United States Patent Application Publication US 2008/0034453 A1 - sequence listing, part 13

SEQ ID NO: 97919 - DNA, 547 bp, Zea mays
tgagtatgccgtgtgtcgtagccctccatcttctcgactgtcggtaccggtccggaattcccgggtcgacccacgcgtccggtctggtctgatggagaggccgtctgtccagaaggtcgctgccctgatgaagcgatctggttgaaacggttgccctgtcaatcggtgaatggaataagccaagtctgttctgggttgtttgcttgttcagtgatgtgtcttctatgacgaaagttgagtgcctatgtgtgagcatgcttgcttgtaacgagacattgaattgttcggaaatgagcattcctgtgctcttcttgaaaataaaaaacataaataaatattataattattttaatttattttatttattctatcatattttatatttatacttaattttttatatatataattaatctcttttaaaaaaaaggggcggcctttttaaaggttccaattttactttctcttgcttgcaactttttagttttttattaggtgcccctatatttaattaactggcctactttttacaacgttgtaactggaa

SEQ ID NO: 97920 - DNA, 544 bp, Zea mays
  unsure (1)..(544): unsure at all n locations
agggtggtgtccttgtctcttacgtacgtccgacnttcgaaccgctccggaattcccgggtcgacccacgcgtccgcggacgcgtgggatttcatgtgattcagtgaacagaatatggattccatgattgctatagtgatccgtgtggattgatgaagagtgagctgataatggaattattcttctataaataggaaacttaagattcaaatgctccggaatggaaatgagggaatgtccacattacccggatttagtcagatccaattcgagggattatgtagattcattaatcaaggcttggcagaagaacttgataagtttcccacaattaaagatccagatcacgaaattgcatttcaattatgtgcgaaaggatatcaattgctagaaccctggataaaagaaaggaatgctgtgtatgaattactcacctattcattcgaattatatgtattcgctagattaaattttggtttccatgtgcaaaaggaaaccatttctaattgaaacatttctataatgaaatccttaagaacctttt

SEQ ID NO: 97921 - DNA, 542 bp, Zea mays
  unsure (1)..(542): unsure at all n locations
cgggggagtcgtgtctccacgcgcttaagtcncgtcgtaccgctccggaattcccgggtcgacccacgcgtccggggaggttcatatatgcatcactgctgcgtcttctcgtactgaagtttgtcctgagcatgtcagcgggcaaggatgtgcttgcccttgcttcacttgaggtggacctctccagcatcgagccagggaccacagtgaccgtgaagtggcgtggaaagccagtcttcatcaggcgtcggacagaggatgacatcaagcttgccaacagtgtggatgtggcatccctgcgccacccagagcaggatgcagagcgtgtgaagaaccctgagtggctggtggtcattggcgtgtgcacgcacctcggctgcattccactacctaattgccgagactttggcggctggttctgcccatgccatggttcccactatgacatttccgggaggatccgcaagggccctgcgccgttcaacctcgaggtccctacctacangttcttggagggagacaaactgctcgtaggcttaaaa

SEQ ID NO: 97922 - DNA, 494 bp, Zea mays
  unsure (1)..(494): unsure at all n locations
gggtagtcgggtatgggtgactagaccgccagcnactcatacgactgacgtaccggtccggaattcccgggtcgacccacgcgtccgctcccacgcccaagccgaccccgccaacgtacaccccttcgccaaagcctccgcacccaagccgaccccgccgacgtacaccccttctcccaagcctccgacgcccaagccgaccccgccgacgtacactccaagccccaagcctcccacacacccgacgcccaagccgaccccaccgacgtacaccccttccccaaagccttcgacgcccaagccgaccccaccgacgtacaccccttccccaaagccttcgacacccaagccgaccccaccgacgtacactcccacaccgaagccgccggccaccaagccgaccacctacactccgacgccgccggtgtctcacaccctcagcccgccgccaccatactactagaaagcgatgcctaccataccacactgtttgt

SEQ ID NO: 97923 - DNA, 496 bp, Zea mays
agtaatgtagtatgagtggggcatgagactcatcgttatcctagcactgacgtaccggtccggaattcccgggtcgacccacgcgtccgccaagatccaggacaaggagggcatcccaccggaccagcagcgcctcatctgtggccggcaggcagctggaggatggccgcaccctggcggactacaacatccagaaggagagcaccctccacctggtgctccgcctcaggggtggcatgcagatttttgtgaagacattgactggcaagaccatcaccttggaggtggagagctctgacaccattgacaatgtgaaggccaagatccaggacaaggagggcattcccccagaccagcagcgtctgatctttgctggcaagcagctggaggatggtcgcaccctcgcggactacaacatccagaaggagagtacccttcaccttgttctccgcctcaggggtggtatgcagatctttgtgaagaccctgtactggaa

SEQ ID NO: 97924 - DNA, 544 bp, Zea mays
  unsure (1)..(544): unsure at all n locations
aggaggttgtngtgtcgctgaagcctaaggcntgtcgtaccggtccggaattcccgggtcgacccacgcgtccggggcacttatgattttatttacttgccaattgattttaagaataaatgtaatgtcggctatgcttggatcaacatgaccaatcctcagcatatcattccgttttatcagagttttaatggtaaaaagtgggagaagtttaacagtgagaaggtggcatcacttgcttatgccagaatccaagggaaaacagccctgattgctcatttccagaactctagtttgatgaatgaggacaaacgctgccgtcccatacttttccactcagatggtcctaatgcaggagatcaggaacctttccccacgggttcaaacatccgagccaggtctgggagatcccggacttcttcgggtgaagaaaatcaccatgacatccagacagtcttgaccaacggtgacacttcttccaatggagctgacaattcaggtcccaccaaagatactgagtagcttgactgcagcttgctgcatt

SEQ ID NO: 97925 - DNA, 553 bp, Zea mays
  unsure (1)..(553): unsure at all n locations
tgggtggatggcagtatcaactgaggcacgtaagctcgtngcgactgcccgtaccggtccggaattcccgggtcgacccacgcgtccgctacgcccgcggcacggggtccggcccctccgcgtcctgctgtagcggcgtcaggaaccggaagagcgccgccagcacggccgccgacaggcgcgccgcctgcaactgcctcaagaacgccgccaggggcgtcagcggcctcaacgccggcaacgccgccagcatcccctccaagtgcggcgtcagcatcccctacaccatcagcaccttcaccgactgctccagggtgaactaaaacctagaccacgcgcgacgacggccgnctgatcgatcgaccaaccattccgncgtcgccgncggccggatcatcgatcgtcgtcatgatgatatctatcaatctacgcgtgatgatcgatggctacttgtctactgctatgtactactaaataaaatctctccgtgtgtgcacgtacgctngcatgtgcatggtagcatgtatgtacgacgtcgtncatgtatgtgtgn

SEQ ID NO: 97926 - DNA, 545 bp, Zea mays
  unsure (1)..(545): unsure at all n locations
tggtgatgtnctgtccctgatnaactgaggcctgtacgactgacgtaccggtccggaattcccgggtcgacccacgcgtccgagctgccattgccatctactgacctgtgacctccgcattcccaaacagcccgagcgagcgagctagcagagcggcggcaggcacctccctcctcaaggaacatggcccgcacgcagcagttggcagtagtggcgaccgccgtggtggccttggtgctgctggcggcggcgacctcggaggcggccatcagctgcgggcaggtggcgtcggccatcgcgccctgcatctcctacgcgcgcggccagggctcggggccctccgccggctgctgcagcggcgtcaggagcctcaacaacgccgnccgcaccaccgccgaccgccgcgccgnctgcaactgcctcaagaacgccgncgccggcgtcagcggccttaacgccggtaacgccgncagcatcccctccaagtgcggcgtcagcatcccctacaccatcagcaccttcaccgactgctccagggtgaactg

SEQ ID NO: 97927 - DNA, 493 bp, Zea mays
gttttggcgtgtatggtgtcatgaaactcatcgacactcctacgaccgccgtaccggtccggaattccaggctcgacccacgcgttcgcccacgcgtacgccattactagtcattggcaacaaaatagacaagcctgaaggtctccctaaacaaaccttcacagaaataatgggcctaaagacgatcactgaccgagaagtggcatgcttcatgacatcatgcatgaactcgaccaacattgattctgtcattgactggctggtgaagaactcgaaaaagaagaattgaacttaaatctgtactagctattaaagcgcacgccaatctctctatttttgcatgtctcatagcattggagctgtaaatcatgcaagaggtattaatcagggatgttgtgttcataattttgttaacctggtttagcagtatgttggtggacagcgtctggtattgagcacgcccgtgctctgaggctgcctcctgtgttccaaa

SEQ ID NO: 97928 - DNA, 493 bp, Zea mays
  unsure (1)..(493): unsure at all n locations
ggattgcacgtntatgtgtgactgagaccgatcgatactcctacgactgcacgtaccggtccggaattcccgggtcgacccacgcgtccgcggacgcgtgggcggacgcgtgggccagaagagcttgcagttactgagagtgtgtgtgagagagaggatgggtggcagcggcagggctgctctgctgctggccctggtggtggtggccgtgagcctggccgtggagatccaggccgacgtcgggtacggttacggcggcgggtacaccccgacgccgacgccggccaccccgaccccgaagcccgagaagccccccaccaaggggccgaagccggacaagccgcccaaggagcacaagccgcccaaggagcacgggcccaagccggagaagccgcccaaggagcacaagccgacgccgtccacgtacaccccgagccccaaacccacgccgccgacgtacactcccaccccgacgccccccaagccgacgccc

SEQ ID NO: 97929 - DNA, 550 bp, Zea mays
  unsure (1)..(550): unsure at all n locations
gggcattatggtgtgatgagnactgcttaggcgcnatcggaccgacttcccggtcgaccgacgcgtccgcgaaggcatctccaatctcctcgcccnccacggacctgaaccgagaacctttaccgccgcggcctctcgcctagccgccggagaagcgccgctcgctcaggaggacagccatggcgccggagccggaggatgatattatgaacgagaagaatccccgcccgctcgacgaggatgacatcgcgctcctcaaaacctatggactggggccgtattcgaccagcattaagaaggtcgagaaggagatcaaggaaatggccaagaaaatcaacgacctctgtgggataaaggagtctgatacagggctggctccacctagccagtgggatttggtttcagataagcagatgatgcangaagaacaaccgttacaagtagcaagatgtacaaagattataagccctaatacggatgatgccaaatatgttataaatgtaaaacanattgcaaaggtagcaagatgttcaaagattataagccctat

SEQ ID NO: 97930 - DNA, 555 bp, Zea mays
  unsure (1)..(555): unsure at all n locations
ggtgcgtnntaggtgatcctgcnccgatgaagtcacaactcgacctgcattcccgggtcgaccgacgcgtccgcccacgcgtccgcactcccgcccctacgccttacaaacccacaccaaaacccactcccacgcctccgacgtgcaccctgacccccaagcctacgacacctaatccgaccccgccgacgtacactccaagccccaaacctccgacgcccaagccgaccccaccgacgtacaccccttcccccaagccttcgacacctaagccgaccccgtctacgtacactccaatccctaagccaccggctaccaagccttccacgcccaagccgaccccgacaacgtacaccccttcgtcaaagcctacgacacccaagccgaccccgtcgacgtacacaccttataccaagcctacgacgcccaatccgaccccgtcaacgtacactccatgccccaagccttccacacaataaacgtccaaactcgactccatcgacgtacaaccctttactcaaagctactaccgctaaggtcgacaccaccaacgtc

SEQ ID NO: 97931 - DNA, 546 bp, Zea mays
  unsure (1)..(546): unsure at all n locations
gtttatgcgntnttnnagtgtagcctgcnactcgctggagcctgccactcatcgcagatccgccgggtcgacccacgcgtgcgcgcaccgccgtcggcccaccgcttcagttggcagttgcgacttgcgagtggctccaacaaggcaacacaatccggcggcaccaacccagcgcggcgccaccggcgacccgtacccccttccccggagagcgatggcgacggagctgacggcggcgcagctgcgcgcgtacgacggcaccgacccgtccaagcccatctacgtctccgtccggggcaaggtctacgacgtcacctccggccgcggcttctacggccccggcggcgcctacgccgtcttcgcgggccgcgaggccagccgcgccctcggcaagatgtccaaggacgaggccgacgtctccggagacctctccgggctcaccgacaaggagctcggcgtcctcgccgactgggagaccaagttccaggccaagtaccccgtcgtggcccgactcgccgccgacgcctgaactcggcagtctgggtn

SEQ ID NO: 97932 - DNA, 550 bp, Zea mays
  unsure (1)..(550): unsure at all n locations
tgagcngtttagcttgtcctgcacttgatggagtgactcatcggaccggcattcccgggtcgacccacgcgtccgcggacgcgtgggccgcgaccgggagagagtcagagagagacgcccgcctccagatcgtccggcggcgatggcggcgtcggtctttccagcgctgctgctggccgtagcggcggtgcttctcctaccggtggcagaggccgtgtggctcgagctcccgccgtctgggaccaagtgcgtctccgaggagatccagcccaacgtcgtagtgctcgccgactacgctatcatgtacgagtcccaccccagctcgcatcccaccgtcgccgtcaaggttacatcaccctatggcaatactgtgcatcataatgaaaatgcttcaacgggccagtttgcattcaccacttcagaagctggaaactaccttgcatgtgtctggatagacagcgtggacaaaggatcaggaacatctctaaatcttgattggaagataaggatcgctgcaaggacttggatactattgcttagaagagagaat

SEQ ID NO: 97933 - DNA, 548 bp, Zea mays
  unsure (1)..(548): unsure at all n locations
agagcntnntaggtgtccaggactcatcgtaggactactggaccggcattcccgggtcgacccacgcgtccgcccacgcgtccgcccacgcgtccgcgatttcattcaagaataaacttaacatgcgttaatgatgaaactggagtggttgacccgaagaagttcagcgttctgggtaactggcagcgtgattactcaatggaatacatcctaacccatctcaagaaagagatgacatcgccacagaaccgcaagctagttcagcctccggaagggacattcttctaaagatggcagcaactcatgtccatccatggtgactcggaaacagctttcgcacctggttcctatantttatatatttagtctgatctcccagttatctgtaaaccaccgagatcgagtgcaagcagacttggttgatttacaatttgcccggtgggtgctaatgatatgggatgaaacggttgccggtttggctgctaaaaaaaaaaaaatattacccattaaaataaaaaggtcgggcgctttagaggatccaagctacc

SEQ ID NO: 97934 - DNA, 552 bp, Zea mays
  unsure (1)..(552): unsure at all n locations
ggtggnntagctagtcctacgactcattctagtnactcatccgactgccgtaccggtctggaattcccgggtcgacccacgcgtccggggaaacttggctatggaaagagtgcaactggaaatagcatccttggaggggaagcatgggtatcagaatattcacattctggtgttactaatacttgtcagctgggaagcactaccctgatggactgccggaccatcaatgttattgatacaccagggttatttgatatgagcattgcatcagacgatgctggtaaagagattgttaaatgtatgaacatggctaaagatgggatacatgcagttctaatggtttttagtggcacatctcggttttctcgagaggatgcaagtacaattgagactattaaggtcttttttggagaaaagattgttgaccacatggttttagtttttacttatggtgatctagttggtgaatctaagttgaagaacatgctcaatgatgcgccagagtatttgcagaatgttgatgagctatgccaaaacagaattgtcgtcttc

SEQ ID NO: 97935 - DNA, 561 bp, Zea mays
  unsure (1)..(561): unsure at all n locations
ggtggcntntttaggttgcgatgatnactcgttctagttncatcgatagtactgctcgtaccggtccggaattcccgggtcgacccacgcgtccggtcaaggccaagatccaggacaaggagggcatgcctccagaccagcagcggctcatttgggccggcaagcagctcgaggacgggcgcacgctggccgactacaacattcagaaggagagcaccctccacttggtgctgcgtctcaggggcggcatgcagatcttcgtgaagactctgaccggcaagactatcacccttgaggtcgagtcttctgataccattgataatgtcaaggccaagatccaggacaaggagggcatccctccggaccagcatcggctcatttttgccggcaagcagctcgaagacgggcgcacgctggccgactacaacattcagaaggagagcaccctccacttggtgctgcgtctcaagggtggcatgcagatcttcgtgaagacacttactggcaagacgatcacccttgaggtggagtcctcagacaccattgacaacggtaaagccc

SEQ ID NO: 97936 - DNA, 539 bp, Zea mays
  unsure (1)..(539): unsure at all n locations
tgtttgcgtatttnattgaacctacnctcatcgagcctgcnactcttgganattcccgggtcgacccacgcgtccgcccacgcgtccgcccacgcgtccgattgtcgacgatcttgtgtccatcgacactctaatggaggaccaccttacgcaagagcccatcaatgagtacgtccagagttgctacattgtggctttcaacaagatctagagttcagtttctgagattgggcaacggcagcggctcatctcgtcaagtttgtgctgggatgccagtttatcccttctagtctattacagaaatgttgttcggagctgagtctattataaacatcttggtctgagtttattgttgagtggtgccagtttttttcaatatacatttatcttaaaaacagcggtactgatgtctttttgtctaaaataacaaagcattaggctaccttaaaagagtaatagatactctcgccatttactctcacttggttgaatttcttaaattaaacagggcgggcgctcttgaaggaccaagttttctg

SEQ ID NO: 97937 - DNA, 534 bp, Zea mays
  unsure (1)..(534): unsure at all n locations
tgatatgcntantttnttagagcctcnactcatggacatcgactacggtccgaaattcccgggtcgacccacgcgtccgctgtattgcaggatgttgcgctaatactgtggtcgatttgcgatgtttgttctgtatcggatgatgtttccttagtaagctgcttgaatagatcatgctcaatgtaccattatttacactggagactagacaaaaacaatcgtttgataaaaaaaaaaaaaaaaaaaaaaaaaaaaaaaaaaaaaaaactaaaaaaaaaaaaaaaaaagggcggccgttctagaggatccaagcttacgtacgcgtgcatgcgacgtcatagctcttctatagtgtcacctaaattcaattcactggccgtcgttttacaacgtcgtgactgggaaaaccctggcgttacccaacttaatcgccttgcagcacatccccctttcgccagctggcgtaatagcgaagaggcccgcaccgatcgcccttccaacagttgcgcaacctgaatggcgaatgggacgccc

SEQ ID NO: 97938 - DNA, 544 bp, Zea mays
  unsure (1)..(544): unsure at all n locations
gtgggntaggtgacctgcactcactgagtgctcactcgaccggcattcccgggtcgacccacgcgtccggaaaggttttcatgatatggcagaggcaataaataacgattgtcaaaaatccttcctttttctttcatttgaaaagtgcataaaaattatattgccaattccattttaattatattcttttttcttaatgttaataaaaaaaagaagaaaattctggttttttctttccaaaattcgatataggctgaaagacaatcagatcttttttctcttcagcgggcagttccatatagaatttgttagaataaaacaagcgggttaaaaaaaaaaactctttttttttatttatccacaaagcaaaaaaggttcttatcaaacccacaataaaatgggaaagaaagataaagtaagtagacctgaccccttgaataatgcctctatctgctattctgatatataaattcgatgtggatgaaattggtgtataagcgcatttttgtattttcttagacttaaatcgcgcaggcaagaattn

SEQ ID NO: 97939 - DNA, 549 bp, Zea mays
  unsure (1)..(549): unsure at all n locations
cgatgcgnnttaggtgatcctgcactgatcgtaaggctcactggaccggcattcccgggtcgacccacgcgtccggcccgggcggcttctgggtgctctccggcccgcccgtcaactacgagaaccgctggcacggctggaacacgaccgcgcaggcgcagaaggccgacctggacaggctcaagaagatgctggccagcatgtgcttcaagctctacagcatgaagggggacatcgccgtgtggcagaagtccgccgacgcctgctacgacaagctcaccccggtcaccacgcccgccaagtgcgacgacagcgtcgaccccgacgccgtctggtacgtgcccatgcgctcctgcgtcacggctcccagccccaagtacaggaagctggggctcaacgccacgcccaagtggccccagaggctcagcgtcgcgccggagcgcatcagcgtcgtnccgggcaacaaaggcggcggctttaagccggacgaccgccggtggaagcttagggccaaacactacaagacgctgttgcggnccttgggaccaa

SEQ ID NO: 97940 - DNA, 552 bp, Zea mays
  unsure (1)..(552): unsure at all n locations
agataaaatatcatccacgacaccgaccctacttctacacgactgccgtactcttccggaattcccgggtctacccactcgtcctcccactcgtccacccactcttccacnaatttgtaaaatacctccttatcgtacgatttcgcaaattcataaacattatcattccaattccatatcaaacatattctctcctctcaacattaataacaaatataacaaaattctcattctatctttccaaaactctatatatcctgaaacacaatcacatcttttttatcttcacccctcatttccatatatacattgttacaatcaaacattctaataacaaaacacaactctatttatttatttatccactactcaaaaaattttcttattaaaccaactataaaatctatactaaatataatactacttataccttaccccttgaatacatcctcattttcatattcttatatataaatcctatctacataaaattattcttataacccatttacttatttacttttacttaaatccatcaactccataactttt

SEQ ID NO: 97941 - DNA, 543 bp, Zea mays
  unsure (1)..(543): unsure at all n locations
gaagtgcggtnntnnngatggaccctagcactcatccgagcctgcnactcatcgcaaaattcccgggtcgacccacgcgtccgcccacgcgtccgggcggcgccggcgtgcttgtgatctcaacccaagtcgtgcctccgctccggtcacccgtcggtccacgcaaccatgtcgaggaggaagaccagggagcccaaggaggagaacgtcacccttggacccactgtccgtgaaggagagtatgtctttggtgtcgctcacatctttgcatccttcaatgacaccttcattcatatcactgatttgtctgggagggaaactctggttcggatcaccggtggcatgaaggtgaaggctgaccgtgatgagtcgtcaccttacgctgctatgcttgctgctcaagacgtcgcacagcgctgcaaggagcttggcattactgcactgcacattaagcttcgtgccaccggaggcaacaagaccaagaccccaggacctggtgcccagtctgccctcaaggcgcttgctcgttccgggatgaaaatn

SEQ ID NO: 97942 - DNA, 538 bp, Zea mays
  unsure (1)..(538): unsure at all n locations
tgttatgcggnnttaacttgagcctgccactcatcgancatgatactcatgcaaaattcccgggtcgacccacgcgtccggtagtcatatggctgctgttgtgaaggctaaacctaaaactgaaccaccgcctgacagagcggaaccaaatagggaagcagttgggccagcacagttgactgttaccttgttatctaatgctgaagaaagtgcagacaatgtggttgtggatatcgaaagaccacataacaggcagattaatgggatcccagcatctaacgcagtgcctaggtcatcagaggatattgaggatggtgaggtcgttggaatcatcacacttgaggatgtatttgaagaactcctacaggaggaaattgtggatgagactgatgaatatgttgatgtccataaaaggatccgagtagctgctgctgctgctgcatcatcggttgcaagggctccatccgttaggagattaacgggccaaaaggctgcaaaccttcagggagcacagaatcgccaaggacagcagccttct

SEQ ID NO: 97943 - DNA, 531 bp, Zea mays
  unsure (1)..(531): unsure at all n locations
gatatgcgtattgacttagagctgcnataactgacatcgataactattggacattcgcgggtcgacccacgcgtccggtagtcatatggctgctgctgtgaatgctttacctaaaactgaaccaccgcctgacagaggggaaccaaataggggagcagttgggccagcacagttgactgttaccttgttatctaatgctgaagaaagtgcagacaatgtggttgtggatatcgaaagaccacataacaggcagattaatgggatcccagcatctaacgcagtgcctaggtcatcagaggatattgaggatggtgaggtcgttggaatcatcacacttgaggatgtatttgaagaactcctacaggaggaaattgtggatgagactgatgaatatgttgatgtccataaaaggatccgagtagctgctgctgctgctgcatcatcggttgcaagggctccatccgttaggagattaacgggccaaaaggctgcaaaccttcaaggagcacagaatcggcaaggacagcatcg

SEQ ID NO: 97944 - DNA, 569 bp, Zea mays
  unsure (1)..(569): unsure at all n locations
agattttnttagtttgtgctacgactcatcttagctcactacgactgacgtaccggtcctgaattcccgggtcgacccacgcgtccgcggacactttcgtccactctttcgcccacttttccagacccactcctccggccacacgttgtgccactcttactgcgactcctgcgtgccgacacttccaaggtgcatcttgccatgtgcatgatcttcaactccaccaacgtcacacaagtgttctctcttatcaacagctaaatctacctcatgtactccaagttcgcattcttgcactggtacttttcctaaggcataagtcttcctgaagttctccgacgcactctaggacttggtaatcctggaaaatgactactattacggtatctcataaatttataagcgattacctttaccatgaactaacgattatgatcttattgccagaatttcttaaacctttttaaatatagttaacccatttataaaatctctgtttaaattccatcgttaaatgcttttatggatttcattcattcaaattttaattaaacttcttctaatattag

SEQ ID NO: 97945 - DNA, 535 bp, Zea mays
  unsure (1)..(535): unsure at all n locations
gtttatgcgntnttnnagttagaacctgcnactcatagtaccatgataccgtttgaaaattcccgggtcgacccacgcgtccgcccacgcgtccggccctagccgccgcccgccgacttcatcggtgccgtcgtctagacctcgtcacgcactggagggggtaaagtccgacatcaatggcgaagcatcatcctgatctcatcatgtgccggaagcagcctggcatcgcgattggccgcctttgcgagaaatgtgatggcaagtgtgttgtctgcgactcgtacgtgcgcccatgtacgcttgtccgggtctgcgacgagtgcaattatgggtcgttccacggaaggtgtgtgatctgtggaagagtccgcatctcagacgcttactactgcaaagagtgcacccagcangagaaggacccggacagttgccccaagatcgtgaatcttggaaagcccaagaccggatctttctatgagcccaggngtatggctttaagaagagatgaccgagagattgagctgtgtgttgttcn

SEQ ID NO: 97946 - DNA, 550 bp, Zea mays
  unsure (1)..(550): unsure at all n locations
cgtgggnttaggttgtccctcnactcatctagtactcatcgactgacgtaccggtccggaattcccgggtcgaccgcacgcgtccgcccacgcgtccggtcggttcacttctccaggtaaggaaagggttcgtactcatggcgccggcgcagccaaagtcgggcctcttcgttggcatcaacaagggtcatgtcgtcaccaagcgcgagctgcctccccgcccgtgccaccgcaaggggaaatcaacgaagagggtgtctatggtcaggggcctgatcagagaggttgctgggtttgctccttatgagaagcgtatcactgagcttctgaaggttggcaaggacaagcgtgccctgaagcttgctaagagaaagcttggaactcacaagagggcaaaggacgaagagagaggagatggcgggcgtgctcangaagatgaggtcggcttgtacgcacactgacaagangaaatagagagcatttaagttcatggagcctgcagagaatatgttcagtgtctgattttcatacatgtagaccttaatagacn

SEQ ID NO: 97947 - DNA, 550 bp, Zea mays
  unsure (1)..(550): unsure at all n locations
gttgggnnttaggtagcccaggactcatgttagtactcatcgactgccgtaccggttcggaattcccgggtcgacgcacgcgtccgagcgtacgcgcctagcgaccagcacagattcgttccacgcctacctcgggccctcgcccgtgctctcagatctcgcgcgcgccccgcaaagggtaactttgagccatgggcacagttgtggatgctccagcagttgtggctgaagaggtcactgaaaacatgttgggtggtaagaaagttacagttgtatttgttctaggtggtcctggaagtggaaaaggcacacagtgtgccaacattgtggaacactttggattcacccatcttagtgctggagatcttttgcgtgcagagattaaatctggctctgagaatggaaccatgattgaaaacatgataaaggagggaaagattgttccatcagaggtgacctataaagctgtgcaggagggcaatgataanaatgaaaatgacaattcctgatcgaacggatttcaaggaatgaagagaattcggcaacattn

SEQ ID NO: 97948 - DNA, 551 bp, Zea mays
  unsure (1)..(551): unsure at all n locations
tgtgcnnnntagcgtgagccagcngctcatcgtgatgaccatcggaccggcattcccgggtcgacccacgcgtccgaacctccaaacacctacctctctacgaactacctgccgccggaaaaccctagagcgctcgagcatggatccgcagcagccggagcctgtcagttacctctgcggagattgcggagctgagaacaccctgaagcccggagatgtcatccagtgccgtgaatgtggctaccgcatcctctacaagaagcggacccgccggattgtccaatatgaagcgcgctgaagagtgaagacaagggaaaacactgaagatggttgatctattactcgccacattacctatgtaaacagtcttctgggggaaatgaaaatgtcagacttaacgtttgtatgtcgtgtgccttctttgaacctgagctgtataatttgtaacgcttgaactggggactgatttgagaactgagacactgcagcaatatgttgatggatcctaagtggcgaatctaatgcatgcgtggtatgccaaaaaaaaaaaa

SEQ ID NO: 97949 - DNA, 556 bp, Zea mays
  unsure (1)..(556): unsure at all n locations
tgatgggtnttagctatgtctagtgactctttctagtnactcatccgactgacgtaccggtccggaattcccgggtcgacccacgcgtccgatcagattctgatgttcattgggcaatgctacaaccttgagacactatgggtacttgacgcggtgcgcgacgaagggctcgacgccgtgggaatttcctgcaagaagctccagtctcttcgtgtgctcccgttgaatgcacatgaggacgccgacgagttggtgtcagaggttagccttactgccatctcacggggctgccctgctctccgttcgatattatacttttgccagaccatgaccaacgctgctgttgtcgacatgtcgcggaactgcccggagctgaaggtattccggttatgtataatgggacggcaccagccggaccatgcgactggngagcctatggatgaaggattcggtgccatcgttcagaactgcagcaagcttaccaggctatccacgtccgggcaacttactgaccgggcatttgagtacattggcaggcatggcaagtccctgcgga

SEQ ID NO: 97950 - DNA, 536 bp, Zea mays
  unsure (1)..(536): unsure at all n locations
ggtttgccnnntttnnnttaaagactacgactcatgcgacatgatactcgtccggaattcccgggtcgacccacgcgtccggggacaaggatcttgccaagaagatttggtgcttcggacctgagaccaccggcccaaacatggttgttgatatgtgcaagggagtgcagtatctcaatgaaatcaaggattctgttgtggctggtttccagtgggcatcgaaggagggtgcactggctgaagagaacatgcgcgggatttgcttcgaggtctgtgatgtcgttcttcatgctgatgctatccacaggggtggtggccaggtcattccaactgccaggagggtcatttatgcttctcagctcacagccaagccaaggctgctggaaccagtttacctggtggagatccaggccccagaaaatgcactgggtggcatatacggtgttctgaaccagaagagaggacatgtattcgaggagatgcaaaggcctggtaccccgctctacaacatcaaggctttccttcctgtcatcgag

SEQ ID NO: 97951 - DNA, 536 bp, Zea mays
  unsure (1)..(536): unsure at all n locations
ggttatgcntnnttgnctagaactagtgactcttggaacttagtactcgtcgcaaagtcgcgggtcgacccacgcgtccgcgaagagaaaagagaagaacctctatccggaagcgaaaaggaccagaagaaaccagaggcgactccaggttcgtgggcgatgctgcgcgcgggaggtaggcagctccttgccccggggctccggcggctcggtctgggcaccggcgccgccggtgaggtgggcccggccgccgcggcggcggtgatgagggcgtaccacgagcgggtggtggaccactacaacaacccgcggaacgtcggttccttcgacaaggaggaccccaacgtcggtactgggctggtcggcgcgccggcctgcggcgacgtcatgaagttgcagatccgcgtcgacgaggactccggtaaaatcgtcgacgcctgcttcaagacctttggctgcggctccgccatagcgtcctcgtccgtcgctactgaatgggtgaagggaaaaccaatggatgaagtcttgacaatcan

SEQ ID NO: 97952 - DNA, 531 bp, Zea mays
gaccgctgagaccgatcggcctggcactcatagtactgtcgtaccggtgttgaattcctggctcgaccgacgcgttcgaggactgcacatggttgctggcaattcgctcgagttcagatcgagcgcgggccatgcacggggttccgccggccgcgaagagcgcaatcatgcacgacaagatggtgaagctcgccttcggaagcgtgagcgactccttcagctccacctccatcaaggcctacgtggccgagttcatcgccaccctcctgttcgtcttcgccggcgttggttccgccatcgcctacgggcaactgacgaatggcggcgcgctggacccggtgggcctggtggcgatcgcgatcgcgcacgcgctggcgctgttcgtgggcgtgtccgtcgcggcgaacatctcgggcggccacctgaacccggccgtgacgttcgggctggccgtgggcggccacatcaccatcctgacgggcgtcttctactgggtggcccagctgctgggcgccaccgtggcgtgcctgc

SEQ ID NO: 97953 - DNA, 548 bp, Zea mays
  unsure (1)..(548): unsure at all n locations
tgaatgcnnnnttnnnataggaactagttgctttatgtactagtcctcatgnagtgacgtaccggtccggaattcccgggtcgacccacgcgtccgcccacgcgtccggcagcagccaattcgctcgagttcagatcgagcgcgcgccaagcaagtggtccggccggccgcgaagagcgcaatcaagcaagacaagatggtgaagctcgccttcggaagcgtcggcgactccttcagcgccacctccatcaaggcctacgtggccgagttcatcgccaccctcctcttcgtcttcgccggcgtcggttccgccatcgcctacgggcaactgacgaatggcggcgcgctggacccggtgggcctggtggcgatcgcgatcgcgcacgcgctggcgctgttcgtgggcgtgtccgtcgcggcgaacatctcgggcggccacctgaacccggccgtgacgtttcggctggccgtgtgcggncacatcaccatcctgacgggcgtcttctactgggtgggccagctgcttggcgccaccgtggcgtgcctgn

SEQ ID NO: 97954 - DNA, 547 bp, Zea mays
  unsure (1)..(547): unsure at all n locations
tggtatgcannttanaatgaagctgaggacaattgaagctagtnactcctagnactgccgtaccggtccggaattcccgggtcgacccacgcgtccgcttgctgaagctgaactgctgatccgtcttccaagctgtggtgtcggcccctgagttctgatccaagatgtatctccagtattacatcaatgagaagggggacaaggtctacaccaccaagaaggagtcacctcttggggtgccgacgcagtctgctcacccagctcgcttctcaccagatgacaagtactctcgccagcggtacctgttgaagaagagatttggacttctgccaacgcagaagccagcactgaagtactgaagcttcaactttccaaccatggatgtgcagtttgtgtcactgcttgatgcttgttggttggaatgtagaataggtatctgaggaaacatatcaaacactgctaggcactactatgacatctcagcgcattcaggcactatatgtaatgctatgtgtttgacaggtctaaaaaanaaaaaaaaagggcg

SEQ ID NO: 97955 - DNA, 523 bp, Zea mays
  unsure (1)..(523): unsure at all n locations
gtggctgaggacgatagtaggnctaggggnacttagtactgactgtaccggtcttgaattcccgggtcgacccacgcgtccgcttgctgaagctgaactgctgatccgtctttcaagctgtggtgtcatgccctgagttctagtccaagatgtatctccagtattacatcaatgagaagggggacaaggtctacaccaccaagaaggagtcacctcttggggtgccgacgcagtctgctcacccagctcgcttctcaccagatgacaagtactctcgccagcggtacctgttgaagaagagatttggacttctgccaacgcagaagccagcactgaagtactgaagcttcaactttccaaccatggatgtgcagtttgtgtcactgcttgatgcttgttggttggaatgtagaataggtatctgaggaaacatatcaaacactgctaggcactactatgacatctcagcgcattcatgcactatatgtaatgctatgtgtttgacaggtctaaaaaaaaaaat

SEQ ID NO: 97956 - DNA, 559 bp, Zea mays
  unsure (1)..(559): unsure at all n locations
ggttatgccggnattntatttgaaggttgggaccctacgnntcatgctgccctacngtagctgtcgnctgccgcgtctgaattcccgggtcgacgcacgcgtccgacgcgtcctacgagctttcgcacgcaagtgtcaagagaccaaacgggggacatggctcgggcgcaatctgccgtagcggtcgccgtggtggccgcggtgctgctgctggcagcggcggccacgacctcagaggccgtcatcacctgcgggcaggtgagctccgacatcgcgccctgcctctcctacgcccgcagcacggggtccggaccctccgcgtcctgctgtagcggcgtcaggaacctcaagagcgccgccagcaccgccgacgacaggcgcgccgactgcaactgcctcaagaacgccgacaggggcgtcagcggcctcaacgccggcaacgccgtcagcatcccctccaagtgcggcgtcagcatcccctacaccatcagcaccttcaccgactgctccaaggtgaactaaaacctataccacgcgcgacgacggacgcctgatcgan

SEQ ID NO: 97957 - DNA, 531 bp, Zea mays
  unsure (1)..(531): unsure at all n locations
gccgatgagaccccttgntccagtactcatccgacctgctctaccggtccggaattcccgggtcgacccacgcgtccgccgagtcctacgagcagtcgcacgcaagtgtcaagagacgaaacggtcgacatggctcgcgggcaatctgccgtagcggtcgccgtggtggccgcggtgctgctgctggcagcggcggcgacgacctcggaggccgccatcacctgcgggcaggtgagctccgccatcgcgccctgcctctcctacgcccgcggcacggggtccggcccctccgcgtcctgctgtagcggcgtcaggaacctcaagagcgccgccagcaccgccgccgacaggcgcgccgtctgcaactgcctcaagaacgccgccaggggcgtcagcggcctcaacgccggcaacgccgccagcatcccctccaagtgcggcgtcagcatcccctacaccatcagcacctncaccgactgctccagggtgaactaaaacctagaccacgcgcgacgacggccgcctgatcgn

SEQ ID NO: 97958 - DNA, 515 bp, Zea mays
  unsure (1)..(515): unsure at all n locations
gctcgattctcttgaatccttatttcangtatttctcttctcgattcactcatccgccggatggaatcatgttgcgctcatactgttttccatttgcgatgtatgttctgtatcgggggatgtttccttagtaagcttcttaaatagatcatgctcaatgtaccattatttacactggagactatacaaaaacaatcgtttgataaaaaaaaaattattaaaattaaaaaaaaatatattaaaaataaaatataaaaataaaaaggtctgcctttttaaaggatccaaacttacttacgcttgcattcgacttcatatctcttatatagtgtcacctaaattcaattaactgtctctttttttacaacgtattaactggaaaaaccctgtccttacccaacttaatagctttgcatcacattcccctttttccaatttgcttaataactaaatatgcccttaccaatttgctttttccaacattttcccactctaaatttcaattgaaccccccc

SEQ ID NO: 97959 - DNA, 526 bp, Zea mays
  unsure (1)..(526): unsure at all n locations
gggtctgatacaactgagctacnttctcagtacctgacgtaccggtccggaattcccgggctcggggacctgtccaaggggatcacctactcgctccacaggaacatcgggatcacagtcttggctctcggcactcgtcagatcttcgcgctcttcctgaggccgaagaaggaccacaagtaccgggtgtactggaacgcctaccaccactcggtcggctacgccatcatcgtgctgggcgtcgtcaacatcttcaagggcatggccatcctcgacgtggagcagaggtggaagacgggctacatcgccgccatctccgtcctcggcgccgtcgccgtggccctggaggccgtcacgtggggcgtcgttctgaggcggaggaaggaggaaagcaagagctacaacggcacctcaaacggcggccgctctagaggatccaagcttacgtacgcgtgcatgcgacgtcatagctcttctatagtgtcacctaaattcaattcactggccgtcgttttacaacgtcgtg

SEQ ID NO: 97960 - DNA, 547 bp, Zea mays
  unsure (1)..(547): unsure at all n locations
cgaaatccgggnnttaanggtcgaagctgcnactcatcgaaaatgacgacagtngcagaatcgccgggtcgacccacgcgtccgagcgaacaggcaaaaaggagaggccgagaagcgctttagcgataagagtggtgcacccgtggcggcacggcatgggggccacggcgtactccgtggcgctcctcggcggcgcacgcctgccggccgacctcctccctcggcgcagcagcgtgtgccaccaccagcttcgcctacaagacgcaccgaggctctacctgcaccgtgccagggccgcttccgaggacacgtcggcctacggcggcgacgagctcatcgaagacctcaaggcaaagtgggacgccgctgaggacaagcccaccgtcctcctgtacggcggcggcgccgtcgtggcgctatggttgacgtccgttgttgtcggcgccatcaacgccgtgccgctgctccccaagatcctggagctcgttggcctcggctacaccggctggttcgtgtaccgctacctcctcttcaaggaaagcaggan

SEQ ID NO: 97961 - DNA, 548 bp, Zea mays
  unsure (1)..(548): unsure at all n locations
gtttgccgtattaagttgaagcctccactcatcgncctgccactcatagnagcaaccgcaccgtcgacccactcgtcctcgaacgcctcgtacaaaaaaacacccagttctgagtcggaagtttgactcccgcacaacggggcaacacaaaacgggtacaacatcacatccctccgacatcatcctgaagaccgcactcatcacaccagcaccttgtagcattaccgcatcaaccgacaccatcaccaccttaacctacaaactcaccgctacactcaatgcacctccccaacttacatatccatgacacctacttctcttgcctacattagctcattgcacacactcaggcaaccttggacacctgatacgacaatcagtacgacctgctctacactgaatgcggccctacggatcttcaacgaccaccgttgacgcacccgacaccaaccgatgtccggtgctctccacgatccttgaaccctacctacggatgtacccattcagggtttggtagcccttatagcctaacaaataactcttgccta

SEQ ID NO: 97962 - DNA, 526 bp, Zea mays
gacgctaggaccaatcgcgaattttaacttagtactgacgtaccggtccggaattcccgggtcgacccacgcgtccggttacttcaagatggaaatgggcaagaacatgtgcggtgttgctacgggtgcatcctaccgtattgtcgcatgaggcccttacgaaatgttacatggtctgtttggcatcaataatgcatgtttaacctgagcttggcgatgggttatacagaacggaaactctgtttgtgaatagaaaatcatgaagggaaggagttgaccggacccctacttgtacgtctccccggctgtgtaggtagattgtcagttggggttccgaagtactctactcatacgtgtgtatgacagtttatttatgaaacaaaatacgcattgatcgttaaaaaaaaaaaaaaaaagggcggccgctctagaggatccaagcttacgtacgcgtgcatgcgacgtcatagctcttctatagtgtcacctaaattcaattcactggccgtcgttttacaacgtcgtg

SEQ ID NO: 97963 - DNA, 549 bp, Zea mays
  unsure (1)..(549): unsure at all n locations
ggttgctatantnanaatgttgctgagtacaattgagcctgncactcatagtactgtcgtaccggtccggaattcccgggtcgacccacgcgtccggtcggcggccagcggcgagaggaggaggggtgggtcagccatgacggggaaggcgaagcgtaagaagcacacggctaaggacatcgccgcgaagatcgactcggcgacgacgaaccggggcggccgcaaggccgggctggcggaccggctggcgcaggacaagggcaggcatgcgaagctggcgtgcccgctctgccgtaccccggcgcccgacatcaagtccatgcagatccaccactaggcgcgccatcccaagctcccattcgagccggagaagctactcaacctgcactcctccgcccccgctgctgctgttgccgacgacgccgccttcgcctccgctgccgaggccaccacctactagcccaagccctgcgtccggggcagcctcaagaagtaagcttgctggcttggatggctagcccgcctgcatggggcacaattgccttcggt

SEQ ID NO: 97964 - DNA, 521 bp, Zea mays
  unsure (1)..(521): unsure at all n locations
gacactgatnacgtttgaacctacnactcatcggacctgacgtaccggtccggaattcccgggtcgacccacgcgtccgcccacgcgtccgcccacgcgtccgcccacgcgtccgctcctcccaggcgcatccaagggggtccttctcgaccgtgcggaacgagccagagaacaggtatggcggcggcgcggcacctcagatccggcctccccctcctccgcgcccacctcgcatcctccgaatccgcggccgtcgctcaggtttcgaggggcttcgcgtcgcaggccgctaagcccaccgggaaggagatcaaggttccaaaggctctgtttggcggcacaggcaactatgccagtgcactgttcctcacagcagctaaatctaatgcattggacaaagttgaatctgagattaaagctattgtagaggcttccaagaagagcccgttgttttctcaattcataaaggactngtcagttccaaaagcgaccagngtgaaggctatagccgaaatatttgc

SEQ ID NO: 97965 - DNA, 542 bp, Zea mays
  unsure (1)..(542): unsure at all n locations
tgtagcggttttnagaggagcctgcactcatcgctcatgtcctcatagcagaaccgccgggtcgacccacgcgtccgcggacgcgtgggccgctgcctccgcgtttcgctttccccccgtcttcccaagcctttgctgggctcttcgctggggattccctctgctcatggccgggagagggaaggcgatcggctcaggggccgccaagaaggccatgtccaggagctccaaggccgggctccagttccccgtgggaaggatcgccaggttcctcaaggccggcaagtacgccgagagggtcggcgccggcgcccccgtctacctcgctgccgtgctcgagtatcttgctgctgaggttctcgagcttgccgggaacgcggctcgtgacaacaagaagacccgcatcgtcccgcgccacatccagctcgccgtccgcaacgacgaggagctctcccgcttgctgggcacggtgaccatcgccagcggcggtgtcatgcccaacatccataacctgctgctgcccaagaagtctggcggcggca

SEQ ID NO: 97966 - DNA, 521 bp, Zea mays
  unsure (1)..(521): unsure at all n locations
tgccatgagaccggtcngaacccagcncttcatcggactgccgtaccggtccggaattcccgggtcgacccacgcgtccgcggacgcgtgggcggacgcgtgggtcctcctgctcggactcctcgggcgggaggccgctggcggcgggtggcagagcgcgcacgccacgttctacggcggcggggacgcgtccggcacaatgggcggcgcttgcgggtacggcaacctgtacagcacggggtacggcacgagcacggcggcgctgagcacggcgctgttcaacgacggcgcggcgtgcgggtcctgctacgagctgcggtgcgacaacgacgggcggtggtgcctgccgggcaccatcaccgtcacggccaccaacttctgcccgcccaactacggcctccccagcgacgactgcggctggtgcaacccgccgcgcccgcacttcgacatggccgagccggccttcctccgcatcgcgcagtaccgcgccggcatcgtgcccgtcgcgttcaggagagtgc

SEQ ID NO: 97967 - DNA, 523 bp, Zea mays
gcgatgaaactgtgaccagcaccctacgactgacgtaccggtccggaattcccgggtcgacccacgcgtccgcgaagcttgagcagagggagccaaaatggtgaaggacacgcggtactgcgacgtgctgggcgtggacccgtccgccaccgagtccgagatcaagaaggcgtactacgtcaaggcgaggctggtccaccccgataagaacccgaatgatccgcaggccgcggagaagttccaggaactaggagaagcataccaagttctcagtgaccctacacagcgccaagcttatgactcacatgggaaagacggcatctcaacggaggggattatagatcctgcaacaatttttgcaattctgtttggtagtgagctttttgaggaatatattggtcaactggcaatggcatcaatggcttcacttgataattttggtgaagatgagcagattgatgcaagaaagctgcaagagagaatgcacgctgttcaaaaggatcgggaagaaagacttgcaaag

SEQ ID NO: 97968 - DNA, 522 bp, Zea mays
  unsure (1)..(522): unsure at all n locations
gaaccctgatagcaatcngacctgcnactcatcggacctgacgtaccggtccggaattcccgggtcgacccacgcgtccgaagaaggcacgggagatcggcgtgctctgcgacgccgaggtcggcggggtcatcttctggggcggcggcaagctctatgactactgctcgcccaggacctcgctgtccaggatcttggagaagtaccagaccaactccgggaagattctgtggggtgagaagcacaagaacctgagtgcagagatcgacagagtcaagaaggagaacgacaacatgcagattcagctcaagcatctgaaaggcgaggacctgaactccctgcagcccagggagctgatcgctattgaagagggcctgcagaatgggcagaccaacatgcgcgagaagcagatggactactggaggatgcacacgacgaatgggaagatgctggaggacgaacataagatactgacttttangatgcaccaacaggctgttgatctgagctgctgcatgaggg

SEQ ID NO: 97969 - DNA, 550 bp, Zea mays
  unsure (1)..(550): unsure at all n locations
tgtacagccggnattttaggtgaacgctgcnaacaattcgagctgcgtaccgctngcaaaatccccgggtcgacccacgcgtccgcaaggccaacatcgacggcctggtgttcgccgtgaagaagatgaagtgggacgcctgcgaggagctcaagatccggcaaaaggttaaccacagcaacctggtgaagctggaggggttctgcatcgactcggcgacgggcgactgctacctggtgtacgaatacgtggagaacggatcgcttgacctgtggctgctggaccgcgaccacgcgcggcgcctgaactggcgcgcgcgccttcacatcgcgctggacctcgcccacggcctgcagtacatccacgagcacacctggccgcgcgtggtgcacaaggacatgaagagcagcaacgttctcctggacgcccgcatgcgcgccaagatcgccaacttcggcctcgccaagacgggccacaacgccatcaccacgcacatcgtgggcacccaggggtacatcgcccccgagtacctcgccgacggcctcgtcan

SEQ ID NO: 97970 - DNA, 555 bp, Zea mays
  unsure (1)..(555): unsure at all n locations
aggatgccgtagttggagtgtcgctatnagctgatcggccagtcnacaatagtactgtcgtaccggctttgaattcccggctcgaccgacgcgtccgcaagaaccgaccggctcatacccttctgccttcgatgcgctcatggccggaactgaccgggggcagcactacaagccgagacttaaaacaaacaacagagctcaaaccaagccatcgctctcaatacataaacataagacaacatcatactattcccgtcctatcgattaggcattataaatcggagtaatgaacaatactcacacccgggagccttcatataaaatagtgacatatcaaattctaatagttagaaacgactatcacatggtaaagcctgatcaaaggaaattatgattcatctacccaaaggaagcctgagaaactgcaaccagatccaagtaaagcaacacgcgcacaaaataccaaactcttacacaaagagaaattaactctaagacacctatacctagcgcgaaaacgtctggacaatgaaaacacttcagattaaaaacctg

SEQ ID NO: 97971 - DNA, 544 bp, Zea mays
  unsure (1)..(544): unsure at all n locations
aggattgcctaantannctaggtccctgaaaacgatcgaagcctgcnactcataggactgccgtaccggtccggaattcccgggtcgacccacgcgtccgcccactcgtccgttcgcttctgtcaccgtgttagtgtccgttctagctttggattaggtgggggtacccctgttgttccctttggttgctcccgctatgaaacgagacgagagaagaatgagcaaggtttttgttcgcaaaaaaaaagacaagacgataaaaaagacaaaaaaaaagcactaccacaaacatgacctgagcccactactcgacgccgatgaccgtggcactgttcgatcacgaggatgccgacggctgaccctcgtcatcttggacgcgtcggccaaaagggcgtcctgaatatagccatccttcttgatcaacactgcgatgcatatctagacgtttgatttaagaaccttgaatgcagctacggcgtaccttattcaccgaagctcttgaaagcgactggataaccaatggattaatttttgacaattaaca

SEQ ID NO: 97972 - DNA, 539 bp, Zea mays
  unsure (1)..(539): unsure at all n locations
ggtatgctnnttntacttgaacatgagaccnattgaagcctgcnactcatcggactgacgtaccggtccggaattcccgggtcgacccacgcgtccgcggacgcgtgggcggcgccaccgcgctgcgcgtcgcgatggccgagggccacgcggacgcggccaggttcctgatcttgaacggggccagcgtggacaaggcgagcctcgacgacgacgacggctcaggttcaggctccggctctggcgccgcgcggctagcaatgtcgcccaccgagctgcgcgagctgctgcagaagcgggagctcggccactcgataacgatccacgactcgccagcggtggtcccgaacggcggctcgtcggggcacagccgtccaggcagattacagagcacaagttcggacagccagcgctggcctcgggtgagcgtatacaagggccaccctttcctcagaaaccgcacctctgaagctggcaagctgatcaacctaccaggcaccatggaagaattcaaagtcatcgtcggtgagaaactgaan

SEQ ID NO: 97973 - DNA, 558 bp, Zea mays
  unsure (1)..(558): unsure at all n locations
ganagatcanantttaaacgtagcggactgatacctgttcggtcagctcctcatagcaggaccgcagggtcgacccacgcgtccgcggacgcgtcggcggacgcgtgggctagctcttcagaacttgcggacgaaagactgaccgggcaccgctagcggatcgatcgaccatggcgtcgtcctctcttctcctcctcgccgccgtcgccctcttcgccgcctccgcagacgcggccaccttcaacgtcatcaaccgctgcaagaacacgctgtggccggccgccctccccggcggctgcgcgcgcctggacccgggcaagacgtggaccgtgcatgtgccgacgggcacggtgcacgcgctggtgtgggcgcgcacggggtgcagcttcgacggcagcatgcgctctagaggatccaagcttacgtacgcgtgcatgcgacgtcatagctctactatagtgtcacctaaattcaattcactggccgtcggtttacaacgtcgtgactgggaacaccctgccgttacccaacttaatcgccttgcagcacatncccctt

SEQ ID NO: 97974 - DNA, 557 bp, Zea mays
  unsure (1)..(557): unsure at all n locations
gatatgcggtcttaaagtgaagcctcnactcatcggcctgncctcgtagtactgacgtaccggtcttgaattcccgggtcgacccacgcgtccgcccacgcgtccgaccactcgtccggttcggagccgacggcccgtccgggtccctctccgcgggccgtccccaaggccaatagttttcaagtggcaatggcggaccaggctaaccaacccactgtccttcataagctcggtggccagttccacctgcgctcgatcatctctgaaggtgtacgggcccgtaacatatgcccatctgtctcatcttatgaaaggagatttgccacaaggaactacatgacccagagcctttggggcccttcaatgtctgttagcggtggcatcaatgtcccagtgatgcagaccccgctctgtgctaatgctcctgctgagaaaggaagcaagaacttcatgattgatttcatgatgggcggtgtttcagctgctgtttcaaagactgctgctgctcccatcgagcgtgtgaagctgcttattcagaaccaagatgagatgattan

SEQ ID NO: 97975 - DNA, 539 bp, Zea mays
  unsure (1)..(539): unsure at all n locations
gtaagactagtcccctcagctaccnacaatagtactgtcgtaccggtcttgaattcccgggtcgacccacgcgtccgcccacgcgtccgtccactcgtccggttcggtaaccaccgacccgtccggctacctctccgggtgccgtccccaatgccaatagttctcaagtgtcaatgtcggaccaggctaaccaacccactgttcttcataagctcggaggccagttccacctgcactcgatcatctctgaaggtgtacgggcccgtaacatatgcccatctgtctcatcttatgaaaggagatttgccacaaggaactacatgacccagatcctttgcggcccttcaatgtctcttaccggtggcatcaatgtcccagtgatgcacaccccactctgtgctaatgctcctgctgagaacggacgcaagaacttcatgattgatttcatgatgggcggtgtttcagctgctgtttcaaagactgctgctgctaccatctagcgtgtcaagctgcttattcacaaccaagatgagatgttg

SEQ ID NO: 97976 - DNA, 531 bp, Zea mays
  unsure (1)..(531): unsure at all n locations
agggacggggnctgatactnccggagctggacaactcctggaannccngggncgannnaggcgtgcgtccacgcgtncgcccacgcgtccgatgtggttgaggtctntagcgatggtcctgttcatggctggcgccgcgctgctcgccggggctgccggcgccngcgcgcatcatggcgtgtggagcatcatcacccggcccatgttccagagcatgctgagccaccgcggcgacagcgggtgccagggcgccttctacacctacgacgccttcatcgaggccgccagcaagttccccggcttcggcaccaccggcgacgagcagacgcgcatgcgggagctcgccgccttcttcggccagacgtcccacgaaaccaccggtggatgggcgactgctccggatggacccgttgcctggggatactgcccggtgaaggaacaaaaacaaacggacccaccctactatggacgaggacccatacagctaactcataagttcaactacaggcctcgcgggcaagcgcttgacct

SEQ ID NO: 97977 - DNA, 532 bp, Zea mays
  unsure (1)..(532): unsure at all n locations
gggacggggatgataatgtaatntgggtgcagtnncnannntcaannccggggccgacccacgcgtccgcggacgcgtgggcggacgcgtgttctccatcttacaccccttcgccaaagcctgcgacacgcaagccgaccccgccgacgtacaccccttctcccaagcctccgacgcccaagccgaccccgccgacgtacactccaagccccaagccttccacacacccgacgcccaagccgaccccaccgacgtacaccccttccccaaagcctccgacgcccaagccgaccccaccgacgtacaccccttccccaaagcctccgacacccaagccgaccccaccgacgtacactcccacaccgaagccgccggccaccaaagccgccacctacacttcgacgccgtcggtgttttacacccccagcccggccgcaccatactactagaaagcgatgcctaccataccacactgctgtcagtctctggagccattangtggtcctgatcaatggaaagggttgtgtcctac

SEQ ID NO: 97978 - DNA, 586 bp, Zea mays
  unsure (1)..(586): unsure at all n locations
ngaagcgtgtccctcctcgcattcttcgctgtcgcctgccaccggnctcggaatacccgggctcggacccacgtcgtctcgtcccatcgcgtctctgcccacgtctgtccgtgttacaatgtgtaggtgcatcaccgtccgggaccaagcatgcggcgtgagtttttgtccggtcaagcagcatcgaggaccggtgcgcacgtctggtccgactaccaacatttcagtaaggatgagcaccgctccacgttggtgcctgcgtctcaggggtcggcatggcagatcttcgtgaagacacattactggcacagacgatcaccgcttgagggtggagtccctccgacacacattgacatacgtcaaaggccatagatccaaggacaatggaggtgcattgcacacggaccacgcagcaggctgatcnttcgccggcaaagcatctggaggatggtcgcaccttggctgactacaacattcataatgagagcaccctccacctggtgctccgcctcaagggtggtatgcaaatttttgtgaagacattgactggcaagaccatcaccttggatgtggaggtcgctgacac

SEQ ID NO: 97979 - DNA, 597 bp, Zea mays
  unsure (1)..(597): unsure at all n locations
nnaagatgggtcccctctcgtaccttccgctgagctgccacacggnccggaattacccgggctcggacccacgtccgtccgtcttcatctttatccgagagttcctgtgcagtcagtgtgaaaagaagccacgattttagcacgagcgagcgaggggtctggatgaagtcctctcccaagtcttcgatatcgtctatgtcagcccagtcaaaggtgtatcgccgacacggtcggtcgcaacacctctccgagactgtcattcgatcttctgcaagggtgaaccaagatccgatttcgaggagagtcaacgggtggatcttgttcaaagtctcaagcaccctcacaacccgaattcaaaaataatataaccccatgggacaaggtgacccgcaatttgttgatggaaagattcaaaactatttgaaaagtcatgccgatttttgaggtatctttgcattcgttgttccctcggagtaagctgacccactggtattccttcttgactttgttcaccacaaagccaaaattgagtgcaatcttggaattggcatcactcaaatttgcggcgtggtgcaacaacccttgtaatgcacactg

SEQ ID NO: 97980 - DNA, 525 bp, Zea mays
  unsure (1)..(525): unsure at all n locations
ttagctggtcccccccccatctcccctcgagctgccccggnccggaatacccgggccgacccacgcgtccgcggacgcgtgggcggactcgtgggctccatcttacaccccttcgccaaagcctccgacaccgaagcctaccccgccgacgtacaccccttcttccaagcctccgacgcccaagccgaccccgccgacgtacactccaagccccaagccttccacacacccgacgcccaagccgaccccaccgacgtacacccctttcccaaaaggctcgacgcccaagccgaccccaccgacgtacacccctttcccaaagccttcgacacccaagccgaccccaccgacgtacacttccacaccgaagccggcggtcaccaaagncgccacctacacttcgaacgccncggtgttttacacccccagcccggcgtcaccatactactagaaagcgatgcctaacataccacacttgtgtcagtctctggagcatttatgtggtctggatcactggaagggtgg

SEQ ID NO: 97981 - DNA, 527 bp, Zea mays
tggcagacggaaaaaagaaaaagagagtagtcttctctccgaactggagggccgacccacgcgtccgcccacgcgtccggagaaatctgccaaaggcttaagcctccttaactgctgctagaacagcagcaagtgccatttatgttccacctgctcagcaaggcactattgatctccagagtggaatcctccatgctgaagaaaaagattacaagactgcttacagctacttctttgaagcatttgaagctttcagtgcactggaagacccgaaagccatctttagcctgaagtacatgctcttgtgtaagataatggttaaccaagctgacgatgttgcaggaataatctcgtctaaggctggcctaaaatatctgggtcctgatgttgatgctatgaaagctgttgctgatgcatactctaaaaaatctctcaagtattttgaaactgcccttcgtgattataaagtccagctggaggaggaccctattgtccacaggcatctttcttcttgtatgatacactgc

SEQ ID NO: 97982 - DNA, 536 bp, Zea mays
  unsure (1)..(536): unsure at all n locations
nggggcaactggtcccctgctactcgtttcgtattnnctcctnctggntcggaattcccgggcgacaggtgaagccgccgccgctgcagtgtccatatccacctctttatgactgagatggggggttttgtcaagaccggcaagagcaatgcgtacttcaagcgtttccaggtgaagttcaagagaaggcgcgctggcaagacagactacagggccaggataaggctgattaaccaagacaaaaacaagttcaatacacccaaatacagatttgttgtgcgatttaccaacaaggacatcacagcacaaatcatctctgctagtatagcaggtgatatggttcttgcttctgcttactcgcatgagttgccacgatatggtcttgaagttggtctgaccaactatgcagctgcctactgcactggccttctgttggctcgccgtgtgctcaagacccgtggtttagattaggaatatgagggcaatgttgaggccactggtgaggatttctcttgtgagccagctgatgagaggag

SEQ ID NO: 97983 - DNA, 417 bp, Zea mays
  unsure (1)..(417): unsure at all n locations
ntaagtgtcccccgacgcgtgcgctgcccggccgaatccgggccgacccacgcgtcgccacgctcgccacgcgtcgccactctccccaaggaggtgcgacagaggaacgaaacctccgcgacgaagccgcggagtcagactgacctaccggccacttgcggctaagggcttaaggacctgctccgggatgcgccggctctcggatgcatacctggctctgggttccgtcatcttacgacacgctggatgggcgggagattacacggaccccaggggcaacgccaatctggcgtaacgaaggtcgagtcggcgttcgctgtactaactggtattctaggtcagctgtcctgacgacccatggccgaagtcggccgaggggtgtggggacagcacttatggttgcgtgcatgcggcacc

SEQ ID NO: 97984 - DNA, 524 bp, Zea mays
  unsure (1)..(524): unsure at all n locations
ngggaactgttttttcttattcggtncgtacgnncgcaccggnctggaattcccgggccgacccacgcgtccgaaaagtgcataaaaattatattgccaattccattttaattatattcttttttctgaatgggaataaaaaaaagaagaaaattctggttttttctttccaaaattcgatataggctgaaagacaatcagatcttttttctcttcagcgggcagttccatatagaatttgttagaataaaacaagcgggttaaaaaaaaaaaaaaagggcggccgctctagaggatccaagcttacgtacgcgtgcatgcgacgtcatagctcttctatagtgtcacctaaattcaattcactggccgtcgttttacaacgtcgtgactgggaaaaccctggcgttacccaacttaatcgccttgcagcacatccccctttcgccagctggcgtaatagcgaataggcccgcaccgatcgcccttcccaacaagtgcgcagcctgaattgcgaatgggacgcc

SEQ ID NO: 97985 - DNA, 511 bp, Zea mays
  unsure (1)..(511): unsure at all n locations
nggggaagatgttccccctccgcacnccccgcccgtctgccaccggactggaattcccgggccgacccacgcgtccgctagttctaggcggccgcccgcgttctaattcgtttcccttaagattacctgaggccacggcgagttctatcgggtaaagccaatgattagaggcatcgggggcgcaacgccctcaacctatcctaaaactttaaataggtaggacggcccgcttctttcgggaacccgtccaacgaattcggaacctcaaaggggccatttttgggtaaccaaacctggcaatccggtttaacccgaaaccggttttaggtgccaaaactgcgctttaccttatacccaacagggggtgtgggactataaaaacacgacagcggtgatatgagaagaaaaccccattagtgaggtaaacaccacagcgcataataactccccaaaatatgtgggctctaaccgccaacacaccgcccttggagagaacaccccccattgtagg

SEQ ID NO: 97986 - DNA, 520 bp, Zea mays
  unsure (1)..(520): unsure at all n locations
nnttatggttcnccgcntacttgccntgcgcttccaccggnctggaattcccgggccgacccacgcgtccgcccacgcgtccgcgcccctcctcctctccttcatccgtacccaatctaatctacacccgggcgagatgggccgcaagttcttcgttggtggcaactggaaatgcaatggaaccgcagatcaggttgagaagattgtcaaaaccctgaatgaaggaaatgttccctcttcagatgttgttgaggtcgttgtcagtcctccttatgtgttcctcccggtggtcaagagccagctgcgccaagagttccaagttgctgctcagaactgctgggtgaagaagggaggtgcattcactggtgaaattagtgctgaaatgctcgtcaaccttggcgttccctgtgtcattcttggacactctgaaaggagagctctgctgggagaatcaaatgangttgttggagacaaggttgcttttgctctgtctcaaggactaaaggtcattgcatgtgtn

SEQ ID NO: 97987 - DNA, 531 bp, Zea mays
  unsure (1)..(531): unsure at all n locations
ngggacagtgggttncctggccacgtggcgccgagctccaccggnctggaatacccgggtcgacccacgcgtccggccacgcgctcaactccacgggccttgagtctagggttttcttcgccgctacctccctacgaggcgggcgtgcagccatggcgctggtgcatgcgggcatgggccttacccgggtcgttatcctcgtcggcgccggcgttgccggctccgtcgtcctccgcaacggccgcctcgccgagatcctcggcgagctccaggagatactcgacaaggggaagaaggtgaaggatggaggagggggagacggggaaaccgatctcaacgaggctcttacctcgcaggtgcgtcgccttgccatggaggtccggcaacttggtaattcacgttcaataactgttctcaatggaggttctgcacaatcaggagtatcaggcctgatagtacctgcagcaactgtaggagcactgggttacggttatatgtggtggaaggggatctcgttctcagatctaatgg

SEQ ID NO: 97988 - DNA, 531 bp, Zea mays
  unsure (1)..(531): unsure at all n locations
tttacagcgtgctccccgcccacgccgcgctccgcctcgcaccggnctcggaatacccgggccgacccacgcgtccgcgtcgcaccaaatatggtcagctggttgtgttctagctgagttgcttcttggacagccacgatttccaggagagagcgctgttgatcagttggtagagatcatcaaggttcttggtactccaacccgtgaggagatacggtgcatgaatcccaactatactgagttcaggtttcctcagataaaggctcatccatggcacaagattttccacaagagaatgcctcctgaagccatagaccttgcttcccgtctccttcagtattcaccaagtcttcgttgctctgctcttgacgcatgtgctcatcccttcttcgatgagctgcggacaccgaatgcacgcctaccaaacgggcgcccgttccctccgctctttaacttcaagcacgaactagcaaatgcctctccggacctcgtcagcaggcttgtgccggagcacattagacggcagatcgg

SEQ ID NO: 97989 - DNA, 519 bp, Zea mays
  unsure (1)..(519): unsure at all n locations
gaaacgtggtttttnnnnccgggttttnnnngncgcatcgaatacaaaccgaggccacgcggacgcccacgcttactttctgttcctgcttgcttttgatctcaacccaagtcgtgcctccgctcgtgtcagtcgtctctccacgcaaccatgtctaggaagaagaccagtgatcccaatgaggagaacgtcacccttggacccactgtccgtgaaagagagtatgtctttggtgtcgctcacatctttgcatccttcaatgacaccttcattcatatcactgatttgtctgggagggaaactctggttcggatcaccggtggcatgaatgtgaaagctgaccgtgatgagtcgtcaccttacgctgctatgcttgctgctcaagacgtctcacagcgcttcaaggagcttggcattactgcactgcacattaaacttcgtgccaccggaggcaacaagaccaataccccaggaccttgtgcccaatctgccctcaaggcgcttgctcgttcccggatt

SEQ ID NO: 97990 - DNA, 532 bp, Zea mays
  unsure (1)..(532): unsure at all n locations
nggggttgacgtgaaccccccgcccaccccgccgcgcttcgcaccggnctggaatacccgggccgacccacgcgtccgcccacgcgtccgctactactcatcactcgccaacgtgcagagatcagggaagcggcgctcgatccactgactgaccgctcatggcgaaggtccacctctacgtcgccgcggcctgcgccgtcgtcctcgcgctcgccaccccggccctcgccggtgaccccgacatgctgcaggacgtctgcccggctgactacgcctccccggtgaagctgaacgggttcgcgtgcaaggcgaacttttcggcggacgacttcttcttcgacgggctgaggaacccgggcaacaccaacaacccggcgggctccgtggtgacggcggccaacgtggagaagttcccgggcgtgaacacgctgggcgtcttcatggcgcgcatcgactacgcgccgggcggtcagaacccgtcgtacacgcacccgcgcgccaccgagatcatcttcgtcctcgacggcacgct

SEQ ID NO: 97991 - DNA, 524 bp, Zea mays
  unsure (1)..(524): unsure at all n locations
nggagagtggtccgctccgacccgtcgcgcagagctccaccggnccggaattcccgggtcgacccacgcgtccgcccacgcgtccgtcccgctccgatcgaccttctccctccccaccaccgagcccatggcggaccatctcaccgacgaccagatcgccgagttcaaggaggccttcagcctcttcgacaaggacggggatggttgcatcacgaccaaggagctgggcactgtcatgcgctcgctggggcaaaatcctacagaggctgagctccaggacatgatcaacgaggtcgatgctgatggcaacggcaccatcgatttcccagagtttctcaaccttatggctcgcaagatgaaagacaccgactctgaggaagagctcaaggaggccttccgtgtgtttgacaaggaccagaacggcttcatctcggccgccgagctccgccatgtcatgacaaatcttggtgagaagctaactgatgaggaggtggacgagatgatccgtgaggctgatgtccatg

SEQ ID NO: 97992 - DNA, 479 bp, Zea mays
  unsure (1)..(479): unsure at all n locations
ntgatgtcttcgcactgtgcgtctcccgattccgccgaccacgcgtcgactcgcttgctcgctcgggcatttctctcgcgcgggagcgccatgtgagctcgggcggatctgatggcttgtgtgatctcctgcaggtaagaaaaagaggaaggcaagatgtctcaccgtaagttcgagcacccgaggcacggctccctcggcttccttcccaagaagcgctcctcccgtcaccgcggcaaggtgaagtcattccctaaggatgaccccaagaagccttgccatctcactgccttccttggctacaaagctggcatgactcacattgtccgtgaggttgagaagccaggatccaaactccataagaaagaaactgtgaggctgttaccatcattgaaacccctcctcttgtcattgttggctcgtggcatatgtgaagactctcgtggcctcgcacactcaactctgtttggcccacatct

SEQ ID NO: 97993 - DNA, 523 bp, Zea mays
  unsure (1)..(523): unsure at all n locations
actgggttacgtccagcctgttccagtcacttccaccggnctcggaattcccgggccgacccacgcgtccgcccacgcgtccgaaatggaagacagactctttgctgcctacaaagccacaactgagggcaggttcccagaagcactgaggcagttccttagcatcttacatacgattcctgtaatcgttgtagactcacggagagaagttgatgaagtgaaggaattaattgagatagtgagggagtatattcttggtctgaagatggaactcaagagaaaggaattgagggatgatgtgacccgccaacaggagttggctgcttacttcacaaattgcaagcttcagagaattcatatgaggcttgtgctttctagcgccatggctctttgcttcaagcagaaaaactatgctactgcagcacactttgcaaggatgcttcttgaagatagccctcaagaggctcaagcagggaagctcgacaggtgctgcaagcttgtcaggataagattgatctcaccc

SEQ ID NO: 97994 - DNA, 527 bp, Zea mays
  unsure (1)..(527): unsure at all n locations
tttttaaggactttttttnnccccttttnnncgntcnanccggnctagaaaacccgggccgacccacgcgtccgcccactcctccgaaatggaagacattctcttgtctgcctacaaagccacaactgagggcgggttcccttaagcactgaggcagttccttatcatcttacatacgattcctgtaatcgttgtagactcacggagagaagttgatgaagtgaacgaattaattgagatagtgagggagtatattcttggtctgaagatggaactcaagagaaaggaattgagggatgatgtgacccgccaacaggagttggctgcttacttcacaaattgcaagcttcagagaattcatatgaggcttgtgctttctagcgccatggctctttgcttcaagcataaaaactatgctactgcatcacactttgcaaggatgcttcttgagaataaccctcaaaaagctcaagcaaggaatgctcgacaggtgcttcaagcttgtcaggataaagatgattctcacn

SEQ ID NO: 97995 - DNA, 530 bp, Zea mays
  unsure (1)..(530): unsure at all n locations
nnaagatgtnnttcagttcaagcaagtgatgtagaacttgcacnggnctcggaatacccgggtcgacccacgcgtccgggcgtctactctagctcgacgcatcaggctccccctagtcgccacccctgccgctgccaaggagacctcccccgccctgcaaatcatctcacgaaggaggattcgagggctgatgcaacgggattcgagggctcatggttaggatggacgctcctgattccctacgaaagtggtttctattggccctaaacatgattgcgcaagcactatcaaggtgacaggaaaggaagcttctgcagcttggattgccaatagagtgaagcctatgttgattaaaaagccaaggcttggtgcaagagaaatgcagtatatgttggaggatcaattcacagtcactttgtcatataacaaggtctgggaaaggagaaagttggcacttaaagaacctcatggtacatgggaagatagcttcaaagtgctatggaattggaaaagcacccgntgatgcaacc

SEQ ID NO: 97996 - DNA, 529 bp, Zea mays
  unsure (1)..(529): unsure at all n locations
tttaaattgcnnnnngggacttgngnngcacgancgtaccggactggaaggccggggccgaccgacgcgcaagcgttnnnaaattttgctgatgattattttgttatggatgggtttgatgtgaaaaccggatattaaattgtgaagggttctaaggatgatattaccatgcaaaatcctgccaccggggatatttcaatcccttattggatggcttgcttgtccactggtattggaactcggccattcgttggggaatttatgaaacaaattggccaggccaatcgccgtgtcttggctactgatgaatggctaagggtccgtgaatgtgatggtgtctatgcaataggtgactgtgctacaataaaccaaaggaaagttatggaggacatttcagaaatattcagagtcgcagataaagaatagtctggaaaccttgactgtgaaaagaaattcaagatatcccttgatgatatctacgtgagggtacccgcaagtacaacttctaccttaaatagcaagcagattt

SEQ ID NO: 97997 - DNA, 524 bp, Zea mays
  unsure (1)..(524): unsure at all n locations
naagtgtgcctttccccaaatcncgcgcactnctgntnggncacgaanccgggggcgacccacgcgtgcgcccacgcgttcgtccacgcgtcctttcacttcttacgcggacgcgtgggccgccgggctgtgcgccgaccccgagacattcgccaagaaccgcgagctggaggtgatccactcccgctgggccatgctcggcgcgctcggctgcgtcttccccgagctgctctcccgcaacggcgtcaagttcggcgaggccgtctggttcaaggccggctcccagatcttcagcgagggcgggctggactacctcggcaaccccagcctgatccacgcgcagagcatcctcgccatctgggcctgccaggtcgtgctcatgggtgccgtcgagggctaccgcattgccggcgggccgctcggcgaggtcgtcgacccgctgtaccctggcggcagcttcgaccccctcggcctggccgacgaccccgatgccttcgcccagctcaaggtgaggagctcagaan

SEQ ID NO: 97998 - DNA, 527 bp, Zea mays
  unsure (1)..(527): unsure at all n locations
tggaagtgtgttctttgctattctgttctcatcctctcnactggnctcggaatacccgggtcgacccacgcgtccgcttgagcaagctgaaagaagggacccgcatcttggagaagcatcagtttctcttgcgatagaaggagactctgcgcgtgggaggctactctaccttgaaaaccgagttgctctagcaagaatactgtttcctatggaggcaagggtagcaatggacattgctcaagtcgatggaacactggaattcacccttgtttctagtgtgaatctgcctgccgagatacaacggacagttgacctgaacgatactcctttcacaatgaaggaagaacacctggctcggatgagagccctatccaagacagtggaagtcgggaagcgtttctttccgcggtgttcgaaagtacttgacacgatcatggacgacgataccgagatggctttcctgtggcgagacacattcgcggagaagaagaggaggttccatgacccggaagacttgttcaaaatgc

SEQ ID NO: 97999 - DNA, 546 bp, Zea mays
  unsure (1)..(546): unsure at all n locations
tgggataggaactgactgaatacagtaggactgacgtaccggtccggaattcccgggtcgacgcacgcgtccgcccacgcgtccgattgctgacaagaacaacaagtgggcatcatatgctggacctggtggggggaatgacccagatatgctggaagtaggcaatggtggcatgagcttagcagagtatcgctcacattttagcatatgggctctcatgaaggcccctctattaattggctgtgatgtcagaaacatgacttctgaaacaatggaaatactgagcaacaaagaagtaattcaagtaaaccaagatcctcttggagttcaaggaagaaaaattttaggacaaggaaaatatggatgccgtgaggtgtgggctggtcccttgtctgggaatcgtcttgttgttgctctgtggaaccgttgttcagatactgctaacgttacaatgaaactgccagcagtaggccttgatgggtatgctggctattctggtagggatctgtggaagcatgaaactctatcggaaaatgtcgtaagaan

SEQ ID NO: 98000 - DNA, 550 bp, Zea mays
  unsure (1)..(550): unsure at all n locations
tatgggngtagtcatcgaatgagtactgcatgactcaccggtccggaattcccgggtcgacccacgcgtccggcctttttgggttgtatccgaagacatggaaagggatgtttttatgtcagcagacgaagccagagcttatggacttgtcgatattgtaggggatgaaatgattgacgagcactgcgatactgatccagtgtggtttccagaaatgtttaaggattggtagtgggtggatttcttgtaaatttatctcaaacctaaattcgggttttatgctatagaaaatagaaatacttcatgatgatgaatcatcaggttaagatcgatctaaaccaatccattttatatatacatacgacatgccaacggttaaacaacttattagaaatgccagaacagccattcgaaatgctagaaaatcggccgcgcttaagggatgtcctcagcgtcgaagaacatgtgctaaggtgtatactatcaaccccaaaaaacccaactctgccttacgtaaaggtgccagagtacgattaacctctggatttgg

SEQ ID NO: 98001 - DNA, 550 bp, Zea mays
  unsure (1)..(550): unsure at all n locations
cgggntcgctattgctcagtgnctcgataggacctgacgtaccggtccggaattcccgggtcgacccacgcgtccgctcatcgacttcgcatgctacaagccggccgacgagctcaaggtgtccaaggcggagttcatcgacctggcgcgcaagtccggcaagttcgacgaggacagcctggcgttccagtcgcgtctgctggccaagtccggcatcggcgacgagtcgtacatgccgcgctgcgtgttcgagcccaacgccagctgcgccaccatgaaggagggccgcgccgaggcgtccacggccatgttcgcggcgctggacgagctgttcgacaagtgccgcgtccggcccaaggacgtgggcgtgctggtggtcaactgcagcctcttcaacccgacgccctccctgtccgccatgatcgtcaaccactacaagatgcgcggcaacatcctgagctacaacctggggggcatgggctgcagcgcgggcgtcatcgccatcgatctggcccgggacatgctccaggccagcggcgcgggccttgcc

SEQ ID NO: 98002 - DNA, 548 bp, Zea mays
  unsure (1)..(548): unsure at all n locations
tacggtngtagtctagcactgtactgatgactcaccggtccggaattcccgggtcgacccacgcgtccgcggacgcgtggggttgtgagaattcttaattcatgagttgtagggagggacttatgtcaccacgaacagaaactaaagcaagtgttggatttaaagctggtgttaaggattataaattgacttactacaccccggagtacgaaaccaaggatactgatatcttggcagcattccgagtaactcctcagctcggggttccgcctgaagaagcaggagctgcagtagctgcggaatcttctactggtacatggacaactgtttggactgatggacttaccagtcttgatcgttacaaaagacgatgctatcacatcgaacccgttcctggggacccaaatcaatataatctgtatgtagcttatccattagacctatttgaagagggttctggtactaacatggttactttcatatggggtaacgtatttggtttcaaagccttacgcgctctacgtttggaggatctacgaattcccccc

SEQ ID NO: 98003 - DNA, 541 bp, Zea mays
agatagttcgattcagtcggatgacgtaccggtccggaattcccgggtcgacccacgcgtccgcgccctcgccttcgactacctgcgcgccatgggttacagcaacgtggaggtcgtgtcggcgatggtcttcgaggcgttcccgctgctcagatacatcctctacacgccttcgtacctgagcctgcaccaccgcgagcggtgtcgcaacttctgcctgttcatgccggcgctggacctggcgggcgggacgctggacgagcgggcgtgggcgctgcagcgcgcggcgtacgacggggggccgggcggcggcgcgctggggacgccggagttcgtgttcctggcgcacgtggtggacatgatgtcgtcgatgcacgtgccggtcgcgctccggtcgctcagctccaccccgttcgccaaccacttcattctggttccggtctggcccgtcggcttcgggtttatgctgctcatgtggtgctgctccaagaccttcgtggcaggttctactaacttctggggcaacttcaacaaaactggg

SEQ ID NO: 98004 - DNA, 561 bp, Zea mays
cgcattaggtgattgtcagcaatcggttgcgaccgccgtaccggtccggaattcccgggtcgacccacgcgtccgcaacgtccaaaatccagaccgctggtaggagtatctcgtatacattgatcaacgggggcggggcgagcgcctgcgccacctccatccccctcgtctcggcgccttctgcatgcccttccaagaagaccaccgtcgccaggttcctgtgctctacggcgacttgcatggccatcagcggcggtggctgtggccgttgctgcgaaaatgatggccgtctttggctgcctcggctgtacgtgatgctgaacggcctgtccagtgtcgccgtcgggctttgccttgctccctggcgttttcgttcagctctgttgctgttttcaccttggccgtcatttttgtctatgtgacctgttcattgctctgtatcatgttgtctgctttctgtgccttgatttgtatttgttcttatttgtagtattttgattgcttttcttcttggtgtttgattattttgataggtatgtttattgtctgtttcttggtttt

SEQ ID NO: 98005 - DNA, 551 bp, Zea mays
  unsure (1)..(551): unsure at all n locations
taggtngttgtgcccacnccgattcgctcggctgcacccgtccggaattcccgggtcgacccacgcgtccgcggacgcgtgggcggacgcgtgggctctggagcatttaggtggtctggatcaatggaagggttgtgtgctagccagccggcaaagatgagctgctgatggtaatgatgatgataagaggccactgctaccctactacgtaccctcctctttgtgtgctgccatccgtccccgttagacgatcgaggagagaataacgcagagctctctgctcccggcctgtcttctgccgtcccggccgtttaatttactagtgtgttcgtcctatatgtttagcagcagcaggtgtattgtgcgggtatgtaatggtattgcaactatattgggtgtaaaaccataataaatgtgggcaaatatgcaaggaaaaaaggcttctaaaaaaaaaaaaannnnaaaaaaaaaaaaaaaaaaaaaaaaaaaaaanaaaaaanaaaaaaaaaaaaaaaaaaaaaaaanaanaataaaaaaaaaaaaaatattaa

SEQ ID NO: 98006 - DNA, 549 bp, Zea mays
gatgtgcttgtccatgaattgtacgcatgcactcaccggtccggaattcccgggtcgacccacgcgtccgcccacgcgtccgtaaaagatgggtgcctcctactggtaaaggttccctatatatcaggccactgctaatatgaagcggtgcagttcttggtcttgcgcctgctcctgagtatagctttatcatttttgtatcccctgttgggaattatttcaaggaaggtttatctcctattaatttgatcgttgaggataaatttcaccgtgccagccctggtggaactggaggtgtgaaaaccattggaaactatgcctcggtactgaaagcacaaaagattgcataggggaaaggatattctgatgtcctttaattggatgctgttcatgacaaatatcttgaaaaagtctcttctgcaatatttttgttgggaaagaccatgtaattctacgcctggcatttaagggaccattacttccggtattaccagggaaagttttaatggagatgctcacaaccaaaggtttaagggtgatgagcctctt

SEQ ID NO: 98007 - DNA, 547 bp, Zea mays
agcattagcattgcctgaatccagtaggactgccgtaccggtccggaattcccgggtcgacccacgcgtccgcccacgcgtccgtaaagaactgattaagtacaaaggttttcagattgcacctgccgagctggaagggctacttctgtctcatccagaaattctggatgctgttgttatcccgttccccgatgctgaagctggtgaagttcctattgcttacgtcgtaaggtcctctgagagttctttgactgaagttgatgtccagaaatttattgaaaagcaggtcgcatactacaaaaaattgaggagggtgacctttgtggacagcgtaccaaaatctgcttcagggaagatcttgagaagagaactcatctctaaagtcagatcatccaagctatagcaagccggcttctgtgttcagaagctagaacgacttccaatttgaaaatttgtcagattgagcgtaaaggtttacatgttactgagcggagcttatcaagcaatacattcagcttgacacaatttgggggacatgtatacatgg

SEQ ID NO: 98008 - DNA, 547 bp, Zea mays
ccgtgcgtgttatgaatagtacgcatgactcaccggtccggaattcccgggtcgacccacgcgtccgcccacgcgtccgcccacgcgtccgggaggagcgaaacctcctgtctgttgcatacaagaacgtgattggagcccgccgcgcctcatggcgcatcatctcctccatcgagcagaaggaggagggccgaggcaatgaggaccgagtaacactcatcaaggattatcgtggcaagattgagactgagctgaccaagatctgtgatggcatcctcaagctgcttgagacccatcttgtgccgtcttccactgcccccgagtccaaggtcttctatctcaagatgaagggtgattactacagatacctcgctgagttcaagactggagctgagagaaaggacgctgctgagaacacgatggtggcatacaaagcttgccaggacattgctctggctgagcttgctccaactcaccctattaggcttggactggcacttaacttctcagtggtctactatgagattctgaactcacctgatcgcgc

SEQ ID NO: 98009 - DNA, 543 bp, Zea mays
cacgtgcgtgtcctgtattggtacgtatgactcaccggtcctgaattcccgggtcgagccacgcgtccgcacgagagagacgaatcttccgaatctctcggtggcgatggcgctctccgaccgctcccgcgggtcgctcctcccgagcttcctctacggctcctcggcgcgctctttcgctgccacaggagccgccgcgcgcctccctgtctcctccccggcgcctgccgcggctggagcaggaggcggcgtgccgttctcgatccaggcgcccaaggagaagatcgagatgtactcgccggccttctatgccgcctgcactgccggaggaatcgccagctgcgggctcacccacatggccgtcacgcctctcgacctcgtcaagtgcaatatgcagattgacccagcgaaatacaagagtatctcatctggatttggtatcctgtaaaagagcaggggcccggggttcttcaggggatgggtgctactttggtgggtacagtgctaaggggcttgcaggttggcttctatgagtctttaaaa

SEQ ID NO: 98010 - DNA, 546 bp, Zea mays
  unsure (1)..(546): unsure at all n locations
tgggtcgtgctgactgcggtggatngacgtaccggtccggaattcccgggtcgacccacgcgtccggcgccaacgagctcagcgacggctactccaagggcaccggcctcgccgccgagatcatcggcacggttcgtgctcgtctacaccgtcttctccgccaccgaccccaagcgcagtgcccgtgactcccacgtcccggtgttggcccctcttccgattgggttcgccgtgttcatggtgcacctggccaccatccccatcaccggcaccggcatcaacccggcgaggagcttgggagccgcggtcatctacaacaaggacaaggcctgggacgaccaatggatcttctgggtgggcccactgatcggcgccgccatcgccgncgcctaccaccagtacgtgctgagagccagcgccaccaagctcgggtcctaccggagcaacgcctaataagtccggcgccgggagctgtgggcgccaccgatcgatccaagtgtagatacgtacgcttccncgacttcggccagtatatgacgcccttgg

SEQ ID NO: 98011 - DNA, 547 bp, Zea mays
  unsure (1)..(547): unsure at all n locations
cgtgttgttaatgattctcgttcgatngacgtaccggtccggaattcccgggtcgacccacgcgtccgcccacgcgtccgcccgccaacaagcgctgcatcaactgcaataatttgggaccacaatatgtctgcacaaatttctggacctttgtttgtaccaattgcagtggatcacatcgggagtttacacatcgagtaaaatctgtttccatggccaaatttaccgcacaagaagttgctgcccttcaagaaggggggaatgagcgtgctagagaagtatttttcaaggaatgggatcctcaacgaaatggataccctgacagcagtaacgctgacaaattgagaaatttcattaagcatgtgtatgtggaacgtagatacacaggagaaaggagtactgataggccaccaagggcaaaggatgacaaggatgagtatagtgaaaatagaagatctgatggaaaatggggtgggtcgagaagtccggcaaatggaaattactttgatcgtcagaattatagccgacggagtgattaccgaaattn

SEQ ID NO: 98012 - DNA, 550 bp, Zea mays
agcacttagaaattgactgcaatctagtaggactgtcggtaccggtccggaattcccgggtcgacccacgcgtccgcggacgcgtggggccttctctgactccggaagcaatggattttgtcaagcgattgctgtgcaaggatccgcgtagaaggattactgcagctcaggctttaagtcatccatggatcagaaattataatgacattaagctgccgttggacattcttatattccgacttatcaaagcttatattcgctcctcatctttacggaaagctgctctgagggctctgtcaaagaccttaaccgtagacgagcttttctacctgaaatcacagttttctctattggaaccagacaggaatggatgcatcactcttgacaatatcagaatggccttaacgagagaagctactgatgcaatgaaagaatcgcgagttcaagatattcttgtttcgttgagcgcccttcaatacagaagaatggaattccaagaggtctgtgcaacatcagttagtgtgcattagcttggagccttggatagatg

SEQ ID NO: 98013 - DNA, 559 bp, Zea mays
  unsure (1)..(559): unsure at all n locations
tacgtgtttgtcctagctcgagtatgcatgactcaccggtccgtaattaccgggtcgagccacgcgtccgattggtggacctcacggcgatgctggcctcactggccgcaagatcatcattgacacctacgggggctggggagcccatggtggtggcgctttctccggcaaggacccaaccaaggttgaccgcagcggagcctatgtcgcaaggcaggctgccaagagcatcgtcgccagcggccttgctcgccgcgccatcgtccaggtgtcttacgccatcggcgtgcccgagcctctctccgtgttcgtcgacacgtacggcaccggcgcgatccccgacaaggagatcctcaagattgtcaaggagaacttcgatttcaggcctggcatgatcatcatcaaccttgacctcaagaaaggcggcaacgggcgctacctcaagacggcggnctacggccactttggaaaggggacgaccctgacttcaacttgngaggtggtgaagcccactcaagtcngagaaaaccttcttgcctaaggccggctttttttttaa

SEQ ID NO: 98014 - DNA, 548 bp, Zea mays
  unsure (1)..(548): unsure at all n locations
cgtggtgtatagcagagtatgtatgcctcaccggtccggaattcccgggtcgagccacgcgtccgcgagggcgaaacccacaaaccctctccctcctgtactccggccgacacatccaggggcgatgaggctgggtagctccggcgccggatcgagcgtcgtcgttcctcgaaacttcaggctattagaggagctcgagcgtggagagaagggcattggtgatgggacagtgagctatggaatggatgatgctgatgacatctacatgcggtcatggactggtaccatcattggccctcacaatactgtacatgagggtcgcatctaccagctgaagttgttttgtgacaaagactatccggagaagccaccatctgtcagattccactcaagaatcaacatgacatgcgttaatcacgagacaggaatggttgatccaaaggaaagttggtttgctagcgaactggcagcgggactacacgatggagaacatnnctacccagctcaagaaagagatggctgcttcgcagaatcgaaggtagtgcacn

SEQ ID NO: 98015 - DNA, 544 bp, Zea mays
  unsure (1)..(544): unsure at all n locations
tcgtagtgtnccagtccgatgacgnatgactcacccgtcctgaattcccgggtcgagccacgcgtccgcccacgcgtccgacttcaacttcctcggccccttcctaattgctgctatcatggtgctcatggggttttcactaatccagatctttttcccactgggcaagatctctgtgatgatatatggtggattggcatctcttatcttctgtggctatatcatctatgacacagacaatatcatcaagcgccacacatacgatcaatacatatgggcagctgtttcactctacctcgacgtcatcaacttgttcctgtctctgctgcagctgctgagggcagccgatagctgagctcattaatggagtgtttggtttgagaaatgatatagtccatcatcttctcactcctcacttttttgtttggttgtggaaatgaatgaagtaaatcaacaccaactcatctttattaataagtggttaataccaatatgtggaataaaagcattccacttaatttaaaggattgacccatgatgcacn

SEQ ID NO: 98016 - DNA, 550 bp, Zea mays
atgcttgctcgaaccttatgctatgtactgccgtaccgaattcccaggtcgacccacgcgttcgcgcagggctgccagctttaacatcattcccagcagcaccggtgctgccaaggctgtcgggaaggttgttcctgaattgaatggcaagctcactggcatgtccttccgggttcccaccgtggatgtgtcagctgtagacctcactgtcagaatcgagaagggggcctcctacgaggaaatcaagaaagctattaaggccgcttctgagggcccactcaagggtatcattggctacgtggaggaggatctgagttccaccgactttcaccggtgacagcaggtcgagctttttcgacgccaaggccggtattgccctgaacgaccacttcatcaagctcgtctcgtggtacgacaacgagtggtgctacagcaaccgcgtcgtcgacctgatcccgcacatgtctaagaaccaattatgctagtatagagaaagaatttcttcacttcctatcaggggtcgtccccaatggcctttgtccaaaaacat

SEQ ID NO: 98017 - DNA, 554 bp, Zea mays
cgttatatacttgacctgagtacactttgactgccgtaccggtccggaattcccgggtcgacccacgcgtccgcccacgcgtccggtgagaaagatggcatctgggctgtgcttgcatggctttctattattgctttcaagaataaggacaaccttggaggagataagcttgtcactgttgaagatattgtccgtcagcattgggccacacatggtcgccattattacacacgctatgactatgagaatgtcgatgctggggctgctaaggagctgatggcaaacctagtaagcatgcagtcatcactttctgatgttaacaagttgatcaaggagatccggtctgatgtttctgaagtagttgcagctgacgagtttgagtacaaggatccagttgatggctctgtgtccaagcaccagggcatccgatacctcttcggagatggttcacgactggtgttccgtctatccggaaccgggtctggtggtgccaccatccgtgtctacatcgagcaatacgagaaggatttccttccagaccggcagggatttaa

SEQ ID NO: 98018 - DNA, 521 bp, Zea mays
  unsure (1)..(521): unsure at all n locations
nnttgagggggcccccnaactgggaactggggctnncnacgtncgtaccggttcggaattcccggggcgagccacgcgtccgcccacgcgtccggagccttcgccgatccgcgagcgcagatcgccganaccaggcggcggagagggagctcgaggcggcggangaaggcgttcgccacagtcgctgatttccctggggaagagatgggtctctcctttgggaagctgttcagccgcctcttcgccaagaaggagatgaggattctcatggtcgggctcgatgccgccggtaagaccaccatcctctacaagctcaagctcggcgagatcgtcaccaccatccccactatcggattcaatgttgaaactgttgagtataagaacattagcttcactgtttgggatgttggtggccaggacaagatcaggcccctgtggaggcactactttcagaacacacagggacttatttttgttgtagacagcaacgacagggaacgtgtttgtgaggctagagatga

SEQ ID NO: 98019 - DNA, 520 bp, Zea mays
  unsure (1)..(520): unsure at all n locations
nnnggagggggccgtnaccccgcatccgccgcccattgcgaacnctttcggaattcccgggtcgagccacgcgtccgcacacatatcagcaaggtgaagtaataagggcgaaggtgaactctctcacttccattgagacagagctacccttcagttactacagccttccatactgtcgtcccagagatggggttaagaagagtgctgaaaacttaggcgagcttctgatgggtgatcaaatagataattctccgtaccgtttccgtgtaaatgtcaacgaatctctgtatctgtgtactacaaccccacttgacgaggctaatgtgaagctcctcaagcagcgtagccatgatctataccaggtgaacatgattcttgacaatcttcctgtgaggaggttcacagagcagaatggaataaccatccagtggacaagctatccagttggttatattccagaaggcacttctgatgtctacatcatcaatcacctgaaatttaaggtcttggtccataagta

SEQ ID NO: 98020 - DNA, 523 bp, Zea mays
  unsure (1)..(523): unsure at all n locations
nggctgcgtgccttaatccccgcattccgnnncagatccangntcgtaccggnccggaatggccggggcgagccacgcgtccgcccacgcgtccgcaagcaagctttcagctagtacatacatactanncanccaggcagcgatggctcccaccgtgatgatngcctcntcngccaccgccgtcgctccgttccaggggctcaagtccaccgccagcctccccgtcgcccgccgctcctccagaagcctcggcaacgtcagcaacggcggaaggatccggtgcatgcaagtgtggccggcctacggcaacaagaagttcgagacgctgtcgtacctgccgccgctgtcgacggacgacctgcttaagcaggtggactacctgctgcgcaacggctggataccctgcctcgagttcagcaaggtcggcttcgtgtaccgcgagaactccaccttcccgtgctactacgacggccgctactggaccatgtggaagctgcccatgttcggcttcaacgactccacc

SEQ ID NO: 98021 - DNA, 515 bp, Zea mays
  unsure (1)..(515): unsure at all n locations
ggggggcggccccggaaatgggaattggagctngccacgnctgtccggtccggaatgccggtggagccacgcgtccgcccacgcgtccgattacatgtggggcaactcctgcaatggaaatactgagttggtgtggggctgatccaggaaatgcatttcttgtgccatcaccttactacccgggttgggatagggacataaaatggcgaactggtgttgagttgatacctgttccttgtcgtagtactgataactttaatgtcagtgtcactgctcttgaaatagcttacaaacaggcaaaaaagcgaggaataagagttcgtggggttctcatatctaacccttcgaacccaacgggaggcattgtgccaaaagaaatactgcatgaccttctacagtttgctgcagagaagaacatacacttaatttctgatgaaatatttgctggttcaacatatggaaaggacaaagttgtcagcgtggcaaatgttgtggatgaactagacgactttgat

SEQ ID NO: 98022 - DNA, 519 bp, Zea mays
  unsure (1)..(519): unsure at all n locations
nggaggcggtctgnaccccgcaccctgccncacngnatacccgttcggaaatnccgggtcgggcgcaacccgtccgatgaattgtagccagtgtttataaccgtttcgttagaaaagagggaatagtgtgcatggttcggtggggattccctggaataaaacgtcncatcttccttcaattccttgtgcgggatatccaatcaattagaattcaggttaaagagggtctttatcctcgtcgtatcctttatatggaaatccggggccagggggtcattcccttgactcgtactgatgagaagttttttactccacgagaaattgaacaaaaagctgccgaattggcctatttcttgcgtgtaccaattgaagtattttgagtaccaattgcaattttttgcaattgtaaggggattttcgagtatttatctaaagtaaaggaaggaacaaacgaggataagagaaaattgcttcgaatttgttttgtccaaatgagatatatggcatactattctttca

SEQ ID NO: 98023 - DNA, 523 bp, Zea mays
  unsure (1)..(523): unsure at all n locations
ggggtgccccnnnnnnacccaactcccgacgctcgtccgaaccgcttcggaattcccgggtgcgacgccacgcgtccgcccacgcgtccgcacgctcgagacgagagccagctctcccagcacacgagcacatggggtccaccaccctcctcgctgtcttcctgctcgtggctgcgtccgcagcgccggcgcggtcttgctcacctcgcgacctgcaggcgctgttgagcgtgaagcaggcgctagggaacccggcaacgctgtcgacgtggaccccagcgtcgcccgactgctgctcgtgggaccacctccggtgtaacgacgccggacgcgtgaacaacgtgttcatcgacggcgcggacgacgtgcgcgggcaaatcccgtcggcggtgggcgggctgacggagctcatgtcgctgaccctgttccggctggcggngctgacgggccccatcccggcctgcctggccgcgctgtccaacctgcagttcctgaccgtcttccacaccaacgtgtccggcgc

SEQ ID NO: 98024 - DNA, 515 bp, Zea mays
  unsure (1)..(515): unsure at all n locations
nggggagagggccnnngcctgggcacccgtccacgccatgcctgtccggccggaattcccgggtggagcacgcgtccgcggacgcgtgggcggacgcgtggggtgtggtcctcttccagccgtcnatcattggtagtgaggctgctggaatccatgagacaacatacaattcaatcatgaagtgtgacgtggatatcaggaaggacctctatggtaacattgtgctcagtggtggttcgactatgttcccgggtatcgctgatcgtatgagcaaggagatcacttcccttgcaccaagcagcatgaagatcaaggtcgttgcaccgcctgagaggaagtacagtgtctggataggagggtcgatcctagcctcgctcagcactttccaacagatgtggatatcgaaggaggagtacgacgagtctggcccggcaattgttcaccggaagtgcttctaaggtttcacaagttcctcgtcggtacctagtctcaaattatgttcccttcatttctcg

SEQ ID NO: 98025 - DNA, 520 bp, Zea mays
  unsure (1)..(520): unsure at all n locations
ggcnncccccccnatattgtatcaggtattgctatnacngtcgtaccggnttcgaatacccggcgcgagccacgcatacggcgagggtggtggtggccgctaccgcttcttcngcngctgcttgagagactgattttgttgctcatcctggcttcggctcgacttatcttatctatctatagtatcgtgttaccgttcgcttctttcaccgtgttagtgtccgttctaccttttgattaggtttttgtacccctgttgttccctttggttgctcccgctatgaaacgagactagagaagaatgagcaatgtttttgttcgcagctaaaaaaaaaaaaaaagggctgtctctctaaatgatccaagcttacgtacccgtgcatgcgacgtcataactcttctattagtgtcacctaaattcaattcacttgccgtccttttacaactttcttactgggaaaacccttgctttcccaacttaatcttctttcaacacaattccccttttcccaacttgcctt

SEQ ID NO: 98026 - DNA, 528 bp, Zea mays
  unsure (1)..(528): unsure at all n locations
cgagggaaaggcnnngccnnnnatcagtattctacgatttcanacncangntcgntccggntcngaanacccgggcggacgcacgcgtccggcgagggtggtggtggcggctacgggttctgcggcngcggctggaaggactgatgttggtgcccatcctgggttcggccgacttatcttatctatctatagtatcgtgttaccgttcgcttctgtcaccgtgttagtgtccgttctacctttggattaggtgttggtacccctgttgttccctttggttgctcccgctatgaaacgagactagagaagaatgagcaaggtttttgttcgcagctaaaaaaaaaaaaaaagggcggccgctctaaaggatccaagcttacgtacgcgtgcatgcgacgtcataactcttctatagtgtcacctaaattcaattcactggcccgccgtttacaacttcctgactgggaaaacccttgccttacccaacttaatctcctttcaacacattcccctttctccacttgcgta

SEQ ID NO: 98027 - DNA, 511 bp, Zea mays
  unsure (1)..(511): unsure at all n locations
ntacccggctccatgcnngtctactgncannnctgtacnggttcggaantgccgggtggacgccacgcgtccngcgagggtggtggtggcggctacggcggctgcggcngcggcttgaaggactggtgtgggggcccatcctggcttcngccganttatcttatctatctatagtatcgngttaccggtcgcttctgtcaccgtgttagtgtccgttctacctttggattaggtgttggtacccctgttgttccctttggttgctcccgctatgaaacgagacgagagaagaatgagcaaggtttttgttcgcagctaaaaaaaaaaaaaaagggcggccgctctagaggatccaagcttacgtacgcgtgcatgcgacgtcatagctcttctatagtggcacctaaattcaattcactggccgtcgttttacaacgtcctgactgggaaaaccctggcgttacccaacttaatcggcttgcagcaacattctcctttcgccaggtggcgt

SEQ ID NO: 98028 - DNA, 522 bp, Zea mays
  unsure (1)..(522): unsure at all n locations
ggagggccggttgcttttccccagcctcgcacgctatgcccnncccgnncggagatnccggggcggagcaancgttcgcccacaccttcgggttttagaaagcgttttgagggttccaccccaaaatttgcaagtggttatggccttaaaaaaggtttggccagttaaaaatggtaatgggcctcaatggcgtagggggaagcacatcattggaaattgctgtagactctgtgcaagatgcagactttgttcangttattaaaaatatttttgaagcttcaagaaatgagagatcaagtggtgctgttggttttgtgttgtcaacggctagagcaatatcagagttacatactttgcttatatctggagggatagaagctagtgactttgatgccttcatatgcaacagtggcagngatctttgttatccatcttcaagctctgaggacatgctttaccctgctgagctcccattcatgattgatcttgatatcactcccannattgatatcggtggggagg

SEQ ID NO: 98029 - DNA, 522 bp, Zea mays
  unsure (1)..(522): unsure at all n locations
agagggcccccnncttaacccagctcccaccgcatgacgtaccggttcggaattcccgggtcgacgcacgcgtccgggagcagcagacctgggccttcaccttcggtatcctaggtaacataatctcgctgatggtgttcctttcgccgctgccgacgttctaccgcgtgtaccgcaagaagtcgacggaggggttccagtcgaccccgtacgtggtgacgctgttcagctgcatgctgtggatcttctacgcgctgctcaagtccggcgccgagctgctggtgaccatcaacggcgtcgggtgcgtgatcgaggcggcgtacctggccgcgtacctggtgtacgcgcccaaggccgccagggcgctcacggccaagatgctgctggggctcaacgtcggcgtctttggactcgccgcgctcgccaccatggtggtctccagcgccggcctccgcgtgcgcgtgctcggatggatctgcgtcagcgtcgcgctcagcgtattcgccgcgccggtcagcatat

SEQ ID NO: 98030 - DNA, 511 bp, Zea mays
  unsure (1)..(511): unsure at all n locations
nactgaaacctgggggcttagtactgacgtaccggtccggaattcccgggtgcgagccacgcgtccggaaccggaggaacgaggatggaggatgactcgccgctgacgaagactatgagagggtggggtgacaggactcgccgcggggaccatctggggcaccgtcgtcgccacctggtacgacgtgccccgtgtggagcgccacgtcgcgctccctggccttatccggacgctcaagatgtgcggcacctacggggccaccttcgccaccatcgggggcctctacatcggcgtcgagcagctcgtgcagagccagcgcaagaagcgcgacttcgtcaacggggccgtcggcgcgttcgttgccggagcctctgtctgcggctacagaggaaagagtattcagtcagccctcatcggaggctcctgtctggctttcacatctgctgtgctggacattggcggcaatacgaccagaggtgacaaccgccaaaagtactatttcttccacaan

SEQ ID NO: 98031 - DNA, 536 bp, Zea mays
  unsure (1)..(536): unsure at all n locations
agtaagccatgagtgcgactgagacttaggctgtcgtaccggcccggaattcccgggtcgacgcacgcgtccgcccacgcgtccgcccacgcgtccgcccacgcgtccgtcgatctgcaagtctcgctacgtgagcagtgcaataaaaaaaagcagccgcaatggcgagcagcaccatggccctctcctccacggccttcgccggcaaggccgtgaacgtgccgtcgtcgtccgccttcggcgaggcccgcgtgacgatgcgcaagacggcggcgaaggccaagccggcggcggcgtccgggagcccgtggtacggccccgaccgcgtgctgtacctgggcccactgtccggcgagccgccgagctacctgacgggcgagttcccgggcgactacggctgggacaccgcggggctgtcggcggacccggagacgttcgccaagaaccgggagctggaggtgatccactcccgctgggccatgctgggcgcgcttgggtgggttttcccggaacttnttgcccgaaacgggggtaat

SEQ ID NO: 98032 - DNA, 545 bp, Zea mays
  unsure (1)..(545): unsure at all n locations
cggttatggcttgcnctgaccactgagatagtatgcatacagnactggctgtaccggttctcgggttcgacgccacgcgtccggccggagctggtgggcgtcctcggcgcgtccagtaagccccccgaggcgcgggagatggcgggcgagtcgctgtgcgccctggtgaccgtgccccgcaaccggaagcggttcgtccaggaggaccgcgacgtggcgcgggtgctgcagctgctgggccccgacgaggagaaggagaagcccgcgccggcgaggcggttcctgctgtcgacggtggcgcacctcacggacagcagctccggccggaggaagatcatgtcctcggagcacgtcaggtaatacagtacgatacgaacaacacgcacacgtagccaatcatcacgtgctcatcaattatcgctgcagttctcagttnttttttttggaaaaaaacaaatgcttgtggtctcgtggcaggaatcttgagaagctttcggagggccgatgtcccaaacgccaaacggttcgtgaagaggcttggcggg

SEQ ID NO: 98033 - DNA, 544 bp, Zea mays
  unsure (1)..(544): unsure at all n locations
tgttcgagcggantnntngtcgactgatgactgaggncnntnctnannnncctnnnnnnttnnnnnnnnnggnnggaggcacgcgtccgtgcctcgacattcttaaggacaaatggagtcccgctcttcagatacgtacagttctgcgcaggtaattgcttattttatcgtctgtttggctaaatagctgtgatggtgggtggtatatgatgatgtactctgcattgtatcaatactgcatccaatttttggcttgcatatggttctagcatatcagtgtgctaccacactgcccccctgacaatatttggtcttcagcattcaggcacttctgagtgccccaaatccagatgatcctctctcagacaacattgcgaaacactggaaatcaaatgaagctgaagcttttgagacaggtacttgtagttgcagtaaacacagttatgaacatagtgttggtatggtttctgcttcacgtctatattacagatgtcctaacatggcagtctcttgcagcgaaagantggactcggcttgattcaag

SEQ ID NO: 98034 - DNA, 537 bp, Zea mays
  unsure (1)..(537): unsure at all n locations
ggtttagtatggcctgtcgctgagtacgatncctacgccatgccgtaccggttcggaattcccgggtcgacccacgcgtccgtgaagactcgtgttattggttgcccaaagactatcgatggagatctgaaatgtaaggaggtaccaacaagctttggatttgatactgcttgcaagatatactccgaaatgattggcaatgttatgactgatgcaagatccacaggaaaatactaccactttgtgaggcttatgggtcgtgctgcttctcacattacattggaatgcgctttgcaaacacaccccaatgctgcactcattggggaagaggttgctgcgaagaaagaaacccttaagaatgtcacanactacattactgatatcatctgcaagcgtgcagatcttggttacaactatggtgttatccttataccanaaagcctgattgatttcattccaaaagttcaaaaactcatcgcggaaatgaatgaaattttagcacatgatgttgttgatgatgcaagggcctggaaaagc

SEQ ID NO: 98035 - DNA, 525 bp, Zea mays
  unsure (1)..(525): unsure at all n locations
agttgcctgtggtgtggctgcccccatcgcacgtcgtaccggttcggaattcccgggtcgacgcacgcgtccgagcaacagcaaccactctggcgccaccttccctcggtcgtgcaacgcgttccagctcatggcgtccatgtcctccgggttcgacctgtcggggctgttcgagagcgagcagaagaccgcgaccgtgttcacggcccgcgcgccggcggccaccgtggtggagaagctggagtccgtggcgcgcgccctaggattcgaggtcaccagggggaaaggctggaaggtgaggatggaggccaaggccgagggcacgaacggacggctcgcggccaccgccgaggtgctcgaggtggccgtggacgtgaccgtggtcgagttcgtgcacgacgccggggacgcgctggactttaacaagttctgcgccgtcgacgtccgcccggggctcacggagatcgtctgggcgtggcagggcgacagccccgncgncgncgtcggcaccgcgtgaacaagcgt

SEQ ID NO: 98036 - DNA, 527 bp, Zea mays
tgtagcctatggtgtgcctgagccatgcgcctacgtactgacgtacagtttccggaatcgacccacgcgtgcgcccacgcgtccgcccacgcgtccgcccacgcgtgcgctactccgtcaccctcaccgtggggggatgggtactggttttactgggagccgcattaaggatccggaatggtcggcaagatcaccgtcaactaattaagctagctatcgatcgatatccattcatgtattagctgttgcttcctgctttgtactccgccgatctgtccatctctacatgttttcgtcttcacacaacaacctctgctacgactacgtatatatgcatgctactagctgattgattttaacgaccaggccgaccccgaaagctagcttggaccaaaaaaaaaaaaaatatctaattgaaattaaaaaaaaaaaaaaagggcggccgctctaaaggatccaagcttacgtacgcgtgcatgcgacgtcataactcttctatagggtcacctaaattcaattcacttggc

SEQ ID NO: 98037 - DNA, 546 bp, Zea mays
  unsure (1)..(546): unsure at all n locations
gtatataatgccatgtcctgacagcatgcatntcctagtcanntgctacatcgntcccaattcccgtctcgacgcacgcgtcctctcacataaccgtagtcactctatagctattactttcaacaaaccccaacttcctttagggactgattcattatataaaaggctgacgcattctctgccctccgatcctataattcatgataacttgaccgatcacactgacttcatacctataactcatcattcaaattactgccctatcaactttcaatggtataatatagccctaccatattatttactcatcactgacaattaaccttataattccactcatcaatccttataaacctttaccacattcaactatgtctccattctcccaaattacccaattctaacaccttaaaacattgtcaatcaataacaatacccttcatcttattattctctaaatcttaattaattcaatctaaattccttaacaaagatcactttaatatcaatttttttcccacattcttcttaattccatttcaaaag

SEQ ID NO: 98038 - DNA, 526 bp, Zea mays
  unsure (1)..(526): unsure at all n locations
ggtagtagccgtggctgaagcctgcnattacgtcngtcttaccggttcggaattcccgggtcgacccacgcgtccggtcccagtgggtcaaggctatggtttgactgaaacctgtgctggagcagctttcactgaatgggatgacacaagtgtgggtcgtgttggtccaccacttccttgctgctatgtgaagcttgtttcatgggaagaaggtggttacaagatttctgattatccgatgccgagaggagaggtcgtggttggcggacacagtataacaaaaggctatttcagcaatgaagcaaagacgaatgaagtatacaaggttgacgagaggggtatacgctggttctacactggtgatattggccagttccatcctgacgggtgccttgagattattgacaggaaaaaagatatagtaaagcttcagcacggagaatatgtgtctcttggcaaggttgaatcggctctagcaacaagtagttatgtggagagcatcatggtctacgccgatccgttccat

SEQ ID NO: 98039 - DNA, 558 bp, Zea mays
  unsure (1)..(558): unsure at all n locations
gtttttgcattctgatgcagcnattangtcatactgtaccgcttcggattcccggtcgacccacgcgtccgcccacgcgtccgcccacgcgtccggggattcaaaggagcagagggacatctatgggatcaaggacaacctgatcaggttcagcattggagtggaagattttgaggaccttaagaatgatcttggtcaagccctcgagaagatataagctccaatccatttgcattaataaagttatgaagtgatggttgtctggatcttgtagagatttgtgatgatacatgagctgttgactgcgaataagttctcttgtgcttattttattctttgaattcaataagctgtgggttgctgtaaaaaaaaaaaaatataatttgattatattttattatattttttttttttaaaaaatatttatttttgtttattatatatattaattttttataaaaaaaaaaaaagggggcgccccttttataaagggccccaattttttataacccggtgttttgcagaagttaaaagttttttttaaggggcccccaaaaa

SEQ ID NO: 98040 - DNA, 537 bp, Zea mays
  unsure (1)..(537): unsure at all n locations
agttagagcgtggtgttcccatccccgtcagtactgctaaccgctccggaattcccgggtcgacccacgcgtccgcggacgcgtgggccagcagctgccacagagacatcagagagcggtcctccttgtgagtctgagctgaagaggaggaggaggaggaggagaagcagcagcgcagccggaggagggagagcgaagatgcgccgcgtcgcgctgttgctcgtcgccgccgtgtgcgcgctggcggcgccggctgccgcggtcgtcactgacggtcttctcccgaacggcaacttcgaggatggcccgcccaagtcggcgctggtgaacggcacggtggtgtcgggcgcccacgccatcccgcggtgggagacgtccggcttcgtggagtacatcgagtcggngcacaagcagggggacatgctgctggtggtgccgcaaggcgcgcacgcggtgcggctgggcaacgaggcgtcgatcccgcagcgcctggccgtggcgcgcggcgcctactacgccatcacgttcagcgcgggg

SEQ ID NO: 98041 - DNA, 536 bp, Zea mays
  unsure (1)..(536): unsure at all n locations
ggtgtagaggcctntcaatgaaaaagaacttattggacgctcgtaccggtccggaattcccgggtcgacccacgcgtccgatagtgaaaacaaatgaagggctagatcggttctttgatagagaacttgagatattgggaagtgttaaacatcgctatttggtcaatctccgtggttattgcaactccccttcatcaaaacttttgatatatgattatcttcaaggtggaagtctggatgaagtgcttcatgaaaaatctgaacagttggattgggatgcacgtattaacattatacttggagctgcaaaaggcttgtcttacttgcatcatgactgttcgcctcgaataatacatcgtgatattaagtcgagcaacatcttgcttgatggcagtttcgaggcccgtgtatcagactttggacttgcaaagcttttagaggatgaagaatcacatattactacaatagttgcaggaacatttggctaccttgcaccagagtatatgcaatttggcagagccaccgagaagactgat

SEQ ID NO: 98042 - DNA, 539 bp, Zea mays
  unsure (1)..(539): unsure at all n locations
agatagtaggcgtcgtgtcgatgagcactaggctctgcgaaccgctccggaattcccgggtcgacccacgcgtccgcatcaccagctgccattgccatctactgacctgtgacctccgcattcccaaacagcccgagcgagcgagctagcagagcggcggcaggcacctccctcctcaaggaacatggcccgcacgcagcagttggcagtagtggcgaccgccgtggtggccttggtgctgctggcggcggcgacctcggaggcggccatcagctgcgggcaggtggcgtcggccatcgcgccctgcatctcctacgcgcgcggccagggctcggggccctccgccggctgctgcagcggcgtcaggagcctcaacaacgccgnccgcaccaccgccgaccgccgcgccgnctgcaactgcctcaagaacgccgncgccggcgtcagcggcctcaacgccggtaacgccgncagcatcccctcccagtgcggcgtcagcatcccctacaccatcaggacttcaccgactggtccagggg

SEQ ID NO: 98043 - DNA, 541 bp, Zea mays
  unsure (1)..(541): unsure at all n locations
ggatggtgagctgtcgtgttgcctaaacgtacgcatgctaactgctccggaattcccgggtcgacgcacgcgtccgcccacgcgtccgcccacgcgtccgctgagtcggagattgaaagggaatcggagtatttgaggaaggtaaagcttacactccactctaacggtatcatttacccttcgtcgctactccgctctctctccaattggcataatccttcactctcatttacttgtaccaattgaacaaaagtaaaaacgggctcaaagtctccgatttcggcaattaatgccaaaggagaagatattaagcccaaagcacaaaggaccgcaccaccatttcaaaaaatttcaaaataaagatttaatcgatgattttcacattggtatccacacaatggacatctcttcaattggtatctttaaaggtagattttcaaaattggaatccaattctctagaaggtcatctttaaaatggcatctattttaaaaccctcttgaaagcttagatgagaaatttatttaggagttttttaacn

SEQ ID NO: 98044 - DNA, 535 bp, Zea mays
  unsure (1)..(535): unsure at all n locations
tgtttgtgtcgcttccatgcattagagtgtaattgtcatcncgntcggaattcccgggtcgacgcacgcgtccgcccacgcgtccgcccacgcgtccgcccacgcgtccggaataagataacacgaaatgggcgtggagcggtggcgagagtagcgtgtaccctccgtggcaagaggctggacggtggtgtatctgtgctctcggtttgcgtgaacttgatctggtcttaagaaccccggtggcgggttgacatatgcaagggttaagtgctacatatgtcgtgtgattggagatcctcagttgagtataatcgattcggatcgccgtaccttcgcggttatgaagaattggtcacttccctgcaacctaaagtcaggatgtgaacactatggataaaaatgatgttgtattgatgaaatgttgaaattagactagatgcaaatagaggctattaatacttaatatggccgtaaaaagatgaaagtaaggactcactttagtaagctacttcttgcaaagtttaagtggattttt

SEQ ID NO: 98045 - DNA, 527 bp, Zea mays
  unsure (1)..(527): unsure at all n locations
ggagagcctgtggtgagccctgggacgatcgnangtacgtaccgcttcggaattcccgggtcgacgcacgcgtccgagcgcacgcagcttctagaatctagaaggcaggagttggtcttcttggacaatgaaatagggttcaatgaggccatcattgaggagagggatcagggaatacaagagattcaacaccaaatcactgaagtaaatgaaatcttcaaagatcttgctgtgctagtccatgatcaaggagcaatgatagatgacattgattcccatatagagaatgctgttgtagcgacttcgcaggctaaaggtcagctttcaaaagctgccaagactcagaagtcgaactcttcgctgatatgcttgttattggttatcttcggcgtggtcctgctcatagtgataatagtacttgcagcataaaagcttggaaggcagctgaggttccgatgatcgagcttattgcgatgaattccttattattattttttttgctgtgcaaccaggaatgggatcctgca

SEQ ID NO: 98046 - DNA, 533 bp, Zea mays
  unsure (1)..(533): unsure at all n locations
atgggagtgcctntaggctgaagactcgtacatggatgcacgctctaccggtccggaattcccgggtcgacccacgcgtccgccaaaatccagaccgctggtaggagtatctcgtagacattgaacaacggctgcatggcgagcgcctgcgccacctccatccccctcgtctcggcgccctctgcatgcccgtccaagaagaccaccgtcgccaggttccggcgccgcacggcgacgtgcagggccagcagcggcggtggcggtggccggggcggcgaaaatgatggcctcctttggctgccccggcgggacgtgatgctcaacggcctgtccagtgtcgccgccgggctcgcctggtacccgggcgtcgcgtccggcgcggatgcggtgtgcaccagggccgacaaggtgaacgagaagaccgtgcagtgcacggacccggccgggcagcttccgtgccctctggtgtcgccgacggaccccgtggaccttcaagccgaaaagcaggtgacgcgcatncggcagcccgtgca

SEQ ID NO: 98047 - DNA, 520 bp, Zea mays
  unsure (1)..(520): unsure at all n locations
cgatgagcgcgtggtgctgcatcnatctatnatcctgtaccgcctcggaatcccggtcgacgcacgcgtgcgccaaaatccagaccgctggtagaggtctcgtatcattgaacaacggctgcatggcggcgcctgcgccacctccatgcccctcgtctcggcgccctctgcatgcccgtccaagaagaccaccgtcgccaggttccggcgccgcacggcgacgtgcagggccagcagcggcggtggcggtggccgcggcggcgaaaatgatggcctcctttggctgccccggcgggacgtgatgctcaacggcctgtccagtgtcgccgccgggctcgcctggtacccgagcgtcgcgtccggcgcggatgctgtgtgcaccattgccgtacaggtgtacgagaagaccgtgcagtgcacacaccctggcgggcagcttccgtgccctctggtgtaacccacggaccctcggtacttcaagcctgaaagctaggtgactcgcattccttaccccgtgcat

SEQ ID NO: 98048 - DNA, 540 bp, Zea mays
  unsure (1)..(540): unsure at all n locations
agtatgttgagctgtngtgttgactgaaactgacggcngtacgaaccgctccggaattcccgggtcgacccacgcgtccgcccacgcgtccgacgaaattgtggaaaatgaccttttcaagcaggattggcgatcaagaaagaaggagcagatattccagtatattgttctgaaatggtcattagttcttcttattggcctgtgtactggacttgttggcttcttcaataaccttgcagttgaaaacattgctgggttcaagttgttgcttacaagtgatctgatgctcaagcataggtacttcacagcatttctggcatatggaggttgcaatctagtcttggcagctgctgctgcagcgatctgcgcttacatagcacctgctgctgctgggtctggtatcccttgagttaaagcataccttaatggagttgatgcttatgctatattagctccaagcacactgtttgtgaagatatttggntcaatacttggagtttcagctggattggtccttgaaaggaaggtccatggacatac

SEQ ID NO: 98049 - DNA, 541 bp, Zea mays
  unsure (1)..(541): unsure at all n locations
cgtttaggatggcctgtgcaactgagtacgtagtctctcactatctccntcggaattcccgggtcgacccacgcgtccgcccacgcgtccgggcgctggagctgctggggctgagggacaacggcgcggaggacgcgtggccggcgtcatcctcctcctcatcttcgtcgtcgtcctcccctgaccatcaggagatcgacgtgagtctcatcatcactgactactgcatgcccggcatgacaggatacgatctgctcaagcgagtgaaggggtcctcatcgctcaaggacattccggtggtgatcatgtcgtctgagaacgtgcctgcccggatcagcaggtgcttgcaggatggcgcggaagagttcttcctgaagcccgtgaagccggccgacatgaagaagctcaagtcacacctgctgaagcggaagcagcccatgcagaagaacaagcctcaggcgcatgcggtggagtctcctgagcagcagcttgacccgcttncgcagccggtgcacgagcccgaggaagccggagcagatcc

SEQ ID NO: 98050 - DNA, 547 bp, Zea mays
ggtggagctgtgcgctgtgcatggcgatcgtacgctcatcacgactggcggtaccggttcggaattcgacgggtcgacgccacgcgtccgcccgccccttggcttttgcttggttgcatcgggccggtcgagccggagaggaaaagctagctagcagctaccagctctcggccggcggtggtagtctgcctgcagctggggttagctgcaagggttgggagctagccatggggaggggtcgggtggagctgaagcggatcgagaacaagatcaaccgccaggtcaccttcgccaagcgccgcaacggcctgctcaagaaggcgtacgagctctccgtgctctgcgacgccgaagtcgcgctcatcatcttctccaaccgcggcaagctctacgagttctgcagcggacagagcattaccaaaacacttgagaggtatgaaaaaaacagttatggaggaccagatactgctgtacagaaccaggagaacgagttagtccagagcagtcgtaatgagtacctcaaagctgaagcggaggtggataatta

SEQ ID NO: 98051 - DNA, 529 bp, Zea mays
  unsure (1)..(529): unsure at all n locations
agtagagcctgtggtgaggccagcnnactgacgncngtacgtaccggcccggaattcccgggtcgacgcacgcgtccgcccacgcgtccgggcaaggcgaagcctgctccgaagaaggtggcgaagacatcgacctcgtctgaccggccgctgtggttccccggcgccgtggcgcccgactacctggacggctcgctggtcggcgactacgggttcgacccgttcggtctcgggaagcccgtggagtacctgcagttcgagttggactcgctggaccagaacctggccaagaatgaggccggcggcatcatcggcacccggttcgagtcctccgaagtcaagtccaccccgttgcagccctacagcgaggtgttcggcctccagcggttccgcgagtgcgagctcatccacggccgctgggccatgctcgccaccctcggcgccctctccgtcgagtggctcaccggcgtcacctggcaggacgccggcaaggtggaactggtggacgggtccttctacctgggccagc

SEQ ID NO: 98052 - DNA, 542 bp, Zea mays
  unsure (1)..(542): unsure at all n locations
agatttgcgtcgtgtgcatgcgaccgtagcgtacacnactgccgtaccggtccggaattcccgggtcgacccacgcgtccgccgacacctaagccgaccccgcctacgtacactccaagccctaagccaccgggtaccaagcctcccacgcccaagccgaccccgccaacgtacaccccttcgccaaagccttcgacacccaagccgaccccgccgacgtacaccccttctcccaagcctccgacgcccaagccgaccccgccgacgtacactccaagccccaagcctnccacacacccgacgcccaagccgaccccaccgacgtacaccccttccccaaagcctncgacgcccaagccgaccccaccgacgtacaccccttacccaaagcctncgacacccaagccgaccccaccgacgtacactcccacaccgaagccgccggccaccaagccgtccacctacactccgacgccgnncgtgtctcacacccncagcccgncgncaccatactactagaaagcgatgcctaccataccaca

SEQ ID NO: 98053 - DNA, 530 bp, Zea mays
  unsure (1)..(530): unsure at all n locations
agtttggccagtggtgaagcctgcncactangncngtcgtaccgcttcggaattcccgggtcgaccgcacgcgtccgcggacgcgtgggcggacgcgtgggcggacgcgtgggcggacgcgtggggtgagagagaggatgggtggcagcggcagggctgctctgctgctggccctggtggtggtggccgtgagcctggccgtggagatccaggccgacgccgggtacggttacggcggcgggtacaccccgacgccgacgccggccaccccgaccccgaagcccgagaagccccccaccaaggggccgaagccggacaagccgtccaaggagcacaagccgtccaaggagcacgggcccaagccggagaagcctgccaaggagcacaagccgacgcctgccacgtacaccccgagccccaaacccacgccgtcgacgtacactcccacccggacgccccccaagccgacgccacccacatacactcccggccctacgccccacaaacccacacctaaacccactgccact

SEQ ID NO: 98054 - DNA, 523 bp, Zea mays
  unsure (1)..(523): unsure at all n locations
gactgatcatcgatctcatacgancggcgccggaattcccgggtcgacccacgcgtccggtgagtgagagagagacagagagatcatcgatcgatcgacgaccatggcgaggcaacggcaagttgcttccatgcttgcagctgctctgctcgttgcaacgacgtttgcgtccattcctacaaccgtgcactccatcggcgtctgctacggcacgctgggcaacaacctgccgtccagcagcgacgtggtgcagctctacaggtccaagggcatcaaaggcatgcgcatctactcccccgacgccaaagccctcgccgccctgcgcaactccggcatcgcgctcatcctcgacaccggcaacggcggcggcgtcctgggccagctcgccaggagcgcctcgttcgcggactcgtgggtgcagagcaacgtgcgggcctactaccccgncgtcggcatcaagtacgtcgcggtgggcaacgaggtgcanggcgacgacacgcgcagnctnctnccggcgatgcgc

SEQ ID NO: 98055 - DNA, 526 bp, Zea mays
  unsure (1)..(526): unsure at all n locations
nattgaaaactgaagcactacnactgccgtaccggttcggaattcccggctcgcgccacgcgtccggtggagaccaaggtcacggcctggcagacggccgaggtcgccaagatcaacaaccgctgcaagagggaggatgtggtcatcaacggctgggagaccgagcaggtggagaaggcctccgcgtggctcaagaagatcgagaggaagctggacgagcagcgcgccaaggcgctggagaagacgcagaacgacatcgccaaggcgcggcgcaaggcggaggagaagcgggcgtcggcggaggccaagcggggcctcaagctggccaaggtgctggagctagccaacttcatgaaggccgtcggcagggtgcccaccaagcgctccttcttctagccagccgactacccctgccaccttcgtctctccctgcctgcgtgtgatcgatgtacgctcgctgctgcatccgagaacctaactgtaaaaaaaaaaaaaagggcggccgctctagaggatccaagcttac

SEQ ID NO: 98056 - DNA, 538 bp, Zea mays
  unsure (1)..(538): unsure at all n locations
cgtagagcgtgtgcgtgaacactgcactcggtgncacatcgtaccggctcggaattcccgggtcgacccacgcgtccgcccacgcgtccgcccacgcgtccgctccgctgggccaccagctttgaccgccgcctcccgtcccctgcgctactgctcctcctcaccccactcccccgcaggagcggcggcggcggcggcgaggtcgtaccccacatcggcgagcggcggcggcaccgccggaggcgaaggcgagaaggtcgggcgcgcgccgcaaaagaacggccacacccagtgctcccagagactctgggggcccaagtcggcgtgccaagacgatctcaagaaagcctaccgcaaggctgctatcaagaaccaccccgacaagggcggtgaccccgagaagttcaaggagctcgcacaagcctatgaagatgtgagtgatccaccagaaacgcgagatgtatgatcagcatggtgaagatgcccttataagaaagaatgggcggcggagggatgccatggtgatgccattggcaac

SEQ ID NO: 98057 - DNA, 520 bp, Zea mays
  unsure (1)..(520): unsure at all n locations
ggtaggccatggtgagccatgccctacgcacgtctaccggttcggaattcccgggtcgacccacgcgtcgcccacgcgtcgcccacgcgtccgcccacgcgtccgcagtgccactcgatcagtagtggtggcagctggcggctggcctgggacgacgatgagcgccaagaccagagctggggccgcccatgtacgccggcagctcgtcgcggccgtggcggtgacggtggcatgcttctactcctcggaggcgacgcagctgcaggtggggtactacaacggcagctgcccggccgccgagagcctcatcgagaccatcgtccacgccgccgtccgcaaggacgccggcaacgggccgggcctgatccggctcttcttccacgactgcttcgtcaggggatgcgacgcgtcggtgctgctggacgacccgacgggcagcccggggaacaggacggtggagaagacgtncccgcccaacttccctagcctgcgcgggttcagcgtgatcagccgcgcgaaa

SEQ ID NO: 98058 - DNA, 532 bp, Zea mays
  unsure (1)..(532): unsure at all n locations
cgtagtggccantactaaggactgagcatgagactcgtcgtaccggctcggaattcccgggtcgacccacgcgtccgcccacgcgtccgcccacgcgtccgcaccagtgcctccaccgaatcttcaacaggcaaaggcaatcaataatcaccagccacatcaatccattccctttcctctcccgctccacttccatgggcaaggttcggtccttcttctcccgctcccgcagcggcaagcgcggcagcgcccggagggcaggctcgtcctcgccgcactcctccgcggcgagcgcgccgccgtccccgtccccactcccactcccgaggaggtcgccgtcgtcgtcgtcaaccacaaccagggacgagacggagcgcgtgttccgcaagttcgacgcgaacggcgacgggcagatctcgcggtccgagctggcggcgctgttcgagggcgtgggccacgccgtgaccgacgacgaggtgtcgcgcatgantggaggagcggacgctgactgngactgttgcgtcagtctgcg

SEQ ID NO: 98059 - DNA, 524 bp, Zea mays
  unsure (1)..(524): unsure at all n locations
ggttaggcgtagtgngtgccaactgagaactgaggcactacggacgacgtaccggtccggaattcccgggtcgacccacgcgtccgcggacgcgtgggcggcgttcgacctgatgctcaagggggagagcctgcgctggatcatgaggatggaggattagagcttcattgcaagcttgctcctcctgcagggcaggcatgtcgcacagcaaatgggcatgaaaagttgaaggcgctccagtcctccagcttgtgtagtacacagtagcaataaaacgttagtgtttgtcctgtgcccatcctgtattattctgttccagggtttcacctttatcgtcagtgtgtggtcaggtttcaacccttctcagaacaaccccctcccagaaaaaaaacaaaggaagaagtttgtgtccaggtttcagaatcccctgtctgtaattaccattgtgcatgacaataatgagatactgtagatattaataatgttccagaccttcaaggccaaaaaaaaaaaaaaaaaaaagg

SEQ ID NO: 98060 - DNA, 531 bp, Zea mays
  unsure (1)..(531): unsure at all n locations
agaggcctgtgggtgacgactgatngactgagtatcatcgtcatgncgtaccggttcggaattcccgggtcgacgcacgcgtccggtccaaaatccagaccgctggtaggagtatctcgtagacattgaacaacgggtgcatggggagcgcctgcgccacctccatccccctcgtctcggcgccctctgcatgcccgtccaagaagaccaccgtcgccaggttccggcgccgcacggcgacgtgcagggccagcagcggcggtggcggtggccggggcggcgaaaatgatggcctcctttggctgccccggcgggacgtgatgctcaacggcctgtccagtgtcgccgccgggctcgcctggtacccgggcgtcgcgtccggcgcggatgcggtgtgcaccagggccgacaaggtgaacgagaagaccgtgcagtgcacggacccggccgggcagcttccgtgccctctggtgtcgccgacggaccccgtggacttcaagccggaaagcaaggtgacgcgcattcggcagc

SEQ ID NO: 98061 - DNA, 503 bp, Zea mays
tccgagtcttgagacagtgcgactgccgtaccggttcggaattcccgggtcgacgcacgcgtccgcgagacagtgaccaatgatgagatcgctgctgacctgaaggagcatgtcatcgggcctggcatccctgagcagtaccttgacgagaagaccatcttccaccttaacccatctggccgctttgtcattggtggacctcacggcgatgctggcctcactggccgcaagatcatcattgacacctacggtggctggggagcccatggtggtggcgctttctccggcaaggacccaaccaaggttgaccgcagcggagcctatgtcgcaaggcaggctgccaagagcatcgtcgccagcggccttgctcgccgcgccatcgtccaggtgtcttacgccatcggcgtgcccgagcctctctccgtgttcgtcgacacgtacggcaccggcgcgatcccctgacaggagatccttaagattgtcaaggagaactttgattttag

SEQ ID NO: 98062 - DNA, 519 bp, Zea mays
  unsure (1)..(519): unsure at all n locations
gttgggctgtgggtgcactgagacgtagncngtcgtaccgctccggaattcccgggtcgaccgcacgcgtgcggcagcaaacaagcaagcaagcaatggagatagaatcggtcaagtgcgagtgctgtggccggaaggaggactgcaccccgcactacattgccagcgtgagatcaggcttccatggccaatggttgtgtgggctgtgctgtgaggcggtcagagatgaagcatgcaggaggaaggctcaccatggagtagaggaggctgtgagggctcacatggcgttctgcaacatgttcaagttgaaccccgccgtccgcgtggccgacggcatgcgccagatgctccggaggcggtccggtgatatgtcaaagccagaatcgggcaagaagtacgaatcatcagtgacactgtattgaagagttcatccatcctaaggcctgtaaaccgtctagccctcttctcaggctgaaatacctttcaacctttngtcagtttgctggattgtcttcctaa

SEQ ID NO: 98063 - DNA, 515 bp, Zea mays
  unsure (1)..(515): unsure at all n locations
tgcgtgcctatccatgagtacgaccctaccgcactgacgtaccggtccggaattcccgggtcgacgcacgcgtccgcccacgcgtccgatcgagtacgacccccaggcgaacaataagttcgacgtcgccatcaggctgcccgcggacaaagcgttgcaggtaggcccacagtacaaggagtacgccggaagcttcgccgtcgtgccgggctccggcgccgggaagacgcggaaagtgaagctctccctgtgcatcaccgaagtgctgttcgatatcgacgctgacggcgataaaaccgtcgacgtcgttatcgtgccgcgcacaaatgctaagatcacgctcaacgctcgccccaccatcaagaatcggaactaggagctagctgctactagtgctcatcaagcacactgtacgtacgtacgtatgtactcgatcgcgtggtcattcatcgaccatcatcgnttatatgctgtcacgcacagtgcgggacggccagtgttgcattattgtgtgn

SEQ ID NO: 98064 - DNA, 528 bp, Zea mays
  unsure (1)..(528): unsure at all n locations
gttgtagagtgcctatggctgaggactgagctctncggactgtcgtaccggtccggaattcccgggtcgacgcacgcgtccggtgagtgcttaaactgcttgcaggtttggctagtagacagcatcgacgacgaggaacagaagatggcaccgaaaggagccgtattcgtctcaatctcacagttccccatcaagaaaatccgcaaggattgcacctacctgagcactccagcaatgaagatccctgaaaccatgcaaaatatccatgcctgcgagaactggctgccaagacgggtgatgagcgcctggcgcatcggcgggatacttcacgccctggaagggtggaccgtgcacgagtgtggggacgccatggtgcatgctgagaaagcatggtcagctgctattaggcacggattcgttcctttgacgaaagcctgaaagcctgtacgcaactctagacgccattcgacgatggctggaaaactacgtttcagcaatcggtagcacatattctncccagctacagaa

SEQ ID NO: 98065 - DNA, 527 bp, Zea mays
  unsure (1)..(527): unsure at all n locations
tgtttagatggccttgggtgtcgactgatngactangncaatacgtactcgctccggaattcccgggtcgacccacgcgtccgcccacgcgtccggggactaggcgggctactatcgtctgcatgtccacgtgctacccgcgggcgggcgccgtcacggtgcgcgacggcgagccgctcaccgtcgtgtccaggtacagcagcgaccggcgccacacgggcgtcatgggcctcttctacatcctcgtggccgaccacgcccggcagctgccgccgcaggagggcctgtgcttcagctttccggtcccatggtgcctaccgtcatggctgtcgagcaacctgtgagatcttttggtgttgaaagctggtgctatgttctaattagctgcttggttagggttcggttcggggcttgtgatggtagggcaaattaagcaaggatggcctcgtgggtccttgcgttactcatacagttatagtaatgttagaatttataatcaattgtcagtctactctgcttgttgttgt

SEQ ID NO: 98066 - DNA, 514 bp, Zea mays
ctcctgactaccgctagtcatgcgtcattacgttccggttctcaattcgggggtcgaccgacgcgtcctcagcagtcaccacttccaaggcattaccgagtcctactagcagtcgcactcaatgttcaagggactaaacagggggcatggctcgcacgcaatctgtcgtagcggtcttcgttgtggccccggtgctgcttctggcaccggcggcgacgaccttggaggccgccatcacctgcgggcaggtgagctccgccattgcgccctgcctcttctacacccgcggcacggggtccggacccttcgcgttctgctgtagcggcgtcaggaaccctctgagcgccgtcagcaccgtctgcgacaggcgcgcccactgtaactggctcaagaacgccgcccggggcgttagagggcctaaacgccgcaacgcccccaggcttccccttctagatccgctgtcagcattcccttcaccctcagcaccttcacccacttgttcagggtgacataa

SEQ ID NO: 98067 - DNA, 519 bp, Zea mays
gtcgtgtcctgtctccgtatgcctggatgtcctgtacttccgtaccggttcggaattcccggctggacgcacgcgtccgcagcagtcaccactcccaagccagtggctattcctacgagcagtcgcacgcaagtgtcagtagactaaacgggggacatgggtcgcacgcaatctgtcgtagcggtcgtcgtggtggccgcggtgctgctgctggcagcggcggcgacgaccttgtatgccgccatcacctgcgggcaggtgagctccgccatcgctccctgcctctcctacgcccgcggcacggtgtccggcccctccgcgttctgctgtagcggcgttaggaacctcaagagcgccgtcagcaccgcctccgacaggcgctccgcctgcaactgcctcaagaactccgtcaggggcgtcagttgcctctacttcggtaacgcctgcagcattcccttcaagtgctgtgtcagcattccctacaccatcagcaccttcacctactgctccagggttaac

SEQ ID NO: 98068 - DNA, 526 bp, Zea mays
  unsure (1)..(526): unsure at all n locations
gtagtagagtgcgcttaactgagccctccgcctaccgcatgacgtaccggtccggaattcccgggtcgacgcacgcgtccggcccaagctaatgcagcatggatttagtgatgccattgcaaaagtaggtttggcaaagtgtgtcagtgacctattcttggttggactgttctaccatctgtataaccagattgctacaaacaccttggagcgagtggctcctctgacacatgctgtcggcaatgtgttgaaacgtgttttcgtcatcggtttctcaatcattgtttttggcaacaaaattagcacacaaactggaattggcacgtccattgccatagctggtgttgctatgtactcttacattaaggctaagattgaagaggagaaaaggaaaaagagcgcatgactgctgtgaataatattatcaggaccttcctcggacacaacatcgtcgacaatcacgacctacttctatacnncttgtttgtttcatcttgagtcagtcggtccattgtttgttcccaat

SEQ ID NO: 98069 - DNA, 527 bp, Zea mays
agagagcctggctgtggctgagtacgagtctctcgcgactgacgtaccggtccggaattcccgggtcgacgcacgcgtccgtggaggagggctttagcgatggtcctgttcatggctggcgccgcgctgctcggcggggctgccggcgccggcgcgcagcagggcgtgtggagcatcatcacccggcccatgttccagagcatgctgagccaccgcggcgacagcgggtgccagggcgccttctacacctacgacgccttcatcgaggccgccagcaagttccccggcttcggcaccaccggcgacgagcagacgcgcaggcgggagctcgccgccttcttcggccagacgtcccacgaaaccaccggtggatgggcgactgctccggatggaccgtttgcctggggatactgccgggtgaaggaacagaaacagacggacccaccctactatggacgaggacccatacagctaactcataagtacaactacaggctcgccgggcaagcgctgaacctgaacctggt

SEQ ID NO: 98070 - DNA, 525 bp, Zea mays
  unsure (1)..(525): unsure at all n locations
agtagagctttccntngctgagaactanctctngcgatgtcgtaccggtccggaattcccgggtcgacgcacgcgtccgcccacgcgtccgcctaaagctagcaaagtccatatggttgctgcacaggttggcgtactgcttcgacccaaaggcaaaggtgtttcaagtgaaaaaggggagtgaattttcggatatccacatggagagcgtcgtgaagaacatcatcctagaagaaggtgcggagaggccaaaagtcggcctgatggtgatgcctggtttcctgatcgggaccagcgtcatacagtcccgtgtgtacctttcagatgcaagtgttcttactgacttaagaatgcacaaggagcttgaaggggtgcctttgcttcttgggagagcttccaccagcataagtntatatgggactgttgtcttgtatgtgatgcgtgagacctctggcgttaatgccgtgctatccgaattgtgcaatgggcttgtgggtttcccatattgcatattcatgtgtgaag

SEQ ID NO: 98071 - DNA, 501 bp, Zea mays
gctgaaactaaggctctccgtaccgctccggaattcccgggtcgacccacgcgtccgcccacgcgtccgctgagctccacggtcccgtacacggcgctccggcccgacgtgtacgcgccgttcgtcaaggcgttcgacgcggcggcggccgggcccaacttcccctggatgtccagggtcgccgcggtggcgccgttcgaccggtgctacgactccaccaagctcccgcagagtctgctcggctacgccgtgccgcagatcgacgtgatgctggagggcgggcagaacttcacggtgctcggcggcaactccatggtgcaggtgaacgccaacacggcttgcctcggcttcgtccaggcgccggggcaagcgccggcggccgtcatcggtgggttccagctggagaaccacctgctgctgctcgacgtggacaagaagcagctcggattcaccactttcctcaacgcaatcgggctttcctgcagcagcttcaatttcact

SEQ ID NO: 98072 - DNA, 519 bp, Zea mays
  unsure (1)..(519): unsure at all n locations
tgttgagtgttgcctgtcattgacccttaagtcgatgcactgacgtaccggtccggaattcccgggtcgacgcacgcgtccgcggacgcgtgggcttgggcctttatgttcataacgacgttatgcttgcttttggtactcgagaaaagcaaatcttgattgaacctatatttgcccaatggatacaatctgctcatggtaagacgacatatgggttcgatatactcttatcttcaacgaatggccccgctttcaatgcaggtcgaaacatatggttgcccggatggttgaatgctgttaatgagaatagtaattcgcttttcttaacaataggacctggggatttcttggttcatcatgctattgctctaggtttgcatacaactacattgattttagtaaagggtgctttagatgcacgcggttccaaattaatgccggataaaaaggatttcgggtatagttttccttgcgacggcccaaggcgcggcggtacttgtgatatntctgcttgggacg

SEQ ID NO: 98073 - DNA, 513 bp, Zea mays
  unsure (1)..(513): unsure at all n locations
gtcgtgtcctgtcaactgatgcttagacctcncgcactgccgtaccggtccggaattcccgggtcgacgcacgcgtccgcggacgcgtgggcggacgcgtgggcggacgcgtgggttcgcagccgctataatatctggtcctgtatgggttatgaatgttgttcctggtcagaagccattgacacttggagttatttatgataggggccttataggggtttatcatgactggtgtgaaccattctcaacgtatcctcgtacctatgatcttattcatgctgatgcaattgactccttgataagtggcccgatttcaggcactagcagatgtgacctgtttgatgtcatgttggagatggatcgcatactgcgcccagaaggaactgccgttatacgggcctcgccagacgtagtagccaaggcagcacagatcgctcagtcgattcggtggaaggcacaggtgcatgacagtgaaccagaatcaggcagtaccgagaaaatacttgtgctacc

SEQ ID NO: 98074 - DNA, 528 bp, Zea mays
  unsure (1)..(528): unsure at all n locations
gtagagccnttcctgtcactgaggatttanccctcactactgtcgtaccggtccggaattcccgggtcgacgcacgcgtccgctgaacttcattttacgccatgagttatcctcccaggtttccactcgaagatgggactgagctttgcaagttgtgcagtgtgaaaatgcaaatccttccttaacagatcgccagtggtcaagacaagaacggtgaacaaactgctgagttcccttgcacatgcaaggtgatattagctcatcacctatctcagactcagcctcaaggcaaatgcggcaacacgcagcagaagagccgtcggtctcttcatcctcaatctccagcaggttcacagttgctggctgtggcggtgacagctctactgatgactctgactccctgttctccctcccaataagagggtccgaatcatttgggaccacctcttccagttcggtgttcctatccattaggaggctatttttcccttctagttttcactgcaacacttcaatcaccacaacagg

SEQ ID NO: 98075 - DNA, 523 bp, Zea mays
  unsure (1)..(523): unsure at all n locations
gtaggcgtgcctgtgctgagcatgagctcatgcgatgacgtaccggtccggaattcccgggtcgacgcacgcgtccgcggacgcgtgggcacgcgcgcgcagtccaaggccggatcggcggcctctcagagctcgggggccgccgtgagacagagaccgaagggggggttgaccggtgctccggaggaagatgtttagcgggacgcagcagaagtgcaaggtgtgcaccaagacggtgtacccgatggaccagctctccaccgacggcgtcgtcttccaccgctcctgcttcaagtgccagcactgcaagtctaccctctcactgagcaactattcctcgttcgaaggagtgccgtactgcaagacccatttcgagcagctgttcaaggagaccgggagttacaacaagagcttccaatcacagtcacctgcaaagattactccggaaaagttggcccctgagctgaccagatcaccaagcaaagcttgcaggatgntttcaggaacacaagacaagtgtgcc

SEQ ID NO: 98076 - DNA, 522 bp, Zea mays
  unsure (1)..(522): unsure at all n locations
tgagtgcgtgctgagactagcatgatgctctcgacgccgtaccggtccggaattcccgggtcgacccacgcgtccgcccacgcgtccgcaaggatatgacaatgatggatcccagggaatgagctgccggtctcaacaagcactctctatccctgggatccatcatctacatacatccatgagcctccttacttcaaggatatgacaatgactcctcctggcccgcgaccggtgaaggatgcatattgccttctgaactttggtgacagtatcacaactgatcacatctcgcctgccggaaacattcacccagacagcgcagctgcaacatatctgaaggagcgtggtgttgaaaggaaggacttcaactcatatggtagccgaagaggaaatgatgagatcatggctaggggaacctttgccaacattcgtcttgtgaataagttcttgaagggtgaggttggacccaagacaatccatgttccatctggngagaagctttcagntttttcatagcagcta

SEQ ID NO: 98077 - DNA, 505 bp, Zea mays
  unsure (1)..(505): unsure at all n locations
gactgatgtaagtagggcttacgtatgacgtaccggtccggaattcccgggtcgacgcacgcgtccgaagaaaagatggataaggattgtattctttaattatttctctatgttttattacttaatgtacgaatttcaaaaattttgtattctattggattggatttgttcgataattcgaagaattacaacaaaatctttagaaatcacatttttagttaggaacttctatggattttattcttcttcttttctttggatccaaaatagaagaataaaagaataggtataagaattaagttaagtcgatccaaaaaggaaaggaggttcatggccaagggcaaagatgttagaatccgagttattttggaatgtattagttgtgttcgaaagggtaccaataaggaatcgacggggatttctagatatagtactcaaaagaatcgccacaatacgcccggacaattagaattaagaaaaatttgtcgttattgtcgcaagcatn

SEQ ID NO: 98078 - DNA, 528 bp, Zea mays
gtagagaggtgccttcgctgaaaactgagactctagcgacgccgtaccggtccggaattcccgggtcgacccacgcgtccgggggccaaaaagccaaaaaaataagtgattcgtttttagcccttataaaaagaaaacggattcttgaacctctttcacgctcatgtcacgtcgaggtactgcagaaaaaagaaccgcaaaatccgatccaatttttcgtaatcgattagttaacatggtggttaaccgtattatgaaagacggaaaaaaatcattggcttatcaaattctctatcgagccgtgaaaaagattcaacaaaagacagaaacaaatccactattggttttacgtcaagcaatacgtagagtaactcccaatataggagtaaaaacaagacgtaataaaaaaggatcgacgcggaaagttccgattgaaataggatctaaacaaggaagagcacttgccattcgttggttattagaagcatcccaaaagcgtccgggtcgaaatatggctttcaaattaag

SEQ ID NO: 98079 - DNA, 540 bp, Zea mays
agatatgccattgttgattaccgagtatcgatctcattcgtactgacttaccggtctcggaattcccggatcgacccactcatccttccaccaaaaagccaaaagattataatgattcgattttagcccttcttaaaatgtaacctgttctagaacctctttcacactcatatcacttccttgtactacttaaaaaataaccacatactcatatccaatttttcataatcaactacttaacatgctaattaaccatattatgaaatactaacttttaatcattcatcttattaaatactataccatatccataattatattcaacataagacacattcaaatacctctatattttatacctcaacctattcatattataactcccaatatacatattccttcaacacactactatatatgattttctcataccagttcctatttaaatactatctaaacaagtaataacactatcctttacctggttataatactcatatcctattcttttaaaatataaatattggtttcataaaacat

SEQ ID NO: 98080 - DNA, 512 bp, Zea mays
gttagagccgtgcgcgcctccgaggcttaggcgctctactgcgtcggattcccgggtcgaccgcacgcgtgcgcggagcctcgctcgcttgtccccaccaacgccgactcgctcccaccaaacccacgagcctaagatggcgtcggcgtccaaggaggaggtgatcgggaagctcaacgtccgcgtggtgcggggcaacaacctggtcatcgccgacccgctcacccacaccagcgacccctacgtcgtcctccagtacggcgctcagaaggtgaagactagtgtccagaagaagaactccaatccagtgtggaacgaagtactgcagctctcagtaacacatcctacgaagccagtgcaccttgaagtttttgatgaagacaagttcacagcagacgacagcatgggtgttgctgagatcaacattactgacatctacgatgctgcgaagctggacctgaagcacgcctcttatgggacaaggatcaagacgatctaccctgtcggagtag

SEQ ID NO: 98081 - DNA, 517 bp, Zea mays
gtttgtgcctgtcgctgcgtggttgatgagactgtcggtatgccgtaccggtccggaattcccgggtcgacccacgcgtccgggcgtcgccttcgctgtctccggcgaggggcccggcggtcttcgccgccgcggtcgtggtgtttctgccggtcttattccccgggttgttctcccctcttggccacgctttcccttctgtcttctcggagtggaatgcccctaagccaatgcatccttctcttttgaatgaggccttgcgatggacagttacggccaaaagaaagatctatggtcacccttgccatatcaggggtggaaaccatgcttaacgccatcagtttctcacaaattacctctggaaccaagtggtcattcaagtatttcttgatggtggattgaaccaacaaagaatggggatatgtgatgccattgcagttgcaaagattcttaatgctactcttgtgatcccacatcttgaagtaaaccctgtttgggaggattcaagctcatttga

SEQ ID NO: 98082 - DNA, 525 bp, Zea mays
gttggccgtggtgaaatcgaacactagactctcgcgacgccgtaccggtccggaattcccgggtcgacccacgcgtccgcccacgcgtccggcggcaccgccaccgcccaccacagaggagaccatcatcgctgtccgcggggcgcagctccacctcatcgaccccgaccgcagcgtcgacctcggcgctggcacgctctccatcgtgcgcctccgccagggggaccactccgtcgccgtcctcgcgcgcctgatccacgagaagtcccaccgccgccgcggcctcttccgcttgttcagcagcgggcggtctgacgctggcgccgagcaggagcccgtccagtggccgctggcccgcgatgtcgcggcggtcaagctcgaccccgcgcactacttcttctcgctccatgtcccacacacggaccacccggacgacaaggatgacgcggacggtgccgaagcggacgcggaggctgcgctgagctacggcctcacggtccgtgggaaggggcaggaggaagtatt

SEQ ID NO: 98083 - DNA, 509 bp, Zea mays
tccgattacgtagactctcggactgtcgtaccggtccggaattcccgggtcgacgcacgcgtccggtgggtcggcttctcctacccctacggttcgggttcgggttcgtgaggttctggggcggtgggcttcgtgggtgagcggatcgagatggcggcgtctgatgttgagtaccgctgcttcgtcggcggcctgccctgggccacggacgaccactccctccacaacgccttgagcacctacggcgaggtcctagagtccaagatcattctcgatcgggagacgcagaggtcccgctgattctgcttcgtcaccttctccacggaagaggccatgcggaacgccatcgagggcatgaacggtaaggagctggacggacgcaacatcaccgccaacgaggcccactcacgcggcgtgcgtcgaggctgccgcggcggctgttacggtggtggccgtggaggctgtgggtacagcggttacgggcgccgtgatggctgctgcgggttccg

SEQ ID NO: 98084 - DNA, 511 bp, Zea mays
  unsure (1)..(511): unsure at all n locations
nttgatccctgatactctcggatgncgtaccggtccggaattcccgggtcgacccacgcgtccggttaggattcagctatgtgcgagtagcaccaaaagcacctgcctccaattcagtgctcgagaagaagtcagctgctgcaaagggtaccactgtaactggcactgatgctgatctccgcagattgagcatggatgcagcccgtgagttgctgctaaaatttggcgtacctgaagagcaaattgataaattaacaaggtggcatcggatcgctatggtgaggaagctttcaagtgagcaagctgcatcgggaattactatcgatgaaattcctgttagtaagtttgcacgtggacaaaggatgtcttttctgcaacttcagcagcaaactagggagaaatgtcaggaaatttgggacagacaagttcagtcactttcagctntagatggtgatgacaatgccagtgacacagaagctcacagtgatctagactcatttgctggggatct

SEQ ID NO: 98085 - DNA, 541 bp, Zea mays
  unsure (1)..(541): unsure at all n locations
agacgaattggntnaagnccagttcgccacgcatcacctatacccntccgctaaagattcccgggccgacccacgcgtccgagcgaacgtgctgataaaatagctgttcatttttcgagttatcaactcaaggatcagcctagtcaaactcctgaaaaggatgcgagagttgtcctttctggagtaagccttaagtatggaattgatttgttggaaagtatccaaagtggccctaagaagaagagcacaaagaagtcactcaaggatgttgtcacagagaatgaatttgaaaaacgtcttcttccagatgtcatccctccagatgagattggtgttacctttgaggatattggagcattagaaaatgtcaaggaaactttgcaggagttagttatgcttcctttgcaaaggcctgagttgctctccaaaggacaacttatgaagccatgtaaagggatattgctttttggtccacctggcaccggttagaccatgctttgccaagctggttcaacaaaagcctgtgctcaatttaatgtcc

SEQ ID NO: 98086 - DNA, 539 bp, Zea mays
  unsure (1)..(539): unsure at all n locations
aganangagatggttgccactgaagttgagggaatagtagtacttccccggncttgaattcccgggtcgacccacgcgtccgatcgagcttaattgcgccactgctcgttatcctcctcttgcattgcattgcaggtcgtagttgagcagcagcaaccactgcacaggatgtcgtggcagacgtacgtcgatgagcacctcatgtgcgagatcgagggccaccacctgagctctgccgccatagtcggccacgacggcgccgtttgggcccagagcaccgcattcccacagttcaagccagaggagatgaccaacatcattaaggacttcgacgagcctgggtttctggccccgatcggcctcttccttggccccaccaagtacatggtcatccaaggcgagcccggcgctgtcatccgcgggaagaagggatctggaggcataactgtgaagaagaccggacaggcgctggtgatcggcatctacgacgagcccatgacccctggacagtgcaacatggtggttgaaaggcttcgtga

SEQ ID NO: 98087 - DNA, 507 bp, Zea mays
  unsure (1)..(507): unsure at all n locations
ccccagagcactccntccggntaaaattcccgggtcgacccacgcgtccgggtattgctgctctccgaccccgagctccttaggccgcaacatcaggcgcggccccggtcgcgtgtgaccgaaatggcgctgccgaatcaggggaccgttgattaccccagcttcaagctcggcatcgtcgggtatggtggaaccgggcaaactacatttgcgaaaaggcatctcactggaaagtttgagaagaaatatgaaccaaccattggtgtggaagttcatccgatggatttcaccactaactgtggtaagatcaagttctactgctgggataccgcacggcaagagacgtttggtggactcagggatggatactatatccatggccagtgtgcgatcatcatgtttgatgtaacctcaaggcttacttacaagaatgttcctacgtggcatagggacctgtgcagggtctgtgaagacattcccatngtactctgcggtgataaggttgan

SEQ ID NO: 98088 - DNA, 532 bp, Zea mays
agtttgtgttttggcccatcgaatagtactgcatggctgcactcgtctggaattcccgggtcgacccacgcgtccgaccacgcctccaaagcctccgacacctaagcttaccccaccgacgtacactcccacaccgaaggcgccggccaccaagccgcccacctacacttcgacgccgccggtgtctcacacccgcagcccgccttcaccatacttctagaaagcgatgcctaccataccacactgctgacagtctctggagcatctaggtggtctggatcaatggaagggttgtgtcctagccagccggcaatgatgagctgctgatggtactgatgatgataagaggccaatgctaccctactacgtaccctcctctttgtgtgctgtcattcgtccccgttagacgatcgatgagtgaataactcagagctctctgcaagggcctgtcttatgacggcatcgccgtttaaatgactagcgtgttagtcctattttttaaccgcatccggtttataagtctggtctggtt

SEQ ID NO: 98089 - DNA, 522 bp, Zea mays
ctgagctatcactgcctgagatggaagtagtccctctacctggctctgaccggcccgacccacgcgtccgcccgcatcgaacctcacccccgatctgatctaatcgaaggctgcggcggcgatgggcggggaccatggcggtgggcacgccggcggcgacttccgccagaaggtatggagcatgacgggcggcccctactgccgccccgtccactggcgccgtaacaccgccatcgccatgttcggcgtcttcctcatctgcatccccatcgctatgaagtccgcagagctcgagcaacgcccgcatcacccagtccggccaatcccatctcaactgtggtgcaaaaactttggtaagaaggaatactgaaggaccctgcaactagcatgaagtgtgggcaccttgcttttgccttctatatgtggaaacctgtgcctagccataatgctgggttaagtgttaggagcatctctggaatgcttcgcgtagtatctcttgatacttctttccttcgtgttacc

SEQ ID NO: 98090 - DNA, 514 bp, Zea mays
agcgtttactgtggagatggtagtagtgctgtacctggatttcccgggtcgacccacgcgtccgcctgtagtagcctgccatgactacgcgctgctgcctggtcgtcgccactctcctcgcggggctgctctcggtcagtgccagcctcgagttcggtttctacaacaagacgtgccccagcgccgagaccatcgtgcagcagaccgtggccgccgcgttcaccaacaactccggcgtcgctccggcgctcctgcgcatgcacttgcatgactgcttcgtcagaggctgcgacggctcggtgctgatcgactccacggccaacaacaaggcggagaaggactcgatccccaacagcccgagcctgaggttcttcgacgtggtggaccgcgccaaggcgtccctggaggcgcggtgccccggcgtggtgtcctgcgccgacatgctcgccttcgcggccagggacagcgtcgtgctcaccggcggcctcggctacaaggtgccgttcggacgccg

SEQ ID NO: 98091 - DNA, 512 bp, Zea mays
tgaggagtggttacgcaagagggggagcgtgcgtccgtactgttatgtctacccacgcgtccgcggacgcttgggcggactcgttggcaaaggacctgagtgcgctgtggactggcgcaccgggctgttctgtgtgccaccggacagtgttcggtgcaccatgcccgtgcaaatccgaagcagccactctagggaattcaacgacgccctccgctataattcaccggactgtccggtgtgccagcggatcatcggctaactcgtgccaacgggcgactctgacggctgaacagtgttacgacagaagtcatagcagaaagtcacagggcaccggactgtccggtgccgcacgaagaccaagctgcaacagttcgacttcgctgcaaacccctaacggttgggtgacaatgcccaggcaccgggacaggcacaatgcccgtacagtggcgccctctaggtgcacggcagcttagtgctaagcggcggccctcggtacaacgttacgttcggac

SEQ ID NO: 98092 - DNA, 509 bp, Zea mays
  unsure (1)..(509): unsure at all n locations
nnnaaaaacgatcaatggcgctaacgggtcgagccacgcgtacgcttacgtccagctagcccttgccgtcgctcgtctcctttagaggcgccggcaccgacgatctggcccgggtctatttgcagaagcgcggtcacttgtctcagcccggggtctgctgcgtctggtggtggtgaatgggagaacctcgtgacgatctgttccggatcaagcgtgcgagctcgggaatcaggggtttcacacatagctgttgcgatctgaattcgatgtactaatggagtctaatgccggctaaaagtctagccttacttactctatgatgtctgaagctccccttggctacagcattgacgacgttcgatctgtccgaggcgtgttaaagttccagactgctgctttactccgactgcgcgaaaattccatcctgatattccctttggcttcctcattcttgcagtttatgattttttttctgaccttttgattctgaccaatctttctggcctgcg

SEQ ID NO: 98093 - DNA, 532 bp, Zea mays
  unsure (1)..(532): unsure at all n locations
tgctagagtgctgagnccccaccttcngcagcgcgtcgcgcctgaataccgggtcgacccacgcgtccgtatcactaaaaccgaggactgtgagagttttttcaactttttcaatcccccgcaggtccctggagatgatgatgacatcgatgaagacactgctgatgagctgcagagtcaaatggagcatgattatgacattgggaccaccataagggataagattatccctcatgcagtttcctggtttactggtgaggctgtgcaaggtgaggattttggtgagttgggcgatgatgatgaagatgatgatgatgaagacgatgacgaagatgatgaggatgaagaagaggatgatgatgatgaagaggatgatgaggaagaaagcaagccagcaaggaagtcaagatctggtcgcagacataaggcgccacagaaagtgtcccatggaaatgcggaacaaccagcggagtgcaagcagcaataaaatggcccgttgatgttggttgatgcaatatttttcattgagctn

SEQ ID NO: 98094 - DNA, 535 bp, Zea mays
  unsure (1)..(535): unsure at all n locations
cggttagagtggctgagccatcagtacaaagtagtggacttcttcctgaattcccgggtcgacccacgcgtccggcgagacagatagaagcaggacgaagagcattgacacgatatgcacgtcgtggtggaaaaatgtgggtgcgtatatttcccgacaaaccggttacaataagacccacagaaacacgtatgggctcgggaaagggatcccccgaatattgggtagccgttgttaaaccaggtcgaatactttatgaaatgagcggagtatccgaaactgtagctagagcagctatctctatagctgccagtaaaatgcccatacgaagtcaatttcttcgattagagatatagaaccccaaaaaggaatattgaagataaaaaacccctggtttttctttctggaaagacaatatttctttcatccttttgcattgaaataacaaatggaaatccaaataatatgattcaacctcagacccttttaaatgtagcagataacagtggagctcgaaaatngatgtgtattccat

SEQ ID NO: 98095 - DNA, 532 bp, Zea mays
  unsure (1)..(532): unsure at all n locations
agttcgaggtcttggccatccggtgggagtaggtgaccccgtcctgaattcccgggtcgacccacgcgtccggggttggcttctcctccccctccggttcggtttcgttttcgtgaggttctccggggttcggtgtcgtgggtgagcggatcgagatggcggcgtcggatgttgagtaccgctgcttcgtcggcggcctcgcctgggccacggacgaccactccctccacaacgccttcagcacctacggcgaggtcctcgagtccaagatcatcctcgatcgggagacgcagaggtcccgcggcttcagcttcgtcaccttctccacggaggaggcgatgcggaacgccatcgagggcatgaacggcaaggagctggacggccgcaacatcaccgtcaacgaggcccagtcccgcggcggcagctgcgggtacggtggtggccgtggaggcggcagctactgcggttgcaggcgccgtgatggcagctgcggctactgcgagtgcagcagctactgtggtggcggcngccg

SEQ ID NO: 98096 - DNA, 537 bp, Zea mays
agtttttagtcgttggcgacgtaccgacatggatagcatcgctctactcggtctggaattcccgggtcgacccacgcgtccgccagctgccattgccatctactgacctgtgtttctccgcattcccaaacagcccgagcgagcgagctagcagagcggcggcaggcacctccctcctcaaggaacatggcccgcacgcagcagttggcagtagtggcgaccgccgtggtggccttggtgctgctggcggcggctacctcggaggcggccatcagctgcgggcaggtggcgtcggccatcgcgccctgcatctcctacgcgcgcggccagggctcggtgccctccgccggctgctgcagcggcgtcaggagcctcaacaacgccgagcgcaccagcgccgatcgcctcgcctcctgcaactgcctcaagaacgccgtctcctgcgttagaggtcttaacgccggtaacgccgccagcatttcttccaattccgcatcagcatacttacaccataagctccttttccgattgtccatt

SEQ ID NO: 98097 - DNA, 522 bp, Zea mays
  unsure (1)..(522): unsure at all n locations
ggtttntnntnattttgagttattacgcaagagggagaagtttccgctgttcttgtaagcctacgcactcgtccgcccacgctttcgcccactcgttcgactggggattgcatttatgagcttagttccaatgggaacaagttccattcttgcgtgttccacccgagctattccaatctcttggttattggaggctaccagtctctcgaggtttggaacatggtgaaaaaccagagcctaaccgtacaagctcatgaaggtctaattgcggcgctggcgcagtcaccagtcacagggatgatagcttctgctagccatgacaactctgtcaaggtgtggaaatagcagtaacaacgattatgatgcacctaggtagctttttttccaaggcaagtgaaatttctcctgctgaagcataaaataaggaagagtagtaaattagatggttgccggtcgcggttcagctgtccaagagcagtgagtttgttgatgggttgtattgtatttatgctgataggctgt

SEQ ID NO: 98098 - DNA, 529 bp, Zea mays
tgatttggtctgaccatccagtaaaataagtcacacacgtcctgattcccgggtcgacccacgcgtccgcccacgcgtccgattcaacaaagccagagattagattaagggtgggaatggtcaagacacaggctcagcttccaaggaccccaggactgatagggtggagtcttatgctgcagaaccaagcacgaagaaatggtcttgttgtgtgacagccagccctacgcaatcctgaggaaggcaattgcatgctctggaaatactgaccctttaattctctatacatactatccataagacactgtagaggtacccatggctctctgagctccaggatgggtgtctgataaaactctggcgtgcatgtatgtatggtgtgagagttgtcggcatacattactcaagtggacttatgatcgtaattcctagtctcggtctcataatgctctcccagttgtcatgctaatacgggtgcaaatgaattagacaatttgacagtggtaatggaagtcgaaattcattcaca

SEQ ID NO: 98099 - DNA, 512 bp, Zea mays
  unsure (1)..(512): unsure at all n locations
tggagataattacgcattacagagtgctcgcccggtcttgaattcccgggccgacccacgcgtccgattgtgggaacatttcatcaaaggagatctttcacaggtcaaacgagacctaagacttgagcgaaaagaaattattagatggaatctatttgcattaaaaaaaccgatcaaaaaaggacgagcgaagtaagtaatcgaaaaactttcttctttgttcgtcctatctataagaggagagcatatgaaaaatgtaacccattcttttgtttttttagctcactggccattcgctgggagtttcgggcttaataccgatattttagcaacaaatctaataaatctaactgtagtggttggtgtattgattttttttggaaagggagtgtgtgcgagttgtctatttcaagaatagattggatctatccggctgcactttagaatatttttagtattttttttgataaataagaaaaggtgcacgatctcgacgaattacttctgaatan

SEQ ID NO: 98100 - DNA, 506 bp, Zea mays
ccccccgaccactacctgaagttacgggtcgacccacgcgtccgaggacgcgtgggcaggctgcggccggcgggtacggtttgtccacctagtacacggacgccagggtgagggacgtcgcgtccacgggcgagaacgagtacgacgagtacaagaaggaggagatgcagcacatgcacaagcaggaccttggcgaggtcggcaccatcgcacgtgggcgccttcgcactatacgagaagcacgaagcgaagaaagactcggagcacgcgcaccgacacaagatcgaggaggaggtcctggaggaggttgtcgtcagatccggctgcttcgcctttcactagcaccaatagctggataaggaccacttggaggccgatgaggccggctgcgagaacaagcaccacttcttcggctagctgattgatcctacaatatcgatcgtcgtactttaccgtatgcttacgctgcgtgttaaactgatatctagagcttgacgggctgcaat

SEQ ID NO: 98101 - DNA, 508 bp, Zea mays
cgccgccaggcatgcaccggtcttgaattcccgggtcgacccacgcgtccgctcttgtttcttggttatcaaacgattgtttttgtctagtctccagtgtaaataatggtacattgagcatgatctattcgagcagcttattaaggaaacatcatccgatacagaacaaacatcgcaaatcgaccacagtattagcgcaacatcctgcaatacagtacaatacatcacatcactagtcacgcctcattacgctactacactttcttcaagaggtggtactctgatatcgcgaaaccgaacgacgcaacgagcacgtaggcagcagcgtactattatgatacgtactagagctttcaggcgacgtgcagcgcgctaccgagcgctgcgcggaggctgtcgatctcgtcgccgggcaaaaccgccgtgacgaggcggccgctctagaggatccaagcttacgtacgcgtgcatgcgacgtcatagctcttctatagtgtcacctaaattc

SEQ ID NO: 98102 - DNA, 517 bp, Zea mays
ataaaagagctgtgccttgcattcgctgctctctcccggtctggaatacccgggccgacccactcgtccgcccactcgtccggggttggcttctcctcttttttcggttcgggttcgggttcgtgagggggtgctttgttcggcttcgtgggtgagcggatcgagatggcggcgtctgatgttgagtaccgctgcttcgtcggcggcctcgcctgggccacggacgaccactcccttcacaacgccttcagcacctactgcgaggtcctcgagtccaagatcatcctcgatcgggagacgcataggtcccgcggcattagcttcgtcaccttctccactgaggatgctatgctgaacgccatcgagggcattaactgctaggagctggactgtctcatcattaccgtcaactatgcccaatcccgctgctgtcgtgtaggcttcagcggtcggttcttgttgttcctgggatgcagcttttactgccgttgcagacccctttattcagcaggggttc

SEQ ID NO: 98103 - DNA, 526 bp, Zea mays
  unsure (1)..(526): unsure at all n locations
agcatgaatgctgagnnccgaaattcgcacgncattcgactgtgctaaattccggtcgacccaacgtacggcccgcgtccgttcactcgtacggttagctttcggcatcccgtccccgtccgcgccgaccgactccaccttttcgtcggcgcgtcagcgtcgcagctccactgagcgtgcgtatcaccggcgggaggcaagggcaagctgtggtcgcgatagcgtccgctgacgcacgcttggcggggatcgcctacttcatccgcgtcatccccgacttccccaagccagagatcatgttccacgacatcacgacgttgctgctcgatcccaacgcgtttcattacaccatcgacctctttgtcgagcggtacaaggaccaatggatcaccgtggctgctggcgttgaagctagacggttcatttttggtcctcctatcgctttagccattggcgcaaaatttgtgcccttgatgaaaccgaataagttgccaagcgaggtgatctccaaaaatattctttggat

SEQ ID NO: 98104 - DNA, 538 bp, Zea mays
  unsure (1)..(538): unsure at all n locations
agttttttagtttaaggnnnnnnnntttgaacctcagtcatcgtatgacccnccnnnntggaancccgggccgacccacgcgtccgcccacgcgtccgcggacgcgtgggttctcactgagacgggttactccttcacaacgggaggcgagcgagaaattgcatgggacatcaaggagaagctagcatatatagcccttgactatgagcaagagttggaaactgccaagaacagctcttcagttgaaaagagctatgagctacctgatggacaagtaatcaccattggtgcagagagattcaggtgccctgaggtcctcttacagccgtcgatgattggtatggaagctgctggaatccatgagacaacatacaattcaatcatgaagtgtgacgtggatatcaagaacgacctctatggtaacattgcgctcagtggtggttcgactatgttcccgggtatcgctgatcgtatgagcaaggagatcactgtccttgcaccaagcagcatgaagatcaaggtcgttgcaaccgctgat

SEQ ID NO: 98105 - DNA, 508 bp, Zea mays
  unsure (1)..(508): unsure at all n locations
atggnttccatgcattaagtatactctaccggttcggatttgcaggcccggctcgagcgtcccatcccacagaatgctccacactctagttaggctaaagaagggatgtctgctgtcttcggagagattagttcaaaacctgtgactgcagggttgcgaaaggttaccgatgacatgaagtctaaaaaccgcgctgatagaagcggtgttgtcagcagcactgctcctgctcctgctgcagctcctgaaaagacttcccgtgcagggtccttctctttcaaatctggaccccctaaactggaacttcagatgggacgcaaatgggtggctgagaatcaggttggcaagaagacccttgctattgatgattgtgattccagacaatctgtctatgtgtatggatgcaaggattctgtccttcaagtaaacggcaaggttaacaatatcactggtgacaaatgcactaaagttggaaatngattccaaggatgtggagcagcttttgaat

SEQ ID NO: 98106 - DNA, 501 bp, Zea mays
  unsure (1)..(501): unsure at all n locations
agatgtgtgatacgcggttggaggagagctacactccctnnggttcggaattcccggctcgacccacgcgtccggggctttagcgatggtcctgttcatggttggcgccgcgctgctcgccggggctgccggcgccggcgcgcagcagggcgtgtggagcatcatcacccggcccatgttccagagcatgctgagccaccgcggcgacagcgggtgccagggcgccttctacacctacgacgccttcatcgaggccgccagcaagttccccggcttcggcaccaccggcgacgagcagacgcgcaggcgggagctcgccgccttcttcggccagacgtcccacgaaaccaccggtggatgggcgactgctccggatggaccgtttgcctggggatactgcncggggggggggtgaaggaacagaaacagacggacccaccctactatggacgaggacccatacagctaactcataagtacaactacaggctcgccgggcaa

SEQ ID NO: 98107 - DNA, 501 bp, Zea mays
  unsure (1)..(501): unsure at all n locations
gatgctggtatgtcgtgagggataagtatcactcgtactcggttcggaattcccggctcgacccacgcgtccgcccacgcgtccgcggacgcgtgggctttagcgatggtcctgttcatggctggcgccgggctgctcgccggggctgccggcgccggcgcgcagcagggcgtgtggagcatcatcacccggcccatgttccagagcatgctgagccaccgcggcgacagcgggtgccagggcgccttctacacctacgacgccttcatcgaggccgccagcaagttccccggcttcggcaccaccggcgacgagcagacgcgcaggcgggagctcgccgccttcttcggccagacgtcccacgaaaccaccggtggatgggcgactgctccggatggacccgttttntttttgcctggggatactgccgggtgaaggaacagaaacagacggacccaccctactatggacgaggacccatacagctaactcataagtaca

SEQ ID NO: 98108 - DNA, 513 bp, Zea mays
  unsure (1)..(513): unsure at all n locations
agagctgttgtgccccagctccncgangtatcgctcgtactcggtctcggaattcccggctcgacccacgcgtccgcccacgcgtccggggttggcttttccttcccctccggttcgggttcgggttcgtgaggttctccggggttcggtttcgtgggtgagcggatcgagatggcggcgtcggatgttgagtaccgctgcttcgtcggcggcctcgcctgggccacggacgaccactccctccacaacgccttcagcacctacggcgaggtcctcgagtccaagatcatcctcgatcgggagacgcagaggtcccgcggcttcggcttcgtcaccttctccacggaggaggcgatgcggaacgccatcgagggcatgaacggcaaggagctggacggccgcaacatcaccgtcaacgaggcccagtcccgcggccgccgtggatgcggccgctgcagctggtacggtggtggccctggaggctgctgctaccgcngttgccggcgccgtgan

SEQ ID NO: 98109 - DNA, 503 bp, Zea mays
  unsure (1)..(503): unsure at all n locations
tagatggtgagcatcgatagatagtacgcatnactgtactggttcggaatacccggctcgacccacgcgtccggtgctgcccattctacaaatccgtttgtatgatgcgcaatattattcacttcagcacgttggcaaatcaggctgtggagcgggcagctggtactgatggccaaaagataacatacggtgtcataaaacaccgtttgggcgatctattttatcgcctagtatctcaaaagttcgaggatcctgccgaaggtgaagaagctttggtcggcaaatttaagaaactgtatgatgacctcaccactggtttccgcaatctcgaagacgaggcacggtgaactagtgtagattctgtgtaaacaaggactgccaaatgttttataagatacataanaaattttttttgtagattgagatcatctgtaagaattattcccaccgttgcaccatctcttcgccaccactgttttagtcatcggtgcctgatgggcacn

SEQ ID NO: 98110 - DNA, 512 bp, Zea mays
  unsure (1)..(512): unsure at all n locations
tatgtgtgnntttggatcttgtcgtnctngtcnttcatctcggtccggaatacctcgcgcgaccctcgcgtgcagggacgcatacgaccatacattttaatatggtctgaaattacaggtcttagtgccgggtttgtctgaccgtgaggcggaaaatataactctctacgaggcctcagccgtcgtctacggacttcctaacgtcgacgtctgccgccacgtcccggttcgggaaatcttaacccgagctccctttccggtgacacgcgtgatcacgctatctgcctagattcccccgtcccttaagatcggctgacccatgtgcaagatctcgtctcattgaacctatatcctattcggcagttaaagtctcattagatatttgcttcttccaccaaaatctgacttacgggatcaacgtcggttctagaaccccggtttttattggagtcccctctagtagaaccctccttaccttaaggtttcatactatggaagaactcatctttctt

SEQ ID NO: 98111 - DNA, 499 bp, Zea mays
  unsure (1)..(499): unsure at all n locations
ngtatgtctcctcagatatgtacgtatgactcgtaccggttcggaattcccggctcgacccacgcgtccgcccacgcgtccgcccacgcgtccgcttctttgttaaggggatatagtgctcctgtccggctagattctgatctgagtgagggtgacctatttttcttgcttgccagtgactcggatgaatttaacagatgggaagctggccaagttttggcacgtaagttgatgctcagtctcgtagctgatttccagcaacagaaaacactggttctaaatccgaaatttgttgatgggattagatcaattctgcgcaacacaagcttggataaggaattcattgcgaaagcaataactttgcctggtcaaggggagattatggatatgatggaagttttgggnnccccagatcctgatgcagttcatgctgtccgtaactttattaagaaggagcttgccgtgcaacttaaagatgatcttcttgcggctgtgaaaa

SEQ ID NO: 98112 - DNA, 503 bp, Zea mays
  unsure (1)..(503): unsure at all n locations
gtgttgtgcaatcgtactcgaccgtnacgagtcaggttcggtattcccgggtcgacccacgcgtccgcccacgcgtccgcccacgcgtccgcgtcgtccctgcagccgcaagaaagctcttcttgcggggcacggccgcgtccaccatgaacgaggcatcggcgagctcgccggacgccgaggagaagaagacgacgactgtcttcgtggccggctcgacggggcgcaccggcaagctcgttgtggagaagctgctggctaagggattcggcgtcgtcgccggtacgacggacgtgagcagggcccgcggcagcctggcccaggaccccaaccttcagctcgtcaggggttacgttacggagggagtcgacaagctggtggaagccgtgcgcggcgtcgacgctgtcgtctgcgcgacgggattccggcggcccttgacccttttgctccgtggaagtagacaacttgggacaatgaacctgtttgagcatcctnaaggttgg

SEQ ID NO: 98113 - DNA, 510 bp, Zea mays
  unsure (1)..(510): unsure at all n locations
tgtagtgtgttcctaccgacatagtagcctcgtcccggtcggaattcccgggtcgacccacgcgtccgcggacgcgtgggcaagccgacatatgtcggctcagcctctcctacctcacgcccctgtcactgaggtgcgccgtggagcttggcatccccacggcgatctaccgccatggcggggctgcctcagccgctgagctggtcacggcgctgtctctcccctccactaagctgccgttcctccgccgcctgctgcggctcctcgccgcgtcgggcgtgttcaccgtcgacaagcagagcacggaggaggagcggtaccgcatcagccccgtgtcctacctcctggtggacggcatccctcacgaggaccacatgaaccacaccgctctggtgctcacctgcacctcgacgcgctacatcgaggcggngatagggctggcggagtggttcaagagggacgtggtcacgttaccgttcgaggagctgcaccgggcgactttgttcacga

SEQ ID NO: 98114 - DNA, 484 bp, Zea mays
ccctcggtgagcgtactcggttcggaattcccgggtcgacccacgcgtccgcggacgcgtgggcttactggttctgttgctatggttgacggatgtatataggatatgtgccttttgacgcgtgtaagcacaaacgtttagacagaccgagagcagcagccagtgaacctgttatggttttgcagttgttcagtacggcagaatgttgttaaaccgtagctcagagatgtattaccagtggcgctaagctgtactgttacggtgtataatgcggatacaaataaacaatctagcgggtcattaaagcctgaactcagataacatgttcttagcaaaagcaagctgcacggtcagcgatagcggtacggacctaatttataatcggaaacaaggtggctggctctctaaaggatcacaggttacggaacggatgcatggcacgttgaaggtcttctataggggtacctaaaaatccttcagtggt

SEQ ID NO: 98115 - DNA, 511 bp, Zea mays
  unsure (1)..(511): unsure at all n locations
tatggtcactaagacatagtcgncatcgtcncggttcggaattcccgggtcgacccacgcgtccgaaaggaagttaattctgtaaaccagattcttatatattgctatcgaaaaggttaaagagcctgatagacaacctaatattcttgcggaatatatagctttccaattaaaaaatagagtttcattccgaaaagcaatgaaaaaagctattgaattaactaaaaaagcggatataaagggaataaaaatccaaattgcgggtcgtctagcaggaaaagaaattgcacgtgccgaatgcatcaaaaagggtagactacccctccaaacaattcgcgctaaaattgattattgctgctatccaattcgaactatctatggagtattaggtgtcaaaatttggatattcgtagaagaagaataactaaccatgtcttcccattccgcccagtgatagaataaaaaagacaagaaccttgttttttcaaaaatcccctaaaaaaaaaaaaag

SEQ ID NO: 98116 - DNA, 504 bp, Zea mays
  unsure (1)..(504): unsure at all n locations
ngtaatttgtccactagaaatagtatgcacgactccgntcggttttcccggctcgacccacgcgtccgcgcacgcgtccgtatttatgtaaaaactgcctgtcaaaatgattaattggaattccagttagtcattgaagaaatgaaaaagggattaaagaaaataaaaaatccaagtcttaaatgaaagggtctggttggaatcataaagtgtggtagaaagaactacatatagttttttctaccacactttagattctttctattatattatcttgaatctacatagaatcgattagtagattgaaatagtagtctaattcaacttcttttttcactgcatccacttaatttcaatcaagtcaaaatcaaaaaaatcgaagataattcttcattgaaagaatccaaagagggggagaaaaataatacgagaatagactagaatagattatagtaaaagaaaaaaagtaaaaagaaaaaacctacgaatctttcatgcctaaaa

SEQ ID NO: 98117 - DNA, 507 bp, Zea mays
  unsure (1)..(507): unsure at all n locations
ngaagtgtgtccatgagcagaggagtaggtacgctcggaccggtctcggaattcccggctcgagcgacgcgtcacccgacgcgtgggcggacgcgtttgccttcgcgtgggtccgcatccccaaatgaagcgccgcgcgcaaggcagcaaacgcgccgcgcaccggaaggccccggggagctgcacgaggtggccccattgcggcatggctgctacggccgacgccgctggcgtcgagttcccgctcattggcgttgccgtggccacgctcatcgtgacggtccttgtcgcggccgtgatgcgccggcgacgacgtccctggcaccaggcgcctctggtggaggggaaacccgcaccagaggcaggctgcgcggtcagcgatggcgggacggacgtcatcatcgtcggcgccggggtagctggatctgcgctggcatacacgctncgaaaggatggccgtcnggtgcatgtcatcgaaagggatctgacagaacctgacagaattgn

SEQ ID NO: 98118 - DNA, 515 bp, Zea mays
cggtaatgtggcctcgaattagtagtatggatctctcggtctcggaattcccgggtcgacccacgcgtccggtttcacaatttaatgaatcctccacttatttgatgggatggttaagagattacctagtgggtaaactcttcacaacttattaatggatataatccttttgggatgaatagtttatcagtatgggcttggatgttcttatttggacatcttgtttgggctacaggatttatgttcttaatttcctggcgtggatattggcaggaattaattgagactttagcatgggctcatgaacggacacctttggctaatttaattcgctggagagataagcccgtggctctttccattgtgcaagcaagattggtcggattagcccacttttccgtgggttatatattcacttatgcagctttcttgattgcctcaacatcaggcaagtttggttaatttagttatttttttttgtactggatcagaaccccagttattactcttgatgg

SEQ ID NO: 98119 - DNA, 502 bp, Zea mays
  unsure (1)..(502): unsure at all n locations
tgatgtcgtgccctcgccacttgtctgctagcctcctactcggtccggaatacccggctcgacccacgcgtccgggggacacgatcgccatggccttcacatcgaccgccgccgacgtgctgtgccggccggccgtggccgaactccgcctggcgccgtctaccggccgggcgcgcgtgtcgttccgcgcggcgccggcgccggcgcggaggtccgaggcggcacgcgcggagctgagctcggcgctggtgatcagcctgagcacgggcgtgtcgctattgatgggcacgatacgtcttcttcaacttccagcgggagaacgtggcgaagcaggtgcccgagcagaacggcaagacgcacttcgacgccggcgacgagcgcgccaaggagttcgcggcccttggattttttccaagtctaacgacccagtgggcttgaacctcgtcgacgtcctcgcctggagctcgatcggccacatagtcggctactacatnctagccag

SEQ ID NO: 98120 - DNA, 500 bp, Zea mays
  unsure (1)..(500): unsure at all n locations
ngagtgtgatccctccgattttncgtcactctcgttcggtttgcattctcggctcgacccacgcgtccgtgcctctgtacgacgccctcgtaggctcgaacaggcagaagttgcagtcctggtccgtgttcatgcctctgtacgacgccctcggagggaccatcagctccagatcgtgggggctgcagagagaggtcgaccaaggcatgaacgaccgggtgccggacttcgtgttcctggcgcacgtggtggacgtggtgtcgtcgatgcacgtgcctttcgccttccgctcctgcagctcgctgccgtgggccatgcgctcggtgctgctcccgctctggcccgtcgccttcgccttcatgctccttcagtggttcttcttcaagaccttcaacgtcagcttctactttctncgcggccggcttcaacagaactggagcgtcccgagatatggctttcaatacctcattccttcgccaaataagggcattaccgccaaa

SEQ ID NO: 98121 - DNA, 511 bp, Zea mays
tatgtgtcatgaggttgggaggggtagtgtcgtaccggtctcggaattcccgggtcgacccacgcgtccgcccacgcgtccggtcctccttgtgagtctgagctgaagaggaggaggaggaggaggagaagcagcagcgcagccggaggagggagagcgaagatgcgccgcgtcgcgctgttgctcgtcgccgccgtgtgcgcgctggcggcgccggctgccgcggtcgtcactgacggtcttctcccgaacggcaacttcgaggatggcccgcccaagtcggcgctggtgaacggcacggtggtgtcgggcgcccacgccatcccgcggtgggagacgtccggcttcgtggagtacatcgagtcggggcacaagcagggggacatgctgctggtggtgcccgcaggcgcgcacgcggtgcggctgggcaacgaggcgtcgatccggcagcgcctggccgtggcgcgcggcggctactacgccattacggtcaacgccgcgcggaccttcc

SEQ ID NO: 98122 - DNA, 496 bp, Zea mays
  unsure (1)..(496): unsure at all n locations
atgtgtcatcgctaggagaaagtagtcctctaccggttcggaattcccggctcgacccacgcgtccggaacgtcgtacgagaacctttctcccttctccacctttctccttttcttgccacgggggaacaccttcgccggcgagagcatggcgatggcgtaccgtgtcctggaggtcaccctggtgtcggcaaatgacctcaagaaagtgtcgctcttctcccggactcgcatctacgccgtggcttccatctccggattcgacctccgcatcccttcccacagcacccaagcagaccacagcaacggctgcaacccctgctggaacgccgtggtacacttccccatcccggctgccgctgacacccgcggcctcgcactccacgtgaggctccgncggcccccccccagcgtctatacctgggcgatcgcgacatcggcgaggtgtttgtgcccatcgacgacctcctggccggcgccgacaagggtggcgatcc

SEQ ID NO: 98123 - DNA, 525 bp, Zea mays
  unsure (1)..(525): unsure at all n locations
agtgtagttggtagnnncccgatccnncgcnacgntacattggtccagcatacctggcgctagccacgcgtgcaggccccggtggccaccttgggttccttagatctggacccagagcgcgatcagtaaggtcttataggagtatgggagcgtatgacgccccgtcgcagaagaagaagggcttcgtgctgccgaggcctaagatgtccaacgctgacctgggcaggatcatcaactctgacgaggtgcagtctgtggtgaagccactcaacaaggaggtgaagcgcacggagaagaggaagaacccactcaagaacatggctgctgtgctcaaactcaacccctacctcggcactgcccggaagatggacacccttgctgaggctgctcgtgtgaaagccatgaaagcaaaagctcgacttcaagaggaccaagcttacttccggacactgccaatgctaaaagcttgctggccaaggcatggtacaaaaaccatgggatccgtacctgagactacaccgatcg

SEQ ID NO: 98124 - DNA, 510 bp, Zea mays
  unsure (1)..(510): unsure at all n locations
cgcggtttcatcgacaattatagtagtcctcgtcctggttcggaattcccggctcgacccacgcgtccggcccccggtggccaccttgggctctttttgatctggacccagagcgcgttcaataagctcgaggaggtgtatgggagctatgacgccccgtcgcagaagaagaagggcttcgtgctgccgaggcctaagatgtccaacgctgacctgggcaggatcatcaactctgacgaggtgcagtctgtggtgaagccactcaacaaggaggtgaagcgcagggagaagaggaagaacccactcaagaacatggctgctgtgctcaaactcaacccctacctcggcactgcccggaagatggccacccttgctgaggctgctcgtgtgaaggccaggaaggcgaagctcgactccaagaggaccaagcttaccccggagacttgccaggttaaggcttgctggcaggcatggtacaagaccatggtcntcgacagcgactacaccgaa

SEQ ID NO: 98125 - DNA, 664 bp, Zea mays
  unsure (1)..(664): unsure at all n locations
gtggtgnccctcagctccactacagnattgcatcgtaccggtctggaattacccgggctcgactccacgtcgtctcgtcggacgccccgtggggtnnctcatgtctctgcttcgtcgtctctnnngtggagctacctannggtgacncggtgcgcggactcgttccnttnacgccactgtggccgtcganntccagccctcnnngtcggcttttctnnntcgcaccntncgtcactncgtgcgggtcangnncacctcaccaggggttcatttaaatgggnncagagaccggggtgttctaaccccnnctcttnntggaaggggtatgnnaagcatgggtgaaggggcagagaacgnnngagtcattcttcnnaccaagccnnncttccttggggatgtcttgcaagcccaaatcttgccttggtccttggataaattttggagcctgctattggccaattgtaaaagaaatggatatcaaggcggcaaatattcaccaagggcttggagaaacaaagtatttccttcaagatcccatcaaaagtatgtgacaccttgtacaagcatgggttcaaggatgaatngtttcaaaacaaggacccgcgaaaagggttccctcaaaagcttgcacaanatggggtcttcttgtggcttcaacgagggc

SEQ ID NO: 98126 - DNA, 521 bp, Zea mays
  unsure (1)..(521): unsure at all n locations
atgagtggttgnccaaactgacgcagcgattcattggtctggaatacccgggccgacccacgcgtccggtacggcgcgggcatcgtccccggtgtcatcgtcatccactcccccaggatcccgtcgggtgaggatatcgccgaccgcagcgacaagatgctggcggtgctggacaccaacatcctctgggtgaaccccgactgcggcctcaagacccgcaagtacacggaggtcaagcccgccctgaccaacatggtctccgccgctaagctcatccgcacccagctcgccagcgccaagtgagcaccttttttttgcctttttcgtttccgaggagggcgtcgtcgatgccaatttgtttccaataaacagggctgtgcccgccgttctgttgtactccgtctgtggttaggttagtagttatcttgatctcgccctcacgcggtacctgttttactactctctgattggtggtttctgaggcaagttgcccgtgtacttgtatcgtaaaaaccgagtgg

SEQ ID NO: 98127 - DNA, 524 bp, Zea mays
  unsure (1)..(524): unsure at all n locations
atagagatgtttgcccagcctcancgacgcagtcatctaccgttctggaattcccgggtcgacccacgcgtccgcccacgcgtccgagcgaacgaagcgacttttaccctgaatagggggatatcggagttcggggtgatggccgcggacacggagcctctcgagatcctgctccacctccccttgttagccgaggataagaacgtcccatatgtatttgttccatcgaaacaagctcttggccgtgcttgtggtgtgacaagacccgtcattgcttgctcagtgaccagcaatgagggtagccagctgaaacaacagatacagggtctcaaggactcgattgagaagcttctcatctgatttacctaagatctttcagtgtgatgggccttggcgacacatttttcagaggcttggactggtgatggtgtcttgtttacattacgctttccaaactatatctgaacactgctaagtcaatcatatttgaattgtgcttcactttatatctgtgattgtcatgg

SEQ ID NO: 98128 - DNA, 515 bp, Zea mays
  unsure (1)..(515): unsure at all n locations
tgagctgttctacgcaacgaggaagtatcctcctcctgncttgaattcccggctcgacccacgcgtccgcccacgcgtccgcatgacctactgctgctttaacttcggtgatgactagggtgcggggggcattgtcaaagccttcgcacacataaaatgcactgtgctggcccctgccaagatcattgccaccaaaccggacgatggagcgaagattaactatgtcgaaggtcacatgttcagtttcattccacctgctcaaactgtcgtgctaaagcttgtgctgcaacacctgaccgatgaggactgcgtcaagctcctggctcaatgcctgaaggcgattccttcacggaaggacggctggtaaagtataatcggggatattatgattgaccactctgggcttatgctggatacctaacctctgatggacatccggatgatgaccatgacaaaagacgggcatatgatgaacaagattggagcgagctcctcaccaaagcacggttcagcga

SEQ ID NO: 98129 - DNA, 519 bp, Zea mays
  unsure (1)..(519): unsure at all n locations
tgagtgtctgcccagtccgacgatgcactcncactccttgttttaccgggccgaccgacgcgtccgcccacgcgtccgcccacgcgtccggcctgtgctcgcctcagctcctttcttccccgcccgttggcttttgcttggttgcatcgggccggtcgagccggagaggaaaagctagctagcagctaccagctctcggccggcggtggtagtctgcctgcagctggggttagctgcaagggttgggagctagccatggggaggggtcgggtggagctgaagcggatcgagaacaagatcaaccgccaggtcaccttcgccaagcgccgcaacggcctgctcaagaaggcgtacgagctctccgtgctctgcgacgccgaagtcgcgctcatcatcttctccaaccgcggcaagctctacgagttctgcagcggacagagcattaccaaaacacttgagaggtatgaaaaatacagttatggaggaccagatactgctgtacagaacatggagaacgtn

SEQ ID NO: 98130 - DNA, 516 bp, Zea mays
  unsure (1)..(516): unsure at all n locations
caggtctgnaaagtccgcagntgcaatctcgtgtcctgaataaccgggccgacccacgcgtccgcccacgcgtccggcagcctgagcacccgattagactccgtgcgaccgaagccagagccgggggaaccgaacggaagcgagacccccggcggctagcgagatggacggcggcgccggcgaggaggggaagcaggagcggcacctggtgctggcccacaagctcttccttctatcccacccctccgttgatgacctctccaaggtcgccctccgcgccgaagtcctcgacaccgtgaaatccgatgatatggcgacgctgtttgagtcgctggtcgccgcgggtgtgctggagggggacgccgcgctgctggccgagatgcgtgggaggattgacgaggagatccgcaagctagatgagaaaattgctgatgcggaggagaacttgggtgagagcgaagtccgtgaagcacatcttgccaaatctttgtactttataagggtcggtgagaagga

SEQ ID NO: 98131 - DNA, 521 bp, Zea mays
  unsure (1)..(521): unsure at all n locations
tatggtggncccagcctcagcgangcancgacgtaccggtctggaattcccgggtcgacccacgcgtccgcacagagacatcagagagcggtccttcatgtgagtctgagctgaagaggaggaggagggggaggagaagcagcagcgcagccggaggagggagagcgaagatgcgccgcgtcgcgctgttgctcgtcgccgccgtgtgcgcgctggcggcgccggctgccgcggtcgtcactgacggtcttctcccgaacggcaacttcgaggatggcccgcccaagtcggcgctggtgaacggcacggtggtgtcgggcgcccacgccatcccgcggtgggagacgtccggcttcgtggagtacatcgagtcggggcacaagcagggggacatgctgctggtggtgccgcatggcgcgcacgcggtgcggctgggcaacgaggcgtcgatccggcagcgcctggccgtggcgcgcggcgcctactacgccatcacgttcagcgcggcgcggacgtgcgct

SEQ ID NO: 98132 - DNA, 373 bp, Zea mays
ttatctcctcactcttttcgctgatacgctcgcatctcgcgtatcaaactttcaatttttaaacctaaagaagatacgaagttttaagactgggagccaatgcaggcttcgagtacatcatccaactttaaatgttcaagtgcttatcacaaacatgaaaggctgtgatagagaaatgttgcttcactgaccaaacatcatattcatgataaatgatctatgtgtcaagattaggagggaactgtgctatggagatcacgacttatgactctaaccaataatgatgatgagctagaaaggtaaaatatcatgcacaatgactgatgtctggacccgcctcgcttctgacgttagatggaaattgaattcgtca

SEQ ID NO: 98133 - DNA, 518 bp, Zea mays
  unsure (1)..(518): unsure at all n locations
tggcatggtatgtttcagtcncatgaatatcgactgttcggtcctgaattaccgggtcgacccacgcgttcggcattccctcacgctaggattatgcttcactaacctgctagtgcttattatcggtcaagggcaccataatttttactagaagtggaagagttacacaaagttcgcgaaatgatcacaagggtttatgcactaagaacaggcaagcctttttgggttgtatccgaagacatggaaagggatgtttttatgtcagcagactaagccaaagcttatggacttgtcgatattgtaggggatgaaatgattgacgagcactgcgatactgatccagtgtggtttctagaaatgtttaaggattggtagtgggttgatttcttggtaatttatcttaaacctaaattccggttttatgctatagaaaatagaaatactttatgattaataatcattagggtaagatcgatctaaaccaaccattttatatattcatacgatattgccactgt

SEQ ID NO: 98134 - DNA, 521 bp, Zea mays
  unsure (1)..(521): unsure at all n locations
agatttatgtttgtttctcggaaaagagtagtaccgttctggaatatcccggccgaactcgtccgcttatgaatcctgaactctttcttcgggttgtaattaagcctcctaagggtgttctacgctacggtcctacaggaactgggaagaccctattggcaagggctatcgcaagtaacatcgatgccaactttttgaagattgtttcaagtgctattatcgacaaatacattggagaaagtgctcgtttgattagagaaatgtttggctatgcacgtgaccaccaaccatgcatcatcttcatggatgaaattgatgctattggtggtcgaagatttagtgagggaactagtgctgatcgtgagattcagcggacgttgatggagctccttaaccaattagatggatttgatgagctaggaaaggtaaaaatgatcatggccacaaatcgacctgatgttctggacccggcgcttctgcgntcctgacgtttagatagggaagattgaaattccgctacc

SEQ ID NO: 98135 - DNA, 524 bp, Zea mays
  unsure (1)..(524): unsure at all n locations
gatggggcttgtgaatttagagagatnatgtccgtnctggaacaaggtcgccccacgcgtccgcccacgcgtccgagacaagtggtttccaatgcttagtgtgtgtactagcaaccagctagctcgggcggcagcaggcagccatcatgtcggaggagaagcaccaccacttcttcaaccaccacaagaaggacgaggagcagcccgccggcgagtacgggtactccgagaccgaggtggtcaccgtcaccggcgagggcgagtacgagaggtacaagaaggaggagaaggagcacaagcacaagcagcacctcggcgaggccggcgccatcgccgncggcgccttcgcactctacgagaagcacgaggcgaagaaggaccccgagcacgcgcacaggcacaagatcacggangaggtcgctgccgcggcagccgtcggcgccggcggctacgtattccacgagcaccacgagaagaagaaggaccacaaggacgccgangaggccaacggcaagaagaagcac

SEQ ID NO: 98136 - DNA, 516 bp, Zea mays
  unsure (1)..(516): unsure at all n locations
tatgtagagtatcttagagggagaagtccccttcttgagtatccgggccgacccacgcgtccgcccacgcgtccgcggactcgtgggcgaaattttatgcagaaccctcagctgcaggagggggaattccagaactttccgacttcttacctacgctgtgctgctcatcgtgttgcacaacattatggcttagagactatagtggcagatagtttagtagaaggctcagttagcaggatcgttgcaagaaaaacaccagagagcaggtgtcctgcaatttcattagcagaagttcctagcaaacaagcaagaaatgatcatgaagcagcagagaagcttaagtttgtcatttatcaaaggcccaaagcattccaaaatggaagcactgatttgggaaacaagaatggtgcaccaaaaactgttgaagagagaatagaggaatataataaagcacgagcacgcatcttcaatggttcntgttctgcagattctgatgctgcaagtgttttgggaacc

SEQ ID NO: 98137 - DNA, 567 bp, Zea mays
  unsure (1)..(567): unsure at all n locations
atttaatgatgatagtgatggttgagcctacgcacttatttgatagtcctcctccggtcttgaattcccgggtcgacccacgcgtccgccatttccccatctcccagatccaattctctagttcttcctcctctgccgccatggcgctggctgtggagaagacctcgtctggacgggagtacaaggtcaaggatctctcgcaggcggacttcggtcgcctcgagattgagctggccgaggtcgaaatgcccggcctcatggcgtgccgcgccgagttcggcccgtccaagcccttcgccggcgctaggatctcggggtctcttcacatgaccatccagaccgtcgtcctcatcgagaccctcaccgcgctcggcgccgaggtccgctggtgctcctgcaacatcttctccacgcaggaccacgccgtcggcgtcatcgcgcgcgactcggccgncgtgttcgcctggaaaggggagaccctagaggagtactggtggtgcaccgagcgctggctcgactggggccaaggcgggcggccccaacctcatcgtcggcgacgggcgggac

SEQ ID NO: 98138 - DNA, 545 bp, Zea mays
gttattttgggtgtggccatgcagtatagtatgctgctaccggtctggaattcccgggtcgacccacgcgtccgcggacgcgtggggtgaaccagaaggcgctttttcctggcgactctgagatcgatgagctgtggaagattttcagaattttgggcactccaactaaagaaacatggccaggcgttacttcgttgcccgattacaagtcaactttcccaaagtggccacctgtggatcttgcaacggtggtcccgacactcgaaccggcgggaatcgatctcctatctaagatgctgcgtctagatcccagcaagaggatcaccgcccgcgccgacctcgagcacgactacttcagggacctcgagcacgcctagcaggatatggatggatggatgaaccatttcccctgccctgctccctctgtaaattacggtagcagccgcgatgcttgtggccggcgagtacccgtttgggcggccgctctagaggatccaagcttacgtacgcgtgcatgcgacgtcatagctcgtctatagtgtcag

SEQ ID NO: 98139 - DNA, 486 bp, Zea mays
  unsure (1)..(486): unsure at all n locations
gtgttccatcagacaagatagcacacttcctggtataccgacggacgacgcgtccgcggacgcgtggggtgaaccagaaggctctttttcctggcgactctgagatcgatgaggtggggaagattttcagaattgtgggcactccaactaaagaaacatggccaggcgttacttcgttgcccgattacaagtcaactttcccaaagtggccacctgtggatcttgcaacggtggtcccgacactcgaaccggcgggaatcgatctcctatctaagatgctgcgtctagatcccagcaagaggatcaccgtccgcgccgtcctcgagcacgactacttcagggacctcgagcacgcctagcaggatatggatggatggatgaaccattttttccngcccctcccctgctccctctgtaaattacggtagcagccgcgatgcttggggccggcgagtacccgtttgggcggacgctctagaggatcca

SEQ ID NO: 98140 - DNA, 554 bp, Zea mays
tatttgatgcgctgacaatcgcacgacgaaagctatcctgctccggtcttgaattcccgggtcgacccacgcgtccgcccacgcgtccgcccacgcgtccgcggactcttgggcgatcagctgaatggagtgcatgagaggggagttcatgatctgtggagagtgctgaaggatgagatttgcctgccactgatgatatcattgtgccaactgaacggtctgcgcttgccgccttgcttgatggctttgcctgctgatctcaagactaaggtattggggtttttacctggggttgatcttgcaaaggttgagtgcacatgcaaggaaatgatgaatcttgcatcagatgatagtatctggaagaagcttgtatccaagtttgaaaattatggcgagggctctaagctggcaggcaagaatgcaaaggccatatttgtagaagcttggcaggccaataagagacggcagaagaggcccaatccaaccttttggaactatggcttgggaaacagtccttataagccgccacttaagctgccattgattggtgggga

SEQ ID NO: 98141 - DNA, 568 bp, Zea mays
  unsure (1)..(568): unsure at all n locations
ttgtattgttatgcatatttatatttgtgatgtgattgatttcagtcatgactgcatactcttccggnttctgattcccgggtcgacccacgcgtccgctcgacaacgaggccatctatgacatctgttttcgctccctcgacattgagaggcccaactgcgccaacctgaatcgccttgtgtctcatgtgatctcatctctgactgcttccctgaggttcgatggtgccctcaatgtggatgtgaacgagttccagaccaacctggttccttacccgaggatccacttcatgctctcctcctacgcaccggtgatctcttctgcgaaggccttccacgagcagctgtctgtggcggagatcaccagcagcgcgttcgagccggcttccatgatggtcaagtgcgacccacggcacggcatgtacatggcttgctgcctgatgtaccgcggcgacgtggtgcccaaggacgtgaacgccgcggtggccaccatcaagacgaagcgcaccatccagttcgtggactggtgcccgacgtggtcaagtgctgcatcaactaccaggcgcca

SEQ ID NO: 98142 - DNA, 390 bp, Zea mays
gtgtttccattcgagtttatcctcgttactcggacgcactctccgtggaaagccattcacaatcttgatgacaagcaagcatttaagctggtataagaccggcatgacagctcgagaaaaccccctaactcgccacaccgtgtaagacgtggggcaaggtctcgaatgactggcgtaaatgcacgtagcgggaatcgtttgaaagtgaaagtcgtcaaagtgctgaagcctcaaaccatcacctcatcagacatagaagggaattccgtgtaggagaaacccagatctacaagaacccaaacgaagcatatgttctttcttggttactacgacgcttggccgaaccatgacgcgacactatagatcccagtaactcatccttaaagacat

SEQ ID NO: 98143 - DNA, 556 bp, Zea mays
  unsure (1)..(556): unsure at all n locations
tgattaagtgtgntgccccatcgaatcaatagtatcctcanccccctggtatntacgggtcgacccacgcgtccgcgggcgagcgctgaacctgaacctggtgggttatccggacctggtggcgagagaccccgtgggggccttcaagacggccatctggttctggatgacgccgcagtcgcccaagccctcgtgccacgccgtgatgaccggcgactggaggccctccgccaccgaccgcgccgcggggaggctccccggatacggcctgaccacgaacatcatcaacggtggtctagagtgcggcgaggaccgctccaccgacggcgccaaagccgccaaggaccgggtcggctactacaagaggtactgcggtatgctcggagtggggtacggggacaacatggcatgcgggagccagaagccttacggaggatgatgacactagtagctgatctatggttgctgcaatgcaagccttcacgtgtgtttgcctctctacctaaagaataaatcaagctagcagcaaacctaccttcggcgtgtgtctacttgn

SEQ ID NO: 98144 - DNA, 554 bp, Zea mays
atgaggtggtgctggcctcggctatatagcatgcttcaccggtcctgaattcccgggtcgacccacgcgtccgcacaaggtctacttcgacatcgagatcgacttgtaagcccgcaggccggattgtcatggggctgtttgggaagactgttcctaagacggcagagaacttccgagctctttgcacaggagagaaaggggttggcaagagtggcaaagccctccactacaagggaagtaagttccacagaatcatccccagcttcatgctccaaggaggtgacttcactctcggggactggaggggtggtgaatctatctacggcttgaagtttgcggatgagaacttcaagatcaagcacactggtccaggccttctgtccatggccaatgccgggagagatacaaacggatcccagtttttcatcaccacagtgacaacaagttggttggacgggaagcatgtggtgtttggcaaggtgttgtctggaatggatgttgtgtacaaggtcgaagcttaaagccggcagaatggagagccggagagcaaggtt

SEQ ID NO: 98145 - DNA, 539 bp, Zea mays
gttattaagattggcctcgatgttagtactctcccccctttgaatccgggtcgacccacgcgtccgccgatgccccaattcctccttcggatctcgttttcagcgcagcgcacgtgtgaaggaaggggggcgcggaggaagatggggctcgcgttcgggaagctcttcagccggctcttcgccaagaaggagatgcggatcctcatggtcggcctcgacgccgccggtaaaaccaccatcctctacaagctcaagctcggcgagatcgtcaccaccatccccaccatcggtttcaatgttgaaactgttgagtacaagaacattagcttcactgtctgggatgtcgggggtcaggacaagatcagacctctttggaggcattacttccagaacacccagggtcttattcttgttgtggacagcaatgaccgtgaccgtgttgttgaagccagagatgagctccacaggatgctgaacgaggatgagctacgtgatgctgtgctgcttgtttttgccaacaagcaagatcttcccaatgg

SEQ ID NO: 98146 - DNA, 551 bp, Zea mays
  unsure (1)..(551): unsure at all n locations
atttgaagattgttggnnccgaatcnncgnatgtcttgccctgaattcccggtcgacccacgcgtccgctttcgcccgtcctccctcgccttcgccttctccttcgccggcaggagatttccaccaccacggggggaccgtccagaccctccggcgctatcacgctatggcccatactgttgtgctcaaggttggcatgtccattgagggctgtattggagctgtcaagcgtgtcctgggcaagatggaaggcgttgagtcctacgacgtagacatcatagaacaaaaggtcacctgtaatggcaatgttacacctgacgccgtcctgcaaactgtttccaagactggcaagaagacttcgttctgggaggctgacgccgtgacaagtgaatccgtcacacctgccggtgccaacttctgacaagttcgatgatcacgaagtgccctgcaaggcagctaataaaaaaatgtgaatgtatctagcttggaactgttacaaataatttcaaactgctaactcggtctggacattttacatttgctattctttg

SEQ ID NO: 98147 - DNA, 502 bp, Zea mays
tagtgttgctccacgcccctggaggtaggctactactggttcggaattcccggctcgacccacgcgtccgcttgatcagggagacacagtgctcggtctgcctagcagaatacgaaccgtacgagaggctgcaaaagatacctccctgtgggcataccttccacatcaactgcatcgaccactggctctccacaaacaccacctgcccactctgccgagtatcgctccttcccgcccccaaggcaaccagcaccggactggatctggaagcacagactgtggtagaagaggagtccccgaacgcacatcatcgccaggaggagggactagttgatgccaacacaccacaggaaggtgaggcggccgtaggtgacggagcaagtagcgtccagattgaagaacccccccggggcaccacgatgcggccgagccactggtagtgacggtggtcgctgtcgctgcacctcacgctgacgctgaaggttcaccgagtacagcatgg

SEQ ID NO: 98148 - DNA, 559 bp, Zea mays
atctgtaatttatatatttttagattggtattgaataagttatcctccccggtcttgaattcccgggtcgacccacgcgtccgttcatgttatcagtttacttaactgacattttccacaacaaatctcttgattcggaattaggggctcatgttccgtctgatgaatcgattttctcttttttttacacttctgtatctcactctatcttgttttttattattatctaaaataaccgatgaattatgaattttccataacttaaacttacgtaagtgctttaccaacatatgtagtgtactaaaaaaaatggaattgaaccccttcatgcttactataactagttatttcggttttctactggctgctttaactataaccccagctctatttattagcttgaacaagatacgtcttatttgaaatgaattgaatagaataatctttcttttggattcttggtattctagactcttttccacactaattaccaattcttttcttggtcattgagattcgtgggtagtttagactattatttagagatagatcgtacctt

SEQ ID NO: 98149 - DNA, 542 bp, Zea mays
  unsure (1)..(542): unsure at all n locations
attttgagatgtggccatgctagtagtatctgcaccggtctcgaattcccgggtcgacccacgcgtccgcccacgcgtccgattggacagtcgtcaagtgtcatgacacaggttccactcctctatatccggggtgcattcataccagcaacgatgatcgctgttctctactacttcgatcacagcgttgcgtctcagcttgctcagcagaaagagttcaacttgaggaagcctccatccttccactacgatttgcttctcttaggtttcctgacgttaatgtgtggccttattggtatccctccatcaaatggtgtcattccacaatcacccatgcatacgaagagtttggctactctcaagcaccagatccttcgtaaccggctagtagccaccgcacggaagggcatgagccagaatgcaagcctgagccaactgtatggcagcatgcangatgcttatcagcagatgcagacaccactggtttatcagcaacagtctgtcagaagaggcttaaatgagctcaaggactcaacagtcca

SEQ ID NO: 98150 - DNA, 571 bp, Zea mays
  unsure (1)..(571): unsure at all n locations
tttaaatatgattttttttatttatattgattggtactgtatatagtaagttancccggtcttgaatcccgggtcgacctacgcgtccgcccaggcgtacgcctcctacacctaagctttttacgcctacgtacactacaagccctaaggggggacctaccaagcctcccacgcgccaaccgaccccgccaacgtacacccctgcagcaaagcctccgacacccaagccgtccccggctacgtacaccctttctaccaagcctacgacgcccgacccgaccccgcctacagccactccaagccccaagccttccacacacccaactcccaagccgaccccaccgacgtacacgccttccccaaagccttcgacgcccaagccgaccccaccgacgaacatctattcctcatagcctcctacacccatgcctacaataccgacgtacactttcacaccttatccggcggccaccaagccatccaccttcacttccacaccgtctgtgtattatacccctagcccgttcacaccattccactagaaagcgtttcctaccattacccactgctc

SEQ ID NO: 98151 - DNA, 496 bp, Zea mays
  unsure (1)..(496): unsure at all n locations
gatgtgctagtcttgttggagggagtatccttcggtcggaattcccggctcgacccacgcgtccgcggacgcgtgggcggacgcgtgggtccttacatacagctagatagcctctgcatgccgacggacagcatggccaaggccgagctgctcctcgccctcgtggcttcgctcgtcgtgctgccattctcctccctcgccgtgtaccaggacttctgcatcgccgacctatccgccgccgccacgccgggcggctacccgtgcaagcccccgaaggacgtgaccgccgacgacttccactatggcggcctcgccacccccggcacggcgctgaaacccttcaagatctccctgggctcggccgtcgtcaccacgttccccggcctgaacgggctgtggggnnccccatctctgccgcgcggatggtgatggtcccgggcggcgtcgcgccgctgcactcccacccgggaggcaccgagctcatcttcgtcatcga

SEQ ID NO: 98152 - DNA, 546 bp, Zea mays
attattaagtggttggcctaccgaaaataggtatgctgccacgccctggaattcccgggtcgacccacgcgtccgaccggagcagcggcgctcgcgcgggcggattcttggcggacgacgattacaacgaaatcgacatgggctatgaggatgagcctgcagaacctgagattgaggaaggggccgaagaagagcttgagaacaacgaagatgcccctgatgatgtcataggtggagagggtgaagataaggaacaggaaaagaccaagcgtgagcgcaaaacaacaaaatatatgacgaagtatgaacgtgcgcgcattcttggtacacgagccttgcagataagcatgaatgctccagtcatggttgagcttgagggagaaactgaccctcttgagattgcgatgaaggagcttaaagcgcgcaagataccctttacgatcagacggtacctacctgatggaagttatgaagactggggagtagacgagctcattggggaagactcctggaaacgccaggttggtggagactgaagatgctgat

SEQ ID NO: 98153 - DNA, 579 bp, Zea mays
  unsure (1)..(579): unsure at all n locations
ttgtatgatgtgaattaaataattataagatgttaggtactgtttaatgcaattattgtatngatgtcccggttttgaattcccggctcgacccacgcgtccgcggacgcgtgcggtgaaccagaaggcgctttttcctggcgactctgagatcgatgacctgggggggattttcagaattttgggcactccaactaaagaaacatggccaggcgttacttcgttgcccgattacaagtcaactttcccaaagtggccacctgtggatcttgcaacggtggtcccgacactcgaaccggcgggaatcgatctcctatctaagatgctgcgtctagatcccagcaagaggatcaccgcccgcgccgacctcgagcacgactacttcagggacctcgagcacgcctagcatgatatggatggatggatgaaccatttaccctgccatgctccctctgtaaattacggtagcagccgagatgcttggggccggcgagtacccgtttgggcggccgctctagaggatccaagcttacgtacgcgtgcatgcgacgtcatagctcttctatagtgtcacctaaa

SEQ ID NO: 98154 - DNA, 569 bp, Zea mays
tagtaatttaattctattaaatataatttaccagatgctgatgtctccagaggagcatgctccgtcttgaattcccgggtcgacccacgcgtccgcattggtatcctacctgccagcgaacctgtttcgtcttcttgttacccacgtggcctcgccggggccgctagctccaccttcctgagctccgccccgagcgcgatgtggcgagcgacgaggcggtctccgccgttcctgcgatggctatcgtcggacgcagcctcctctaaggcgccgcggcagcgcgtagcggcgctgtgggggaacggtgactacgggcggctggggctgggttcgctggagtcgcggtggagccccacggtttgccccttcttcctcgcccgcgccggcgacccgcccgccttcctcgcctgcggcggcgcacataccctctttctcacccagaatgggcgagtgttcgctacagggctgaacgactttgggcagcttgggataggaacctctggtacacatatgctggagccctgtgaaatttctggatttcacgaaaggagtgtagaaagttcaactgg

SEQ ID NO: 98155 - DNA, 500 bp, Zea mays
  unsure (1)..(500): unsure at all n locations
agagttnaaatgtaggattgagggaagagagagtttcggaccggtattcccggctcgacccacgcgtccgcggacgcgtgggagcagctgccacagtgacatcagagagcggtcctccttgtgagtgtgagctgaagaggaggaggaggaggaggagaagcagcagcgcagccggaggagggagagcgaagatgcgccgcgtcgcgctgttgctcgtcgccgccgtgtgcgcgctggcggcgccggctgccgcggtcgtcactgacggtcttctcccgaacggcaacttcgaggatggcccgcccaagtcggcgctggtgaacggcacggtggtgtcgggcgcccacgccatcccgcggtgggagacgtccggcttcgtggagtacatcgagtcggggcacaaaagggccccagggggacatgctgctggtggtgccgcaggcgcgcacgcngtgcggctgggcaacgaggcgtcgatccggcagcgcctggccgtggcc

SEQ ID NO: 98156 - DNA, 488 bp, Zea mays
  unsure (1)..(488): unsure at all n locations
tggattagggctgtagtcngaagaccggatgcggtccgcactgccgtaccggtccggaattcccgggtcgacccacgcgtccggccgcggccaacgcggcgctgccgccgggcgcaaagcccttctccacgttccagtccgtgggggcgcacatctggcgcgccgtctcccgcgcccggggcctcggccccggcgacatcaccgtcttcgccgtcttcgccgactggcgcgcccggcttgacccggcccttccggcggcctacttcggcaacctcattcaggcggtgttcacgggcgtgcccgcggggatgctcctgggcgggccccccgagctgtccgcgggcctgctgcagaaggccatcgacgagcacgacgccgtcgcggtcaccaggaggctggaggagtacgaggcggcgcccaagctgttccactacagcgacgccggccccaactgcgtggccgtcggcagctcgccgcgctttaaggtn

SEQ ID NO: 98157 - DNA, 527 bp, Zea mays
  unsure (1)..(527): unsure at all n locations
cgtttattaggtnaatccaagggtgnccgcatgatgctcgtcgcatgacgtaccggtctcggattccccggtcgacccacgcgtncggagaaaagcagaccagacgagagacctgtcgcgtttcgtcctgctgcctggccctgctgccggtcccgttgttgctcagctctcccgtccgctgctgccctccgtgcgggtccagatcccggcaccaaccgatccggcgccctacagcatggccggggcgaaggcggcggcagccctggctcttgcgctcgtgcttgcgctcgcggtggccaactccgagggcgactccctctgcgagctgcgccggagcctgagggaccaccggcggcgttctgcagagctgggaccacacgctcgtcaacccgtgcacctggttccacgtcagctgcgaccgcgactaccgcgtcaaccgcctagatcttggcaattagaacttgtctggtcatctggtgcctgagcttgtgaaactggatcatcttcagtatctggaactgtatcag

SEQ ID NO: 98158 - DNA, 539 bp, Zea mays
  unsure (1)..(539): unsure at all n locations
agggnnntntggaggttnnnncctttgaggtcntcgtacggatccccgcaacatatcagcaacactccacggaattcccgggtcgacccacgcgtccgacacacacacagacaagtggtttccaaagccaagtttgtgtactagcaaccagctagctcgggcggcagcaggcagccatcatgtcggaggagaagcaccaccacttcttcaaccaccacaagaaggacgaggagcagcccgccggcgagtacgggtactccgagaccgaggtggtcaccgccaccggcgagggcgagtacgagaggtacaagaaggaggagaaggagcacaagcacaagcagcacctcggcgaggccggcgccatcgccggccgggcctttcgcactctacgagaagcacgaagcgaagaaggaccccgagcacgcgcacaggcacaagatcacggaagaggtcgctgccgcggcggccgtccgcgccggcggctacgtattccacgagcaccacgagaagaagaaggaccacaaggacgccgaggaggc

SEQ ID NO: 98159 - DNA, 476 bp, Zea mays
ggttagtgtgtgtacatagctggatgcggtcgttcgccgtaccggtccggaattcccgggtcgacccacgcgtccgcccagctcgctcgtcccagctgatcaggtcgagcacctagtagcgacctgctcgatcatcagtgtagagtgtcggtaggtgtctgtctctcttggtggctggttgcaacggtcatggcgacgtcgtctcgtcgggtgcccttgctgctgctgtgcctgggcgtgctggtgtcctgctccttcgcggcgggcagcttggaccaggagctggacatcacgtggggcgacgggcggtgcaaggtccttgacaacgggcggctgctgacgctgtcgctggaccgcacgtccggctccgggttccagtcccggcacgagtacctgttcggcaagatcgacatgcagctgcggctggtgccgggcaactccgtcggcaccgtcaccgtctactacctgtcgtcgca

SEQ ID NO: 98160 - DNA, 490 bp, Zea mays
  unsure (1)..(490): unsure at all n locations
agcttagaggtnctctnagtaaattgtacgtagtctcgtctgacgtaccggtccggaattcccgggtcgacccacgcgttcgcggacgcgtgggccaacccagctcgctcgtcccagctgatcaggtcgagcacctagtagcgacctgctcgatcatcagtgtagagtgtcggtaggtgtctgtctctcttggtggctggttgcaacggtcatggcgacgtcgtctcgtcgggtgcccttgctgctgctgtgcctgggcgtgctggtgtcctgctccttcgcggcgggcagcttggaccaggagctggacatcacgtggggcgacgggcggggcaaggtccttgacaacgggcggctgctgacgctgtcgctggaccgcacgtccggctccgggttccagtcccggcacgagtacctgttcggcaagatcgacatgcagctgcggctggtgccgggcaactccgtcggcaccgtcaccgtctactacctg

SEQ ID NO: 98161 - DNA, 492 bp, Zea mays
  unsure (1)..(492): unsure at all n locations
agagagagtgtcttcntnaattgtactgcatctgtacgcactgccgtaccggtccggaattcccgggtcgacccacgcgtccggggttttggcctcgccgcgcacgcctcctgaagcttctagacgttcgaggaggaggagaggctcccgccgacgtcgcagccatggcgtccaccaaggtgcagcgtatgatgacccagcccatgaacctgatcttccgtttcctccagagcaaatcgcgcatccagatctggctcttcgatcataaggacctcctgattgagggtcgcatcatccgattcgatgagtacatgaacttggtcctcgaagatgctgaggaaatcaacgtccagaaaaacactaggaagacactgggccggatacttcttaaaggtgacaacataactctgatgatgaacagtggcaagtggaaattcttatggcaagaacgatgtttggagctcgcggtgaatatttctggcaactctttct

SEQ ID NO: 98162 - DNA, 488 bp, Zea mays
  unsure (1)..(488): unsure at all n locations
agaggagagtntgttaatacctggatgcatactgtacgcctgccgtaccggtccggaattcccgggtcgacccacgcgtccgcccacgcgtccgcccacgcgtccgcggacgcgtgggtgcgattactataacatcaagccagatctagtttcactggccaaggctctttcaaacgcctacgtacccatcggggcaactcttgttagcccagagatatcagatgtgatccattcccagagcaataagcttggttcatttgctcatggattcacgtactccggccatccagttgcctgtgctgtggccattgaagctctgaaactttatcgcgaaagggacattcccggccatgtcaagcaaatcgccccaaagttccaggacgggattagggcgctggcagacagtccgattataggggagatacgtggcttggggatgattatgggtaccgaattcacaaacaacaagtcaccgactgaactgttcc

SEQ ID NO: 98163 - DNA, 515 bp, Zea mays
  unsure (1)..(515): unsure at all n locations
gggttngagtttatcctaggttgttatagaccgggggagaaggtaggcttcaccgattcccggtcgacccacgcgtncgggtggcgttctgctttcccaccggatcaggtgcattttctggttcgtgggcgagagggaagagatggcggcgtcggacgttgagtaccgttgcttcgttggcggcctcgcctgggccaccgacgaccactccctcaacaacgccttcagcacctacggcgaggtcctcgagtcgaagatcatcctggatcgggagacgcagaggtcccgcggcttcggcttcgtcaccttctccacggaggacgcgatgcgcagcgccatcgagggcatgaacggcaaggagctcgacggccgcaacatcaccgttaacgaggcccagtcccgcggcggccgtggaagcggcggtggcggatacggtggcgggcgccgtgatggaggcggctacggcggtggcggtggaagctacggcggtggtcgtggaggctacggcggcggtg

SEQ ID NO: 98164 - DNA, 484 bp, Zea mays
  unsure (1)..(484): unsure at all n locations
agtntagagtgcgttttagctggacccgatacgtgggcatgccgtaccggtccggaattcccgggtcgacccacgcgtccgcgttcaagaagctcgaggaggtgtatgggagctttgacgcgccgtctcagaagaagaagggctttgttctgccgaggcccaagatggccaacgctgacctgggcaggattatcaactctgacgaggtgcagtctgtggttaagccactcaacaaggaggtgaagcgcatggagaagaggaagaacccgctcacgaacatggctgctgtgctcaagctcaacccctacctcggcactgcccggaagatggccacccttgctgaggctgcccgagtcaaggcccggaaggagaagcttgattccaagaggaccaagcttacctcggagactgccaaggtcaaggctgccggcaaggcgtggtacaagaccatggtctcggacagtgactacaccgagtttgagat

SEQ ID NO: 98165 - DNA, 481 bp, Zea mays
agtagggctcgtagtattaggtccgcagcctgtgcgcactgccgtaccggtccggaattcccgggtcgacccacgcgtccgcgacgagctccggcggtaccggagggtgcaggcgctgctcaagaggctcaacaagccggcgctgcggagcatccaggcacagccccgacggcgacctcatcgactgcgtgccggcgcacctgcagccggccttcgaccacccgaggctgcgaggccagaggccactggcgggcccgccgccggcgaggcccaaggggaaccgcctccgcgacccgataaggaatgacaccgcggaggccgtcggcgtccagcagctgtgggcggcgtccggggagtcgtgcccggaagggtccgtgcccatcaggcgtgtcacggaatcggacgttgctccggccagcttcgtcaggcgggtccgggaggccgcccggcggccagttgccgggcggactccgtcttccgg

SEQ ID NO: 98166 - DNA, 500 bp, Zea mays
ggttatgcttgaaatagaatcctacaggaccctcccggaattcccgggtcgacccacgcgtccggtgctcggcctgtcagatggctgtcgtgtggatttagaaccagctccgcgaaaacaagaccaaggagctcatactgcagtacgctaaccagctgtgtgagcgtctgccgagccccaacggagagtcaacagtcagctgccaggagatctccaagatgcccagccttgcgttcaccatcgcaaacaagaccttcaccctaacacccgagcagtacattgtgaagctggagcaaggaggccaaaccgtctgcatcagtgggttcatggcgtatgacctgccaacggcgcgtggtcctctctggattcttggggacgtcttcatgggagcttaccacacggtgttcgacttcggcaacgacaggattggcttcgcggaatctgcatgagtgtggagaccactctgctcttcatgcataaagataccctatgtattaggg

SEQ ID NO: 98167 - DNA, 503 bp, Zea mays
ggttcttatgataagaggcgtaatggaacactctccggaattcccgggtcgacccacgcgtccgctcaagcttcagtcgtccatggctcagcagcaaacaaatcctgaagaggtggtcctcgggcaggaggtcggggccgcgagggtggccactctcaaccgcccgcgccagctcaacggcatctccgacagagtggtgtacctcctcgcacagttcctggagaaatgggagaaggatgagaacgccaaattcgtcatctttaagggtgctgggcgtgcattttctgctggtggggacctaaagatgttttatgaagggaaatcaaatgattcctgcctcgaggttgtgtatagaatgtattggctttgctaccacattcacacgtacaagaaaaccatggttgctcttgttaatgggcttgtcatgggtggtggcgctgcaatggttgcgccactaaagtttgcagttgtcacagagaaaacaatctttgctactcctgagg

SEQ ID NO: 98168 - DNA, 493 bp, Zea mays
ttgagtagtcgcgttaagtatcctgacttgcatacgttagtcactgacgtaccggtccggaattcccgggtcgacccactcgtccgagaacctgcgcatccgcaaactcatatttaccaacggagacatggtccactccgggagagccctcaagagggtgggcctggaggactgcttctaggggatcatctgcttctagaccctgtacccgccgtgcccgtcgcatggagaccaggatcccgagatcttcgacatcgccggcacacttcgtccgctccggcaccgtcgactagctgaccaagaccctccgtcctgtgcaagcctaacgtggacgccatggatgaggcgctcatgatcgccaacgtcaacccgcacaatgcgatcttcttcgacgacagcgttacgcaacatccatgccggtaagcagattggccttcacacggtgctggtgggcaaatcgcatctgttgaaaggctcttaccactcgcttgag

SEQ ID NO: 98169 - DNA, 504 bp, Zea mays
  unsure (1)..(504): unsure at all n locations
ggcttgtctatagtatccaagaacatcattggcagcactcnncgaattcccgggtcggaccacgcctcccgggagaaagttgaaccacacttttaatacctcattgccaatggtacactgtccgtggtggtcagcgctacgctactggtcttttgtacttaactgatgtaccagaaagaggggaaacggttttccccttggctgaggagcccgatgatgctaaagatgcaaccttgtcagaatgtgctcagaaaggcattgcagtgagaccacggaaaggtgacgccctccttttcttcaaccttaacccagacggcaccaccgactcggtgagcctccatggtggttgcccggtcataaaaggcgagaaatggtcggctacgaagtggatccgtgtggcctcgttcgataaggtccatcacccacagggcaactgcaccgacgagaacgagagctgcgcgaaatgggcggccctaggggagtgcataaagaacccagagtaca

SEQ ID NO: 98170 - DNA, 504 bp, Zea mays
  unsure (1)..(504): unsure at all n locations
gggtgatgactgtactcgatcccttacgcacaccgccggaattcccgggtcgacccacgcgtccgatgtccttgattatcggtatctatgatgagccaatgtactccagggcaatgcaatatggtggtggagaggctcggcgattacctgatcgaacagggcttctaagtttgtcataatgctattttggtcattgggcacttaagtttgcacctcatttggttctgtaatatgtgggcttgtgcatgtgcttggcgtattgcatgcagtgaataatttatcttcgcgttgggttggtgacaatgttgggaacggatttgaattggggtttatgcttgccatctcctcaaaaaaaaaaaaaaaaaaaaaaaaaaaaaaaaaaaaaaaaaaaaaaaaaaaaaaaaaaaaaaagggcggccgctttaaaggatccaagcttacgtacccctgcatgccaagtcatagctcttctatagggtcacctaaattcaattcactggccgn

SEQ ID NO: 98171 - DNA, 485 bp, Zea mays
gtagtctcttaagtagctggctgcatgctgtacgcactgccgtaccggtccggaattcccgggtcgacccacgcgtccgctcaggcctatgaggtcctcagtgatcctgaaaagcgagagatttatgatcaatatggtgaggatgccctcaaggagggaatgggaggtggtggagggatgcacgatccctttgacatattccagtcattctttggtggtggaagcccttttggaggtggtggcagcagtaggggcagaaggcagcgaaggggagaggatgtggttcatcctctgaaggtttctctggaggatttgtacaatggcacatcgaagaagctctctctgtcccgcagtgttctctgctccaagtgcagtgttaagggtacaaagtctgaacctatatagaggtgcgctggttgccaaggttctggctttaaggtccaaatccggcatttggcgcctggaatgatccatcatatgcagct

SEQ ID NO: 98172 - DNA, 503 bp, Zea mays
  unsure (1)..(503): unsure at all n locations
tggtcaacgatcgaaattgatgctctgggaaccgctccggaattcccgggtcgacccacgcgtccgcccaacgaatggaggaatggcagagagatcttctttcgtgctttctggtgtttctcgcaatgcgtagaggccttcaggcattgtcgtcccgtgttgtctattgatggtacttttctgcttgggaagtataagggcacattgttggttgccatatcatgtgacgcggacaacacattggttcctttggcatttgctttggtggagagggagaacagagagagttgggcttggttcttgcgacttgttcggatccatgtcgtgggccctggtcgcgaggttggtgtcatatctgacagacatcagggtattcttaatgcagtgcaagagcagattcctggctacgcacccatgcaccacagatggtgcactcgacatctagcagaaaatcttcttcgaaaggatcgtagcaaggctaatttccccctttttgaggagan

SEQ ID NO: 98173 - DNA, 504 bp, Zea mays
  unsure (1)..(504): unsure at all n locations
aggtccagcatgatcactganctcatagcgtaccgcnccggaattcccgggtcgacccacgcgtccgctttaggaacatttttggggatagggactttagattacgagatgttaaggttgcactcgaactatcatttatggaagcagttcaagggtgcagcaaaacggtcaccttccaaacgtctgtaacatgtgaaatctgtggtggagccggtgtgcctcctggaaccacacctgaaacatgtctatcttgcaggggttcaggatttatattcatgcaaaccgggcccttcaagatgcaatcaaacttgacaaaatgtggtggttctgggaaaactgtgaaggaattctgcaaggcatgcagaggaaacaaagttgtgcctggaaggaaatcagtccgccttgacatactgcctggtttggataatgaggataccataaaggtggttcgatcaggtggagaagacccagatggccgtccaggtgatctttatgtgaccctcg

SEQ ID NO: 98174 - DNA, 485 bp, Zea mays
  unsure (1)..(485): unsure at all n locations
ggttagagtgcttnagtggttgactgctatcgtctgccgtaccggtccggattcccgggtcgacccacgcgttcgcccacgcgttcgagcgcttgcctcatttgaagattgtaacctcagagattgatagtggattgaacgatgaatatcgtgtcataccaggacttggagagtatggtgatcgatacttcggcacagactaaccgatgactgatgctgtcgtagttagcagtgtgaaaaggtactcaaattagagctgacattaccgtggcagatatactggtgtttggttgctttatggtatactggaagacaaacgtggataggtttctggtaggtgctgaaaccgtgaccgtgtggtcttgtccattatcatatgttttgataccacaaaccgttggttgtgaggcaaatttgattttttttgcattttgaggctcctagctgaagtgcctgcttctagtcacacaatactgttatacagg

SEQ ID NO: 98175 - DNA, 491 bp, Zea mays
aggataggagtgcgtttagtttctgtacgtactctgttgtcgtaccggtccggaattcccgggtcgacccacgcgtccgcacgaaaaagatgaaaatctcaagagaggctatagatgccagcgggagaatctcaaacgcagaggatattctgacaatagaagtaaggcctggttggaagaagggaacaaagattacatttcccgacaaggggaatgaagctccaaacatgaaagctgctgatattgttttcatcctcgatgagaagccccatgatgttttcactcgggatgggaatgatcttgtggtgactgagaaaatctcgctggtggaagcgctgattggatatactgcacgtgtcactacgcttgatgggcggagcctatcattgcccatcaactcgataatccatccgagctacgaagaggtagttcctagagagggcatgccaatacccaaggacccctctaagaagggaaatctgcggattaag

SEQ ID NO: 98176 - DNA, 489 bp, Zea mays
  unsure (1)..(489): unsure at all n locations
gaataggggtnctctnagtacctagattgcaatctgtaggcactgcacgtaccggtccggaattcccgggtcgacccacgcgtccggtgtgctctgacagtgagatggcgagcgtgaaggttttcgggtcacccacctcggcggaggtcgcccgcgtgctcatgtgcctcttcgagaaggaggtggagttccagctgatccgcgtcgacgcctaccgcggcaccaagcgcatgccccagtacctcaagctgcagccgcaaggcgaggcgctcaccttcgaggacgagagcctcaccctctccgactccagggggatcctccgccacatctcccacaagtacgcgaagcagggcaacccgtacctgattggcacgggcgcgctggagcgggcgtccatcgagcagtggctgcagacggaggcgcagagcttcgacgcgcccagcgccgagatggtctacagcctcgccttcctgccgcccaccctgccca

SEQ ID NO: 98177 - DNA, 489 bp, Zea mays
  unsure (1)..(489): unsure at all n locations
gggtagagtgcttnataactgtaagaatgcgctggcactgcacgtaccggtccggaattcccgggtcgacccacgcgtccgaaaaatcttcatttcacatatagaattttctttctttcatttcattgcagggctttcttgttggttcttatgggctgacgtgggcactcaataactcaagcaaagtccttaaattagcaatccttaacagtcctcttacagtttcttctccagtccctggattgtttcagcagctaaaatggccactctttggtgaatttacttgtcaaaatgctgttttggctgagcgtttcattgaagcagatatatgctgaaattggaaaaggctgatgtatacaggttaccgtatctatccagtggcgctcctggattcgctttgcttgaagctgncaggaagatcaatttcaagatgtactaaatagaattttcgccggatttttgtccaaacgttgggaaaaaccaatactg

SEQ ID NO: 98178 - DNA, 525 bp, Zea mays
  unsure (1)..(525): unsure at all n locations
ggggaangaggttnnngagttttaacttgaggtgcgtaagtaacgaagactaatgcaacaccnncggattcccgggtcgacccacgcggtccccctaacccatggtggtgctgaggatgggaatgtgaaacgttccctgtgatcctattgcccaaggagaagcttgttgacaccaacggcgcangtgacgctttcgtcggaggctttctctctcggctggtccagggcaagagcatcgaggactgcgtgacggctggttgctacgctgccaatgttatcatccagcgcccaggctggacctaaccaaagaagcctgacttcaactagtgcaatactcaggcaccgaggcacgttacgagcggttcggcgtgtacactcccctgtatcctttccggtccggccaattttttgtcgccgtgatatttgttcagcaactatggacgacgtcgcctctgttctgtacgaggcatggtttgccatcattattctgttagcttcggcgatgcttgcaatgcgacgagaatg

SEQ ID NO: 98179 - DNA, 509 bp, Zea mays
  unsure (1)..(509): unsure at all n locations
agctctgtgattggctactcgatcaggtacgcnatcagctaccggaattcccgggtcgacccacgcgtccgaccgaccgacgttccaagaagcgaaacgaaacgataatgatgatgatgatgggagagagagcgcacgcgcctccgtggcagcgctcgccggcggccagcggcgtcacggacgcggacgacgcgtctccgtacgccctcctagcggcgctgcagcattacctgccgtcgaacgaggtggcggcgtacgacgaagacgacgaggaggcggccctggcggcggcgaccgccgccgtcgacgcgtacgcctgcgacgagttccggatgtacgagttcaaggtgcggcggtgctcgcgcgggcggaaccacgactggacggcctgcccctacgcgcacccgggggagaaggcccggcggcgcgaccccaggcggtaccactactccggcgccgcgtgcccggacttccgcaagggcgggtgcaagcgcggcgacgcgtgcgag

SEQ ID NO: 98180 - DNA, 536 bp, Zea mays
  unsure (1)..(536): unsure at all n locations
agcnttcatcagtttntatcgttaagtcgttgtgttcgatttatgttatcatagcangacttacggaattcccgggtcgacccacgcgtccgcccacgcgtgcgcccacgcgtccgcagacaccgctacaatccactagctaagcgcgccatggcagagnncgctcanggtcaccaccgcgaggcctccgacgccggctgcgtccgtgccgtcctcgccgagctcatcctcaccttcctcttcgtcttcgccggcgttggctccgccatggcaacagggaagctggccggcggcggctgggacacggtagtgggcctgacggcggtggcgctggcgcacacgctgggggtggccgtaatggtgtcagcggtgctgcacgttttccgggtgtctaaataaccgggtcctgactctagtcttgccatattggtgttgaatttctagtatttgaatcttatgtgttttttattagttaataatcggatacatatatgttttgatgctttgttgtattattttttgattagtacattttt

SEQ ID NO: 98181 - DNA, 486 bp, Zea mays
  unsure (1)..(486): unsure at all n locations
agttttaggcgtgttttgngaagccggatgcctgtcgcatgccgtaccggtccggaattcccgggtcgacccacgcgtccgctttctttctcggaggcgacagctcgaactcgaatccctcatccagcctgtcgctggcgtcgccggtcgccgccgctcgattgcctccgcctgaatatcccttgccccataaggcctgaccttgaaagcctcgccacttgatcccggcggcggcggaggggagggcgatgccgaagcggacgacacacacctactcgagcgaggacgcactgccggagggccccgagtccgaccttttcgtatactactgcaagcactgcgcctcacatgtcctcatcaccgatacccaattgcagaaaatgcccaagcgaaagactgacagagcacatgttttagacaaggctaagcatctttcaaggctaaatgttaaggaggcaggaaaagtaatgttgaaacgtggtgaag

SEQ ID NO: 98182 - DNA, 494 bp, Zea mays
  unsure (1)..(494): unsure at all n locations
agtgagaggtgcttaagtactgaactgatacgtncgcactgccgtaccggtccggaattcccgggtcgacccacgcgtccggaaagttgcccgcacgtctactttgttgggaatcaagataaatatgaaactcgactgggggaagggcaagaaaaacagaaagtgaggctaatctccatcccaaggttctcggagagtggagtcgctgtaatgctcaatctgaggaacttggaatgcagcacattgagtttctcaacaagctttgatgcctgaatatgctctgatgtttgtaagtgcagaagacttcaatgtagcatgttgagcggcatgagcacgagggaactacgtgaaccctttgtggggtgtgggggtgggggcatggaaggatgtatttgtaccagaacagttctttattagatgtatgatgatgaccttaggttttgccaaatagatcttttagaatgcagatgctgtaacttgtaaccacaaccgag

SEQ ID NO: 98183 - DNA, 480 bp, Zea mays
attagactgcaaacactaggcatgctcgtaccggtccggaattcccgggtcgacccacgcgtccgacaacttcttggcccgcgacctgacgatcgagaactcggccgggccgtcgaagcaccgggcggtggcgctccgcgtgggggcggacctgtcggcgttctaccggtgcagcttcgtggggtaccaggacacgctgtacgtgcactcgctgcggcagttcttccgcgactgcgacatctacggcaccatcgacttcgtgttcggcaacgcggccgtggtgctgcagggctgcaacctgtacgcgcgcaggccgctgccgaaccagagcaacatcttcacggcgcatgggcgggaggaccccaaccagaacacgggcatctccatccagaggtgcaaggtggcggcggcggccgacctcgccgtcgcccagtccttcaccaagacctacctgggccgtccatggaagcagtactcccg

SEQ ID NO: 98184 - DNA, 515 bp, Zea mays
  unsure (1)..(515): unsure at all n locations
cgcgtcgaatgactgcgatcgtatagcgatngtcatcnccgtaccggatttgcaggtcggatccaacctacgcgtgccgcgacgcctggcacatgatccctcattgaatgatgttgaagagaccatggtagagacgattgccctctgccagagaaattcacataatttgaaccaacagcagagagaggcactctggtttccgttattggaggcaatgatggcccctcagaagctgtctagttcagcttcacctcatccacactctgaagctctgaaatctttgaccatgcaagttctcaacagtatggcagcatttattgcccttccatccatcctgcagcgaatcttacaggacccagtttattgaaaaggaaaacttggagaaatccaaggccttattctgggaatgttggatacctttaactatgaacagaccctgctggaaacgacaactaggcttctaaaccaagatctncattggtcaatgtgtaacctgagagcttcagttaccaaag

SEQ ID NO: 98185 - DNA, 508 bp, Zea mays
  unsure (1)..(508): unsure at all n locations
cgggtcnactgctgacgatcgacactatggcgaacccgtccggaattcccgggtcgacccacgcgtccgcgctgatgctggtggcgtgcaccgcggggttcgttctccagtggcgcctcgcgctcgtgctcctcgccgtgttcccgctcgtcgtgggcgccaccgtgctgcagaagatgttcatgaagggcttctcgggggacctggaggccgcgcacgccagggcgacgcagatcgcgggcgaggccgtggccaacctgcgcaccgtggccgcgttcaacgcggagcgcaagatcacggggctgttcgaggccaacctgcgcggcccgctccggcgcttgttcttgaaaggggcaatcggccgcagccgcttccgggtggcgcaagtcctgctggacgcgtnctacgcgctggggctgtggtacgcggcgtggctggtgaagcacggcgtgtccgacttctcgcgcaccatccgcgtgttcatggtgctgatggtgtccgcgaacgg

SEQ ID NO: 98186 - DNA, 546 bp, Zea mays
  unsure (1)..(546): unsure at all n locations
gagaggaatgttagagaggactcgngtactgcagtgganagtgtacgcatgccgtaccggtccggaattcccgggtcgacccacgcgtccgcaaccagcaagcaaaaattccccaatcctgtcgtgtccgaggctaagatgtccgggcgcgggaagggcggcaagggcctgagcaagggcagcgcgaagcgtgaccggaaggtgctgcgcgacaacatccaggggatcacgaagccggcgatccggaggctggcgctgctggggcggcgtgaagcgcatatcggggctaatttacaaggaacccgcggcgtgctcaagatcttcctggagaacgtcattcgcgacgcgcgaacctacaccgagcacgcgcggcggtagaccgtgagcggcatggacgtagtgtacgccctttagcgccagggccggaccctctatgggtttgacagataaagtctgacgcgggcgatttagaggatccaggcttacgtagcagtgcatgcgaaggtagaagctaattgtatagggggccgtaaaatcaaagtacan

SEQ ID NO: 98187 - DNA, 541 bp, Zea mays
  unsure (1)..(541): unsure at all n locations
tgaaagaagatagctaatcgaacactgaagtgttagcactacgcacngccnnnnaatttccggattgcccggtggacccacgcgtccggggagttgacttttgtaagaagctctgtggagtctctattgtgcgaagtggtgagagtatggagaacgcattgcgtgcttgttgtaaaggaataaaaattgggaaaattctaattcatcgtgttggagacaatggacaacagcttgtttatcacaaactgcccatggatattgctgaacgacatgttctacttttggatccggtgcttggtacaggcaactcagtagcccaagcaattgaccttcttataagaaaaggtgttcctgaggatcggatcatttttctcaatctcatctcggctcctgaagggattcagtgtatctgcgagcgatttccttcgctgaagattgttacatctgaaatcgattatggtctgaacgaagaattcagggtgaacccattactgggaaaatattgggacccggtctttaggccaaaccaattggtggtctt

SEQ ID NO: 98188 - DNA, 572 bp, Zea mays
  unsure (1)..(572): unsure at all n locations
gagagtataggggaggcntgtcaggtgactggacctgaagcactaggcacgtcgtaccggtccggaattcccgggtcgacccacgcgtccggcatctcgctccttgtcgacaagacatccaccatgcaagacagcgcctttcactggcgcaggcaatccaagaggctgcgtagagctctttggatgaagaatgccaagcttctagttgtgttgacagttgtcatagtagtgctgctctacttgatcatttctgctttctggggaggcctttgcttgtcatcatgcagatcatgagttacacaccagatggctttggcccttccttaaaatggagggttggaacaccattggaatgaagccttggttgggttaagcaccggaacctttccggaggcgaaaaagaaaagggcgaccattgggttccactgtgggttccccaagaactgggaccatttgggaccaggggcccaatggggatttggccccttcgtggatttggaaagacccccaagtggttggggggaaaacttatgacctttaaaaaggggggagagcttataaaaatgtttttg

SEQ ID NO: 98189 - DNA, 522 bp, Zea mays
  unsure (1)..(522): unsure at all n locations
acgtcnacctaccgcatcctgacagcaatagcaacngcgccggaattcccgattcgacccacgcgtccggtgtacgtgaagctgggccaggggctctgctccttcaaccacctgctgctcccctagggcatcgggacattgccggtgctggacgacagggccctcacgcggagcttccgggaggtgagcccaccccccgaggcgtgaggcggagagtgtggccccatggtgtcccccacgctgctcgaggcgtgttcctccaagtggatgagctgttcctcgaagacttccaggccccgccccacgagctcttccaggagtttgactaccagcccattgctgcagcgagcctggcccaagtgcaccgtgccaggctgcacgatggcaccgtggtggccgtgaaggtgcagtacattgacctgcgggaccgctttgatggcgacattcacaccctgtagctcctgctgcacctcgtggagctcatgcaccccagcttaggtttcaattggggtcttcacgacg

SEQ ID NO: 98190 - DNA, 530 bp, Zea mays
  unsure (1)..(530): unsure at all n locations
aaggaggagagggcgtgncgtcattgaaatcgatgctgtacgcactgccgtaccggtccggaattcccgggtcgacccacgcgtccgcccacgcgtccgcccacgcgtccgcccacgcgtccgcccacgcgtccgcccacgcgtgcgatttcagccgccgccgcgcgtagcaagcaggagcagcaaggatgccggctggccacgggctgcgctcgcggacgcgcgacctgttcgcgcgccccttccgcaagaagggctacatcccgctcaccacctacctccgcacctacaagatcggcgactacgtcgacgtcaaggtgaacggcgccgtccacaaggggatgccgcacaagttctaccacggccgcaccggtcgcgtctggaacgtcaccaagcgcgccatcggcgtcgagataaacaagcaggtgaatggtcgcatcatcaggaagcgtatccatgtccgcgtggagcatgtgcaggcgtccccggtggacaagagagtttccgcctgaggaaagttgaaaaatgat

SEQ ID NO: 98191 - DNA, 521 bp, Zea mays
  unsure (1)..(521): unsure at all n locations
gaatgtgngtaatgagatcganctcgtagcgactgccgtaccggtccggaattcccgggtcgacccacgcgtccgcaaaggagccccagaagatctttcagattttttgcaactaataaaatatgtcagtgggtcctatgatactggagaaggatttgagaaactgaacagggcaatatcagagtatgaggtgtcaaagagttcaggaagctatcgcaggctcttttatttggcattgcctccatctgtctacccttcagtgtgcaaaatgatcagaacatattgcatgaatccatcttctcaccttggatggaccagagtcattgttgagaagccctttggaaaggacttggattccgctgaagaattaagtgcccaacttggggagctattcgaggaacaccaactatacagaatagaccattacctgngaaaagagttagtccaaaacttgcttgttcttcgttttgccaaccgattgttcttgcctctttgganaccgcgacatattgataatatan

SEQ ID NO: 98192 - DNA, 553 bp, Zea mays
atatgagattgagggtggtaagaggggctcgaagtaatggaaacagatagctgtacgcatgccgtaccggtccggaattcccgggtcgacccacgcgtccgggcttctcctccccctccggttcgggttcgggttcgtgaggttctccggggttcggtttcgtgggtgagcggatcgagatggcggcgtcggatgttgagtaccgctgcttcgtcggcggcctcgcctgggccacggacgaccactccctccacaacgccttcagcacctacggcgaggtcctcgagtccaagatcatcctcgatcgggagacgcagaggtcccgcggcttcggcttcgtcaccttctccacggaggaggcgatgcggaacgccatcgagggcatgaacgggaaggagctggacggccgtaacatcaccgtcaacgaggcccaatcccgccgcggccgtggaagcggctggcgccgcaggttacgggggtggccgtggaggcggcgggtacgggtgttgcgggcgcccgtgatggcagtggcgtgttcggcgggtggcgggag

SEQ ID NO: 98193 - DNA, 519 bp, Zea mays
  unsure (1)..(519): unsure at all n locations
aggggggggtgctgactcctgagacggaactcgtacgcactgccgtaccggtccggaattcccgggtcgacccacgcgtccggactcacttgatgctgctggcactaacgcggatgctgccagtaagattgagaggttggtgattcaaccgagagtagaggatgcagtacttggccggcggaaagctgaaaacgcaatggcttggcgggcagtgtttacatcggccgggtttgctccggtaccgctcagcaacctcgcagaagcacaagctgactgcctgttgaagcgcgtgcaggtccgaggattccatgtggagaagtgtggaatgggtctagcactctactggcagagcggcgagctcgtgtctgtctcggcatggcggtgctgatcatacggaccccatccatcaaccatcatgacacctacaccaatttgcaggcatgtttaaccctggtaatgtgcattttgtcttgcaatttcaaacatcgtgaagaaaactattggatttgtggtacaccn

SEQ ID NO: 98194 - DNA, 538 bp, Zea mays
  unsure (1)..(538): unsure at all n locations
agagttagtaaggcggctcnatcctgtagtcgtngctctgacgtaccgcgtccggaattcccgggtcgacccacgcgtccggttcgctgcagtccaaggattgttgctgtagcacttgcagcacaaatctactgctttgatgctgttactcttgagaacaagctcagcgtcttgtcatatcctctgcaaggtgcacctggggtaaatattgggtatggcccgatggctgttggccccagatggttagcctatgccacaaatactcctttattgtcaaacacaggccgtctaagtccacagaacctcacaccttcaccaggtgtgagcccatctacttctcctagcagtggcagtttagttgctagatatgcaatggagtccagcaagcaattagcttctggtattattgacatgggatataaaacattttcaaagtaccgccaggaacttctaccagatggttctaacttccctgtgtcatcaagcccaggcaggagatcttggaaaattctttccaaggggcattcactggaaactn

SEQ ID NO: 98195 - DNA, 547 bp, Zea mays
  unsure (1)..(547): unsure at all n locations
gatagaggaggtagtagcggggtgcngtaactgaagtcgatgctatggcgtacccgtccggaattcccgggtcgacccacgcgtacgcccacgcgtgcgaatttaatgagacagcagcttggatttatgcaaaaagcatggaggggagaccttacgggtatcacaatatgatatttagctggattgacaccatcagtcataattatccaccaccattagatgctcatgtggttgcttctgttatgactgtatggagcaagcttcaaccagagtatgctgctaatatgtggaaagaagcccttaacaaacggcttggaactaagggtcttgacctttctgaaatcatagtggaatcagagaaacgtgggataacatttgacaagtgtctaactgttcctgagaacgatagctgggtctatgaagatggtcagtcagcatcttgtgtagctttcgtcccttatgatgtacaaggagggctggactcttttgaccctattaccaaggtctaattgaagttactggaattcgccaattaaagatgcctatn

SEQ ID NO: 98196 - DNA, 537 bp, Zea mays
  unsure (1)..(537): unsure at all n locations
agagtaggtagaagcggtgtcnaataattgatatcgacggcactcacgtaccgcgtccggaattcccgggtcgacccacgcgtccgctttttttcttctatctgttatctaggctcctgagggagttagatttgcaggaaaatgatgtggaggaccgtgggcccagatggctttccttccctgattcctgcacttcgctggtctccttgaatttcgcttgcatcaaaggggaggtgaattctggtgcgttggagagacttgttgctaggtctccaaatctacgcagtttgaggttgaatcgttctgtttcagtatacacactctcaaagatactattgcgagccccaaatttggaagacttggggacaggtaatctgacagatgagttccaagctgagtcctattccaagcttactagtgctctggagaaatgcaaaaagctgagaagtctgtctggattttgggatgcttcttctatttgggttccggatatctatcccctctgtaataaacttacaggcctaaacttgagttata

SEQ ID NO: 98197 - DNA, 521 bp, Zea mays
  unsure (1)..(521): unsure at all n locations
cggggggctcngtgctgaatcgatactcatagcgactgccgtaccggtccggaattcccgggtcgacccacgcgtccgcacagacaagtggtttccaaagccaagtgtgtgtactagcaaccagctagctcgggcggcagcaggcagccatcatgtcggaggagaagcaccaccacttcttcaaccaccacaagaaggacgaggagcagcccgccggcgagtacgggtactccgagaccgaggtggtcaccgccaccggcgagggcgagtacgagaggtacaagaaggaggagaaggagcacaagcacaagcagcacctcggcgaggccggcgccatcgtcgacggcgccttcgcactctacgagaagcacgaggcgaagaaggaccccgagcacgcgcacaggcacaagatcacggaggaggtcgctgccgcggcggccgtcggcgccggcggctacgtattccacgagcaccacgagaaggagaaggaccacanggaacccgaggaagcccaccgcaaa

SEQ ID NO: 98198 - DNA, 544 bp, Zea mays
  unsure (1)..(544): unsure at all n locations
gagagaggagggggaggaggactcgagtcctcganatcggangcctgtacgcatgccgtaccggtccggaattcccgggtcgacccacgcgtccgtgacttcattcccagcggccggcggcgacctccacgtggtgccattcgccggcaacgagcgcccgcccaccaggatccaggtttgtgctgcgagagcgcctatccattcaccatgattaatttcgtgctcctgatcagccgccagggcaaggtgaggctcaccaagtggtattctccttacacccagaaagagaggaccaaggtcattcgcgaactcagtggactcattcttacacgagggcccaaactttgcaattttgttgagtggagaggttacaaggtcgtataccggaggtatgctagcctgtatttctgcatgtgcattgatgccgaggacaatgagcttgaagtccctgagatcatncatcatttcgtcgagatactgggccgttattttggcagtgtatgggagttgggattgatagtcaattgttataaggccctcctcc

SEQ ID NO: 98199 - DNA, 541 bp, Zea mays
  unsure (1)..(541): unsure at all n locations
ggattatgatgggagcggcatanatnactgaaatcgatgctgtagcgatgtcgtaccggtccggaattcccgggtcgacccacgcgtccgcccacgcgtccgattaccgggaacctgtaaggcctcaatcagctttccagggtgttggaagaacccttggtggtggaccttccccagatgagagtgcaacacctgctcctgcaccagcggcccctgctgcttcgaggtccgctggcatagtcgtggatgactcccagccatttacatccatacagctgaggctggctgacggcactcgcatggtcgcccggttcaacatgcaccacaccgtgggagacatcaggtccttcatcgacgcatctcggcctggaaccgcaaggccgtatcagctgcagacaggtttcccacccaagcagctggctgacccaacgcagaccgtggtgcaagctggactggcaaactcggttatcatgcagaagatgtaatgtttcgacaacatgggtaactaggatgcatcgtactgcatcctttgagaactggg

SEQ ID NO: 98200 - DNA, 538 bp, Zea mays
  unsure (1)..(538): unsure at all n locations
gagatgaaggagagagagcggactgnaataatggaagtcgatggcatgacgtaccgcgtccggaattcccgggtcgacccacgcgttcgcccacgcgtacgcccacgcgtacgcccacgcgtccgtccacgcgtccggcaaggtgataagtaccgggaattggcccatacggtggatgatgctcttgggttcatgactgcatcggggcttacaggcgaacaaccggttatgaccactactgacttctggaccttggaccaatggcttttcttaccctacgagcaggctcttacccgtgaggattccaccagtggccttttctatgaatggtcgggccacaatgttgaggttggtgagcgcactcgacaactgatggatctcatggtggaatttctccgtgatgttgccaaacctttgggcataaaagtgagcgaacaaattaaccccagggaattgatgaactgattgaaaatctgaacctttaatacaaacctgaagggacacccttatttcaaggttgggagcaaagaaccatagg

SEQ ID NO: 98201 - DNA, 512 bp, Zea mays
  unsure (1)..(512): unsure at all n locations
agagagagggctgtctactgagacttagcccttagcgatgccgtaccggtccggaattcccgggtcgacccacgcgtccgctagttctagaggcgatgcatgcgcggcggcggctgcacggcgtgctgtgcgacatggtgcgggagcgtcgtggccaggcccaggcgggcaccaccggcctgctgggctgcctgatgcggtcccggggcgacgacggcgcgccgctgctgagcgacgagcagatcgccgacaacgtcatcggcgtgctgttcgcggcgcaggacacgacggccagcgcgctcacctggatcgtcaagtaccttcacgaccaccccaagctcctcgaggccgtccgggcggagcaggcggcggtccgcgaggccaccggccgcgggaggccaccgctggcgtgtgcgcacaccaagaacatggcgcttacgcatagggtgattttggagagcttaaagatggcgagcataatctcgttcacgttcagggaggccgtggccacn

SEQ ID NO: 98202 - DNA, 519 bp, Zea mays
agagagggctgtctcatgacatcgagctctagcgactgccgtaccggtccggaattcccgggtcgacccacgcgtccgcaaaactgtattctgcttgcagcaagattcagatcttgaatattttggagtcgacatgcgtgccattcaagattattctctacaattcaaagatattgtgcactgccgtgcggaaattagggattttgatgcttttgatttgcgattgaggcttcctgctgtggttagcaaattgcacaaacttatcaactgtaatggtggtgtaacatatatacattgtactgctggacttggaagagctcctgctgttgcagtgattcattgcagttgataccgcctttgtggaatgttcaacaatcagcacttctgtttgtttgaagataagataatatacctattatctgtgcacccgaaaaccaacatctaatgattgcctgcttgtgggaattttgatggtcccccgcatctgttctctatagtccatttatgttgggatacggg

SEQ ID NO: 98203 - DNA, 517 bp, Zea mays
  unsure (1)..(517): unsure at all n locations
aggggagaggtgtcncgtactgagatcgagactgtaggatgccgtaccggtccggaattcccgggtcgacccacgcgtccgcccacgcgtccgctgagtcaatgaagatggattctgtctgcctgaggtacaccagagtattttggaacttgatcattgcgccttggaagtttttgtttgcttttgtgcccccataccacattgcacatggctggattgcttttatatgctcactggtcttcataagtggtattgcttatggtgttactaagcttacagatcagataagctgcgtcacaggagtaagtccatatgttatcgcattcacagcactggccgctggaacctcatggccagatctagttgctagcaagatagctgctgagcgtcaagtcaccgcggactctgcaatagccaacatcacttgcagtaactcggtgaacatatatgttggcattggtgttccatggttgattgatacagtgtacaacttcttcggttaccgggaaccattgtg

SEQ ID NO: 98204 - DNA, 547 bp, Zea mays
  unsure (1)..(547): unsure at all n locations
tatagattaatggggaagaggtctgangttttgancatcgatngctgttagcgcatgccgtaccggtccggaattcccgggtcgacccacgcgtccgagcaccttcccaaaaaaatcccccattttcttcgaggcgaggagagcgtgaaagacagggcaccggcagcgacgatgtcggggcgcggcaagggcggcaaaggtctgggcaagggcggagcatatcgccaccgtaaggtgctccgtgacaacatccagggcatcaccaagcccgcgatccgtaggctggctcggaggggcggcgtgaagcgcatttcggggcttatctacgaggagacccgcggcgttctcaagatcttactcgagaacgtcatccgtgacgccgtcacttacaccgagcacgcacgccgcaagactgttaccgtcatggacgtcgtctacgcgctcaagcgccagggccgaaccctttacggcttcggaggctaggctggatgcctnttctacctgctgtcgtggattcctgtatagtgttagggttatttcggttaat

SEQ ID NO: 98205 - DNA, 544 bp, Zea mays
  unsure (1)..(544): unsure at all n locations
tgagagattgaggtgggtaggcgggtcaaagaattgaanatcgtangcaggtagcgatgccgtaccggtccggaattcccgggtcgacccacgcgtccgtgaacgacggcgtgaagaggttcaccgtcaacgcggtgttagggatcgatattgacctgaagacgctggaagcgtttgcggacgacaagttcgatagcacgggctgtcagatctggggaaggaaacgactttcagggactgtttggttgagatcaggcagctcacgaatctcctgctcagcagccagcctgagaacttcatgaacccggtgatcaggcagagaaactacgggtctctggactacaagaagctggccatcatttgtgaaaagtacaaggactctgcagaaaggctggttcgaagcctttgcaaccggaacaacccccagcagaacgcccgtaagaaatctatggacggcttgaaagagaggcttaaggttttagctaaggtaaatcgggtgcattttatttatgacaggggaataaattgctggcactagctttta

SEQ ID NO: 98206 - DNA, 540 bp, Zea mays
gaagagtaggatggatagcggctacattgctggactcgatgcgctgccgtaccggtccggaattcccgggtcgacccacgcgtccgaaacaaatatggtttcagtgatatccgtccatatttgattcgattacatccctaatccaactcgtcgggccacaaccgcggtggcggaggcagtgctctggtcatctagcggacgatgcgggatgtcggaggcggagcaccataccctatggtcactcgcaccatctacgacaaccgggttgtgatgatgaaggtcatgatggaggcgcgtggactgtgggaggcagttgacaccaggaacgtcgagcgcaacgaggattggtgggctatggaggcgatcctacgagcggttcctgcagagatgcatcagtccttgggggcgaaaacgacggcaaaggaggcctgtgacaacctgaagactatgcgaaccggctcagggctagtaaagcggtcaagatacaacaactgcggcaggagtacgaactcctggagttcatggaaagggaaggagtgg

SEQ ID NO: 98207 - DNA, 538 bp, Zea mays
  unsure (1)..(538): unsure at all n locations
tatggattaagtggggaggggctcggatgattgaaatcgtaggccntgacgtaccgctccggaattcccgggtcgacccacgcgttcgcccacgcgtccggataaggtatcttttgaaagacgacgaggaagcaaggatccagctgggctcaaatggctttgccgaggcactggttgagttcttgaggaatgctgtgaatgatgggaatgagaaggcacaagaagttggtgcaatggctcttttcaatcttgcagtcaacaacaacagaaacaaggggctcctgttatctgctggagtcaccgatctacttgagcaaatgatatcgaatccacgggtatctgggactgccacagtactttacctgaatatttcctgccttcctgacgcgaangccgtcatcggttcgaggcaagccgtgccgttcctaatcgaccagttgtacagtcataaagagaatgacaccataggaaagttctggcagcacgacgccctgtgcacgctgttcaacgtttgnggcaaccaggcaaagttgccgtg

SEQ ID NO: 98208 - DNA, 519 bp, Zea mays
tgagagggggctgtctcctgagacggaagctgtaggcactgccgtaccggtccggaattcccgggtcgacccacgcgtccgcgggttcgtgaggttctccggggttcggtttcgtgggtgagcggatcgagatggcggggtcggatgttgagtaccgctgcttcgtcggcggcctcgcctgggccacggacgaccactccctccacaacgccttcagcacctacggcgaggtcctcgagtccaagatcatcctcgatcgggagacgcagaggtcccgcggcttcggcttcgtcaccttctccacggaggaggcgatgcggaacgccatcgaaggcatgaacggcaaggagctggacggccgcaacatcaccgtcaacgaggcccagtcccgcggcggccgtggaagcggcggcggcggcgggtacggtggtggccgtggaggcggcggctacggcggttggcggcgccgtgatggcgggcgcggctacggcggtggcggcggttaccgtggtggcggcg

SEQ ID NO: 98209 - DNA, 535 bp, Zea mays
  unsure (1)..(535): unsure at all n locations
agatgaggggtagctggctcaaatactganatcgtaagcgtcgcgatgtcgtaccggtccggaattcccgggtcgacccacgcgtccgcccacgcgtccgggcaaacgctgctctgttcccgggtgcaccaagagtgcccgcggtcgctctgattgctgtgtgaagcacggtggtggcaagcgttgcaggttcgatgggtgtgacaagagcgcacaggggagcactgacttctgcaaggctcatggagggggcaagcgatgcgcttggagcaccggctgcgacaagttcgctaggggaaggagtggcctatgcgcagcgcatacgaccctgatggcttccaaggtagtgcaccatcctggacatgcacgaagcatggtcgggccttgccactttagcggcggcgtctctggttcgtcagcagctgatagcaacatggatcatgccatctagttattcgggcatggcgcatggtcagactgggtcgactcggtcagagacatgcagagcggctggatggttctaataccacgttag

SEQ ID NO: 98210 - DNA, 542 bp, Zea mays
agagtaagtagaagaggctgtgttctgagatggatgctcgtaggcatgccgtaccggtccggaattcccgggtcgacccacgcgtccgcccacgcgtccgggagcattcgagaagcttcacatggggggcgaccacaagaaggaggatgagcaccacaagaaggccgaggagcaccacaagaaggaggagggggagcaccacaagaaggacggcggagagcataaggaaggcatcgtggagaagatcaaggacaagatcaccggcgagcacggcgacaagtccggcgaccacaaggaaaagaaggacaagaaaaagaagaaggagaagaagaagcacggcgagggccacgaccacgaccacgacggcggccacagtagcagcagcaacgacagcgactgagatctggtgttgcagcacaggtgcaacacaagtatgcttgctggatggaagattcataccagctgatggctgatgaagtgtttcactggtggcatgcatgcatgtatcgtgctattataatccaaagggaaaaaagaaatac

SEQ ID NO: 98211 - DNA, 520 bp, Zea mays
aggagagaggctgtctcctgagacgaaagcgatgcgatgcgtaccggtccggaattcccgggtcgacccacgcgtccgcggacgcgtgggcggacgcgtgggtgttgagggaaggaaacctcgaggaggcagcaatggtggatgtttggatcgaggtggaggctaaccagtacaccgctgcactgaatcccatcctcttccaggtcctcatcagtcctatgcttgggggaaccaccgaccagaaagttgcggatgagaaccttgagaagctgaagaaggtgctagaggtgtacgaggcacgcctgaccaagtgcaagtaccttgctggagacttcctcagcctcgccgacctgaaccatgtgtctgtcactctctgcctgttcgctacgccctacgcatctgtgctcgacgcctacccgcatgtgaaggcctaggtggtctggtctgatggacaggacgtttggtcagaaggtcgctggcctgatgaagccatctgcttgaaaccggtgccctggcattg

SEQ ID NO: 98212 - DNA, 537 bp, Zea mays
  unsure (1)..(537): unsure at all n locations
gaatttggatgaagaggtgtganatcatgaactcgatcgcctgcagcgtaccggtccggaattcccgggtcgacccacgcgtacggtcatgaccttggggcaaagggtgccatttgaatttcatggaacaaactatgtattcaatgtcaatcaagctttgctagagggtcaggagagttctacaccattggatagaggattcttgtcaagtgatacatacatcatatttgaggctgctcctaattcaggaattaaggtgatcaaccaaaaggaagctgctagcagcaaacttttcaaacataaagagtttaacctggaaaaattggggataggtgggttaagtgctgaattcactgacatatttcgtagggcattcgcttcaagagtctttcctcctcaagttgtcagtaaattgggcatcaaacatgtaaaaggtatactgctatatggacctcctggtactggcaagactcttatggcacgacaaatgggaaaattattgaacggaaaagatcccagattgggaatggacctaaa

SEQ ID NO: 98213 - DNA, 542 bp, Zea mays
  unsure (1)..(542): unsure at all n locations
gagagtaagggggggagcggtgtgacaggctgaaatcgatcgcatgccgtaccgcgtccggaattcccgggtcgacccacgcgtacggttctagctagctagcaaagggggggaaaatggctccgcttctcgctgctgccatgaaccacgctgcagcccatcctggccttaggagccacctagtaggacccaacaatgagagtttctcacggcaccacctgccgtcttcttctccacagagcagcaagcgaaggtgtaaccttagctntactacacgatctgcaagagtaggcagccaaaatggagtccaaatgttgagcccctcggaaatcccacaaagggactgggtcccctctgacttcaccttcagtgccgacacttcagcggaccaaattgaaggtgcttggaatgaagatggaaagggggaaagcaactgggatcacttctggcacaatcattcggaaaggatactggacgggagcaattcaaacattggagcgaattcgtaccttatgtgcaaaacaggccgtcagattgctcan

SEQ ID NO: 98214 - DNA, 527 bp, Zea mays
agagtagaggctggtgttatgaatcgaagtcgtacgcatgccgtaccggttcggaattccgaggcctacgacccacgcgtacgcgtgacgcagggaaccactgcaggatatttcactaatgaagttcaaggattgatgggggatcgaaatccaaagctcgcattaaggcaaagataacacatgacagtgttgtgatgcagacaaaatgaaaacattctatgaaggacattcgtagtcttgctgataacagtaaggagttccttgcataagaagaaagccagataccaatacatgaagtgatttgctacaggtattatcataatgttaccaatgttaaagtgaaacacaaaccgaacgaatattaagaatggatagaagatgtgtacgatgaggaattagaaaagatgatggacacatttgaagatgataatagactcacctctggaaaggatgaacttgaattcactagcaacattgagaaacaaggaaaaagcacttaggatgacctataggattaattttcagaa

SEQ ID NO: 98215 - DNA, 524 bp, Zea mays
  unsure (1)..(524): unsure at all n locations
agagaagaggcgtgtgtttttgacatgatgctcgtacgcactgccgtaccggtccggaattcccgggtcgacccacgcgtccgcagccagtcagccacatcactagctatctgtgcagaggcaatggcgtccaaggttgagctggtggtggaggtcaagtccccggctgacaagctgtgggcggcgctgcgtgactcgacggagctgttccccaagatcttccccgagcagtacaagagcatcgagaccgtcgagggcgacggcaagtcggccggcaccgtccgcctcctcaagtacaccgaggcggtgccgatgctgacgttcgccaaggagaagcttgagacggcggacgacgagaacaaggtggtgtcgtacagcgtggtggacggcgagctggcggacttctacaagaacttcaagatcacgctgaaggtgactccggccaaggcgganggcgagggcggcgccgtcgtcagctgggccatggagttcgacagggtcaacgaccaggtgcctgacccgga

SEQ ID NO: 98216 - DNA, 540 bp, Zea mays
  unsure (1)..(540): unsure at all n locations
agagtaggaggagcgggctcgaagactgatatcgtngccgtgacgtaccgctccggaattcccgggtcgacccacgcgtccgccaaatcgccccctctcccaaaccctcttcatccccctcccgtgctcgacccagatcgagggctcgatccgtcggccatggcgctggagtgggtggtgctgggctacgcggcgggcgcggaggcgatcatgctgctgctgctgacgctgccggggctcgacggcctgcgccggggcatgatctccgtggtgcggagcgcgctgaagcccatgatgtcggtggtgcccttctgcctcttcctgctcatggacatctactggaagtacgagacgcgccccacctgcgacgacgagcacgcctggaccccctgcgagcacctgcggcaccagaagtccatcatgaagtcgcagcggaacgcgctcctcatcggcggcaggctgttcctctactggatcctgttttcggtaacccagctggccgtcaaggttgaagcggatgcgagaaggccgtggccaacn

SEQ ID NO: 98217 - DNA, 539 bp, Zea mays
  unsure (1)..(539): unsure at all n locations
gagagtaagggaggagcggagtcanttgctgaagtcgatagcatgccgtaccgcgtccggaattcccgggtcgacccacgcgtacgaccgaagtccggaacaatggattgcattctggtggtggtagatcgattctcaaaatatgggcatttcttggcgctggcccaccctttttctgcagcaaaggtagcaaaacttttcttggataatatctataagcttcatggtatgccggacaatatagtatctgatcgggatagagtgttcacaagtctgttctggcagcaattattcactctcagtggcacccaattatgcatgagttcggcttatcacccacaatccgatggccagacggagcgcgtaaactagtgcattgaaacttatttgcgatgctctgtgcacgcctgtcccagcaaatggtaccaatggttagctgttgcagagttctgagataataccaactttcattcagctctgaattggcctccatttgagggggtataatgacagcccccttcggcactttcgcttgcaac

SEQ ID NO: 98218 - DNA, 544 bp, Zea mays
  unsure (1)..(544): unsure at all n locations
tagagtagtggtagcgaaatcgtataatggattcgganagctgtacgcctgccgtaccggtccggaattcccgggtcgacccacgcgtccgcttaagatccttcaaaaggtgaaagcaacatatgaccttccgatagtcactgatgtgcacgaaagccaccagtgtgaagctgttggaagagttgctgacatcatacagattccagccttcctctgtcgccagactgatcttctagtggctgctgctaagactggaaaaattatcaatatcaagaaaggacaattctgtgcgccttctgttatggtgaactctacagagaaagtaaggcttgctgggaatccaaatgtgatggtctgtgagcgtggtaccatgtttggctacaatgatctatttgttgacccaaggaaccttgagtggctgagggaaagcaactgcccagttgtagctgatgtaacacatggtttacagcaacccagttggaaaaagcttgatgggggatgtgttgcaagcggtgggctgccgagactaataccgtgcgttggn

SEQ ID NO: 98219 - DNA, 515 bp, Zea mays
  unsure (1)..(515): unsure at all n locations
agcaggaggtgtactgccttcctcgctatttgcaggacattccccttggagttaccgggccgacccacgcgtccgcggacgcgtgggaaattcgttgtgagcattttcttgcagcctggagcctatgagctgatgggttacatagtgtatgagatcgaccagcacccttaccagaatgtattctacaatggcactattgaggtcgttgaggctggaggcttactcagtgttgagtctgtgttcctcatcacccttggaatcgctcttcttggtctctttggattatgggcatatggccaggttcagcagctctcgaagaaaacgaagaatgcccccaaggtggagctcggaactggaacaactgatgccaacatcgatgagtggctggagggcacttcgtttgtgcagagaagcaaatccaagaagaagcagacctgaagctagctctccagactagttaatccttggaggatctagaatgaggcatttgagggtagcccttcacaagtgacttn

SEQ ID NO: 98220 - DNA, 528 bp, Zea mays
  unsure (1)..(528): unsure at all n locations
aagtgatggtnntangnttcccgtcccctagtagctaaatcactccggcttggaattaccgggccgacccacgcgtccggggtccaaaactcatatgggagtttcaattttccttggttcaaggaggacctttggccagggcactaactgcaaatctgctaaactgtattatgcaaccttccacatctctcaccactgtttccacaggagttttacatctgggtccctctttcaccacttgattgtctacggtagataaatcgtttgagttctgaactgccttaggtacggcaatgcttgctacgttgacgaaagacaccgccacagatacgaggtgaatcctgacatggtcccagaatttgacaaagcaaggctttctttcgttggcaaggatgaaagtggcgaacgcatggaagtatatatatgattgccaactattttcgtgaagaattaaccttcttctaatctggtctcatgtatttggtctggcacatgccgaatatcgaactaccaactcattgggttttt

SEQ ID NO: 98221 - DNA, 541 bp, Zea mays
  unsure (1)..(541): unsure at all n locations
aggtgntntnggattggactgncatgctatancatttcgcnttggaattaccgggccgacccactcgtccgctaagttttgcttccatctggctggtgctttgcctgacttcagtgaagacaatgaaaagatcacattcaaaagattgcttttgaataaatgccaagaggagtttgagagaggtgaaagggaagaagctgaagctgataaaacagaagaggaaggtgagatcaaacagaccaaagaagaaagagaggaaaagagaatccgtgctcgaaggcgcatgctgggaaacattaggttaatcggagagttgttcaaaaagaaaatgttgacagaaaggattatgcatgagtgcattaaaaaattgtttggaaattgtgatgatcccgatgaggagaacattgaagcactatgcaaattgatgagtacaattggtgagatgattgatcgtgcaaaggcaaaggagcacatggatgcatnatttggtatgatgcataagatgtcaacaagtcagaagttggcttctcgagtaaggttn

SEQ ID NO: 98222 - DNA, 521 bp, Zea mays
  unsure (1)..(521): unsure at all n locations
agcggctgagttcattcgtactangtcatacacactggctcggattcccggccgacccacgcgtccgtctgctctcgacccctagctcctttgttctcacacaggcgcggccccctcgttgggaccgatatggctctggcgaatcaggggaccgttgattaccccagcttcaagctcgtcatcgtcggcgatggtggaactggtaaaactacatttgtgaagaggcatctcactggagagtttgagaagaaatatgaaccaaccattggtgtggaagttcatccgttggatttcaccactaactgtggtaagatcaggttctactgctgggataccgcagggcaagagaagtttggtggcctcagggatggatactatatccatggccagtgtgcgatcatcatgtttgatgtaacctcaaagcttacttacaagaatgttcctacgtggcatacggacctgtgcatggtctgtgaaaacatccccattgtccttgcggaaataaggttatgtgaatacat

SEQ ID NO: 98223 - DNA, 527 bp, Zea mays
  unsure (1)..(527): unsure at all n locations
agattataagcctgtgnttcgggtcatcagctccatcgcctgcagcactgtaatttccgggtcgacccacgcgtccggagcgcgccatctccaaggagggctctctttacactttagagagcacggactgcttcaacggtgatgtgctcctattccatagccatagctcctagctctccttactcttcgatcgttcttacctcttgccatccattcagtcaccgacgccgaggctgactatggaggacgcgctcgcgaacgccgaggcccccatgttctactgcctcgactcgctattctcggacaccgacatcgacccacgccgcgatgtgcgcatgctcatcgtcaactgtagcctcttcaacactacgccatctctcgcgtccatggtagtgcaccgctacaagatgctggaggacgtcacgtcgtttaaccttgtgagcattgtgtgcacagcatggttcatttacccggaccattcctatgtcatgcttcatgcagactccctggtgctactcctaaattgt

SEQ ID NO: 98224 - DNA, 521 bp, Zea mays
  unsure (1)..(521): unsure at all n locations
gcggtgcctttgttccatagtaactatcgatgatacgtccggctcgaatcaccgccgacccacgcgtgcgcggacgcgtgggttctgcctccttctcattctcgaccggtcaccccatctccaccgccacagccgtcgtcttccgccgccgccgatggcccgcctcttcacgcaaaccctcaccctagcccgccccgccgcctccccctccactaccgccgcatccgcttccctccgtggcctcgccaccaaggtcgagatcatcgagatcgatctcgccgaggaagacgctggctcctcgtcccacggctccccctcctcgtccccatcggtcgaggcggtcgggatccggcgcctggaggaagccatccacggcgtcatggtgcgccgcgccgcgcccgactggctccccttcgtgccgggagggtccttctgggtgcccccactgcgccgtcagcacggggtcgccgagctcgtgggccggatcgcggctgccgtgggcaccgaaaggggcgccggtn

SEQ ID NO: 98225 - DNA, 525 bp, Zea mays
  unsure (1)..(525): unsure at all n locations
gtcgtatgcttggcctttcgccccagagaagtagctccctccggcctcgaattacgggccgacccactcgtgcgcttggtcgagcacgtcgcctaattaaattccccattccaatacacagatctcgcggccgtgggtggctacgaatctcgcggtgcggaggcgcgacagaggcggtgtcgactccgacggactcgcagccaccggtggagacgccccaccggcgcactcctccaacgttcatagtttaagggcttgatttggataattagtcatcaacagaagtgataaaaaatggtggttcttgcagcatcaatcgtttcaaagtcgggaaaagcacttgtttcaagacagtttgttgacatgtctcgcataagaattgaaggattacttgctgcgttcccgaaactggttggaactgggaagcagcacacttatgtcgaaactgaaaatgtgcgatatgtttatcaacctattgaaagtttatatcttctacttatcacaaacaagcagagcaatattctn

SEQ ID NO: 98226 - DNA, 361 bp, Zea mays
gactttgcagacagagtactccctgcttatccgccacctctcgggagctaacccccgttttacccttgcatcccttaacgcgttcactgtcactcagcactccctctggcccaaccacgtacctgtgcccacccggctacgcgaccttcccgatctgccataacctaccccaagctcccaaccgatccgtctcctgctacgtcgcgtccctcaggcgcccctcacgaccgcacgcgtccgcctgtgtctcgaccgggtacacggactcttcaccttcacgactacctgcctgtcctgacgccgcataccctcaagtcgctctgtgacgactcagctgtggtggcaattccccgtgtcagac

SEQ ID NO: 98227 - DNA, 541 bp, Zea mays
taacggtaagctccaggctcttttagaggaagctagcatgcttcctggatctcccggatcgacccactcgtccgcccaggcgtgcgcccactcgttcgcccactcttttgtcgcgaactgaagcgactagtctaaggcggggtttgctgcggcgatggggagcgacctgtagacggagaagaagaagaccccggtggcgctgatgcccatcgcgaagcccctcgctggaaagaagctctgcaagcggaccctcaagctcgtgcgacgagcctctgaggccaagtgcctcaagcgctgagtcaaagaggtagtcaagagcattcgccgcgggaacaaagggttgtgtgtgattgctggaaatatttctcctattgatgtgattacacacgttccaatactatgtgaggaatctaatgttccttacatatatgttccatcaaaagaggatcttgcgaccgcatgaaccactaataggccaacttgttgcgtcctggttctgaccaaaccaaacaagggggagctcagtgacgaagttaaggat

SEQ ID NO: 98228 - DNA, 522 bp, Zea mays
  unsure (1)..(522): unsure at all n locations
gcagatcgtctgagnttaaatcacgactcatcgctacagcctctaatttccgggtcgacccacgcgtccgcacgctcctcagaacggtcaggtcggaattttcctgtacttcaactggtacgaggctctgagaaactgtcctcatgaccaagcagcaggccatagagcctgagacttccacattggctggtttgctgatccattgataaacggacactatccacagatcatgcaagatctcgtgaaagaaacgctgtccacgttcactcctgagcacgctaaactggtgaagggctcggcagactacatcggtatcaacgagtacacatccagctacatgaaggggcagaagctggtccagctggcgcccagtagctactctgccgattggcatgttcaatatgttattgcacgcaattgcaaacccattgtaccaccagcgaattctaaagtgctctacattgcccccacagtgatgtacgggtgcgtgaactaccctcagggagaactatgcggaatccg

SEQ ID NO: 98229 - DNA, 524 bp, Zea mays
agcgatcgtgtgagttacccagtcaactcatcgcagtacactgctccttccggccgacgcacgcgtccggagggatatgagacgctgctagattcaactgtacattacatgaagatttgaaggaagctcgatctggttaaaaggtgaagtgagagctcgccacgaagattagtcgagaacgtatccgtcacgagattgacctcatgatgtcagacatacaccctgttaaagcaatgtgtgacatccgcgatttggggctattttatgttgcatgttcttttcctgaaaaatgcaacccttctgtatttgacaagcgtgattggcagagtctttcacatattgaagcagcttgagatcttgcatattctattggcagcttgttgctcagcagtggttctgacttcaagtcgcacgatgagcgaacaaagctaggcttgtctagtgcattattcaaccccctccgaagcatgttctacctggacaaaatatctaagaaagcttctgattctagctatattatcaaa

SEQ ID NO: 98230 - DNA, 528 bp, Zea mays
  unsure (1)..(528): unsure at all n locations
agttaataatcctgttgttcgntccccgcacaataagtagcctccttccggcttcggaattaccgggccgacccacgcgtccgcagggaaggtcccatatgtcgtgtatctctttcctgatgaggataagcagcatatggtcctggccagattgagtgatgaaaagattctgcaatgcgatatgaagctaatgcagattacacaacagcatgatcaccatttaacgcctgctaacaccatcactcatgtggataacaacatgcaacttgtgacctccagagatgacacgtctatacctgtgtggaagccctgcatcccagtactgatacactatatcagtgagcctcacatgcactcaacgccatcaattgcactacatactaactcaaagtgactggctgcacacagcttggacaaatagatactgatatacagctccaaggcgagctcacactttaatactacgacgagctttaccagacatatcttgacatgttactcttgctaagtgaacgcattcccatcttt

SEQ ID NO: 98231 - DNA, 535 bp, Zea mays
  unsure (1)..(535): unsure at all n locations
agcgatgtgtctgagnnttcccgtcacccntatcgncactcacactatcacttccgggtagacggccgacccactcgtgcgcatggtctatgggacgatgactttgacgattacgaccactcatgccgacgttctagctgagctacaataacaagtcgacggaggtgttccagtccgtgccgtacgtggtggccctcttcatcgtcatgctgtggatctactacgcgctgctcaagtccaaccagctcctgctcatcaccattaactccgccagctgcctcatcgacactctatacatcgccatgtacctgctctacacgcccaagaaggcaaagatgttcacggtcaagatcctcctcctccttaacgtagaccttttctggctcatcctccttctcacgctgttgctctccgtcagacaacgccgcgtactcgacctgaacttgacctgcctcagcttatattttagcgattttattgctctcctcaacattaatcgtcaattaggtgatgacaacggaacctttgtgttcat

SEQ ID NO: 98232 - DNA, 531 bp, Zea mays
  unsure (1)..(531): unsure at all n locations
agtagaacgtctaagnttagnntcacagactagtnagtacgtactctttaatttccgggtcgacccacgcgtccgaaagcgaaaccagagccattgcctacacctttaccttaacctaatcccgaacctaagccaggtcctaggcccgatctctaaaataaaaccaaatccaaaacctgaaccaaaaccagatcctaaaccagatcataaacctgagccaaagccagagcctaaacccatacctaaaccagagccaaagccagatccacaaccaataccagagcctaagccagagcctaaacccgaaccgaaacctgatccaaagccagagccccaacctaagccatagcctaagcctgagccataaccataaccaaagccagtaccacaaccaaagcctgaacctaaaccagaaccaaaaccagagccaaagccagatcctaaacccgaaccattaccagagccaaagcctgaacctaaacccgaaccaatgccaaaaacctaaaccatagccaaaacctgatcccaaan

SEQ ID NO: 98233 - DNA, 529 bp, Zea mays
  unsure (1)..(529): unsure at all n locations
atggtgatgtgcctgtggnttgggcccccgcttagtagtagcctcttccggcctcgaattcccgggccgacccacgcgtgcggacgcacatctatctgtcaagcgtcgccgttgcctcgatcagagtctgaggcgagcacccgcatggcttctgctggcggcggcgcatgagggaaggtatccttcaagatcatcctcaccttcgaccccaagctccctttcaaagtgttcagcgtgcccgaggcggcgccctttaccgcggtgctcaagtacgccgcggaggagttcaaggtcccgccccagaccagcgccatcatcaccaacgatggaattggcatcaacccccagcaaagtgcatgcaacgtgtttctgaaacatggttcggaactgcgtctcatccctcgcgatagggctggagctgtagtcatgtcttccggttagaggatatatacagtccaatgcataatgagcaaaacttgagagaaataaagctttgatgctggccttgcttggcttgaagatgttgtac

SEQ ID NO: 98234 - DNA, 540 bp, Zea mays
  unsure (1)..(540): unsure at all n locations
acgattctaaattgctgtggnnttacccctttgccttatccgncagttacagtacccccttcgaattcaccgggtccgacccacgcgtggcgacttgcatggtacgactgtgtggttttctatttatccaatcgtcggaccgtgggaagatataggagtgtttcaggaccaggatgcgttgcagtgcaaggacattgttgtggaatttttgttgctgattgccaaggggtgggtcggtcgatgtagcgtctatgcatggcttgtagttctcctgtaatgttgttgttaatttccgcttggcggcttgtaatcttacgtgtatctggaacttgaatcctgggtgattaatccggcaagcagctgcctgtttgtaaaaaaaaaaagtatatggattttaatatatttaattttgcactaaatatttaaatttatttttaccataatgtctgctaatgtcttatttttttcaaattctttataacaaaatgcacgcccttttcaaaatgaaccagtttttttttaaaccttaggggctttttg

SEQ ID NO: 98235 - DNA, 529 bp, Zea mays
actcctgttttgtcttttcggagtagcctgctccccctcgaattaccggtccgacccactcgtccggaccggcatgactatcaccctcgacgtggtctcgtctgacaccattgacaaccttaaggccgagatccatgacaaggagggcattcccccagaccagcatcggctcatcttcgctgtcaaacagcttgaggacgggcgcacgcttgctgactacaacattcagaaggagagcaccctccaccttgtgctccgcctcacgggaggcatgcacatctttgtgaaaaccctgaccggcaagactatcaccctctaggtggagtcctctgacaccattgacaacgtcaaggccaagatccaggacaaggagggcatccctccagaccagcagcggctcatctctgctgggaagcagcttgaggacggtcgcacgcttgccgactacaacatccagaacgagagcaccctccacttggtgctgcgcctcaggggaggcatgcagatcttcgtgaagaccctgaccggc

SEQ ID NO: 98236 - DNA, 527 bp, Zea mays
accctgattccatgtccggagatagtagcttactatcatttaccgatcgaccacgcgtccgctccgcgcgcctcccctccccgccccgccgtcgtttccatcggagctccctaccgactgccgggagccattgcatccgcatcagcgacgcgccgcggactctccgctctcctcctctccccttcctcccgtgcgctccgccgccgcctgggccccctcgccgcggcggcctcctcaccgcacgtcgccccgtggccccttctcgctccgcgcggtgccagaaccgcgtcgtccggcgggtcctggcactccccgctgaacgacccgtccccgaactggagcaaccggccgcccaaggagacgatccttctcgacggctgtgactacgagcactggctcatcgtcatggagttccccaccgaccccaagccttcagaggaggaaatggtcgcggactacgtcaagaccctcgcggccgtcctcgaagtgaagaggaagcaaagaagaaaatctactcagtgtgcact

SEQ ID NO: 98237 - DNA, 529 bp, Zea mays
atcgctgtggagcaatcgaaacgagccatgcactgtttcgaattaccggtccgacgcatgcgctcgtggggacatatatccagattatgattgcatcgctgttcgggcacacttgttcttccgggaggaggatttggaaagtttcaagcagatggtagacacctacttatctgatgcctctaggcaatgggcagccacaaatgaaggcagttctcttctggacagtatgactaaagcaattgatgaggttatcaaaattaaagagtgtgacatctacagctataatccagactctgacgcatatccagttcttgagaaaggggccatatggtcgttcaactactacttctacaataggaagctaaagcgagttgtgagctttcgatgttactgcactagcaaattatcaggagatgacttcttaaccggtgttgcgtctgatggtgaagaggaagatgccttgattgacatggacatatgactgaccgtgttctgctagctacctgatgtgcgtataatataaaacatc

SEQ ID NO: 98238 - DNA, 531 bp, Zea mays
  unsure (1)..(531): unsure at all n locations
atagatagtcctgtgttcagttttctgaacatagtagactcatattatttccgggtcgacccacgcgtccggcagtctcnagttacaattcccaatccattaaactttaccagccttttgcaaactcagaggagnacgttattgtacccaaggcggagaagaagcctgtttttaagataccctctgaggacgagcccgtggccccggcggataaagcccccgctgtgaataagcctaatgcggataaactgctcccggcgggaaaatccgacggcaaggaatgccgtgttgacaagaacgtgcggaagaatgccaagaagagcgtggagacgtacaagatctacatcttcaaggtgctgaagcatgtgcacccagacatcggcatctcctccaaagccatgtccatcatgaactccttcattaacgacatcttctaagaagctccgcggcgaagcggtcaagcttttccgatacaccangaagccccaccatcaccttccggggagatccaagaccttcgtccggcttgtt

SEQ ID NO: 98239 - DNA, 538 bp, Zea mays
  unsure (1)..(538): unsure at all n locations
cgtttgagtagttctgtggnnttttntgttcancttatcggctacaactattccggcntcggaattcccgggtcgacccacgcgtgcgcccacgcgtccgcccactcgtctttccactcttccgggctgactcaaggctaagggagcaggtagaaattggtaatgatgacgggctttacgttagttgtgtggcttcctcggcaaacctttgggcactcatcatggacgctggaactggtttctgttctcaagtttacgagctctcaccagtttttctccacaaggactggataatggagcagtggcagaaaagttactacataacagcaattgctggatcaaccaatgggagttcattggttgtcatgtccaaaggaactccttacactcagcaatcatacaaggttagcgaatcggtcccttacaagtggatcaatataaagtggaaagaagggttccatgtaacatctatggccactgctggaaaccgcttgtgcgtagttatgtcaaggaactcatggttttctactcaagtggt

SEQ ID NO: 98240 - DNA, 505 bp, Zea mays
cgcaacggtgatccctacccctgctcttccctcattacgtcgacccacctcgccacgacgttactcccatcgccgctttttgggcgcaccccagcaaacatcggtcgatccgcaaccggcgaccccatcgtgactgggccccctcatcgaggtctccctctttcgccgcccgtgaccatggccccaagccgtcggaggtgtacggcttcgttggatccatcaccaccgtcattgccaccgccgtgtacctcgcctgggcatacacgcccgagcccgtcctccagtcactcggcatcacctactaccctagcaagtactgggcactggcggtgccatcgttcgtggttgtgaccgtggtgctgtccatgggcatctacatgggcctcaacttcgctgccactcctcctccgacttccttcagtactatcttcgatgaaaagagtatggagcacacaaccttttttcctgcaactgaggatgaaaggcccatcgaacccatctcaga

SEQ ID NO: 98241 - DNA, 528 bp, Zea mays
  unsure (1)..(528): unsure at all n locations
atagatacgtgtnatgttcagnttcgacgctattagtaacactatccaccttccaatccgacccacgcgtcacgcgacccatgggcagactcgtgcgcagattttaattagggttcctcaaaaaaaccctaagcccaagctcaatcaaaaaccactaccgtcccttaaccaggccggccgtccatcccactacccatggcgatggcgtacaaaatggccacggatgagatgaacgtgaaggacgagtgccatcgctggttcatggagatgaagtggaagaaggtgcaccgcttcgtagtgtacaagatcgacgagcggtcgcgcgccgtgctggtggacaaagcgggcggacccagcgaagggtacaacgagctcgtggccacactgcccggctacgactgccgctacgccgtcttcgacttcgacttcttcactgttgacaactgccagaatagcaagatctttttcatcgcctgatcacccgctgcgtccaagatcatggccaagatcctgtactcgaaatcgaag

SEQ ID NO: 98242 - DNA, 539 bp, Zea mays
  unsure (1)..(539): unsure at all n locations
agtttaagtagcattgtgtgcttcgaccttcgtaggcttctcccggtctcggaattaccgggtcgacccactcgtccgcttggccccaaaatccgatattctgagatgtttcaacatgatggagagttgaagctctcaaggcgttacctagtttgcccaccagagatagatagaacatctgccgagtacttggtgaagaatggcatccgcactcatgctcgcattgagacagtttaattcggccatgtcacatttttctggaacggtaacacgtcgggatactttgttgcaactaatgacgagtttgtataagtacctattgacagtggaattacattcattgttgcacccaatttgaaggcgcttgaaattgctggaaaagctagggtattactcctaattggaaagtttgacccagtccttgttaaacctgccaattggtgacattntctggtaacactgttaattttaaggccaccttaattgtttgtaaggcaatttttgaacctgtaaaaattattggaatgctgccgcccaag

SEQ ID NO: 98243 - DNA, 542 bp, Zea mays
  unsure (1)..(542): unsure at all n locations
tgatgcctagatgtgatgttgggctccaccgctangcacttcgtgcaataatggtccgacccactcgtccgcggcgcgtgggtccctctcgtcgccgacttctcccgttcgcaacgccacgctccccaacggcgaaatggcccctaagcgaggtggcagggcaccggtgccggccaagaagaagaccgattaagtgacgaaccctctgttcgagaaaaagccgaaacagttcggcatcggcggcgcgttgccttccaagaaagacctgcaccgattcgtcaagtggcccaaagtcgtgcgcattcagcgccagcgtctcattctcaagcagcgccttaaggtgcctccggcgctcaaccagttcacccgcaccctctacaagaaccttgctaccaacctgttcaagatgcttcttaagtaccggcccgaaaacaaggctgtcaagaaggagaagcttcttaaaagggcccaggcttagaatgaaggaaaaactgttgaattcaagataccaattgttgtgaaatatgggctttaccatgtag

SEQ ID NO: 98244 - DNA, 518 bp, Zea mays
tgtccggctggttcggacgatcgtagggtacttacgccctgacttagcggaccgacccagacgtacgcgcgagctagggctctggcgtttgccccatttcggtgctcacctggactagactgtgcctgcccagctgggaattcactcgtcgagccttacactgctggccataacattctcctagcccacgctgaggctgttgatctttacaacaagcattacaagcgcgacgacacccgcatagggcttgcgtttgacgtaatgggtcgtgtgccatacggaacatcgtttctggataaacaggccgaagaaaggtcctgggacatcaacctaggatggttcttagagccagtggttcgtggtgactaccccttctccatgagatcattggctagggaacgactacccttcttcaaggacgagcagaaggagaagctcgccggttcctataacatgttggggttaaactactacacctcacggttctccaaaaacatcgatatctcaccaaactactc

SEQ ID NO: 98245 - DNA, 546 bp, Zea mays
  unsure (1)..(546): unsure at all n locations
tgcttcgcgagtggtgtgttggggnttcgggcacttactactgnctgtccggtttggaattcccggctcgacccacgcgtccgcccacgcgttcgcgaccgcttcttcggcgtggagggcagcaagctgctgcagtgcgtgtgctggtccaacggccgtgagaccgagaaccccagcgtcgacaacaagcagtgccccgggaagaacttcgtggtgctggtcgtcaggctcctcctcgtcgagctcttcctccgctacgacacattcaccggcgaggtcggcaaggagctgctcggcaccagcgtcatcttcaccggtgtcacgaaagctacctccggtccgggcagcgagtaaaccgtccggccggcgcgcgtcgttggatatatgatgagtggacgtgacagagtgtcccattatttcttaatttcgtcattttactccttccttctaataagacttctctgtcaccctcgggcccacctttacttgtgattggaggtgtttgtcgcttttgtaataattattatgcctgatggcatgttgcat

SEQ ID NO: 98246 - DNA, 504 bp, Zea mays
  unsure (1)..(504): unsure at all n locations
atgtgggtagttcgcacgtatcgtagatcactccggctggaattaccgggccgacccacgcgtccggttgggtgatcctaatgagcaagctcgcctatgactgagatgaatggcatgctgggttggtctaggcctatgcgtattgggcctgctgcaaacaagaaagctactgttgttcaggagaaagtaccaagtgctcagggagttcagtctgacaatgatcctaacaatacaaccatttttgttggtggtcttgaccccaatgtcactgaagatatgttgaaacaagttttcaccccttatggggacgtagtccatgttaagattcctgttggcaaaagatgtggttntgttcaatatgctaacagatcttcggcagaggaggcataggtaattctgcagggcaccttggttggagggcagaatgtgatgctttcatgggtcgcaacccttcaacanacaagtcaagctcaccaggactcaacagtgggccgggctattctt

SEQ ID NO: 98247 - DNA, 547 bp, Zea mays
  unsure (1)..(547): unsure at all n locations
tgtccgggagtgtattgctgangccaggcncacttcagcactgatcgctccggtccggaattcccgggtcgacccacgcgtccgcccacgcgtccgcccacgcgtccgctccttttgctcagaaacccaccaacccgggccaggcgccggctgtctcggccgtcggcgccggcgacgtcgccctatcccggtccttcaggtgaaccaagttggccatggccttcaacaagatcaaggtcgccaaccccatcgtccagatggaccgcgatgagatgaccaaggtgttctggaaatctatcaaggacaagcttatattccctttcgtagacctcgacatcaaatattgtgacctcgggctttcacaccgtgatgctaccgacgacaaagtcacagtggaagctgctgaagccacactcaagtacaatgtggctatcaagtgtgccaccattacaccagatgaagcaagggtaaaggagtttggcttgaaggctatgtggaagagcccaaatggcacaattaggaatattctgaatggcactgtgttcat

SEQ ID NO: 98248 - DNA, 544 bp, Zea mays
cgtatgaagtggcttgctgaacatcgtatatggtcgcagtgctcgtaccggttcggaattcccggctcgacccacgcgtccggcgcaggagatcgagcacaccctcctccttatccgcggcctcaacctccacgtggcacagggaggcacaggtgaactgggcacggtggtgttcctgcacggcttcccggagatatggtactcgtggcgccaccagatgcgggccgtggccgcggcggggtaccgcgccatcgcgccggactgccgcgggtacggcctgtcggagcagccgccggagcacgaggaggtctctcctgacgacctcatcgccgacgtgctgggcatcctcgacgccctcagcgtcccgaaggcgttcttggtgggcaaggacttcggcgccatgccggcgtacgagttcgcgctgcagcacccgggccgcaccctcggcgtggtgtgcctgggcatccccttcaacccggcccccatgtccttcgacgccatcatgcccgaaggattctacatcctgcgctggcgcgaggccggc

SEQ ID NO: 98249 - DNA, 550 bp, Zea mays
  unsure (1)..(550): unsure at all n locations
cgatatgcggggtgtgggtgctgaggccctagcnacctacagnactgccgctaccggttcggaattcccggctcgacccacgcgtccgacactagctagctaggtcgtcgttcctaattatctgaccttgcagcaggcaccacagcagggggagcataaagctgggcgtgccgcaccggagcgccggcgcggacgagcgcggcgagagctccgcgccggcgatggccggcgtgcagcgggaggtgtactcgaagaagggcgtgatgcggcggctgatgcggtggagccggccgcggtgggccgcggcggagcaggcggagtgcgcggtgtgcctggacgagttccgcgcgggcgacgtgctggcgcacctgcgctgcggccaccgcttccactgggcctgcgcgctgccctggctcgagggcacctcacggtgccccttctgccgcgccgtcgtggacgccggcgccgccgtcgacggcgcctagaagcggccgaggctctggtcttgctggggctggcccgtgggacggcgcggggcgccttgtcgctt

SEQ ID NO: 98250 - DNA, 532 bp, Zea mays
  unsure (1)..(532): unsure at all n locations
agctcgcctggtgantttcgaatctncnactgncgtantcgcctcgaattacctgaccgacccacgcgtacgcccaggcgtgcgcccacgcgtccgcccacttgttttctgacgcgtgggtgagccttccgggggagggtgggtggtgctgggtgccggggatgagctgcaacgggtgccgcgtgcttcgcaaggggtgcagcgacgcgtgcgtgctgcggccgtgcctgcagtggatcgacggcgccgaggcgcaaggccacgccaccgtcttcgtcgccaagttcttcggccgcgccggcctcatgtccttcctcaccggcgtccccgagccgcagcgcccagcggtgttccagtcgttgatgtacgaggcggccgggcggacgatcaaccctgtgagcggcgccgtggggctgtttcgcgcgggcagctggcaactgtgccaagcggccgtggaaacagtgcttttggggcggggccatcggcccgttgccccaattcgactggggccgggacaacacgtttgcttttg

SEQ ID NO: 98251 - DNA, 544 bp, Zea mays
  unsure (1)..(544): unsure at all n locations
agcactgggtggctgagnaagggctccagctatcctgcactggcctggaattcccgggtcgacccacgcgttcgcggacgcgtgggctacttctccctaccgttcgagaccccaagcaccagcgcggcttttggggctgcggcgaccatggctgtcgggaagaacaagaggatctccaagggaaagaagggtggcaagaaaaagaccgtcgaccctttctctaagaaggattggtatgacatcaaggcaccgtcggtgttcagtgtgcgcaacatcgggaagactctcgtatccaggacacagggtaccaggattgcttctgagggtctgaagcacagagtctttgatgtttgcctagctgatctttaaggtgacgaagatcaagcttaccaggaaaataatgcttcgtgctgaagaatgtgcaggcaggaatgtgctcacaaacttttggggtatgaattttaccactgattaaatgagatccctaatggaagaaatgcagacattaatcgaagcccatggggatgtcaagacaacggacaac

SEQ ID NO: 98252 - DNA, 547 bp, Zea mays
  unsure (1)..(547): unsure at all n locations
cgcactgtgtgggtatnnttgggctctagatagtacagtagtgctacgtccggnttggaattcccggctcgacccacgcgtccggcatgaggaaatcaacgactgattctccattactgtcggtcacttcggatggcggcaccgccngatgggaatgtccgcttaggcgaggggtgggacgaggacgacgtgctggagccgcagccgctggaggtcatagcgccggatgtcaagtccaagaagcgcaatccggcgcccggagttcgggttgttggtcgccggatctacgatccagagaatggcaagacctgccaccaatgccgtcagaagacaacagacttcgcagcggcgtgcaagcaagtcaagaagaagggtccgtgcccagtcaagtattgcctcaagtgcctccttaacaggtatggcgagagtgccgaggaagcggccggcaaggaagactggatctgtcctaagtgcatgggcatctgcaactgcagcttctgtagaaaggagaaaggccagatgccaactgggataatggcccacatcg

SEQ ID NO: 98253 - DNA, 545 bp, Zea mays
  unsure (1)..(545): unsure at all n locations
tggtgcaaantgcgttnctttctccagttncatgcaccgccctgtatttaccgggccgacccacgcgtccgactgagcacagcacaggcagttcgagagattgtagagatagagagagagataaatatgtcggggttcgggcaccaccaccacaaccagccggctcccccggcgtcgggccccaaccaggtgttcaagatcttctgccgcgccaacgagaactactgcctggccgtccgcgacggcgccgtcgtgctgggccccgtcaaccccaaggacgaccaccagcactggtacaaggacatgcgctttaacacccgggtcaaggacgaagaaggcatgccggcgttcgcgctcgtcaacaaggccacggggctcgccatcaagcactccctcggccagtcccacccggtcaagctcgcgcctttcagcccggaccaggaggacgcgtcggtgctgtggacggagagcaaggacgtgggcaagggcttnccgtgcattcggatggtcaacaacacccgacttaaacttcgacgcctttcacn

SEQ ID NO: 98254 - DNA, 547 bp, Zea mays
  unsure (1)..(547): unsure at all n locations
cgacctccggtgtatnnctgggcctcagcnacctacagcactattactccggnttcgaattcccggctcgacccacgcgtccgggagggcaaggttgaggatgtttatgagtttgaagaaaaggaaaagaagaaggggaagagcaaggaggtttctcatgagtggcaattggttaacaagcagaagcctatctggatgagaaagcctgaggagattaccaaagaagagtatgctgctttctacaagagcttgaccaacgactgggaggagcatctcgccgttaagcacttctctgttgagggtcagcttgagttcaaggctgtcctgtttgtgccgaagagggccccctttgacctcttcgacaccaggaagaaactgaacaacatcaagctctatgtgcgccgtgtcttcatcatggacaactgtgaagagctgatcccagagtggctgagctttgtcaagggcattgttgactctgaggaccttccnctcaacatctnccgtgagacccttcagcagaacatgatccttaaggtcatccggaagn

SEQ ID NO: 98255 - DNA, 547 bp, Zea mays
  unsure (1)..(547): unsure at all n locations
cgtttctggggtgtatgnaagttgcnctagcttgcatcngcttantatctctccattcgaattcccggctcgacccacgcgtccggtggctggtcaatggttttatttaccagtttaggctgacaaaaaggagggtggattctgggtagcactagatacacgagagctattttacagttttcatactgatgatgtgcctgcagaatcagttatgcacaaatgtgtggtccatttcattcctcagcaaaaacagattcccagtctaaagcagcatccgggatttattgtccagaaggtctatgatgcagttgagaagaaactgtggaacctaacagacaaggactatgaggataacaagcagcaagagattgatcttctggttaagaaaacaatagaccgtattgggcagcttcctgatctcgaacctgaagagacacctcttgagaacaattatttgtcaaataaacgaggcctgcgtaagaaacctgttaaccctatagatgtaacaagagaaccttcagttgcaaattcgaacagtttgcaaaag

SEQ ID NO: 98256 - DNA, 546 bp, Zea mays
  unsure (1)..(546): unsure at all n locations
aggatgccgnaattagtgtccctccctcatcgaacaacagtagcgctgcggcatcatcgggccgacccacgcgtccgcagagacttcttgaatccactagctaagctttccatgttaaagttcgctcttggtcaccagcgcnaggcctacgacgccggctgcgtccgtgccgtcctcgccgagctcatcctcaccttcctcttcgtcttcgccggcgttggctccgccatggcaacagggaagctggccggcggcggcggggacacggtagtgggcctgacggcggtggcgctggcgcacacgctggtggtggccgtcatggtgtcagcggggctgcacgtctccggcggccacatcaacccggccgtgacgctgggcctcgccgtcacgggccgcatcacgctgttccgctccgcgctctacgtggccgcccagctgctcggcttcacgctcggctgcctactcctcgctttcctcgcagttgccgacagcggcgtgcccgtgcacgcgctgggcgccggcgtctgcgcgctccggggcgtgctn

SEQ ID NO: 98257 - DNA, 537 bp, Zea mays
  unsure (1)..(537): unsure at all n locations
tggacggggtgtgtgttgggccatcagatttagntgcctactcctatttggccgaccacgcgtccgggcgttagcgatggtcctgttcatggctgtcgccgttctgctcgccggggctgccggcggcggcgcgcagcatggcgtgtggagcatcatcacccggcccatgttccagagcatgctgagccaccgcggcgacagcgggtgccagggcgccttctacacctacgacgccttcatcgaggccgccagcaagttccccggcttcggcaccaccggcgacgagcagacgcgcatgcgggagctcgccgacttcttcggccagacgttccacgaaaccaccgggggatgggcgactgctccggatggaccgtttgcctggggatactgccgggtgaaggaacataaacagacgggcccaccctactatggacgaagactcatacaggtaactcataagtacaactacaggcttccccggccaagcccctaacctgaacctggtgggccacccgggacctgttggctagagacccc

SEQ ID NO: 98258 - DNA, 545 bp, Zea mays
  unsure (1)..(545): unsure at all n locations
cgccccggagcgtgtccagtccactcagaaacatagtagcactctaccgcattggaattcccgggctcgacccacgcgtccgcccgttgcaagtatagtctcttcggctcttgaagacgatgggcaaggacgacgtgatcgagagcggcgctggcggcggcgagttcgctgccaaggactacacggaccctcccccggcgccgctgatcgacgcggctgagctggggtcctggtcgctgtaccgcgccgtgatcgccgagttcatcgccacgctgctgctcctgtacatcacggtggccaccgtgatcgggtacaagcaccagacggacgcgtcggcgtcgggtgccgacgcggcgtgcggcggcgtgggggtgctgggcatcgactgggccttcggcggcatgatcttcgtcctcgtctactgcaccgtcggcatctcggtgggccacatcaaccccgacgtcaccttcggccctttcctggcgcgcaaggtcctcctggtgcgcgcgctgctctacatcgtggcgcaatgccttggcgccatn

SEQ ID NO: 98259 - DNA, 547 bp, Zea mays
  unsure (1)..(547): unsure at all n locations
agatgacgnactagtgctgctgcntcncccgcaaaattgatgtcatgctccggcctggaattcccgggtcgacccacgcgtccgggaagcaatggccactgcgttcggtgtaattgttgatttcattgaccaggaactgtcacggttcattgcagctgggaagctgcactgcaagattgataaggttgctggtgttctggagactaaccgacctgatgagaggaatgctttctaccaggcgaccatcaagcaaggggacttcttgctgaaccgcatccagaagctttcacgggtcattgacctgtaaggactgtttgtgttggagctattcctgcaatcggcgcctgcaaatgtttcccaccctacgtcttccacaagacatctctccttgagtggggattggggaacaagccctaagaacatctgtgttttaagtgcagaatatttgtgttttaatcagtaaacgctgtccaaaaaaaaaaaattgcccaagatctaaactgaaaaaaaaaaagggcggccgttctagaggatccaagcttacgtc

SEQ ID NO: 98260 - DNA, 528 bp, Zea mays
  unsure (1)..(528): unsure at all n locations
tgcgagtcgctgggttacctgatccagntgcatagcgcttcggatagcgaccgacccacgcgtacgcgggcgcgtgggtactgatctcactgatcttggattgctatggcaaaggcaggcgcgccgggggggtcggcggcccagctggtgactctcgggctatcactcctctgcgctgtcgccggcccggccgccgcgcagaactgcggctgccagccaaacgtatgctgcagcaagcttggctactgctgcacgaccgacgagtactgcggcgacgggtgccagtcgggcccgtgccgctcgggcggcggcggcagcagtggcggcggtggtgcgaacgtggctagcgtcgtcaccggctccttcttcaacggcatcaagagccaggccgggagcgggtgcgaaggcaagaacctttacacccggagcgcgttcctgagcgccgtcaaagcctacccaggctttcgcccattggcgggtcgcaagtgccaggcatgcgcgagatctgccgcttttttgggcacgccc

SEQ ID NO: 98261 - DNA, 518 bp, Zea mays
tgagctatggtttctgacacgtacgtagattctctgacttgcggaaccgacccacgcgtacgcccacgcgtgcgcccacgcgtccggaggatttcgttgagatctaagatagagaatcgctggggacagtctgttgtctgctgcgtacggtggtgttgaaggggagaagtttaagatctgttccacagatcacgcgtgcgcgctcgcgaatcggaggttccacacatagcttcgtcgttttgaatttgatgtactaatggagtctaagggtggcaagaagtctagcagtagtcgttccatgatgtatgaagctccccttggctacagcattgaagacgttcgacctgccggaggcgctaaagaagtttcagtctgctgcttactccaactgcccaagaagccattctgatattccctttggcttcctcgttctaatagtttaagatttcttttctgaccctttgaatcttaccaaatcccactgggctggttgttttcttgacaattgaacagttcct

SEQ ID NO: 98262 - DNA, 532 bp, Zea mays
  unsure (1)..(532): unsure at all n locations
cggttcctgggnccccagccatctgttttcctgcatcgcctggaatacccggcccgacccacgcgtccgcccacgcgtccgcccacgcgttcgcccacgtgtccgcaactctttcccaaatgcaccggcggctcggctcgcccatcttcgcgccaagcaccgaatctccgatggcccgcacgaagcagacggcgcgcaagtcgacgggcggcaaggcgccccgcaagcagctggccaccaaggcggcgcgcaagtcggcgccggcaaccggtggcgtgaagaagcctcaccgcttccgccccggcaccgtcgcgctccgggagattcgcaagtaccagaagagcacggagctgctcatccgcaagctgcccttccagcgcctcgtccgtgagatcgcgcaggatttcaagaccgacctncgcttccagtcctccgctgtcgccgcgctgcaggaggccgccgaggcctacctcgtggggctcttcgaggacaccaacctttgggccatccacgccaagcgcgtcaccatatg

SEQ ID NO: 98263 - DNA, 567 bp, Zea mays
  unsure (1)..(567): unsure at all n locations
cggatgcctggagtganannncattcttgaaaanccannttcgaaaggactggatattgtcattcgcccattcntggcaaaccggctcgacccacgcgtccgcgggcgcgtgggcggacgcgtgtgcgccttctgccttctgcgcctccatttcggcctcggtcccttgcaagttcagtctcgcctccaaccatgggtaaagagaagtcccacatcaacattggggttattggccatgtcgactctggcaagtcgaccaccacaggacaccttatctacaagcttggaagcattgacaagcgtgtgatcgagaggtttgagaaggaagctgctgaaatgaacaagcggtccttcaagtacgcctgggtgctcgacaagctcaaggctgagcgtgagagaggtatcaccattgatattgctctgtggaagtttgagaccaccaagtactactgcacggtcattgatgcccctggacaccgtgacttcatcaagaacatgatcactggtaccttccatgcttgactgtgcttgtcttatcattgacttcaccactggtgattttgaagc

SEQ ID NO: 98264 - DNA, 536 bp, Zea mays
  unsure (1)..(536): unsure at all n locations
ctaagaacctctaggntttcgattnttctacattcgtancgccctggaattaccgaaccgacccactcgtccgatctgctcctccaaagatctgataagctgttatgtttgttgcaattcataacattgttcagacagggtaccacggcagaacacgtacaagcccagacgagcactgtacatagctacaataagtcttctgacatcaccaagatgacccacaaaacgggtactgacaagatatagtacaatgaaatcatttcgctggccctggaacttgtccacaatggtaaccttggtagggggctcaatattccatggtttgcatcttctgatgatcacatcacgaataataagcttctgaccattggatggcgacaatcattgaaatcttattggcaagcttgcccaattaagcccaatttccatttcctcacctacaatttccttaaaatcaccactttttccccgttaaatgcaaagcgcatggttcttcttaacctcatggttaaaatacatgcccatgatttaattct

SEQ ID NO: 98265 - DNA, 541 bp, Zea mays
  unsure (1)..(541): unsure at all n locations
atggctaggttcagcctgnacgcacctgcactaccgcntcgggttagggtaccgacccacgcgtccggctgcaccggcgccccagccttgacgagctttatgtcgacacggctgttaagaagttggagagcagagattttgttggtgctaaaaggattgcccttaaagcacagaggattttcccagagatagagaacataccccagctgttaactgtctgtgaagtacattgtgcagcagaagcaaaagtaaatggaatgttggatttttatggaattctccaagtagaaggaacagcagatgaggtgaccataaagaagcattatgcgaagcttgtcctctcacttcaccctgattaaaacagttatgctggtgcagaatctgctttcaagtttggtgcagaagcatactcaacattgtctgatcgaaccaaacgatatgcatatgatgtcaaatggagggctgcttccaaagttgcaccaaaaccagctacacaggcgacacaacccaatcaggctacacaacctaaacctgatgcaan

SEQ ID NO: 98266 - DNA, 528 bp, Zea mays
  unsure (1)..(528): unsure at all n locations
agcctatctgctgcnttcctgtccaagtatagtatagttactctggnttggaatacccggcccgacccactcgtccggcaggtgctgtgagatacagtttgtcaggtgagccttttcaattgcaccagatgccccggaaatgttgtagcttgactatcccagtcaccagcgacgccttctaccacttctagcaaaagtatgtctgatgagcagtgctggcaattttatgaaaaatatgtatgtaaagagaactcctgaaatgagcaaagacatacacatttactctagtgctctgaaggcgacactaacttggcagaatatgattacgattcaggagtgtcgcgaggcctgtggaggtcaaggtctaaagactgagaaccgcataggaattttcaaatctgaatttgatgttcagtccacatttgagggtgataacaatgtgctaatgcagcatgtcagcaaagcgctttatgctgaatttttgcgtgcacaaaagaagcagcatccattcaagggattgggtttgga

SEQ ID NO: 98267 - DNA, 518 bp, Zea mays
  unsure (1)..(518): unsure at all n locations
actggtggnttccctcctgaactgcagtcgcatacgtactcgaattgcaggaccgacccacgcgtccgggaagatgacggtgacgccacggatcacgttgagttacgggcggctgacggtgcgcgggggtacggtgctcaccggcgtgccggacaacgtgtcggcggcgcacgcggccggggcggggctcgtcgacggggccttcgtcggcgcccacgccggcgaggccaagagccaccacgtcttcaccttcggcacgatccgggactgccggttcctgtgcctgttccggttcaagctgtggtggatgacgcagcggatgggcgtctncgggcgcgacgtccctctgagacccagttcatgctcgtcgaggtccctgccagtgacggccggtgcgacgacgcccccgcgtacgtggtgatgctttcccttgttgaagggcaagttctggcggggcttgcaggggaacgaccgcgaccagctgcagaacttattcaagagccggggacaaggcggtc

SEQ ID NO: 98268 - DNA, 538 bp, Zea mays
  unsure (1)..(538): unsure at all n locations
ttgctagggttcaagtcccctcntcatcgcgttcgcctggattacgggaccgacccacgcgtccgcggacgcgtgggcggacgcgtgggggacgtttgtgttgcaaggcttccaggttggtgcagggcagggacggacaagcttcccttttgccagattctcggagagtacagaatggagttaccagagtacaacacgattgaaccttatgcgaaaatgaacgagaactgtccgtccttgcccccaacgtacaaacgacccgcacgctgctgactacgagattgtctactatgtatctttctgcagctgcttcgtttacacagttggcagtagagtgttgatgctatgttctgtaaataaaagacactatatatataggtgcttggtagatggtagttcttaccaggaatgtagctgcgatgtattcaggttcacggttttcaggcgatcaggtctgaagccacggcgttggctaccaatatgaatggtagggattggcaactccaggaaggtggttatatgttttaatgtatgattn

SEQ ID NO: 98269 - DNA, 532 bp, Zea mays
  unsure (1)..(532): unsure at all n locations
agataatgcggtcgcttcttgcccatgttagtagagacgctccggtttgggatacccgggccgacccacgcgtccgcccgcgcgtccgccgcgctagctgaggactttacagcggcacagaggtgcgacgtgacgaggacgactacgcaggcgccacacatggcatcccagctctccgccgccgtgccccggttccacggcctccggggctacgccgcgcccaggtccgcggtggcggcgctgccgtccgtgagggtgggcaggaagaggtcgtcgtcgcagggcatccgctgcgactacatcggctccgccaccaacctgatcatggtgacgacgacgacgctgatgctgttcgcggggcggttcgggctggcgccgtcggcgaaaccgcaaggcgacggcnggggctgaacttggagccgcgcgacttccggcctgaaaacggtggacccggccggttcaaccttggcgacacgctggcctgcggcgccgtcgggcacattcttggcgtccgcatcgtgctcgggctcan

SEQ ID NO: 98270 - DNA, 523 bp, Zea mays
  unsure (1)..(523): unsure at all n locations
gctgacgctgcnntttcgttaaatcgtttncttagcancgccctgacctaccggatcgacccacgcgtccgcccaggcgttcgcggactcgtgggcgcgtttgncttttacccctccccgaccagatcgcggcgaggacgccttcgatccgacccaggccgacgccgacgacccctctcgccgccggcggccatggcgtacggcgaccgcgtcaccaccttcgaggactccgagaaggagagcgagtacggctatgtccgcaaggtctctggacctgtggttgtggctgatggaatgggtggtgctgccatgtatgaacttgttcgtgtcggacatgataacctcattggggaaattatccgtcttgagggcgattcaacttcaatccaagtttatgaagaaaccgctggactgatggttaatgaccctgtattgagaaccaagaaagcctttttcaattgaattgggaccctggatttttgggaacaattttgaccgtattcaacgggctctaaaaaacctt

SEQ ID NO: 98271 - DNA, 540 bp, Zea mays
  unsure (1)..(540): unsure at all n locations
cagctggtnnttttgatcctttgnnatgcagcactgctctcgagttaccgggccgacccacgcgttcgcggacgcgtgggcggcaggcgccggaggttttgctttccgggctacatggccaacacggaggcgtggcgcgccaaggcgcggtcccagagcgcgccccgccagcgcaccgacgcgctggagcggctgcccagccgcaggaagcaggggacgccgcccagggccgtcgccaggatgcacttgcagcgctcgtcgtcgctggccggcaactactcctccccgtggtcgtcgtcggctgccaggctcgacgtctccgctagttgtcgctcaaggacagcgagtgcggctccaccagcttcgtgctcaccgccgtcaccctctacagccggacgcggtcgctcgtcggctccgaggtgcgccgtggcctgtactgagaggagctagctcgtgttcctggcgaccacatggatggatgcttgtaagttctgttctttaatggtccctgtttctattgtgggagatttattgaatgga

SEQ ID NO: 98272 - DNA, 531 bp, Zea mays
  unsure (1)..(531): unsure at all n locations
gtaaatatgtgncctcgaaatntgttgcatgcactcctcctgaatatccggatcgacccacgcgtccgactgcctcagacatgcttaaagcctaccactgttttcttgcagcaagcccatttaagagactttcgcattttctttccaatcaaacaatcttgagtttgactaaaaatgcatcaaaggtgcatatcattgacttcggcatttattttggattccaatggccatgcctaatcaggcgtctttccaagagggaaggtggtccacctgttctgcgcatcactggaatcgacgtacctcagccaggtttcctgcctaccgagagaattggagaaactggacaaaaggcttgcagagtatgctaaaaagttcaagggccctttgaggttcaagggataacgtccaaagtgggaaaccatccgattgagggatctcaagttggcaagggccaaattgggaatggaaatggctattccgaatccgaaacctgattgatgaaacaattgctttagacaggtctaggaataa

SEQ ID NO: 98273 - DNA, 576 bp, Zea mays
  unsure (1)..(576): unsure at all n locations
aagctcgagnccttagcttccttgtnangtagccactactactggagttagaaggatccgaccccacgtcgtctcgcgcgcggccggtcgctgccaatcgccgacctgctgttcgtttgccgcacatnngggggcgtacnaagtatggtggtcggatactatggaggacggaaggctagtcggaccgtgatgccgcttcgtggccagcgcgtggcgctgcatgggagtacangtngcagcagccgtccaatcgtccggcctcaccatggcccaacccgccccgacaagggcccgtcgtctcggctacaaggccaagcagggatatgttgtctaccgtgtccgtgtgaagcgtggtggcaggaagaggcctgtgcccaagggtattgtctatggcaagcccaagcaccagggtatcacccagctcaagttccagaggaacaagaagtctgtcgctgaggagagagctggacgtaagcttggtggactgagggttcttaactcctactgggtgaatgaagatagttcctacaagtactttgaggacattcttgggaacgtttgccacaaaggcatcaa

SEQ ID NO: 98274 - DNA, 531 bp, Zea mays
  unsure (1)..(531): unsure at all n locations
ngtgaagagctgcctacgtcatangtatgnatagctcctccggtctggaattaccgggccgacccacgcgtccgggaacggagagctggaaaaggcatgtaagtcccggcttttgaccccaagtaccctgttgagggcaatggcggccacctccgaggaggcaatcaagcagttctcggcgctcatggagcagctagaggagccgctaaagagcacattccagaatgtgcatcaaggaaatctgagagggactttgatgcgttttctgaaggctagagaatggagtgtgcctaaagcttataaaatgctaatggattgcttaaactggagagtacagaatgagattgacatcgtgttagctaaacccattctgccatctgatatatatagaggtattcggacacgttactggtggattgacaaggtacttcaagcaaggacaacccggttatgcatttggtgggggtcttaatacttttgaccagggctcggtggactactatgtgcaattacacattcagattgaaggan

SEQ ID NO: 98275 - DNA, 536 bp, Zea mays
  unsure (1)..(536): unsure at all n locations
tgaaagactgancctcactcttgtatgcatcactncctgggttaggntacccgggccgacccactcgtccgcccacgcgtccgaagatatccatgcttattttcagacatgcaatatctgccaacaggccggaccggacaggaccagctatcccgggctgctcgcgcctctacctgttcccccgcatgcatggcattctatatcaatggacttcattgaagggttaccgaagtccggaacaatggattgcattctggtggtggtagatcgattctcaaaatatggtcatttcttggcgctggcccaccctttttctgcagcaaaggtagcaaaacttttcttggataatatctataagcttcatggtatgccggacaatatagtatctgatcgggatagagtgttcacaagtctgttctggcagcaattattcactctcagtggcacccaattatgcatgagttcggcttatcacccacaatccgatggccatacggagcgcgtaaactagtgcatngaaacttatttgcgatgcn

SEQ ID NO: 98276 - DNA, 534 bp, Zea mays
  unsure (1)..(534): unsure at all n locations
ggaaattgctgnccttactcttgtttactgcactcctccggnctggaatacccggcccgacccactcgtccggtctgctgttttggtctcgctggtttaggtcacagcctcctacaaagccgctgctcggcgggcgagtgcgactccacctccggctcacatcctcagcagaggcattgggtggcagggaatcggcatcctccttgacgggctctttggaacggggactggctccactgtctcagtggagaacgtcgggttgcttgggtcgacaaggatcgggagccgacgggtcatacagatctcagctggcttcatgaagcttgttctccatgctggggaaatttggagccttgttcgcttccatcccgttcaccatctttgcggccgtgtcctgcgtcctgttcgggctaagtgctgcggtggggctgtccttcctacagttaactaacatgacctccatgcgcaacctctttatcggccggggcttccattttctttgccctgtccctcccggaatcttgattcggttcc

SEQ ID NO: 98277 - DNA, 533 bp, Zea mays
  unsure (1)..(533): unsure at all n locations
tgtaattgtgcnnncctaacnctgnatgcagcatgtctgaattacggaccgacccacgcgtccgatctgattggcaccggtggaacactctgtttttcgtttcaaacttattgaacgtgttggaggaaaggttgttgagtgtgcttgcgtcattgaattggcagaactgaagggccgagacaaacttggggactgggcagtttttgttcttgtggaagcagatgcttgagcggaacttgagacttctcttctcagagagttagagttagcgctgttgatgctacctctctggaaacaacaaagtttcccatgtttgctatagactggctgacacgtaataaagtttcattccaaattgtgatcccctgaatgatatgtcaatgtagacatgattgctggtccttgtatactgtggcttattattcacatcaattataggatatcctgattggagctaaatactggacaattaacaaaaggctggcggcttttaagaactcatgtttagtacgttttcattccactgtataact

SEQ ID NO: 98278 - DNA, 531 bp, Zea mays
  unsure (1)..(531): unsure at all n locations
gggagcggtgttccgtacttgnccgtaggcatcgtctcgaattaccgggccgacccacgcgtccggctgcgcgtcggagcacagcaacgtgtgctacgctgtgccgttcgtcatcggccccggggtgcggcgcgacggcaccacccggttccgggacgcgcgggggagcccgctgcacgacctcctcgccgtctccagcttcagcgagtacaccgtcgtggacgtgaaccaggtggtcaaggtcgaccccgccgtgccgcccaagctcgcctgcctcctcagctgcggcgccggcaccggggtaggagcagcgtggaggtctgccaaggtggagccaggatccactgttgcaatctttggccttggatctgtcggtttggcggtgggccaaagcgcgaaaatgtgtggggcattcaaaaatcatggcggtggtcttaaacctggacaggagggaagaaggagatcggtcggcggcacaaacttcggtaattcatcggnacttgacaagaggttcgtctgagaagggatcct

SEQ ID NO: 98279 - DNA, 548 bp, Zea mays
  unsure (1)..(548): unsure at all n locations
agatattgggtagctgtttagctccctgntatgcacgattcgtccgggttgggatacccggcccgacccacgcgtccggattctggcacgggtgaggcacaagtagccttttaagcttgcgcggatattgtgctgaaggccaggaacgcttgatagtctatgattatatgccaaacctgagcatacacgcccaacttcatggacagcacgcagcagagtgcaatctcagttgggaaagaaggatgaagatcgccgtcgattccgcagaagggatcgcttatctgcatcaccatgcgacgccacacatcattcatagagatgtcaaggctagcaacgttctcctggattcgaatttccaagctcgggttgctgactttgggttcgccaagctagttccagacggcgcgacgcatgtcacccaagggttaaaaggcacactcgggtatcttggaccagagtccgctaagcttgggaagggctttggaaagctccaatggttttaagtcttggaagcattgcactagaacctggccagctgtgaaaaaccc

SEQ ID NO: 98280 - DNA, 525 bp, Zea mays
  unsure (1)..(525): unsure at all n locations
tgatgaaggttggnttccgtatcatagtatggtactatatggtctggaattaccggatcgacccacgcgtccgcccaggcgtccgcccacgcgtccggtggattttgttttcccgtacctgttgcagttcatgggtgagtacactagcaaggtggacgatttagtgaaggacaaaatcgagtcacagaatgaagaaagagccaaagagaaggaggagaaagatcttgtggctcagcagaacatgtatgcgcaactgcttcctcttgctctgcctgctccgccaatgcccggcatgggtggcccttcacctccgatgggcggaatgggcatgcctccgatgggcgggatgggcatgccgccgatgggccctggtccgatgccagcattcgggatgccaccaatgggaagctactgagatgagatgttttttggtggtggtgcaaagagcttatatgatgaattgatatgttcctgtgtaagcaaaggcggaaaccctaatggaagtggaaaatggtacattttggg

SEQ ID NO: 98281 - DNA, 518 bp, Zea mays
  unsure (1)..(518): unsure at all n locations
atgtgcttaaccgtacacgatagtagagctcctccggnttggaaaacccgggccgacccacgcgtccgcccgcccttccgcgtggtgtgctctctgtttccctttacgccgtttcctctcccgactcggtcctcgccggcgacgccgcggagtaggtgcaacagaaactgctcgaggcggaggcggagcctgcggctgcacagacatgggtgatcacgaggcgcgcggtgatgacttcgagaagaaggcggagaagaagctctcgggctggggcctcttcggctccaagtacgaggacgccgccgacctcttcgacaaggctgcgaactccttcaagctcgccaagaactggagcagagctgcatcagtttacatcaagattgctaactgtcatttgaagggagatagcaagcatgaggcttgcctagcgtacgtcgaggcagcaaatgctacaaaaagtttcaccctaggaagctgcgcaggcgctaaacagtctggtaatctttccttggaattgg

SEQ ID NO: 98282 - DNA, 535 bp, Zea mays
tggaaaggtccaatgcccttcgtatgcatcgctcctccggtctggaattcccgggccgacccacgcgtccgaaagagctgtcgtcgaaagatggccttaatacaaaaaagatctttgtgggtggtatcccagcatctcttactgaagataaattaaaggagcacttctcatcgtacgggaaggtggttgagcatcagattatgcttgatcatagcactggacgttcacggggctttggatttgtcacatttgaaagcgaggatgctgttgaaagggttatgtcagaggggagaatgcatgatcttggagggaagcatgttggaattaagaaagctgaaccaaagaaacctggcgctggtgattcaagctcaaacggaagacacagccgtggtggtggtcatcgtgattcataccgtggtagtggtggttctgtgaacagccgtggcggctatggatattggggtggttaccgatcagctgctgcagcatattatggcagcacagcatatggtgcctatggcatagggtatggatt

SEQ ID NO: 98283 - DNA, 535 bp, Zea mays
ggaaatgatcctcacttctaagactgtatcactcctccggttcggaattcccgggccgacccacgcgtccgcttggcgctggcccaccctttttctgcatttaaggtagcaaaacttttcttggataatatctataagcttcatggtatgccggacaatatagtatctgatcgggatagagtgttcacaagtctgttctggcagcaattattcactctcagtggcacccaattatgcatgagttcggcttatcacccacaatccgatggccagacggagcgcgtaaactagtgcattgaaacttatttgcgatgctttgtgcacgcctgtcccagcaaatggtaccaatggttagctgttgcagagttctggtataataccaactttcattcagctctgaattggtctccatttgaggtgttatatggacagccccctcgggcacttcggcttgcaaccagggagtgcaatgactggttcagatctgtctacttggcttcacgatcgtgaggaggtatccaaagtggttcaacaa

SEQ ID NO: 98284 - DNA, 524 bp, Zea mays
  unsure (1)..(524): unsure at all n locations
agataggccatggcaagcnacgtatagtagaattactctcgnttggaaaacccggctcgacccacgcgtccggttggacccaagaccattcatgtttctactggggagaagctttctgtttttgatgcggcggtgagatacaaatctgagggccatgctactataatcctcgctggtgctgagtatggaagcggcagttctcgtgattgggctgctaagggtccgatgctcctgggagttaaagctgtaattgccaagagctttgagcgtatccacagaagcaacttggtggggatgggaatcattcctctgtgcttcaaagctggtgaggatgctgattcgcttggcctcactggacatgagcggtacagcatcgatctccctaccaacctcagtgagatccgtcccggccaggatgtgactgttactaccgacaatgggaaatctttcacttgcatcgttcgctttgacactgaggtggagctggcgtacttcaaccatggaggcatcctcccttatgtcat

SEQ ID NO: 98285 - DNA, 523 bp, Zea mays
  unsure (1)..(523): unsure at all n locations
taggtggaatgaaccgcatagtacgtaccgacactccggnttggaatacccggctcgacccacgcgtccggtggaccatcagggaaacgatgtttgccctatacctggaacaacaaaaatcgagaacttggaccagaacgtgggggcgctttctgtgaagttgacaccagatgagatggccgaactcgagtcctgtgctgctgcaggtgaaatcttgggtgaccgttatcctcaaatggccaacacctggaaggactctgagaccccgccattgtcttcttggaaatctgagtagccaatctggtgtctcttcaattctgccaccgtcacattggtgtatctccaaattgtcggactgcagaagatactcaggtgcactttgcaaaagcgtccatatgatgtgcttgccttttgcaagctatgatgtttggtacttggtgtgtattgcatgcctcaatttgtatcaagagtatttaccaatgagtatagcttgaaggttaaaaccactgtttcgacgaattaa

SEQ ID NO: 98286 - DNA, 539 bp, Zea mays
  unsure (1)..(539): unsure at all n locations
tggagaatagtgcctccgatcntctgnactcagcgactggtctggaattaccgggtcgacccacgcgtccgcggacgcgtgggcggacgcgtgggcgcgattctttcattcatggcggcgatgtggcggtggatgacgccgatcaagaagagccagccgtcggcgcacgacgccttcgtgggcaactggaagccgaccaagaacgacacgctcagcaaacgcctgcctgggttcggcgccaccatgaacatactctacggcgagtcgatctgcggcaagggatacgtcgacgccatgaacgttataatctcgcactaccagtgttaccttgacctcatgggcgtcggccgtgagcactctggcgacaaccgtgattgcgccgagcaggcaccgttcaaccccttcagtccgactgatgaccagaagcagcagcaatcatgaagcttagacggacgggctcaatgcgcccttgccactgatcaagcttctcagcgctagattgagctacaggatcttgaagatgcgggaaactggttcca

SEQ ID NO: 98287 - DNA, 542 bp, Zea mays
  unsure (1)..(542): unsure at all n locations
tggagtctggtaggccctaaacncgcagtgcacatctgtctggaattcccgggccgacccacgcgtccgcccacgcgtccggattaaggctgctctagtatgctgtctgcccaggcacagtctcctgtgcgcgacattgttgcccttgcggctcgtgattccaccgccctggttggtggaccatactgggacgtgccacttggccggagagactcgctcggtgcaagcatccagggctccaacaatgacatcccagcccccaacaacacactccccactatcatcaccaagttcaagcgccagggcctcaatgttgttgatggttggtcaccctctcaagtggtcacaccattggtatgtctcggtgcactagtttccggcagaggctatacaaccagacaggcaatggcatggctgacagcacactggatgtatcctacgccgcaaagctgaggcagggatgccctcgctctggtggtgacaacaacctcttccccttggacttcataacccctgtcaagtttgacaaatttttactacaa

SEQ ID NO: 98288 - DNA, 536 bp, Zea mays
  unsure (1)..(536): unsure at all n locations
gggatagtnncctaccgtatattgtagttgcgctcgtccggtctggaatttccgagccgcgcgtacgaaagtgttcgcaaaccctagctcccgatcttgatgtgtaaccctcgcgtcttcttcgagaggacggtcggctgctccccggtggacctgatcgtgatggagctgtacgccaacgaggtgcccaagaccgcggagaacttccgcgcgctgtgcacgggcgagaagggcgtgggcaagtccgggaagccgttccactacaagggctccaccttccaccgcgtcatccccgagttcatgtgccagggcagcgactttacccgtggcaacggcaccggcggcgagtccatctacggcgagaagtttcccgacgagaagttcgtgcgcaagcacaccgtccccggtgtgctctccatggccaaagccnggcccaacaacaactgctcccagttcttcattttgtccggtcggaccccttggctcgacgggaagcaccttctattttgggcatgtcttcagggggctttggcctc

SEQ ID NO: 98289 - DNA, 538 bp, Zea mays
  unsure (1)..(538): unsure at all n locations
agaattgttaccccatccattagaantacttatctacttccnctggattggagggccgacccacgcgtccgcgggcgcgtggggtgctgtgggcccccggtgcgagttaagctgttcgacgatgtttctggtctctgccatgaccttgacaacgggatgcagccaatcagtgtcctcttcccgtacctcccaatccctgcgcataagcgccgtgacagggcacgggcacgtttggcagaaatctttgccaccatcatcaagtcccgcaaggcctctggacagtctgaggaagacatgctgcagtgcttcattgattccaagtacaagaatgggcgccccaccaccgagggtgaggtaaccgggctacttatcgcagcgctctttgctggacagcataccagctcaatcacctcaacctggactggagcgtacatgcttcgcttcaagcaatactttgcagaagccgtanaggagcagaaggatatcatgagacggcatggcgacaagatcgaacatgacatnctggcanagaatgatt

SEQ ID NO: 98290 - DNA, 514 bp, Zea mays
  unsure (1)..(514): unsure at all n locations
agcaatatggttactgaaacgtacgacgcgttctctggcttaggtaccgttcagacgcgacgcgtacgcccgcgcgtacgctccactcatcttttcgtttttagaacctctaaaatttcccccgctcggcagtctcagcagcacctgtagccatggacgccagcggagccggtagcaaggggaagaagggtgcggccgggcgcaaggcaagcggccccaggaagaagtcggtgacgcggtccgtcaaggccgggctgcagttccccgtcggccggatcgggcgctacctgaagaagggccggtacgcgcagcgcgtgggcactggcgcccccgtctaccttgccgncgtcctggagtacctagccggcgaagttctggagttggcagggaacgcggcgaaagacaacaggagacgcgcattatcccgcgccacgtggctctggcgattcggaaccacaaggagctcgggagccttctgcaggcgtaacattggccaccggggcgtcttcccaaa

SEQ ID NO: 98291 - DNA, 531 bp, Zea mays
  unsure (1)..(531): unsure at all n locations
gtctatcaggctgggnttccgaccacgtatcgtgctactgtatcggnttggtgtaccgggctcgacccacgcgtgcgcccacgcgtccgcccacgcgtcctcggattcgtgggcttcaacaggttgcatgagaccgggaggcaactcctgatgctgcttttcggactgatgtcgctaagcgtgcatttgttggttggatgagagatctacgtggcatagctatggcaaccaacagccgcaagacatatggcctcctatttgactggttgtatccatctcgcatgccacttctgctgagagccatctcactttgcactgatgaaccagaggtcaccacacccttgctcaagttcacgtatgaatttgttttgaacaaagctcaaagactgacatttgattcatcatcaccaaatgggatccttttattccgagaggttagcaagataatcgtggcttacgggtcacgaattctattgcttcctaatggcacagacatttatggaaagtaattcaaaggcctatggatctcat

SEQ ID NO: 98292 - DNA, 533 bp, Zea mays
  unsure (1)..(533): unsure at all n locations
aggcatgacttctggtcgtacngcccgctacgtagcgatactctcggttggaatatcccggctcgacccacgcgtccgccgacgcgtccgcccacgcgtccttccattcgtccggtctcccccttcaggatgtgtaggagattggtggtattggaactgtccctgttggacgtgttgagactggtgtcattaagcctggtatggttgttacttttgggcctactggtcttactactgaggttaagtccgttgagatgcaccatgaggctctccaggaggcccttcccggtgacaatgttggcttcaacgtgaagaatgttgctgtgaaggatctgaagcgtgggtatgtggcctccaactccaaggatgaccctgccaaggaggctgctagcttcacctcccaggtcatcatcatgaaccaccctggccagattggcaatggctatgccccagttctggactgccacaccttacacattgctgtcaagtttgctgagctcgttaccaagattgataggcgatccggcaaggat

SEQ ID NO: 98293 - DNA, 528 bp, Zea mays
  unsure (1)..(528): unsure at all n locations
caggtggccagtcgacagagatgagtctctctgggttnggnnacccggctcgacccacgcgtgcgctgcagtgaaccttggggcgcctgttggtttcagaagccgcgcatcgtcatgggcgccatgcgcttcgacaacttcatcatccaggccggcaccgacgcgtcgctcgtgcccaccgacatggccaccaccaactccaccgtcagattcacctaccgcaacaggggcaccttcttcgggatccacgtcaccgccgacccgttccagctctcctacagccagctgacgctcgcgtcaggagacctccacaacttctaccagcctcgcagcagcagccgcaccgtcagcgtcgccgtggtcggcaacaaggtgccgctgtacagcggctgacccacgctgactgctgctccggcggccaggggcaaggggcagcaggatgccagcgccaagggggcattcgtgcccatggtgctaaggacatgctggaatcggtgggctacgatgctggcgcgcttgtaaacccct

SEQ ID NO: 98294 - DNA, 528 bp, Zea mays
gtaaagggatgccttacccccgtacgtagctcggtctggaattacggatcgacccacgcgtccgccaggcgtccgcccacgcgttcgaagcaatcaagctgcggccggagcatcttggagacaggaagaatgggtggtagtaggtgaaaccggaggcggcaggatagggagagggagcgagagtagaggccacgcctgcttgacagcaaggcccgtgcgctcggcggcggcggcggcggatatgggcgactctggcggctctgttgtgtcggtggacgtcgagcgcatctccttcggcggcaaggaacatcatattcaaaccaaccatggatctgtatctgttgccatatatggtgaacatgataagcctgctcttattacctacccagatattgctttgaaccatatgtcttgctttcaagggctactcttctgtcctgaagcagcttcattgctgcttcataatttttgcatttaccatatcagtcccccatgacatgagttaagaactgtttcgattttgcgatc

SEQ ID NO: 98295 - DNA, 533 bp, Zea mays
  unsure (1)..(533): unsure at all n locations
gtaaagtgatcctcgactttcgtacgatccacactctnnntngggataccgggccgacccacgcgtccgcggacgcgtggggttcaagaacctctcggtttaggccaagacggccatcctgctgtaccacgccgtgccggactactactccatgcagttcctcaagtccaacaagggcaaggtcaccacgctcgccaccaccagcgtcgccaagaaggactacacctacgaagcggagagcaaggacgacaccgtcacgctcgacaccaccgtcgtcacctccaccatccaggccaccgtcagggacgacgacccgctcgccgtctacgcttgctccaagttcctgcagcctaaggagctgttcaaggccaaaaccgctgatctcgcgcctgcgccggctccacaagggcccaagaagaagagcaagaagaagcccaccggcacttcggcggccttcgcgccctcggacgatgaatctgcagatggcccgtctgccgacgacgacttgttcgatgatgccgcggacaaagctt

SEQ ID NO: 98296 - DNA, 514 bp, Zea mays
  unsure (1)..(514): unsure at all n locations
cgtgatgtgtgntnangactganngcttagnatnacgnttccagctccgaatacccggctcgacccacgcgtccgcggcgaccccgaggccttcgccgagcttaggtgaaggagctcaagaacggccgtctggccctgttttccatgttcggcttcttcgtccaggccatcgtcaccggcaagggcccgctcgagaacctcgctgaccacatcgctgacccagtcaacaacaacgcatgggcctacgccaccaacttcgtccccagcaactaagctcaacggctatgctatgcaacttcattgtctttcggatcggagagggtgtacgtacgtggattgattgatgctgcgagatgcatgtgtgtcttttgtttcacgttgcattgcataggcaagtcgagatgatgagttggcgttgtacactaagatgaaccatgtttgtgcaatagtggtgggttttgtttcctgcttgttaaattgtgatatccattaatttgtttttcttctataaaan

SEQ ID NO: 98297 - DNA, 514 bp, Zea mays
  unsure (1)..(514): unsure at all n locations
agtatgcgttgtgagtccagttctaccgctcacnctgcatcattctccccgtccggcattaccgcacgcgatccgcggacgcgtgcggacagccaagacacttgtggtttctggcaccatgtactatctcacgattgaagtgaacgatggcgaagtcaagaagctctacgaagctaaagtctgggagaagccatgggagaacctcaaggggctgcaggaattcaagcctgtcgaagagggtgctagcgcctaaagatgtctccttctccatgtgcgagcctgaagctcatagcaaagttgcagaataaggagccatgctcccttgtgtaatttcataagactacaaccctattagggcttcgttggttgtgtctgtatcgaatggaattgaaggtgattaattatccttctattctaataaagggcgtttaatctactacaatactcttcaatccacacctaaccgaacaagcccttaatatgatatcttacattgccgaatctgtgtaatatn

SEQ ID NO: 98298 - DNA, 507 bp, Zea mays
  unsure (1)..(507): unsure at all n locations
agtgtgcgcctgattactgtatcccgcagatagtactatctccccatntngcgaccnnccggnagnnttgggtccgagaaagttactacggtgctttgttgttttgctcttggagtgcggatggcgaatattggttatcatgtggtgaagatgatcttgtgcaagtatggagcatggatgatagaaagatagttgcatggggtgaagggcataattcatgggttagtgcagtttcttttgatccgtattggtccccaccaaattctgatgaaacggaagaaaatgtcatgtatcgctttgggtcaattggacaggatacccaactgcttctctgggatctggcattggaagagattgctgtccctctacgccatccgtctggtggctcaccgacattcagtagtggaagcccatctgcacagtgngataatgcgtgcccttcagccggtgttctacagccttctncacggatgcgagatgtgccaaagctctcacctctcgttgcac

SEQ ID NO: 98299 - DNA, 510 bp, Zea mays
  unsure (1)..(510): unsure at all n locations
cccccacgacgagtcctgaataaccggatcgaccgacgcgtccgctatgttctaangggcaaccatgaatgcgttcattaaatcgcatctatggtttttatgaggagggcttactcagattcagtgtaaagctgtggaaaacattcactgactgctttaactgcttgccagtgtcagcattgatagacgaaaagatcctctgtatgcatggcggtctatctccagagttgaacaagctcgaacaaatacttaatctgagtcgccccacagacgtgcctgatactggattgctctgtgaccttctttggtctgatccttctaatgaagcaacaggatgggccataaatgatcgaggtgtttcatatacatttggtcctgatagtttctgaattccttgagaagcatgatttggacctcatctgccgagcccatcaggttgtcgaagatggatatgacgttttcgctagccgtcaactcgtaacaatgttttcagcccctaactactgtggt

SEQ ID NO: 98300 - DNA, 510 bp, Zea mays
agtaatgaggctgttaatctatactcgaccatagctaccatctgcgaattcggctcgacccacgcgtccggagaactgctggtaaccctaacatagtctaggattctcctgcaccatcagcaggatcgcgtggtggcaatgacagtctatcggggggaggcagcagcggaagcattggtaacaatgggggttcctctccgtcttctgctggagtcattgtaggctcagtggttggtacagtcgttggactaggccttgttgctgcattgggattttattgttacaagaggaaacagaagcctttcggaagggtgcagagtccacatgccatggttatccatccgcgacactcaggttcagatgacatgggtaaaaatcacagttgcagggggaaatgctaacgatggtgctcgcgcaagcgagacatatagccaagcgagcaatggtccacgggacatccatgttgttgaaagtggaaatatggtcatttcaatccaagttctccgcaat

SEQ ID NO: 98301 - DNA, 527 bp, Zea mays
acgctgatcgcgtgtggtaacggatcaagcctcgagcgtacatccatcggaatttccggctcgacccacgcgtccgcggggagatagagagaggagagggagttattgcttatagagaacctgaacccaaaccgaatcagggaacactatcgttacctcaccaaggcaggcgtgcatgccagcagccatggcgatggcgtacaagatggcgacggaggggatgaacgtgaacgatgagtgccagcgctggttcatggagatcgaagtggaagaaggtgcaccgattcgtggtgtacaagatcgacgagctgtcgcacgccgtgctagtggacatggtaggcggtcccatgcaagggttcaacgagctcatgacacggctgacacggcaccactgccgctacaccgtattcaacttccacttccacactggtgacaactgccagaagagcatgatcttcttcattatctggtcacctgcagcgttcaggatcagggccaaatcctgtactccacattgaaaccaggcg

SEQ ID NO: 98302 - DNA, 508 bp, Zea mays
agtgagcatgcgtgtagctttccgcctattagtacaatcttccggtccggaattcccgcctcgacccacgcgtccgcggacgcgttcggataaatttctgattttgtctcaaatgagcttggagaggagatttgcccagttcagtgtttttctagcctctactctgatggaatatggtggtgttccacaatctgcaactccagagtctcttctgaaagaagctattcatgtcatcagctgtggctatgaggacaaaactgactggtgaactgacattgggtggatctatggttctgttacagaagacattctcaccggattcaagatgcatgctcgaggctggcgatcaatctactgcatgcctaagcgaccagctttcaagggatctgctcctatcaacctttcggatcgtttgaatcaagtgcttcggtgggctcttggttccattgaaattcttttcagcaagcattgtcccatatggtatggctatggaagccggcttaaattg

SEQ ID NO: 98303 - DNA, 528 bp, Zea mays
cgttggtcgaatctgttgaatttccattgtcacgttagctatagtcgtaccggtccggaattcccgggtcgacccacgcgtccggggaggtttcacaagatgatttcatttttgttgacagatccatagagttcgcatatggagaactttctgatgctacaaacaactttagtatggaccataagattgggcaagggggttttggttctgtttattatgctgagcttagaggcgagaaagctgccataaagaaaatggatacaaaggcatctcaagaattcctcaatgaattgaagattttgacacgcgtccatcacacaaatctggtgcgcttaattggttattgtgttgagagttgcttatttcttgtttatgaatttattgagaacggaaacctaatccagcatctgcatgggacgggttatgaacctctctcatggaccagtatagtgcaaattgcccttgattcaacaaggggtctagagtttatacatgagcacactgttccagtgtatgtgcatcgaaatt

SEQ ID NO: 98304 - DNA, 522 bp, Zea mays
  unsure (1)..(522): unsure at all n locations
agtcatgaatgtgtgctgctcttcgaacatagtagtcttctcccggtccggaattcccggctcgacccacgcgtccgcggacgcgtgggccacgatttcgctgtatagattgtgatctgcgaccgcggcattaggcnctctttgcagaacggtcaggttgtcaagaacgccggtgccgcgggcatgatactcgccaacacaccggcaaacggcgaggagcttgtcgccgacagccacctcctgccagcagtggccgttgggcagtctgaaggcattgccgccaagaagtacagcaaaaccgccccgaaaccaacggccacgctcagcttcgacgggacgaagctcgggatccgcccatcgccagtcgtagccgcgttctcgtcccggtgaccaaacttcctgaccctggagatcctcaagccggatgtcatcgcgcccggcgtgaacatcttggcggcatggagcggcgacgccagcccgttcagcttgtccagcgactcgccgcgggtccgctttcacatt

SEQ ID NO: 98305 - DNA, 511 bp, Zea mays
  unsure (1)..(511): unsure at all n locations
naagagtatatctgattacctatcgaccgacgcgtactgacgggaacgaaagatgaagagtcagggcgtatgttctgcaagtcaagacgatgtaagcacgcnagctttatataggaagtcaatcgggatgtggctacgcacaccttgtacttactgctaacaattcgtaaaaaaatggttttgttcacgatcttgatgatgagtctggtgggatgcgaggatcatgctgcagaggtactaagcgcagccgcaccgctgaagtgcacaatttgtccgaaaggaggagaagggacaggatcaatgagaaaatgcgcgccctgcaagagctcatccccaactgcaacaagattgacaaagcctccatgctggatgaagcgattgagtacctcaaaaccctacagcttcaagttcacatgatggccatgggaagtggactgtgcatttctaccatgctgctgccgccagccatgcaactgcaaactacttcaattgcttcatttcattatatcgg

SEQ ID NO: 98306 - DNA, 526 bp, Zea mays
  unsure (1)..(526): unsure at all n locations
agtaggcgagtgtggnnngttcccattgctnctnnngtaaagtgcaggacctcccggctcgacccacgcgtgcggggcccgctgctccccaaattccccctaaacctttctagctggagggccgatccgcagctcccgggcgcctgatccgagcagtctcctcggcccagccggggatccaagcgggatggggtacttgagctccgtgatcggccaccccaccgatggatcctacgtcagcggcggcggcctcagccagaatggtagatttagctatggctatgcaagctcccctggtaaaagggcatccatggaagacttctatgagacaaatattgattgtgttgatggtcacatagttggtctttttggagtttttgatggtcatggtggtgctaaggtagcagagtatgttaaagaaaacctgttcaacaatcttgttaagtattcaaagttcatcagtgatactaaagtcgctatagatgatgcttataaaaacaccgacagtgaattccttataatcttg

SEQ ID NO: 98307 - DNA, 515 bp, Zea mays
  unsure (1)..(515): unsure at all n locations
agtaaagaagcgtgctagctcccgcctancagtacaatcatcccggtccggaattcccggctcgacccacgcgtccgcggacgcgtgggcggacgcttgggcttacgcgtggagtcgacacgtacgggaccggggcgatcttcgacaaggagatcctcaagattgtcaaggagaacttctatttcaggcctggcatgatcatcatcaaccttgacctcaagaaaggcggcaacgggcgctacctcaagacggcggcctacggccactttggaagggacgaccctgacttcacctgggaggtggtgaagccactcaagtcggagaaaccttctgcctaaagcggccttttttttcagtaagaagctnttggtggtctgctgtgcttaatcatgcttttatatggcttctacatgttgtggatctttcttgatctgcaccgcgcttatcgtttgtgttgtactgccctaataagtggtgcttatgaggactgcttctggttttgctgcttatgtngt

SEQ ID NO: 98308 - DNA, 514 bp, Zea mays
  unsure (1)..(514): unsure at all n locations
gttgtgaatcatgcttcccctcgcccatagtaggtcctaccgcttcggaattcccggctcgacccacgcgtccgcccacgcgtccgggcggctttcaaggtggttgatggtgaatttgccagaggcatcaagtaggatatagattcttagtgtaatactagccaaggaagatttggcagacgatgttgatctagaagctatagctaacttgacagaagggtactcgggtagtgatctcaagaatctttgtgttactgctgctcatcgtcctattagggagattcttgaaaaggagaagaaggagagagcttcagcagaaacagaaaataggccattgcctctgtcgcacactagcaatgatgtccgtgcattaagaataagtgatttcatacatgcgcatgaacaggtgtgtgcaagtgtttcctcagattccagtaacatgaacgagcttgtgcaatggaatgatctctatggagaangcaggtcaaggaataagacaacgctaagctacttn

SEQ ID NO: 98309 - DNA, 526 bp, Zea mays
agacgtcgaagctttttacgttttctgcgcgaggagaagtagcgctgcggcaccttccggctcgacccccgcgtccgaggaaccttggcccgacaccatgctctctaaggttgtccaccccaccaccacgccgggcttgtcgccgcgctcccgcgtctcgccgcacaggcctcccatctcctccctggcggacccctcgtacttccccggccatcgcatcgtcagtttcaaaagcaggacgctgccacttcgctctctccacatcgccgctgccgctgccgccggggcagacgaagaagaggcgcaactaggtggaagtgtgaacgcggtcgaccaggaagaagcggagaataaggtggtggtgcccgagagacaagacccgatgctggtactcaagttcatctggatggagaagaacatccgcatagcactcgaccagctggttcctggctatggcagcatcccggtgaccccgaactacttatggacgcggaaggactccttggaccagcctaaaagccaaatc

SEQ ID NO: 98310 - DNA, 517 bp, Zea mays
  unsure (1)..(517): unsure at all n locations
agtagagaagtcgtgcttcnncctcgcctatcgtataccgtcccggtccggaattcccggctcgagccacgcgtccgcggacgcgtccgcccacgctttcgcttctcgcgccgccgccgccgccgccgccatgtgtaagcgttggaggggagggacggcggggaacaagttccgcatgtcgctgggtctccccgtcgcagcgaccgtgaactgcgcggacaatacaggcgccaagaacctctacatcatctccgtcaagggcatcaagggtaggctcaaccgcctgccgtccgcctgcgtcggcgacatggtcatggccaccgtcaagaagggtaagcccgacctcaggaagaaggtcatgcccgccgtcatcgtccgccagcgcaagctgtggcgccgcaaggacggagtctacatgtacttcgaagataatgctggagtcattgtgaaccccaagggcgagatgaaaggatctgctatcactggacctattggcnaggagtgcgctgacctttgt

SEQ ID NO: 98311 - DNA, 522 bp, Zea mays
agtagtcgcaatgtttttcatctcagcgggcgagagtacgcatggcacccgatccgaatatcccgggtcgacccacgcgtccgagcaaaagcaacaaggctttagcacattcaagaaccacacctcctcccggagcctagaatcatttacacatgctgcggccgcaagtgcagatgcggctccagctgctcctgcggcaactgatgcaacggctgcggtatgtaccctgacatggagaccgtcgccaccagcagcgtcaagaccaccgtcctcgccgtgccgaccaccaagcccagcaccgcggcttctaggcggccaccaaggctgccggctgcgactgaaacacctgcaagtgcggaaccaactccgactgctcctgcttcacctgcaactaacccggcccgactcggcaatggcgcacaagattccaaagaacaaccacaagaaagcgtttaataaaattaattaccggctccagtaaaaaaaaatcctggcaactggaaccggccattaaccaaggtc

SEQ ID NO: 98312 - DNA, 520 bp, Zea mays
  unsure (1)..(520): unsure at all n locations
aggagagcaatgtttttcattctcccgcacatcagtagtcttctaccggtccggaatatcccgcctcgacccacgcgtccggctggtcaggacctcactttctcgcttatgaaaattctcactgagaggggttattcgttcacatcctccgccgagcgagaaattgtaagggacatcaaggagaagcttgcgtatatagctcttgactacgagcaagagttggagactgccaagaacagctcctcagttgaaaagagctatgagctacctgatggccaagtaatcaccatcggtgcagagagattcaggtgccccgaggtcctcttccaaccatccatgattggtatggaagctgcttggatccatgagacaacatacaattcaatcatgaaatgtgatgtggatatcaagaaggacctttangcaaccattggctcagtggaggttcgactatgttccccgtaatccctgatccgatagcaaggagatcatttccctggaccaagcaccttgaaatcaa

SEQ ID NO: 98313 - DNA, 525 bp, Zea mays
  unsure (1)..(525): unsure at all n locations
agtgatgtaattgtnnttttnacacgcacacgtagctcgtccgaattcccgctcgacccacgcgtccgcggacgcgtgcgctcacgtggttgagtctcctatttgcagcaaggttaagtacgacggcgacagggcatctggtctgatcaaggtggaccgtgttctttattcctctgttgtttacccacataactatggcttcattccactgcacactctgtgaggataacgaccccctggatgtcctcatactgatgcaggaacaagttgtccctgtgtgattcctgcgagctcgtgctattgggctcatgcctatgatcgatcaggtctagtgtcttcgtcacctgatcgcatagtgcttgctatgtttaccttaggccatatattttttcccggtaattatgagaccacttgaacatgtaagttttgacttttgaccaaacccaccataagacctttctattgaatactaaaatatagttcttggaaactagtttttggcccaaggcttgatttcttgcatct

SEQ ID NO: 98314 - DNA, 523 bp, Zea mays
  unsure (1)..(523): unsure at all n locations
agtgagccaatgcttgctaattcccgacntacgtagctccctaccgtccggaattcccggctcgacccacgcgtccgcgcacgcgtccgaggtcattgagcttttaatcaaacatccggaactgtgggagagcgttggaattgcacaaccaaagggtgtccttctttatggacctccgggcacaggaaagacattgttggcacgtgcggttgctcatcacactgactgcaccttcatcagggtgtctggttctgagttggttcagaagtatattggtgagggctcccagatggttagggaactctttgttatggccagggaacatgcaccatccattatatttatggatgaaattgactctatcggatctgctagaatggagtctggaactggcaacggtgacagtgaagttcagcgtactatgcttgaactttctaaccagcttgatggttttgaaacatcaaacaaaattaaggttttgatggcaacgaacagaatagacattttggatcaagcccttctt

SEQ ID NO: 98315 - DNA, 521 bp, Zea mays
  unsure (1)..(521): unsure at all n locations
agtgtgcaagtgtnttaggtcccccgaaaacgacgcgtccagaactcggctcgacccacgcgtccgggacgcgtgcgcccacgcgtccggctatgagctttacttgttggttggattctctggagtctggcagctagtccagttaagtttcagacacacatggggagcattggcagaggcacggccaactgcgccaccgtgccgcagccgccgtcgtcgacagggaagctcatcacgatcctgagcatcgatggcggcggcatccgcggccttatcccggcgaccatcattgcgtacctcgaggccaagctccaggagctggacggtccggacgctcggaatcgcgactacttcgacgtgattgccgggacgagcaccggcgccctggtcgcgttgatgcttgcggctccggacgagaacaaccggccgcttgttcgcggcaaggaacttaccacgttctaccttgagaaccggcccaagatctttccacaaaaaaaggctgggttgcttaaccccgttan

SEQ ID NO: 98316 - DNA, 519 bp, Zea mays
  unsure (1)..(519): unsure at all n locations
agagtgcagtgcatgacgtacctcgcacatagtagacctctaccggtccggaattcccggctcgacccacgcgtccgcggacgcgtgggcgctcgccaacgtgttgagtaaggaagcagctagctaggaggccagccgtccactgaccggccggtcatggcgaggatccacctttacgtcgtcgccgcggcctgcgccgtcgccctcgcgctcgccgtcccggccctcgccggcgacccggacatgctccaggacgtctgcgtggctgactacgcttccccggtcaagctgaacgggttcccgtgcaaggcgaacatctcggcggacgacttcttcttcgacgggctgaggagcccgggcaacaccaacaacccggcgggctccgcggtgacggcggccaacgtggacaagttcccgggggtgaacacgctgggcgtctccatggcgcgcatcgactacgccccgggcggccagaacccgncgtacacgcacccgcgcgccaccgagatcatcttcgtg

SEQ ID NO: 98317 - DNA, 532 bp, Zea mays
  unsure (1)..(532): unsure at all n locations
ggtagtgcatatgtgnnttcaaatcctcggctcgatttgcaatagcattattccgtccggaattcccgcgtcgacccacgcgtccgagatgaggaaggtataatttagaatgttaacatcttgatacatctggtgggtatagagcacttaaagatgggatgaagctttatatttcagacaacaaagtgatcttgacagaaggttttggttttgatggcgttgtccctgtgaaatactttgaaagaatcgaaacatggccaggacgagctccaataccgttccaaagataacaggccatgtttcagcattgctagttcgtacgtactgaaaaatgatttgtcatgatgtatcccggagaaccattttttttggtaattcacatacactattttggggggttggcttttttttttttggggggggggggagtcactatgattgtgttgggacctctcagatattcgtttgatgatttttgcaaaaaaaaaatataagggcgggcggtctaaaggatccaagctacgtacgcgtg

SEQ ID NO: 98318 - DNA, 526 bp, Zea mays
  unsure (1)..(526): unsure at all n locations
agttgagccgtgcgtgncctttccccccgaaaaatagtagcctccctacccgtccggaattcccggctcgacccacgcgtccgcggacacgtccgccttaatttctatatgaccctctgctccccatcaactctggacctgtcccaacgatccccaattcctccttcagatttcacattcaatgcaactcaagacagcaaagaaagcagacatatacgaatggggctcgtgtttatgaagctcttcagccatctcttcgtcgataaggatatgcatatccttatggtcagcatcgataccactggtaaaaccaccatcctctacaagctcaagcttgacgagatcgtcatggtcacctttagaggaacacattggacaaggactcggacactgttgcataccgatgatacagatctaaagtaagatggggatgtcgtgtgcttgagacgacaaggatggaaatcttttcaagtaatggctactctttttatcatagactgaatgcttgaatttgtgaaaccttagt

SEQ ID NO: 98319 - DNA, 537 bp, Zea mays
  unsure (1)..(537): unsure at all n locations
gtaatgcgtggnccctgcactctgcgttcagcatcggtcctgaattaccggatcgaccgacgcgtcctcccaggcgttcgcccacgcgtccgcccacgttgcctatgttttgtgttcgttccacgtgtcgattgacatgcctagatctggaaccgctctctggagccctggcggccggcaacgccgtggtggtgaagccgtcggagctcgcgcctgccacctcggcgttcctcgcggccaacatacccaagtacctggactccaaggccgtgaatgtggtggatggcgggccggaggtgggggagaagctcatggagcaccgatgggacaaggttctcttcactggtaatgaactacgtacgtaatgcatgagcgtgtatctgcgttaccacctggtgtctctctcactctcaggcagcagccgcgttgggcgccttatcatggcccaggccgacaagcacctcaccccggtggcgctggagctcggctccaaatgcccctgcatcgtccactggcttgacagcgacatggacagcn

SEQ ID NO: 98320 - DNA, 474 bp, Zea mays
  unsure (1)..(474): unsure at all n locations
agttgtgcgtgtggnccgggtcagataggctcacttgctcggaatttccggctcgacccacgcgtccgggggcttggcctccgctcgatgttcagctaccttacagaccgtcctcggctaggttacgttacttgcaggatagtatcaacgaaccaggagaaagaaatcgcgactaaagaacttggcagctgctctatgagtacaccacgtgctcatcgcttcgccacaacgtcgttcaagcagctcgtgacatcgacgggcctcaaggcgactcgggagactatcggaagacactcttataagctctgcataaacgttacgtcgagaagaccggtaacaacgtttggaccggtcatggactcctggttggcaacgtaggccttaacttcaccaatggagacgctaaggatgtgcgcgaggaggttgacaaattcaagggggcggctccagatcgagctgagctagttgctccag

SEQ ID NO: 98321 - DNA, 533 bp, Zea mays
  unsure (1)..(533): unsure at all n locations
agtagatcctgtctgagnccttttntcaggtcagnttcagganctaatcccttancgctacccgcggcgacccacgcgtccgagcactcgtccggattgttgtcacctttatcctagtctacaccgtcttctgcaccagcgatgccaaaaggaatgccagccactcccatgttcctatccttgccccactgacaattgacttcgcgatattcctggttcaccttgccaccatccccattactggcactgacatcaacccaactaggatccttggcgctgccatcatctacaacagggatcacgcctgtaacgaccattggatcttctgggtcaagcccttcattggcactgctctggctgccatctaccaccaggtgatcatcatagccatcccgttcaaaaacaagtcttaaactgccgtggcccttccgagacatgccattcccaagaacgggcgttttcctgtgatgacttcttgtctgcccacgcctagggtctctggcgaattctatatctcgtctattcagagctgt

SEQ ID NO: 98322 - DNA, 532 bp, Zea mays
  unsure (1)..(532): unsure at all n locations
agtgttgtgnnnccaaattcngcangctattcttccctgaattcccggatcgacccacgcgtcctgtcgaacctccactgagcacaatgttcccctgtattgctgatcggatgagcaaggagatcggttcgcttgcaccaaacagcatgaagatcaaggtcgtctcgccacctgagcggaagtacagtgtctggataggagggtcgatcctagcctcgctcagcactttccaacagatgtggatatcaaaggaggagtacgatgagtctggcccggcaattgttcacaggaagtgcttctaggtttctgccaagttcgtcaagtgcttttagggtttgccatgttcatcatcgctacctagtcttaagttatgcccccttcatttgctgagatatgtgtggcaaatttgcattcgtttggtatttcgtggctccatgtgtgagcatgctgtgtcctataacctggtttatgagatgagttgttaaacttgcttgctttgattgttttacctgtaatagcttatatttattta

SEQ ID NO: 98323 - DNA, 532 bp, Zea mays
  unsure (1)..(532): unsure at all n locations
gaactgtgtgnccttgcactcgtnggtagcttcggtcttgaattaccggatcgaccgacgcgtccgcccaggcgtccggttgagtataagaacatgtgcttcactgtttgggatgttggtggccagggcaagatcatgcccctgtggaggcactactttcagaacacacagggacttatttttgttgtagacagcaacgacagggaacgtgttgttgaggctagagatgagctccacaggatgctgaatgaggatgagctgcgtgacgctgtgctgcttgtatttgcaaacaaacaagatcttcccaatgctatgaatgctgctgaaattactgacaagcttggtctgcattccctgcgacagcggcactggtacatccagagcacttgtgctacatctggtgaaaggttgtatgaggggcttgactggctttccagcaacatctncagcaagtcttgaagcttttcggcagggctcctagcgagaggatgtctgaacaacttatggctgctttttttacatattatactat

SEQ ID NO: 98324 - DNA, 540 bp, Zea mays
  unsure (1)..(540): unsure at all n locations
aggaattctattgccgttacntgcccagtgcactatcgtctcaattaccaaccgaccacgcgtccttccaggcntgcgctgactcgtgcggtcattttaactaatgactgcttataattcaaattggatgagatcaattaataagtaatgccggatatccaatcaaggcctttgggtcacaagtacagaaaagagaattctgaagctgataaagttgagcaggtcaaagcagaaaaaaaaaaaaaaaaggtctgccgctctagaggatccaagcttacgtacacgtgcatgcgacgtcatagctcttctatagtgtcacctaaattcaattcactggccgacgttttacaacagtctgactgggaaaacccttgcgttacccaacttaatcgccttgcagcacattcccctttctccaacttgcgtaatatcgaaaaggcccgcaccgatcgccctttccaacagttgcgcaaccttaatgccaatgtgaacctcccttaatggccatttagctcgccgttgttgtgttccaccaacttg

SEQ ID NO: 98325 - DNA, 526 bp, Zea mays
  unsure (1)..(526): unsure at all n locations
aggccggtgctgaggccaaaaactaagcantacgttcgctctcgaattcccgggccgacccacgcgtccgccaggcgtccgcccacgcgtccgacctgttttgtttaccccccgaaaatttgccgtctggtcgtctcgctcctctccctgcgcagcccccagatccggcaccgcccgctcctcgatccccgcaccccacgcccgcaggccgggaccggcggggtcgcgcgccgggtaggaggaggagaagaggaagggcggtatggcggcgccgccggcgagggcccgggccgactacgactaccttatcaagctgctcctcattggagacagcggtgttggcaagagttgcctcctgttgcggttctctgatggttccttcactacaagctttattaccacaattggtattgactttaagatacgaacgatagaattggatggcaagcgtataaagctacagatttgggatacggcgggccaagaacgcttccggactattaccaacgcgtactaccgaggagcn

SEQ ID NO: 98326 - DNA, 543 bp, Zea mays
  unsure (1)..(543): unsure at all n locations
agattaagtcgctagttcctaatcgtnnagtttgtattgacactaccggnctggaattacccggccgacccactcgtccgaccactcgtcctaagactgaacatttggttgagctcactgacgaggagcgtaacgtactggctgttgcatacaagaatgtgatcgctgctcgccgcgcttcatggcgcattgaaccttccattgaacaaaaggaggactcccataagaacaacaagcatgtgaaccttatcaaagaatatcgtgccaagatcgaagctttactgaacaataatcttgatggcctcttcgaacttctagactcccacctaacgccttcttctactgatgctgaatacaaggctattaacctaacattaaaggtgactattacaggtttcatgaccgaatctaagactggtgcttatagggaggaatccagctgagagcactaaaagtggcctattacgcttggtcaggacaattcttcttgcttaagcttgcaactacgccattcgaataaagcttgagacttgctcctttaat

SEQ ID NO: 98327 - DNA, 538 bp, Zea mays
  unsure (1)..(538): unsure at all n locations
atgacactggtnaagtcagttgccctcgctcagncgcatagcantagattcccggttcgacccacgcgtccgcccacgcgtccgcccactcttccgcagacttttaaacttacgcgtgcactgacaaggatgagccactcgatctacctcctcaccactggtgccacgaacagctctttcatgaacatcaaaaccattgctgagtgccttgcagatgacttgatcaactctgccaaaggctcttccaacagctactccatcaacaagaacgacgagattgatcgtgttgccaatgccaaccttttaatggagcttgtatcctggtgcacttgcactataactacctttctttcaatcccaatttttttcctgaggtttttaccccatttttagactttaagaaccctatatttaaagctttgcgttcccaattgaccattaaaatatacctcaaaatccaaattttcttgatccaaaaattccacactaaaaatattcgccttataaatttgttaaatcccttttgccccccccttct

SEQ ID NO: 98328 - DNA, 522 bp, Zea mays
  unsure (1)..(522): unsure at all n locations
aggggctgctaattctatnctcaccgactgtagtgcctgactcaatcttcggatcgacccacgcgtcccgcatggtttgttgtgtggatcgcaccagatttacaatttccccaggacttcatgtttttgtgacnatggttgatgtgtcgattaggccctctcgccgcggatcctccttgccagctgaatgtcctttggcatgatggtcacacgcttagcatggatggcgcacaggttggtgtcctcaaacaggccaccaaggcttgccgtaagtctgccctcaacactggtcgactgaagaatcctcaccggtaccgccctgtaactgttgccctccgtgagatccgcaagtatcagaagagcactgatctgcttctcaagcttctggcctttctgatgcttgtaaatgaaattgcacaagactttaacactgatctaccgtttcaagaccatgccgtactttactctcaagaagaatacttaggtttaccttgatggcccctatgaaggaccccaaactcg

SEQ ID NO: 98329 - DNA, 533 bp, Zea mays
  unsure (1)..(533): unsure at all n locations
ggtgactcggactgcntacgtntnctgatagcactgactgtaccggtcttgaattcccgggccgacccacgcgtccggaccaacctggttccttacccgatgatcctcttcatgctctcctcctacgcaccggtgatctcttctgcgaaggccttccacgagcagctgtctgtggcggagatcaccagcagcgcgttcgagccggcttccatgatggtcaagtgcgacccacggcacggcaagtacatggcttgctgcctgatgtaccgcggcgacgtggtgcccaaggacgtgaacgccgcggtggccaccatcaagacgaagcgcaccattcagttcgtggactgttgcccgacggggttcaagtgcggcatcaactaccaggcgcccacagttggtgccgggttgccgacctcgccaaggtgcaacgtgccgtgtgcatgatctccaactccacccagcgtctcgaggtgttctcccggataaacagcaagttctacctaatgtacgccaagcgcgctttcgggccctgc

SEQ ID NO: 98330 - DNA, 511 bp, Zea mays
  unsure (1)..(511): unsure at all n locations
cggggctggctaggatcggtcgacagccagcctcgctcaatatcgggccgacccacgcgtccgctctggcatcgggccagtgttttgagaagctggtcggttctcctagatcccttcgcctctggctcgtgcgaagctaggtagccgccaccatgagccgctcggggcagcctccggatctcaagaagtacatggacaagaagcttcagattaagctgaatgcaaaccgtgttgttattggcacacttcggggattcgaccagttcatgaatctggtgatcgacaacactgtggaggtcaatggaaatgacaagacagatattggaatggtggttatcatgggaaacagtgttgtcatgatcgaggcactggagccagttgccaagtcgcagtgaatccttatttttcagctgatatagtcgcagcatgaaaactgatgtaaatgctatgagtgaaccctgttgtacttcggactcgtgcttttgcacagcaacataactcggctaccaan

SEQ ID NO: 98331 - DNA, 528 bp, Zea mays
  unsure (1)..(528): unsure at all n locations
tcggtgganttcgattntncttcangcgttacggtttggaattcccgggccgacccacgcgtccgcccacgcgtccgcccacgcgtccggctgatccttttccagatcaaccaccgcaacgtggggaagctgcttggctgttgcctcgaggtcgaggtgcccatgctggtctacgagtacgtcccgaacggcagcctccacgcgtacatccacggcgatggcgactgctgctgcagcggtggcgaggccaagctgaatctggcacccggcgcgcgccttcgcatcgcggccgagtccgcggacgcgctcgcgtacatgcactcgtcggcgtcgccgtcgatccttcaccgcgacttcaagtccgcaaacattcttcttgactgcaacctcgccggcaaagtgtccgactttcgcgcggtcaggcttgccccccgcggcctaagaagccgttggcaaccttggtccagggaaccctggggtccctggacccgagttcctggttaacaacccagtttaccagcaagaacg

SEQ ID NO: 98332 - DNA, 530 bp, Zea mays
  unsure (1)..(530): unsure at all n locations
cgtcgactggtcggctggtacgtnnagtaagnagtagacactccggtctggaattcccgggtcgacccacgcgtccgcaagcagcaagtcgatcgtgagcatctagttcttccctgctcatcgtcgccagctggtccgagggatgaggaagaagagatagatggacgacgtcggcggtgctgctgctggtggtggcgattcaaagcagctcttggttgaagcagatgggaacacacgcacgcttattttgaacaggccgaaccagctgaatgtactctcctctgcaatgattaagggactcctgagctgtttcactgcttttgtgaaagatgatggagttaaattgttgattatgaacggttctggaagagcattttgtgctggaggtgatgttgttgctggtgtccagtcaataaataatggatggaaatggggcgctgatttcttccgagatcaatattctttaaactacataattgcaacatgtatcaaacctcacgtttctcttcttactggaattgtcatgggtg

SEQ ID NO: 98333 - DNA, 504 bp, Zea mays
  unsure (1)..(504): unsure at all n locations
agtagaacgctagtaacttagctgtcacagactagcctccntgaattacgggtcgaccacgcgtccgggaagaccccatggattgtcaatccagagttttaggattacccagacctatatgttctgaggcctttgcagtatgtggggattgaagtatggcaggtcaaagctggttcagtttttgacaacattttgatttgcgatgacccagactatgcaagacatgttgtagatgaaacttttgctgcaaataaggaggctgaaaaggaggcctttgaaggagctgaaaagaagaggaaggctagagaagaagaggaagcacggagggcacgggaggaaggggagagacgaatgcgggagagggatagggaccgcggcagggaccgatacaaggatagatataagcgtcatatgcactacgactaccatgacgagctatagatcctgtattcttttgaaatctgcacgatattggatgtctgtctacggagagcgcacgttcat

SEQ ID NO: 98334 - DNA, 533 bp, Zea mays
  unsure (1)..(533): unsure at all n locations
cgactaagtgtgtttaaggatacanagtcatttcnaccgccctggaattaccgggtcgacccacgcgtccgcccacgcgtccgcggactcgtgggcttctttatagtttatgctacttcaagtctgcattggatggagaatccaagttgcagatactcaatggcaattatcgtatccctgagcaacccaagtatagcactgctgtcacagggttgatcaaagatatgctggaagcctctccaaattccagaccagacatcacacaggtctggtttcgtgttaatgagctactgccgcttgagttacaaaaaagtttacctgacggaccttcgccagccgtttccttgaagttgcaagatgaaggtgctcataaaagggcacatgttatgcctaaaatgaacccttcttcatcttcaagagagcaatctaatagttctctatcgcatggaaactcaaaagcaagagatgcacccttaggtgcattttgggcaacacaacatgcacaaagtgctcaagcctcagaatattggaat

SEQ ID NO: 98335 - DNA, 533 bp, Zea mays
  unsure (1)..(533): unsure at all n locations
gagacgtgctgggnttggcatgnnagtacangtgctacggtctggaattcccggctcgacccacgcgtccgcagactcctgctgcagcgcctccgccgcttttgtttcatctaacgcagttccctccgcgggagggtgaggcaagatggttctccagaacgacattgatctgctcaacccgccggcagaactcgagaagctcaagcacaagaaaaagagactcgttcagtcgcccaactccttcttcatggatgttaagtgccaggggtgcttcagcataaccactgttttcagccactcgcagactgttgttgtgtgccctggctgccaaactgtcctctgccaacccacacgaggaaaggcaaggctcactgatggctgttctttccgcaggaaaggagactagagcggatgtggtcttcaagttttgctctatgccagatactaagcgtatgaactgcctttagctaaaattttccataagttggtcttgaacagctatgtgttgcatgttggctacctacaaacttatt

SEQ ID NO: 98336 - DNA, 497 bp, Zea mays
agggatgtggctatcatgccaacatacgtacttcactgaattaccggtcgacccacgcgtccgatggagatgatggatctgcatcagacatttgttcatgtggtgtcattctctatgttttaatggctggttaccttccctttgaggagaatgaccttccaagtttgtatgaaaagataactgcagctaagtactcatgcccatactggttctctccaggagctaagtcattgatccagagattacttgatccaaatccaagaactcgtatcactattggagaaataagagcagacccatggtttgagaagaactatgtagctattagacgcggtgaagatgagaatgttagcctggatgatgttcaagctgtttttgacaatattgaggacaagtacgtatctgaggaattaactcacaaggatggtggtcctcttatgatgaatgcctctgagatgattacgctatcttaaggtttggatctctcaacgttgttt

SEQ ID NO: 98337 - DNA, 527 bp, Zea mays
  unsure (1)..(527): unsure at all n locations
ctggtaggcctttaccgtncgctacgnatcgatcgtcccggnctggaattcccgggccgacccacgcgtccgcccacgcgtccgcccacgctccggacccactctttcgcggacgcgtgggcggcgtgcttgggatctcaacccaagtcgtgcctccgctccggtcacccgtcgctccacgcaaccatgtcgaggaggaagaccagggagcccaaggaggagaacgtcacccttggacccactgtccgtgaaggagagtatgtctttggtgtcgctcacatctttgcatccttcaatgacaccttcattcatatcactgatttgtctgtgagggaaactctgggtcggatcacccgtggcatgaaaggtaaaggctgccctgatgagtcggcaacttaccctggtattcctgctgctcaagacgtccacaaggctggaaggagcttggcattactggactggacatttaacttcgtgccaaccgtagccactagacccaggacccatgacccggtgcccagtcttgc

SEQ ID NO: 98338 - DNA, 501 bp, Zea mays
agcgctgtggctacgtactagccatccctgcctgctcctgaatacccgggtcgacccacgcgtccggcaagaaatccaagctgggcttcactgcgtatccatctccccaggtgtcaacctgtgttgtggagccttacaacagcgtcctctccactcactcactcctggagcacactgatgtctctatcctgctcgacaacgaggccatctatgacatctgcaggcgctccctcgacattgagaggcccaactactccaacctgaatcgccttgtgtctcaggtgatctcatctctgactgcttccctgaggttcgatggtgccctcaatgtggatgtgaacgagttccagaccaacctggttccttacccgaagatccacttcatgctctcctcctacgcaccggtgatctcttctgcgaaggcctttcacgaacagctgtctgtggcggagatcaccagcagcgcgttcgaaccggcttccatgatggtcaaatgcgacc

SEQ ID NO: 98339 - DNA, 542 bp, Zea mays
  unsure (1)..(542): unsure at all n locations
agcacgtggggnnnnnncttgaaacctangtcattgcataacttcttctgnttggaattcccggctcgacccactcgtccgcccacgcgttcgcggacgcgtgtgtgagttatgtgtaaacacactgaagaaggagtggggccctatccttggattaagacatgttcttctggtagtgagatgccttctgatcgaaccatttgctgaatctgcacttaatgaacaagctgggaagatgctactcgaaaattatgaggaatatgcaccgcatgcaaggttatacactggcatccatgccctcaagaataagttcaagactggagctatatctgagtcgaccacagcttttgatgttgacaagttaaagtcttggtccaacgagagcgcaacattatcgatgccaccggcaataactacctttgcttgcttcaaagcaccttgtacaaatttgcatgaacagagccctactggattttgatcctctttaagaaccggtgctggtggtacaatgaaggatgggccaatggctttcaaagtaccct

SEQ ID NO: 98340 - DNA, 528 bp, Zea mays
  unsure (1)..(528): unsure at all n locations
cgaactcggtggtccgggtcacgcctcgctcatttcgtctggaattcccgggccgacccacgcgtccgctcgtatcgtcggagaaccaccgaatccatcgcattgcagagacgagtagaggttagatgtatgctgaggtaagatggtgtgcatccggcaggcgaccatcgaagacctgctggcgatgcatgcgtgcaacctgatgtgcctgccggagaactaccagatgaagtactacttctaccacatgctctcgtggccgcagctcctcttcgtcgccgaggactacggaggcagcatcgtcggctacgtgctcgccaagatggaggaggacccctccgagccctgccacggccacatcacctccctcgcggtccttcgctcccaccgcaagctcgggctcgccactaagctcatgtccgncgcgcatgccgtcatggaccaggtcttccgcgctgagtacgtgtcacttcacgttcgtcgatccaaccggctgtctttaacactttacacctttaccctgggtag

SEQ ID NO: 98341 - DNA, 527 bp, Zea mays
  unsure (1)..(527): unsure at all n locations
tgccggnntntggcagcngatcangnagactgaatctacnctggagtacccgggccgacccactcgttcgagcggggccataaaagaggctatgtgttttatgatggatcctttggtggggaagaaagtggttatgtagtgatcacagtccaagttcaataggtatggagcatttgataagacagcagatacacgtaccagtgcattcatggcaccagccttcttgtgatggttataacctggccttcccgatcccgaacctcttcccttgcaagaaccttgtgacacgtgaaggcagcgcctggttgtacagtcctgactccaaagcgttgagggaaaagctcaggcttccagtcgggtcctgtgagcttgccgttccactcaaagccaaatcgaggcttttctcggtagatcgacgaagagaagcgtacgcgacgatactgcattcagcgagcgaatacgtttgcggcgcaatctcggcagcgcatagcattcggccagcatgaatcaaccaggacctggtcatn

SEQ ID NO: 98342 - DNA, 534 bp, Zea mays
  unsure (1)..(534): unsure at all n locations
tgataaatcggctgggttcggtcaccgcttcgcatccagtttctnctggaattcccgggccgacccactcgtccgagaggtttgaggctgaagcctaagtactcttcccatagccttgtccaatacatggagatgatttctaaacttcggcaccgtcatttggtcagcatcattggtcattgcattgtcagtgatgaggagaatcctaatatcgccagctcggtatacctagtttctgaatgcgagacaaatggatctttaagaagtcaccttactgagtggaggaagcgtgaaatgctcaaatggccccaacgggtttgcgctgtcattggcattgcgagaggggttcagcttctgcataatctgactgctcctgggatcgtacagaacaatctcaacatagaacatatcctgctagacaagaccctcacgtctaagatcagcaactttagtctttcaatgattcaactagcaagaaccgcaggatctctcagataccccaattgctgttcatgaagacaatgattttgcagt

SEQ ID NO: 98343 - DNA, 532 bp, Zea mays
  unsure (1)..(532): unsure at all n locations
agtaggctcgctaangttcatncttctcccgacctaggcactaccagtcagcactcgagtcagcggatcgcagccacgcgtgcgcccacgcgtccgtcgacgcgtcctttcacgcttccggatttttttaggcggctgggggcctgcctgtctccactggaagctccggattacgtaggaaaggggcgggcggcatgaggatccagtgcgacgcgtgcgaggccgcggcggccacggtggtgtgctgcgccgacgaggcggcgctgtgcgcgcgctgcgacgtggagatccacgccgtcaacaagctcgccagcaagcaccagcggctcccgctcggcgacgccgcggcgctccccgccagcctcccgcgctgcgacgtgtgccaggagaggccggccttcatcttctgcgtcgaggacagggcgctcctctgccgcgactgcgacgagcccatccacgtccccggcacgctctccggcaaccaccagcgctacctcgccaccggcatccgcgtcggcttcagctccgtctg

SEQ ID NO: 98344 - DNA, 500 bp, Zea mays
  unsure (1)..(500): unsure at all n locations
cgtgacgctgngcatcatcgtccatcagtacatcactccggtcttgaattcccgggtcgacccacgcgtccgatccgatgatgaaaagcctgaaaatctggattcattgatcgctgctgttaacagcagcgatggcagtctcattgttcatgtccgtcctggtgaaaatgctctctctgatgtcctcctaagcactcctatatttactggtgaagaaggtggaagtggttttgctgcttctgcagcagctgccgtagctactggagcatctggatttgaatttggtgtggacccaaatgtagatccagagttggcactcgccctgcggttgtctatggaagaagaacgagcaacgcaagaggctattgcaaaaaaggctgcagatgatacatctaataccgaaaatatcaatgcctcaagctcaaacagcgattctgttatggctgaagcagaacttgcctcanatgctgctgctggtgacaagcaagaacagccaaatg

SEQ ID NO: 98345 - DNA, 531 bp, Zea mays
  unsure (1)..(531): unsure at all n locations
cgaatcgggctaggttcgggttcatgcctgnacgnactacccctccggtccggaattcgacccacgcgtccgcccggtcagagaacccagccgccgtcgcattggccttccaggtaagcagtaacgttcacggtatcggtcgtcatgaagcgcaacccccgcgtcacgagctcccgccggaagtgccgcaaggcgcacttcacggccccgtcctacgtccgccgagtgctcatgtccgcggcgctatcgacggagctccgccacaagtacaatgtgcgttccatcccgatccgcaaggacgacgaggtgcacgtcgtgcgcggcacctacaatggccgtgagggcaaagtggtgcacgtgtaccgccgtcgctgggtcatccacgttgagcggatcacccgcgagaaggtgaacggctccaccgtgaacgtgggcatacacccttccaaggtcatggttacaaagctgaagcttgacaaggaccgtaaggcgctactcgaccgtaaggccccggggccgagcctgctacan

SEQ ID NO: 98346 - DNA, 529 bp, Zea mays
  unsure (1)..(529): unsure at all n locations
gtaatcggctgggttaggtcctcgcatattcagtactaccgttccggnccggaattcccggctcgacccacgcgtccgctcgtgagaagattgacaaaaaagtggacttccaatcaattcttgatttgaaacgattggttagtgactctaaaggaacagattttaaatacagcctttatggtgtcctagtccatacaggttggagcactcaatcaggccattactattgctacgttcgtacatccagcgggatgtggcacaatcttgatgataaagaggtgcgccaagttcgtgaagcagacgtattgaagcagaaggcttatatgttattttatgtacgtaacagtattgggaagtcggtggtgtgcaaagataataatgctgctaatttgctcaagaagaaaacctctgaaaaaatctcaagtttgaatggtattgcacaaaccaatgtaagagcacaaaatttgaatggtgtgtctccatttggtgataagacgcacggcacaatcattggctactctacaatttc

SEQ ID NO: 98347 - DNA, 517 bp, Zea mays
atggaagctagtaagtaaactcccgggaagcagactcgctccggtcttgaattcccgggtcgacccacgcgtgcgctccactcatcttttcgcgtttagtacctttaaaatttcccccactcgccagtcgcagcaggacctgtagccatggacgccagcggagccggtagcaaggggaagaagggtgcggccgggcgcaaggcaggcggccccaggaagaagtcggtgacgcggtccgtcaaggccgggctgcagttccccgtcggccggatcgggcgctacctgaagaagggccggtacgcgcagctcgtgggcactggctcccccgtctacctcgccgtcgtcctggagtacctcgccgtcgaggttctggagttggcagggaacgcggcgaaagacaacaagatgacgcgcatcattccgcgccacgtgctcctggcgatccgtaacgacgaggagctcgggaagctgctggcaggcgtcaccatcgcgcacggcggcgtcctacccaacatct

SEQ ID NO: 98348 - DNA, 534 bp, Zea mays
  unsure (1)..(534): unsure at all n locations
cgactcctcgtctgggnttcccctccgaactatcgctactacgcctccgatttccgggccgacccacgcgtccgcccgcgcgtgcgcccacgcgtccgcggactcgtgtgtctccatcttggcccaaccgatcgcaaacgtctccccttttctccgtcctctcctagtccacacggcagacgccgccgccgggggagaggagaggaggggaggggatcggctccaagggaacaggtgagatggcaatcctgtacgcgctggtggcgcgcggcacggtggtgctggcggagcacagcgcggcagccaccaacgcgggcgctatcgcgcgccaggtcctcgagcgcctncccgacggcggcgccgacagccacgtctcctacacgcaggaccgctacgtcttctacgccaagcgcaccgactgcatcaccgcgctctgcatgtccgacgaccccgtcggaggactgattcccttcccatttttggagatattcatggaaggcttgtcaagacattatgcccggcttgcgctaaccc

SEQ ID NO: 98349 - DNA, 528 bp, Zea mays
  unsure (1)..(528): unsure at all n locations
cgagacggctcggcctaaactagcancattgcagtancattaccggttcggaattcccggctcgacccactcgtccgtcagccggcgaccccatcgtgactgggccttctcatcgaggtctccctctttcggcgtcgttgaccatggccccaagccgtcggaggtgtacggcttcgttggatccatcaccaccgtcattgccaccgtcgtgtacctcgcctgggcatacacgcccgagcccgtcctccagtcactcggcatcacctactaccctagcaagtactgggcactggcggtgccatcgttcgtggttgtgaccgtggtgctgtccatgggcatctacatgggcctcaacttcgctgccactccttctccgacttccttcagtactatcttcgatgaaaagagtagggagcacacagccttttttcctgcaactgaagatgaaaggcccatcgaacccatctcagacatcggtattgatcggatcaacactcttatgtttggtgatagatgattttctccggg

SEQ ID NO: 98350 - DNA, 534 bp, Zea mays
  unsure (1)..(534): unsure at all n locations
cgataatccggttggcctaaatcagatntatnctactancgttccggnctggaattcccggctcgacccacgcgtgcgtcgagaccccaaaccccaaacccttgcttctctcgatgcggctagccgtctatggggaacgctctgctatccaaacgcgagaagcggcttcagacgttgcgccggtagatagcggagccgttctacgacaagaaggacgccgccaagctctccgcgcaggccgcagccctagctgctgtcccgctcccggtccgcggtcccccgtcgtgccaggatgccggcacctcccgcgcagctagctcggcctcggctatggatgtggagatgtctggtgcaaggaacagcaggtctaagacctttctgaagccacttggcagcattagcaagaagaaagtgcagcttcactttgatgatcaagtaagactagagaaaagcttagaataaaggaaaggtttttttaagaagttgaagaatggatgatattcatgcagttttgttcccagtttgaaaaacaag

SEQ ID NO: 98351 - DNA, 508 bp, Zea mays
  unsure (1)..(508): unsure at all n locations
gccaagctggtaagtaagtctccgacagacagncctcactccggnctggaattcccgggtcgacccactcgtccggatacgatgctcaagataaatgacttttatgttttcccacttcaattggatcttgagagaggggattgaaaatatctttctccatactcggatagaagtgtgcgtaacctatatactcttcatagtgtactggttcatagtggtggagttcatggaggacactattatgcctttattcgtccgaagctgtctgatcaatggtacaagttcgaggatgaacgagtgactaaagaagacatgaaacgagcattgtaggaacaatatggtggtgaagaggaagctccgcataccaacccttggttggatactgcactgttaagattaanaagcattcaaatgctaacatgcttgttacattcgagaaagtgacaaggttacattaatcgtgattgggattatgtagatattcaaaacaccttaagttaggtgagaa

SEQ ID NO: 98352 - DNA, 513 bp, Zea mays
agtgaagctggtagtctatccgtcgggaagtagcctccctccggtcttgaattcccgggtcgacccacgcgtccgagccaaccgcatccagtccaccctttccctttcgaccccgacaaccccgagtcccgacccggtggcgcccaaggccgagaagaagccagcggagaagaagccggcggccgaggagaaggcggagaagacgaccgcaggtaagaagcccaagtccgagaagcgcctgcccgcctcgaagtcctccggcaaggagggcggcgagaagaaggggaagaagaaggccaagaagagcgtggagacctacaaaatctacatcttcaaggtcctgaagcaggtgcaccccgacatcggcatctcctccaaggccatgtccatcatgaactccttcatcaacgacatcttcgagaagctcgccggcgaggccgctaagctcgcccggtccaacatgaagcccaccttaacttcccgcgagatccagacttccgtgcgctttgtctt

SEQ ID NO: 98353 - DNA, 532 bp, Zea mays
  unsure (1)..(532): unsure at all n locations
gttttgttagatactgtgtgtaacttccgaacagattgtactaccgtttcgaattcccgggccgacccactcgtacgcgggcgcgtggctatatatcttgtttcctttcttcttcagtattcgccgaacctgcgttgtatcgctcttgaggcgtgtgctcattcattctttgacgaattacgagaatcacatgcaagactccctaacggacgcccatttcctccactattcaactttaagcaggaactatcaaacgcaccaccggagcttgtcagcaggctattaccagagcatgctcgacggcattcaggattcggttccttatttgggagtggaccgtagcccgtatgaaaatctcgttttaatgttgggctgctgtacgctgtcagagggcaatctgcatatcctaaatctaagttntagaacctgaccatcttgttgaaaagttgccagccttagaaaaacccgaagtggcctcttgtgtccatgctctgccagtaacggcacataatgcttgggggaatgttagggt

SEQ ID NO: 98354 - DNA, 536 bp, Zea mays
  unsure (1)..(536): unsure at all n locations
cggctagtcgctggttaacctnttagaactgatcgtantaccgcctcgaattcccgggccgacccacgcgtccgcccgcgcgtccgccgcatccgccctagcatctcgcgtcgagcaggatctgcccagttgctgttgcggtagttcccccaactgtcaccatgcagaacgaggagggtaagactgtggacctctatgtccccaggaagtgctcggccacaaacaggatcatcactgccaaggaccatgcctctgtccagatcaacattggccacttggatgcgaatggcctgtatgatggtcacttcacaacgtttgctctctctgggtttgtccgtgctcagggtgacgcagacagctccttggacaggctgtggcaaaagaagaaggctgatatcaagcagtagattttacatctagtttaccaagaattggacaccgtctttaactatgtttttgaattcatgtcactatatgcaatgttgtgattcagcttgtaccttaaatctgaagattaggatctttgttggttccaa

SEQ ID NO: 98355 - DNA, 534 bp, Zea mays
  unsure (1)..(534): unsure at all n locations
gtcactacgtgttgcctaaacaagacnagttagcagtacgctccggnttggaattcccggctcgacccactcgtgcgcccgctcgtccgcccactcgtccttatttttcggtttgcttgtagggctctcgggtctggtcccagatacgctcatgattggcatggagctcagggacaaggtaacggagtatgtgaaggagaggattttagctctaagagcggcaaacccaggacagtatgataacatatccgttgtccgcacgaactcgatgaaatacattccaaattacttcagaaaggctcagctcaccaagatgttcttcctgttccccgatccccacttcaaggagaagaaccacaggaggagggttatcagcatgcagctgttagacgagtatgcttacgtgatggaagtgggaggaatcatatataccatcactgatgtcgaggagctcggagagtggatgctgtcgtgtctagagaaacacccgttattcgaaaccgttcctgaagaagagattaatgcttgacctgt

SEQ ID NO: 98356 - DNA, 527 bp, Zea mays
cgctactcggtatgccttttcacgctctgcggtacactcttctggaattcccgggtcgacccactcgtccgcccactcgtccggggaaaaccatatggatttatcctactggataccttccgggtcggatggcacctgttaagaacttttttggactgatgtcttttgcatttgtcgtacttgggatctattggttttatcagtatatgaagtcctggagagaggttcttccacttcagaactgtattactcttgtgattacactgggcatgtttgagatggcattgtggtattttgagtatgctgaatttaatgagactggagtacggccaaaaggcatcacattttgggctgtcacgtttgcgactgtcaagaggactgctgcttgaattattgttctgattgtctcaatgggtattggtgttgtcactcctactttggttgtcttgccataaaatgtgttcttgcttgtaagacctttttttttaagcacagtattttttggaatagttggaaatttttgtttt

SEQ ID NO: 98357 - DNA, 528 bp, Zea mays
cgattattctctaggccttccaccgactatcgtgaacattcgaattcccgggtcgacccactcgtccgggagacgagatctgttgacgaagcaagctatgcattgtccctggatggcattatgttcgaatgggcaccggtgcaggttagaacgccaacatactacaacccttgcattgcagccgtactgggcccaagccagcctagccccaatctgaatcttgctgcagttggcctaacagcatgatctaatggaggactagaaggtccagaccgtatttttgtgggtggcctcccgtattacttcactgaagcgcaagttcgggagttgcttgaatcattcggtcctcttcgagggtttgatcttgtgaaggatagggaaactggtaactcagaaggctatgcattctgtgtttaccaggacctcaccgtcactgacatcgcttgtgctgcactaaatggtatcaagatgggtgacaaaacccttactgtcagactagcaaaccaaggggcattttagcccatacca

SEQ ID NO: 98358 - DNA, 510 bp, Zea mays
  unsure (1)..(510): unsure at all n locations
agaagaacggtggttcaattcacgccagatcagtagtctctcttccggtcttgaattcccgggtcgacccacgcgtccgcgcctgtgaaagttcggagccgccttcccgttcgcctccctctccgcctcccgtgcccaaggccaatagttttcaagtggcaatggcggaccaggctaaccaacccactgtccttcataagctcggtggccagttccacctgcgctcgatcatctctgaaggtgtacgggcccgtaacatatgcccatctgtctcatcttatgaaaggagatttgccacaaggaactacatgacccagagcctttggggcccttcaatgtctgttagcggtggcatcaatgtcccagtgatgcagaccccgctctgtgctaatgctcctgctgagaaaggaggcaagaacttcatgattgatttcatgatgggcggtgtttcagctgctgtttcaaagactgctgctgctcccatcgagcgtgtgaagctgcttattcagn

SEQ ID NO: 98359 - DNA, 508 bp, Zea mays
atggacgctggtcagctcttcgcacaatagtagcctcgctccggccttgaattcccgggtcgacccacgcgtccgatcaggcttctcatcgccaccaatgtgccactttcgaggtccagaccccgaccgtcgtggcgggcgaggaagcgcccgtggtggagaccccgccgccggccgtcgtgcccgaggagtctgcccccgccgaggccgaggccgaggccgaggctgctgctcctgctgatcccgaggagcttcccgcggccgagcagcaggcagccgccgaggcggaggccgcggctcctgctggtgccgaggagcccgtcgcggccgaaccggccgccgaggcggaggctgctgctcctgctggtcccgaggagactcctgcggtcgagcaggatgcagccgccgaggaggaagctgctgctgctccttctgctggtgccgaggagcccgccgcggccgagcctgtcgccgaggcaaatgctgctgctcccgaggagctcgccgc

SEQ ID NO: 98360 - DNA, 512 bp, Zea mays
  unsure (1)..(512): unsure at all n locations
agatagtcacttgctaggatgtctgccgaaatagtagcacatcagactcnctccaatttttgggtcgacccacgcgtgcgcttttactctagaagaagacaccttctcatattgcacttacattagaggcggtatgtgttagggaggtttttccaccaaaagttcttaatttcaaaacctttgaagaggcaatcaaagggccaggagaatttctcatgagtgatttcttcaagttcgaccgcccaccttttgtgcatttggcctttcaagctttggacaagtttatgactgaattgacacgatttcctattgctgggtcaacttatgatgttcagaaactgatagaccctgctattagtattaaatgaactctttgtgatagtaagccttgaagaaattgatcagaaaagtcttgcagcattttgcaagtggttcgagggcttgtttgaatcctatggctgcaatgtttggtggtattgtacgtcaagaggttgttaaagcatgttcaagga

SEQ ID NO: 98361 - DNA, 531 bp, Zea mays
cgtctatagttaggccaatcacgaccagttcagtacttctcgaaatcccggcccgacccacgcgttcgcccacgcgtccgcccactcgtccgcaaactttcttggagaagtttgataaaggatctggggatgctgctattcaacaagtgaattgggacacctcaaaagtgaaggataagcttagacgtgacattgaggctcatgtagcttcagttcgagctgctaaattatctgaactttgtgccaaatatgaggcacaacttaccaaagctctggcggaaccagttgaatctcttctagattcagccagtgaagatacgtggccagctattagaaagcttcttcaacgcgagacaaaaactgccgtttcaggtcttcaatctgctgtgtcagcttttgaacttgatgaagcaactgagaaagaactgcttgtgaaagctgtagaagcatggaatgaagtgtgttgagtcataggcaaaagaagaagctggaagggttttgatcgcatgaaggacaagttttcattgctgt

SEQ ID NO: 98362 - DNA, 536 bp, Zea mays
  unsure (1)..(536): unsure at all n locations
cgtatatcatgttggnntcaaaacttgccatgnatagctacttctggaattaccggcccgacccactcgtccgcccactcgtgcgcccactcgtccgctttatttgagtatatgatcgagagcggatggacggggtgggactttaatatcagcgaaatggggttttctgcgtacctttgttatatggctatgtatctcatttttgtggagtttggaatttactggatgcacagagagttgcatgacataaagccactatacaaacatctgcatgcaacccaccatatttacaacaaggagaacaccttgtctccgtttgctggacttgcgtttcacccactggatggtattctgcaagcaatgccgcatgtgcttgcgctcttcctcttcccaacgcacttcaggacgcacatcgctctcgtgttcttggagggcgtgtggacgacaaacatccacgactgcattcacgggaagttattgtcaatcatgggaagcgggtatcacaccattccacatacgacttaccggcacaactt

SEQ ID NO: 98363 - DNA, 534 bp, Zea mays
  unsure (1)..(534): unsure at all n locations
cggatatcgcggctcggcaggccaaagccactacagtaataacactccggtctggaattcccggctcgacccacgcgtccgcccacgcgtccgccacaagcgagctaggtacccggggcggaagaagagagagaagacgtgtctctcctctcggcgtccccgttccccaacctctcgtctgctgcctgcctgcctgcctgcctgcaaaaaggagtttgtcatggcgtctaagcgcatcctcaaggagctgaaggacctgcagaaagacccccccacatcatgcagtgcaggtcctgctggtgaggacatgtttcattggcaagcaacaattatgggaccacctgacagtccctatgctggtggtgttttcttagtgaacattcatttcccgccagattaccccttcaaacctccaaaggtttctttcaagacaaaggtcttccatcctaatatcaacagcaatggaagtatatgcctngacattctcaaagagcagtggagccctgctttgacaatttctaaagtcctgctctc

SEQ ID NO: 98364 - DNA, 545 bp, Zea mays
  unsure (1)..(545): unsure at all n locations
aganaaagacgactagagttaggtcacccgcncagctaccattancacttccggnttggaaaccccgggccgacccacgcgtgcgcgcgcacacacacaaccagatcttccccatatccacccgtcggcacctccgctggaagaggcagatctttgtgaaaaccctgaccggcaagactatcaccctcgaggtggagtcgtctgacaccattgacaacgttaaggccaagatccaggacaaggagggcatccccccagaccagcagcggctcatcttcgctggcaaacagcttgaggacgggcgcacgcttgctgactacaacatccagaaggagagcaccctccaccttgtgctccgcctcaggggaggcatgcagatctttgtgaaaaccctgaccggcaagactatcaccctcgaggtggagtcctctgacaccattgacaacgtcaaggccaagatccaggacaaggagggcatcccttcagaccagcaacggctcatctttgctgggaagcagcttgaggacgggcgcacgcttgcccac

SEQ ID NO: 98365 - DNA, 533 bp, Zea mays
  unsure (1)..(533): unsure at all n locations
agttctcgatgttggcctaaactagactcatngctgtantattcttgactggaattaccgggtcgacccactcgttcgctggggcatatcgccttagtgactcacgtttttgctccaagaaaccacctccgagcccgggcgcacatgcgctcgaggcatgatagagatagaggcggtgagcaaaactatggatgggaaagaggaggacgtgcgcctgggcgccaacaagttctcggagctccagcccatcttgacggctgctcatggcgctgctgacgactaggactacaaggagcccccgtcggcgccgctgttcgagcccggagagctcaagtcctggtccttctactgcgcgggcatcgtcgagttcgtcgtcatcttcctcttgctctacatcaccattctcaccgtcatgggcgtctacaagttcaccttcaagtgcgccaccgtcggcatccagggcattgcctggtccttctgaagaatgatcttcgggcttgtcttattgcaccgcggcattttctgaagacaat

SEQ ID NO: 98366 - DNA, 512 bp, Zea mays
  unsure (1)..(512): unsure at all n locations
cgccggacgcgttttccattccccgccttatnagtagtcctcctccggtctggaattcttgggtcgacccacgcgtccgggctcctctcccccgttgcgcaattcgcttttccccacttcacccgcctcggcggcatggggaagctcgcgctggcgctcctgctcctgctggccgtggcggcgtccgcgtcggccagcagcagcagccacctggatctcgacctgcgctccctgtgctctggagaccgtcggagggagtgccgcgggacggtggccgagtgcctcgccgaggagtcggatgaggagggccttgacctgcccggatcccaccgccgcgcgctctacggcggcgggtacatcagctacggcgcgctgcggcgggacaacgtgccctgctcccgccgcggcgccagctactacaactgccagcccggcggccaggccaacccctaccaccgcggatgctcccgcatcacccgctgccgcggctgacgcggctacggatccgtccg

SEQ ID NO: 98367 - DNA, 530 bp, Zea mays
  unsure (1)..(530): unsure at all n locations
cgatactcactctgannttttnaagccctgntggatttcttactagaattccttccgacctactcgtccgcccgcgcgtgctcccactcgtccgctatatttgactttatgatcgagagcggatataccgtgtgtgtctttaatatcagcgacctgggcttctctgcgtacctttgttatatggctatgtatctcatttttgtggagtttggaatttactgcatgcacatacagtcgcatgacataaagccactatacaaacatctttatgcaacccaccatatttacaacatggctaacaccttgtctccgattgctggacttgcgtttcacccacttgacggcattctgcaagcaatgccgcatgtgcttgcgctcttcctttttccaacatccttcatgacgcacatcgttctcatgtacttggacggcgtgttggacacaaccattcacaactgcattcatcgtaagttattgcccatcattgaaaccccgtattacactcatccaccataccaacttacctgccc

SEQ ID NO: 98368 - DNA, 518 bp, Zea mays
  unsure (1)..(518): unsure at all n locations
nagacaagcgtctatttaagctactctcgcaaaacgtatctacactcntccctngaatccccgggccgacccactcgtccgcgcacgcgtggagtatatctgcctttaagtttgccagcttgggaaaccccagtggaaccgggtgatcataccaaatggggcgctgccaccacccgaactgcttatctgttgttgagaaggcctgtctgaacaccaacagctgtacaggatccatgacagacgagagcttctggaaggatttatgccctggagtcaccaaaacacttgacatcgaaacggaatgctcttactgacctactgaacacgaaccgtctcagtgtgcatctaagttccactgctagtatgcccgtcaaaattctaaaactgtagtgctagttgcacggcaatgctattgtaacctggattggaatgtatacatctgatctaggctatgtttcaagagctactttaaactaacgttagagctgagcagcatgaaatctgattaacgcagatat

SEQ ID NO: 98369 - DNA, 520 bp, Zea mays
  unsure (1)..(520): unsure at all n locations
tgcccacgtgtaagaatttactccgctcagncgcatcgacnctccccnatggaatcaccgggccgacccactcgtgcggtcaggcaagaaacaacggagatttataattctgatgaagcttatgtgtatgacaggcttggcaagctatatgacaagtacagcgattatgtcacagtctgaggacaaggaacgtttgattgctaagcttcatgatgttgtagactgtctctatgaagatggctagcatgaaactaagggcgtatatattgctaaactactagaacttaataaagttcgtgatgctattgatgctcgctataaggaatgtgagattagaaattctgatgttagtcaactgatatactgcatcaatagcttcatagaatctgcacagtctaccgaccagaagttctgacacatagacatgtcataaaagcgaaaggtcattaattagtgttctgaacacatactggctaatatagaaaaaagcacaacacggatctctgccaagcatgcttat

SEQ ID NO: 98370 - DNA, 540 bp, Zea mays
  unsure (1)..(540): unsure at all n locations
agggctaagnttaaaacgtacgcatntcatactgcatcggaattaccggcccgacccacgcgtccggtgggctgcatcatcatgcctcacaatttgtccttgcattcagcactagtgcagtccagaaagagtgacacagacaagaaatctcgtgttctagaagcagtttactactataacatcgagtcgattcttgcactcatcgtgtccttcttcattaacatctgtgtcacaactgtttttgccaaaggattttatgggtctaaacaggctgacagtataggtcttgagaatgctgggcagtacttacaagaaaaatatggaactgcattctttcccatcctctatatctgggctgatggtttgatagcatctgggcagagtagcacaattactggcacatatgcaagacagtttggtatgggaggtttccttaaacttccgattgaagaaatatgctaccggcaatgattactccaagttttggccatttgtcaactatagatggaggtttaaattttcatactttagaacctacct

SEQ ID NO: 98371 - DNA, 544 bp, Zea mays
  unsure (1)..(544): unsure at all n locations
gaaatatcggacttgcntacgccttnattgtcacnactagcatcggttcggaatacccggctcgacccacgcgtccgggggccaacagtggtgccgggttccgattacgccaaggtgcagcgtgccgtgtgcatagtctccatctccaccagcgtcatccaggtgttctcccgcatcaacagtaatttcgacctcatgtacgccaagcgcgcgttcgtgcactggtacgtcggcgagggcatggaggagggggagttctccgaggcacgcgaggacctggccgccctggagaaggactacgaggaggtcgccgcagagggcggcagtgatgacggcgacgaggaggaggaatactgatctgcttgcatgaatctgtttggctgtcgagccaggttgtggtgttgaaaaacctttgtttgtgtcctgggtaatgtttgggtgtttccttccatcatcatttgctggactgctctagtatttgcatttgtaatttgaatantgtagttttaaacactctttggtctaaaaaagaaaaaaaatggcg

SEQ ID NO: 98372 - DNA, 543 bp, Zea mays
  unsure (1)..(543): unsure at all n locations
gtaagtcaatttggnttcaaatcgtccactagcatantcatcgaattaccggctcgacccacgcgtccgccgacgcgtgcgcccagcatccgagatttctcctttggccaggtccccatcgccgcggggctttgcccacctatcccccgcccggtagtagcctatacgccgttgcctagatggagttcatagacttcgtcggtagggtgctcttcgtcgccgctttcctcctatacgcctaccaggagtttaatgaattcggtgctgatggtggaccagcagctaaggcccttcggtccaaattcaacgtgtttgtcaaaaatgtatctgctcatctgggagtagctatgccacacattgaagtgaatcaagtgatagctgctacaattggtcttaaagggtcttggaagccttccttttattttgagcaactctcatcgggcttaatctactgctagatgaccttgctttgaacactcctatcatccatgaattttgaaaactaacattctataaatgcctaaattgacagccctttttttg

SEQ ID NO: 98373 - DNA, 457 bp, Zea mays
  unsure (1)..(457): unsure at all n locations
gaaagctgagncctttagcctttagtgatancctcgaattaccggctcgaccacgcgtccggcgaccgtcgccaccgtccgcctgncttggcccgccactactccgtggtactgttaattccggcgctctcccactgtgaccggccgctagcgacgacagagctgctctattcttaaacaaatggcaccgtccagtacccaaaccttttgaacaacctgcacgaaagccgtattgtcaaactcagtgggtatgagtcaagggttatcttgcttctgggactcatatataatctacacttgccaacactatgatcactgtggcaattcttgaaaccggagagatctaacagggcaacacgtatgtatttccagcgtccaaagatgcataataaagatcagatgggaaatcgacaatgttagtgagataaattagagtttgcatctatgttcaattccc

SEQ ID NO: 98374 - DNA, 544 bp, Zea mays
  unsure (1)..(544): unsure at all n locations
gaggaaagggttagccgtcactcgtatgatatgcanactcctaccggttcggaatacccggctcgacccacgcgtccgcggtcccaagccagccattggttggtatcaagccaagctaatcaagttagctgtanatgcccgctcccgctcttcttccctccgacgaaggcagctgacgacacagcaggctagcttcggagttcggagcactcagccatggccattgccggcgctctcctcctcctgctcggactcctcgcgcgggaggccgctgccggcgggtggcagagcgcgcacgccacgttctacggcggcggtgacgcgtccggcacaatgggcggcgcttgcgggtacggcaacctgtacagcacggagtacggcacgagcacggcggcgctgagcacggcgctgttcaacgactgcgcggcgtgccggtcctgctacgagctgcggtgcgacaacgacgggcggtggtgcctgccgggcaccattaccgtcaacggcacccacttattgccggccaactacgggcttcccaacgaca

SEQ ID NO: 98375 - DNA, 548 bp, Zea mays
  unsure (1)..(548): unsure at all n locations
agtcgtgtgaaatggtgaactggttatgcccattactgcatnatcgtaccggttcggaatacccggctcgacccacgcgtccgccgacgcgtccggcaaagcatttggaattctctgcgatttctctagatctcggctaccgcccactagttttggttcctcctttcgttcgagagagcgattctggtggcaatggcgaagagcgagggtccggcgatcgggatcgacctcggcaccacctactcgtgcgtcggcgtgtggcagcacgaccgggtggagattatcgccaacgaccaggggaaccgcaccacgccgtcctatgtcggcttcaccgacaccgagcggctcatcggcgacgctgccaagaaccaggtcgccatgaaccccaccaacaccgtcttcgatgccaagcggttgatcggcaagaggttctctgatccgtcagtgcagagtgacatgaaagctatggcctttcaaggtcatcccaagtcctggtgacatgccctgtgtttgattaaataccaaggcaatgaagaacaattcgcttt

SEQ ID NO: 98376 - DNA, 529 bp, Zea mays
ttgctgttccattgcaaccgatcgctgctcacacttgatattaccggtcgaccgcacgcgtccgcagggttacaggaaaatcaggctccgtgctttaattgtgcaaggcaggaatgtgctcacaagctcgggtgcatgaattttaccaccgataagctcagatctctagtaaagaagtggcagacattgattgaagcccatgttgatgtcaagacaaccgacaactacatgctgcgtttgttctgcattggttttaccaagaggcgcccaaaccaggtcaagagaacctgctatgctcaggcatcccagattcggcagattcgccgcaagatggttgagattatgatcaaccaggcttctacatgtgaccttaaagaacttgtttctaagttcattccggaagttattggcaaagagattgagaagtctaccttcagcatcttcccacttcaaaacgtcttcatccgcaaggtgaagatactcaaagcccccaagtttgatctcgggaagttgatggaggttcatggcg

SEQ ID NO: 98377 - DNA, 552 bp, Zea mays
  unsure (1)..(552): unsure at all n locations
atgtgctgtctatcantgaactggttccagccntntatgcatnatcgtaccggttcggaatacccggctcgacccacgcgtccggggagatggtcaacaagacttttgatatgttaaaccaagttggtatggtcatatatcagaaaccattggacaatatttgctatgagaaaagatctgaaaacagcccgccattgtgcaaggaatctgatgatgcagatgctgcttggaatgtaccgttggaagcatgcatgcacaaactgcctggtggctcaaaagtccgaggatcaaaatggccagagttatggccgcaaaggcttgagaagacccctttctggattgatggttccaaggttggtgtctatggaaagcctgcaaatgaagattttgaggcagataatgcccactggaaacgggttgtaagtaaatcgtatgtgaatggcatgggaattgactggtccaaagtgagaaatgtcatggacatgagagctgtttatggaagttttactatcatctttgagggaaccaaaaggtctgggtcatgaaaatccg

SEQ ID NO: 98378 - DNA, 511 bp, Zea mays
cgttatgtgcgtcctcgtaatagtagatcatcctctttactatcgccgaccttcgccagcgctgcgtttcatggctgtagctttcttgccctctttctgtttgtcatatgatgatttcaccactcagtaggccttcgtctaaaaggcctctctggttcatcgtgttggttgcatttgtctgtgcagtagccattggagcctacctttatactccacggcattacacagcatgttatctggtaccatcagaagcctgcaattctcggcctcctccagaacctgctagggtatacactgatgatgagatcgctgctcgtgctatcatgagagacatcatccgggcacggccagtgcagtcaaagaatccaaaaattgctttcatgttcttgacgcccagttcattgccatttgagaaactgtgggaaaaattcttcatgggacatgaagaccgattcaccatatatgtgcatgcatcaagagatagaccaattcatgcaagtccagtattctt

SEQ ID NO: 98379 - DNA, 550 bp, Zea mays
  unsure (1)..(550): unsure at all n locations
cgtgatgacgctcggttgattgggttacgttcgcatagcnagnatcgtaccggttcggaatacccggctcgacccacgcgtccggggcctcctttcccacgacttttgagctctctgcgtgtggcgcgcggcatcgtggcgagtgcgaacttgagcagcaaggggtcgttcgaggttcccaatgtggaggtcaggttcatcaagctcttcatcgacggcaagttcgtcgacgccgtctacggcaagacgttcgagaccctaggaccctcgcaccggcgaggtgatcgccagcatcgcggagggaggcaaggcctacgtctacctcgccgtcaaggccgaccgggaggccttcgacaacgggccctggcccattatgactgtatactagcgtggtccgatcctgcacaggttcgcggacctgatcgacgagcacgtggaggagctggcggcgcttgacactgttgactccttctagctgttcgtcgttggcaaagctcgtgacattccttgttctttttacttcttttctactacctcgggccgacgactt

SEQ ID NO: 98380 - DNA, 537 bp, Zea mays
  unsure (1)..(537): unsure at all n locations
agactcgctttattcagcacaaggacagctaggcatctcaccggttcggaattaccgggtcgacccacgcgtccgcccacgcgtgcggcaattccatcgctactgtataatccactacaatctgaagtccaggagtgtcttgctagacacgaatggtgagcccagggttggtgattatggtcttgtaaacctgctgccgatgctggatcgctatgtgctcagcagtaagatccatagcgtgctgagatacatggcacctgatttcacttgcacaactgtcaatgtcacggataattgcgacatatacagcttcggagtgctagtccttgagattttgtcaggcagaaggcccgtagaatatctgcaagatagtgtggctgtgctttctgatcttgtcactgatgcactcgatgatgacaggctggaggactgcatggatccacggctactaggtgagttctcgacggtggatgccacactgatcatcaagctgggcctggtctgtgcatctgangtgccttctcaacgaccggacat

SEQ ID NO: 98381 - DNA, 535 bp, Zea mays
agtgcagctgttttaaaatgcatcccaacgcagtacatacctgatttaaccggtccgaccgactcgtccgcccaggcgtgcgctgactcgtgggcatcatttgttaaagaggtcttccctcaaattgcagcggatgaacagctctatgcaatggtccttcctggtttttggatggatgttggtcagccaagagactacattactggattgcgtctttatctagactcgcttaggaagaaatcggctgccaggctagctgctggagcacatgttgttggcaacgtgctggtgcatgagagcgccaagattggagaaggttgcctgatcggtcctgatgtcgcaattggacctggatgtgtcgtggaagatggcgtgaggctttcccgctgcactgtcatgcgtggtgtgcgtatcaagaagcatgcctgcatctcgaacagcattatcgggtggcactcaactgttggacaatgggcacggatagagaatatgaccatcctgggcgaagatgttcatgtgtgtgacgaggtataca

SEQ ID NO: 98382 - DNA, 530 bp, Zea mays
  unsure (1)..(530): unsure at all n locations
cgctgttccatctcgcccaaatagtaagctcgccctggatattacggatcgaccgacgcgtccgcggaggcgtggggtcctcggacaagtgccttatttacgcgctgaagctcggcgcgtgcgtngcagtctcggtaacgaggtgcacatcggcgacgccaacgtcaagtgctgcccgctcgtgaagggcatcgccgggctctccgcggcggcgtgcctgtgcaccgccatcaaggccaaggtgctggacatctccgtctacgtgcccatcgcgctggaggtgctcgtcaactgcggctgcgaggtcccgccaggctacaaatgcacttaaacgactccattccatttcatcccatctcaccatgcgtgcacagcgaggtctccttttgccctcccgaatgcaaagtttgaaaggctcgtcgacggatttgggtctccttttgcccacccgaatgcaaagtttcgaaaggctcgtcgacggattgtgctcttcggctactgcattcttccttatttcatttgatttgctn

SEQ ID NO: 98383 - DNA, 537 bp, Zea mays
  unsure (1)..(537): unsure at all n locations
gtttccgctgattccatncgcccaactcatcgcatcaatnctccttctacggatcgaccgcactcgttcgcccacgcgttcggaatcagagctctgaggttgcttacatcaggccaccaccaacccctcacgtcggcgtttgcttcgtcggcgaaggcagagatggcgtccgtggccgcggcggaggtcgcggcggcggcgctccggtcggtgctgtcgcgcgcgcagcatgcggcggctcgggcggggcgcgcgccggggtccgtgcgcgtggtggcggtgagcaagaccaagccggtgcctgtcatccggggcgtctacgacgcgggccaccgctgcttcggcgagaactacgtccaggagctcatcgacaaggcgcctcagcttcctgaggatattgagtggcacttcattgggaatctgcaaagcaacaaagccagagccctacttgctggcgtgccaaaccttgatatggttgagagtgtcgatgatgagaagattgctaaccgtcttgatcgagtggtagctgacttgggg

SEQ ID NO: 98384 - DNA, 540 bp, Zea mays
  unsure (1)..(540): unsure at all n locations
agtaaaatgtgttgtgttaagctcaggagataagtagcctgctccggnttcgaattaccgggccgaccgacgcgtccggctggctccattagatggcatggttcggctctacaatcacctgcgcattgcacagtaggatggtcatcttgcggacaagctggatctggacatgccggctctggcttacatgatgaaggaataccctgggaccgaagaagagaagatgcgagctgctgttggcaggtttggcctatcaggaaaggcgcaggtgatgccaatgaggaatctttctgatgggcaaaggagccgtgtcatctttgcatggttggcatataggcagccgcaactgctactgctcgatgagccgacaaatcatttggacattgagaccattgactccctggcggaggcactgaatgagtgggatggtggtttggtcttggtgagccatgatttcaggctgatcaaccaggttgctcaagagatttgggtgtgtgagaatcaggcggtgacaaggtgggaaagtgatatcatggattt

SEQ ID NO: 98385 - DNA, 530 bp, Zea mays
tctgtgttcattgacacaggtagcaatcacgccctcgaattcacgggtcgaccgacgcgttcgaatccccctgtcccgctaggattccccccttctttcccccaaaaccccagagcggataagggcggatgatgttcggcttcgggcaccacggccaccacggccagaacccgtcggcgcacggcggcgtgcaccagcccaccttcaagatcttctgcaaggccgacgaggggtactgcctcaccgtccgcgacggcaacgtggtgctggcccccgccaacccgcgcgacgagcaccagcactggtacaaggacatgcgcttcagcacccaggtcaaggacgaggagggcaaccctgcgttcgccctggtcaacaaggccactgggctcgccatcaagcactccctcggccagtcccacccggtgaagctggtgccgttcaacccggagtaccaggactagtcggtgctgtggacggagagcggcgacgtgggcaaaggctttcgctgcatccgcatggtgaacaacatc

SEQ ID NO: 98386 - DNA, 534 bp, Zea mays
  unsure (1)..(534): unsure at all n locations
tagtgagccttcnncttgccatcgatcaggnatcttcaattacgggcacgacccacgcgtccggagttttggcgtcctgtacaagatagctgagatatcgttcttggcaccctacaagaggganatgtttgatgttatcgagaagggagagaaacagtccaacatcactattggcattatggtctccgatgtcatcgtgttcgttaccgttctcttcaagctcctgtttggtggcaagaaaccagtggcacctgtgaaacctgcagctgatgcgaagaagcccaaggccgtggagactgacggtgctggaagcagtggtgacaaggatgagaaagaggatgaaaaggaggagacaggcccacgtttgaggacccgaaaggagacatagacctgtttttgacgtgttttagctcttctggcgtctgcttattttgagacctgttaataattgggagtgtataatatggagctatgtcacctatgcggtttcccaacctgctgatttgttttaatgggtagaccacgaacacttcg

SEQ ID NO: 98387 - DNA, 542 bp, Zea mays
  unsure (1)..(542): unsure at all n locations
tctgtccagtggtatgactgnttcatgtcccatcagctagntcgtaccggntcggaattcccggctcgacccacgcgtccgggtgcattcaaatctgctgatttgcataccgagctcttaccgagatgaatgggaaaagtttttttagcaagcccctttatgtatctcttgcacagtgtaaagatgactgaaagttaaagctacaggcacagttttcacaaatgcgtcctgttgcaatggcaccttcagtatgtactctcatgcccatgtttccacctagtgttcctggagttggtcagcagttgttgtatggacagccacctccagccttcatcaaccctcaggctggatatgctttccagcaacttatgatgcctggtatgaagcctgttggttcaatgctcaactttatgatgcctattgttcaactatgacagctacctcaacgtcctgattttatttttttctggtcttgtagaatgcactatcctatgctatttttatttatttaatatttattcctatagtgttcttgctccctt

SEQ ID NO: 98388 - DNA, 544 bp, Zea mays
  unsure (1)..(544): unsure at all n locations
gttgaggctgggtcgaatggctatgtcagtacagcatnactgtaccggttcggaatacccggctcgagccacgcgtccgctgccaaggaggctgccagctttaccttccaggtcatcatcatgaaccaccctgggcagattggctacggctatgccccagtgctggactgccacacctgccacatcgctgtcaagtttgctgagctcattaccaagatcgacaggcggtctggcaaggagcttgagaaggagccaaagttcctgaagaacggtgatgctggtatggtgaagatgatacccaccaagcccatggtggtggagacattctcagcgtatcctccccttggtaggtttgctgtccgtgacatgaggcagacggttgctgttggagttatcaagagtgtggagaagaaagacccaaccggcgctcaggtgaccaatgctgctgccaaaaagaaatgtgcgaacctgcgcctgctttagcaatacctaggtttcaaaatttcaagtttggttatggtcgttcctgttaatgggtgaaccg

SEQ ID NO: 98389 - DNA, 542 bp, Zea mays
  unsure (1)..(542): unsure at all n locations
tattgtgtaacgttttaggaagctacngtagcctcaaccctccntcccgcttaccggtcggaccgcactcgtccgcacggacacacatacaactggttcctaaatccaactatctgtactatcaaccacctggctcgagcctttgcacgcatacatcatgtctgatgagaagcaccaccacttcttcaaccaccacaataaacaccactatcacccctcctgctaatacggctactccgataccgaggtgattaccgacaccgactaaggccagtaccagaggtacatgaatgtggagaacgatcacaatcacaagcatcacctcggccaggccgtcgccatcgtcgtccacgccttcgcactctactagaagcacgaggcgaataaggatcccctacactcgcacaggcacaagatcactgaagatgtcactgacgcagctgtcatctgcgcctgcagctacttattccacgagcaccacgagaagaatacggaccacaatgacgcctatgcagccaacggcgataagaagcaccaccacc

SEQ ID NO: 98390 - DNA, 544 bp, Zea mays
  unsure (1)..(544): unsure at all n locations
tgtgctgaaatcttagcttttncaagtcctttctctangntactatcaattcccggcacgacccacgcgtccgcggacgcttgagcttcctcgcccgatttatatctacatcttcccgagcaaatactagggtaaccgctaccttttcagaccacctccaaggctcttaatgtatcttaacactctcaccaatcaaattttcatgtctgatctcgacattcatatcccaactaccttcaatcccttcgcttagaccaatgctctggactctggtgcgtcatcagggtcaaaggactacgtacacgttcgcatccagcagcttaatgttctcaagagccttaccaccgtccattgattgaataataagttcatctacagcaagatcctcaaagatctcaataaaaaattctgcttcaatggtacaatgttacaggacccacaactttgacaagttattcagtttcatagtgatcatattaaaaagatcttaaatttcaaataaaaacaatattattaaaaaagaccccattaataatcattgtat

SEQ ID NO: 98391 - DNA, 543 bp, Zea mays
  unsure (1)..(543): unsure at all n locations
cgttagtgctgtatgccaaatccgacagctatagcatnatcattccggttangaatacccagcccgacccacgcgtgcgccgacgcgtccgcccacgctctggactagggaaagctaaaggagaacgtgagcaacgcggtgctgttcgaccaggctacctacgacaagctgctctctatcgtgcccaagtacaagcagatcaccccctccatcctatccagagcgcctcaagatcaatggctccctggctcggaaggctatcaaggacctgatggcgcgtggcctcatccggttggtctctgttcactcaagccagcagatctacaccagggcaacaaatacctaaggatggtattcccttgatcgccctctctggaggagctcgtcttctttagaacagatgccatctctgtcaagagcttgctaatgctattatagatgagtttcttcacgtggttgatactttttagacattttgcgttagttggcttagctattatgacttaaattgccttaaaaacttattctatggaaaacctcctt

SEQ ID NO: 98392 - DNA, 537 bp, Zea mays
  unsure (1)..(537): unsure at all n locations
aggtgggnttcaagctntcnagtcggatnatcatcggaattaccggctcgacccacgcgtccgccgacgcgtccgcggcgcgtgggtgcattgtggtttctgtgtacatcaaatcgaaagaggctccggctaaagatgttcttacagatctcgttgaaatgtgccgtgggattcaacatcctgtgcgtggcctttttttgataagtcacctttctcaaataagcagagacaaattgtctgatattgggtctgagtacgaaggcgatgtggaaaatattaacgatgcggctgaatttgttcttcagaatttcatagaaatgaacaaactctgggtccggatgcagcatcaggggcctgcccgagaaaaggaaaagcgtgtgaaggaaagaaatgaactgcgtgatctggtaggcaaatacctttatgttctaagccagattgatggctgtgaaccttgatatctacaaagaaacagtctatatcaaggatagatttgtttggtggtgttttggtgagggtacctttgcccaattttat

SEQ ID NO: 98393 - DNA, 549 bp, Zea mays
  unsure (1)..(549): unsure at all n locations
gttggcgctatctgagnnttgcaatgtcgtagctgctactttctatcggttcnggncannngncacgcgtgcgctgggagggctaaagcgtggcgatgtttagcgttgccaggtggtgtgcaaacctggtggtctgggtacatacaaaaagtttgaggcagaaatatacgtcctgacaaatgatgaaggtggccgtcacactgcctttgtcacaaattacacaccccaattctacttcaggactgctgatgtcactggaaaggttgagttgcttggtgagacgaagatggttttgcccggtaacaatgtaaccgcgaatttcgagttgatatcgcctgttcctcttgaaactgggcaaagattttgctatgagtgaaggatggaagacagttggtgccggggttgtctccaaagttattagctgatgaatttccactttcttgcccgtaacaattttaataattatataaatgctgacatgtttcttggaatgcattggtaaaaaagtctaacttatattgttttgtcctccattaattttgaacaaaa

SEQ ID NO: 98394 - DNA, 539 bp, Zea mays
  unsure (1)..(539): unsure at all n locations
agtgntntatgttgcaagtcncagcatgccaactcantcatccactccaccaaccgacccgagcgtctcgaccggccgctcgtccgcccactcgtccgtgatctcagccgccgccgctgctcatctcacagcccggtataatactcctgctcctcgccgatcgatacgatggccgtcttctccgacctccacaccgtcgactgcctcaagtccctcgaggctcacctcgccggcaaaacctatgtgtctggtgactgcattactaangatgacattaacgtcttcgacccggtgccgtcgaagcctggcgctgagtttgctaatgccgtccgctgttacgagaccgtctctgcggctgtagcctcaagattccctgctaaggctgttggtgtaaatctgcctgctggatcagctcctgctgcagctgctcctgcggatgatgctgacgatgatgatgaccttgatctctttggtgatgaaactgaagatgacaataaggcaactgatgagcgttccgccgctgccattgcctgttctaa

SEQ ID NO: 98395 - DNA, 546 bp, Zea mays
  unsure (1)..(546): unsure at all n locations
atcggttgatttgtggggaggagaaaagcatcactcgtctcggaattcccgggtcgacccacgcgtccgggaaccacgggttaagaaaattcttgtccatcacatcgagacagtccaccactctgaagctgtcgaagatgttttacaatctcttttgcttgttgactcaaattccaaggagacaaagagcaagacaaaggagtggaatgacagaatcaagcaagacaaaaaaccagagcaactacgatcagctgccagacagaggcatgaggatatgggaagaaatgctcggtttgcacaaatatggaagagtcgaaaaggagaaaaggctgnatgctgtgactcattgagagaaatatgccatctntatgatgctgtccaagtagatcccgatgatgagaagcatccagcagaaccacggattacatcgtttgaagagggtgctgtctatgcaactttcttccacttataagggaatactngccatcaactgcagaggaaatgaagcggatataatttcaatggcacaatcagaagattctgaat

SEQ ID NO: 98396 - DNA, 552 bp, Zea mays
  unsure (1)..(552): unsure at all n locations
tgagtggccanttgcatgattagtatatantgcatgctctaccggttcggaattcccgggcttttggaggaggtggtggaagcagcaggggaagaaggcaaaggatgggagaagatgtagtccactcacttaaagtgtctctggaagatctttacaatggaatctcaaagaagctctctctttcgcgcaatgtcatctgctccaagtgcaagggcaagggctcgaagtctggtgcttcaatgaggtgccctgggtgccagggctcaggtatgaaagtcaccattcgtcagctggggccttccatgatacagcagatgcagcagccttgcaacgagtgcaaggggactggggagagcatcaacgagaaggaccgctgcccagggtgtaagggtgagaaggtcgttcaggagaagaaggttcttgaggttcatgttgagaagggaatgcaacacagccagaagatcaccttccctggtgaagctgatgaaacgcctgataccgttactggagacatngtattcgtcctccagcagaaggaccactcccagttca

SEQ ID NO: 98397 - DNA, 542 bp, Zea mays
  unsure (1)..(542): unsure at all n locations
ggaaatggntgatgactaaagacagtacgcatgctcaccggctctgaatcccggccgcgcgagcagtcgtggaagcagcaggggaagaagcattagattttagaagagtagtccactcacttaaggttggtcttgaaaatctttacaatggaatctcaaagaagctctctctttcgcgcaatgtcatctgctccaagtgcaaaggcaagggctcgaagtctggtgcttcaatgaagtgccctgggtgccaaggctcaagtatgaaagtcaccattcgtcaactggggccctccatgatacagcagatgcagcagccttgcaacgagtgcaaagagactggggagagcatcaacgagaaggaccgctgcccaaggtgtaagggtgagaatgtcgttcacgagaagaaggttcttgaggttcatgttgagaaaggaatgcaacacagtcataagatcaccttgcctggtgaactgatgaagcgcccgataccgttactggagacattgtattcggtctccaacataaggaccattccaagttca

SEQ ID NO: 98398 - DNA, 550 bp, Zea mays
  unsure (1)..(550): unsure at all n locations
aattgtgcttgaccatccgaacatagntncgctctaccggtctggaattcccgggtcgacccacgcgtccggccgtgcgtgaagaagggcggcatccggttcaccatcaacgggcactcctacttcaacctggtgctggtgaccaacgtggcgggcgccggcgacgtgcgctccgtctccatccggggctcccgcacggggtggcagcccatgtcccggaactggggccagaactggcagagcaactcgtacctggacaggcaggcgctctcgttccaggtcaccgtcagcgacggccgcaccgtcaccagcaacggcgccgtccccgctggctggcagttcagccagaccttcgagggcggccagttctgaggatgaacagctagcgcgcgcgcggctagctattggataattaattacggtactgtcgatttggtttttttgccttggttnttttttgcgcgacgactactaagagggagatgaagaccaagattaagaccaggccttttttccggtatattggaaggaagagaaagctttttgcccc

SEQ ID NO: 98399 - DNA, 561 bp, Zea mays
  unsure (1)..(561): unsure at all n locations
actttatttggtcatgggcatgatgggggagatatagtatcgctgtaccggttcggaattcccgggtcgacccacgcgtccgcttagccacacacacacacggctgctagtgtacacagaggcacagcagcaggaggatggccgtagtgccggctgcgccggtggttcttggagtggccatggtgctcgtcgtcctggtcgtcagcgccggcgcggtcgggcagctcaggatggggttctactccgagagctgcccggtcgtggagcgcgtggtgggcgacttcgtccggcagcacgtccgccgggtgcccaccggcgcgctcgcgttgctccggctgcacttccacgactgcttcgtcaggggctgcgacgactgcgtcctgctcaactccaccgcctgcagcgtggtcgagaaggacgcgccgncgaacctgacgctgcgcggcttcgacctcagcgaccgcgtcaaggcgctcgtcgaggatgcctgctccggcgtcgactcctgcgccgacgtgctcgcgctcngccgccaggacgcggtcgtcttcatcagcgggc

SEQ ID NO: 98400 - DNA, 556 bp, Zea mays
  unsure (1)..(556): unsure at all n locations
aganatttgtgcatggccatgcatcgcattatgtatgctctaccggctcggaattcccgggtcgacccacgcgtccggcaccaagtcttacacctgaacatcaacttctacggcagcatttgccttgacattcgtagggaacagtcgcttccttgtttaactatgtcaaaggttctgctgtcattctggtgactgttcacggactcatactctgatgatcctcttgtgcctgagactgctcacatgtacaagaccgacaaggccaagtatgagtgcaccgtaagctgctggacacagaaatatgccacgggctgcaagcaaggctaaaagctggccaaactggttaatgtgacctaccccaaatcgatatcatctaaataaccagtcaagtctcaagtatgaatggacttttgaggaccattgtgctctgtttaactcatgtattaccttgcgaagtccgttgtgtctgggttctacctgactcgtacgttatctgatgctggatacttaatatctgattctgctttattgaccatacttgttatatggttgtggt

SEQ ID NO: 98401 - DNA, 559 bp, Zea mays
ggttttaggcattgatcactacacgtcaatgactgcatcgctctaccggttcggaattcccgggtcgacccacgcgtccgcccacgcgttcgcgcgtgcgaaccatgcttaccccagcagaagaagcgaagtcgtcgccggagcacgaggaagagcgagcagcgagatgtcgtggcaggcgtacgtcgatgaccacctgctgtgcgacatctaatgccagcacctcatcgccgccgtcatcgtcagccacgacggcagcgtctgggcacagatcgagaacgttcgcgagttaaagcctgatgaggttgctgggatgataaaggactttgatgaacctggaactctagcaccaactggtcttttgttggatgtacgaagtacatggtgatccaaagtgaacctggagtctgcatcccagggaagatggtcactggaggcattactttcatgaaaactggcatgttcctggataatcgggattctatgattgagccaatgacttcagggcaatgcaatatggcggtggtaaagcttcgcaattcctggtcgaacaggggtt

SEQ ID NO: 98402 - DNA, 547 bp, Zea mays
  unsure (1)..(547): unsure at all n locations
ggggtgtcataagaacaagtatgtagctaccggtctcggaattcccgggtcgacccacgcgtccgcggacgcgtgcggggcgagcccgttcgtgctccgggcgcgcatcgcgctcagcctcaaaggcctgagctacgcttactccgaggagaacctcgacgacaagagcgagcttgtcctcagctccaaccccgtgctcaagaaggtgcccgtgctcatccaccacggcaagcccgtctgcgagtcccagatcatcgtgcagtacgtcgacgaggctttccccgccgtcgcacctaatttccttccatccgacccctacgaccgcgccattgctcgcttctgggccttctacgtcgacgacaagttctacagcgcgtggatacccgtgttcaggggcaggacggctgatgagatggctgaggcggcgaggcatgccgtcgcggcgcttgagacgctggagcangcgttcacggagtgctgcanggggaanggccttcttggaggggacagcgtggggctcgtcgacatcgtgcctcgcggccttggt

SEQ ID NO: 98403 - DNA, 553 bp, Zea mays
  unsure (1)..(553): unsure at all n locations
gtatagcggntgntaactgacagtattactgcatgctctaccggttcggaattcccgggtcgacccacgcgtccgcccaccatcacctcccgcagagatccagacttccgtgcgcctcgtgctcaccggcgagctcggcaagcacgccgtctctgagggcaccaaggcctgcaccaatttcacctcctcctatgcttgcacgctcgaccttgcaagctcttctggtgctgatgttcacactgagttgaagttagatgtcgctggtttctctgtcagagctgctctatttctgtaggaactccttaatgtaacccaccagggcctggttaattgggaattattaacactttggtggtgatcacttatggttcaaattcttaatttgacgcttgaaccatgctaaattggtggctgaatttgagatggccgtttgccttaaaaacaaatctttgtttcctgagaaccttaaaaaaaggggtgtcccttttagaggatccaagtttacgcacgcgaacttttaagttcatacctcttatatgggacccaaattaac

SEQ ID NO: 98404 - DNA, 558 bp, Zea mays
agtgatggcgcgatgcaactgaaagtaatattgcatgctctaccggttcggaattcccgggtcgacccacgcgtccgagttcctgaggttcaagcccgagccggtggtgatctacgccttcactaggaacgaggagcggaagcaacgcatcatatacgagacgtcatgggggagcatcacgttcaacgacgccatcgtgcactatggcctggacagcatcccgttcggtggcatggggcacagcgggttcggccagtaccacggcaagtactcgtttgacatgttcagccacaagaaggccgtgctcaagaggagcttcctggtcgagttcatgttccgctacccgccgtgtgacgagaccaagatcggaatgctcaagcgcgtgtaccgcttcgactacgtcttgctcttcctcgcgctcatcggtctcaggagatgaagcagccggcggagagtgcgtgaacaatcgagccaacagaatttgcactcacaccgaacacacagttgctagtggtcaattgtcggtcatactgatcgaagaatatgtaattgtccatc

SEQ ID NO: 98405 - DNA, 547 bp, Zea mays
  unsure (1)..(547): unsure at all n locations
agcattgtcactgattgacaagaagctacactcgcccggaattcccgggtcgacccacgcgttcgcccacgcgtgcgtctgtctgtcgctctcgctcttagacgactgggccgccgacgcttggtgctgaggctttcgttggtctcttcggcggcgacgagcacccaccagcagttctgtagaaatggctgatggtgaggacatccagcctcttgtctgcgacaatggcaccggaatggtcaaggctggttttgctggggacgatgcaccaagggcggttttccctagcattgttggccgtcctcgccacactggtgtcatggtagggatgggacagaaggatgcatatgttggcgatgaggcacagtccacgagaggtattctcacgctcaagtacccgattgagcacggtattgtgagcaactgggatgacatggagaaaatctggcatcatactttctacaacgagcttcgngttgcaccaaatgagcaccctgtgttgctcactgaggctcctttggaccccaaaggccacanggagaagatt

SEQ ID NO: 98406 - DNA, 550 bp, Zea mays
  unsure (1)..(550): unsure at all n locations
tagggntgtcatgaaagtcaagaagtacgctgtaccggttcggaattcccgggtcgacccacgcgtccgcccacgcgtccgcggacgcgtgggctggtctgcccggacgctcggatcgccgactagttcgacgtgattgccgggacgagcaccggcgccctgctcgcgtcgatgctggcggcgccggacgagaacaaccggccgctgttcgccgacaaggacctcaccacgttctacctcgagaacggcccaaagatcttcccacagaaaaaggctgggttgctgacgccgctgaggaacctgctgggcctggtgcggggccccaagtacgacggcgtgttcctgcacgacaagatcaagagcctgacgcacgacgtcagggtggcggacacggtgaccaacgtcatcgtgcctgcgttcgacgtcaagtacctgcagcccatcatcttctcgacgtacgaggccaagaccgacgctctcaagaacgcgcacctntncgacatctgcatcagccacgtcggcggngcccacctacttaccggcggcactt

SEQ ID NO: 98407 - DNA, 558 bp, Zea mays
  unsure (1)..(558): unsure at all n locations
ngttctgaggtgtttgatctcacgncgtacagcnatgacttaccggtctggaattcccgggtcgacccacgcgtccgcggacgcgtgggcggacgcgtgggcggactcgtgggcagggcaaagcttgatgacaatgctggacgacttgacttcacccagaagcttgaggctgcctgcgttggagccgtcgagtctgggaagatgaccaaggaccttgcccttctcgttcacggatcttcaaatatcacgaggagccattacctgaacacggaggagttcattgacgctgttgctgacgagctcagatcaaggctggcggccaactcgaacctttgaaatccttgccgaagttgtggtgctttcctgcgcgacgctttcgaaccgtttttattatgtcgccattttctttccctgtgccaccaccctgaatgaagaaggcctgagctaggcgaacatctgcaggccgcagcagtatgccaaatcattatcattaccgttgccattaccaattggagattgccgtagattccgcgattatgggaactcatttacctgatt

SEQ ID NO: 98408 - DNA, 552 bp, Zea mays
  unsure (1)..(552): unsure at all n locations
gtgtgctgtccactgacagcacagatagcaagactctccggtcttgaattcccgggtcgacccacgcgtccggaaaggggaagcccgccgccgcccctgcctttagcaaccagcagatcgggacctctgggctgcgcaatccatccatggcggaggaatcaggccgtcccttgccaaagtttggtgaatgggatgtcaacgatccggcttccgcagactgatttactgtcatattcaacaaagccagagatgagaagaagggtgggaatggtcaagacacagactcaccttccaaggaccccaggactgagagggtggagtcttatgctgcaaaaccaagcacgaagaaatggttttgttgtgtgacagccagccctacgcaatcctgaggaaggcaattgcatgcgctggaaatactgcccctttaattttctatacatactatccattagacactgtanaggtacccatggctctctggcttccagatgggtgtctcataaaactctggcgtgcatgtatgtatggtgtgagagttgtcggcatacattn

SEQ ID NO: 98409 - DNA, 553 bp, Zea mays
  unsure (1)..(553): unsure at all n locations
ngatcatggnnnnnnnaactgaccgcatcgcancgctacgactctactcggntcggaattcccgggtcgacccacgcgtccggccatgccatctcatatgcgacaagcgaatcatagcactggcatgagcatggaccggatggggcggcgttacatgtgcttgatgatcgatctggctcttctggccgccgcggcgtcggtggactcgtggctgtacgagaagttcacgacttgagggaacttgcgcgcggactacaacgtcgcagggcagcacgtgacgtctctgatcctgacgcagcagtccggcggcgccttcagctcgcggcagaagtacctgtacggngagttcagcatccagatgaagctgatcccgggcaactacgcgggcaccgtgaccatgctttacctgtcgtagggcgacaggaccgggcacgacgagatcgacatggagttcatggcaacgccagcgagcacccgtggtgttgaaaccaacgtgtggggcaccgtaacggaagaaggagcaccaggtctactgtagtttgacccgtcaacc

SEQ ID NO: 98410 - DNA, 538 bp, Zea mays
  unsure (1)..(538): unsure at all n locations
ctgtgtnnncccatgcncaccttcgcanttctcnnccnnnntngnnnnannnnccgggccgacccacgcgtccgcccacgcgtccgggtgggttggcttctccttcccctccggttcgggttcgggttcgtgaggttctccggggttcggtttcgtgggtgagcggatcgagatggcggcgtcggatgttgagtaccgctgcttcgtcggcggcctcgcctgggccacggacgaccactccctccacaacgccttcagcacctacggcgaggtcctcgagtccaagatcatcctcgatcgggagacgcagaggtcccgcggcttcggcttcgtcaccttctccacggaggaggcgatgcggaacgccatcgagggcatgaacggcaaggagctggacggccgcaacatcaccgtcaacgaggcccantcccgccgccgccgtggaagccgccgcngcngcnggtactgtggtggccgtggaggcngcngctacngccgtggcnggcccccttattgcngcggcggctacggcggtggc

SEQ ID NO: 98411 - DNA, 534 bp, Zea mays
  unsure (1)..(534): unsure at all n locations
natttccccagcctcgacgcatgctctcccggtccggaattcccgggtcgacccacgcgtccgcccacgcgtccgagaacccccagtcgcccaccatatcacttgttaaactttgttgaggggtgatggcggtttctttcgcaaacctcaacaccgaggcagggcttaaaaagcttgatgagtaccttctcactcgcagctacatcactggctaccaagcttccaaggatgacttggctgtctacacttcgttttcgtctgctccctcgtccaagtatatcaacgtagcaaggtggtttaatcacattgatgcgctcgtgaggctgagcggaattactgcagagggccaaagtgtgaaggttgaatcctcagcagttccttcagccccaactccagatgttgctgaagcacaggccccagctgctgaggaagaggacgatgatgatgttgacctttttggtgaggagaccgaagatgagaagaaggctgctgaagagcgtgctgcagctgccaaggcttcttgccaagaagaan

SEQ ID NO: 98412 - DNA, 528 bp, Zea mays
  unsure (1)..(528): unsure at all n locations
agttnnnnggtcaaaagntgntctnnggcctgaaaacccgggccgaccgacgcgtccgcccaggcgttctataactttcagncgcctaatagatcactcgacaaaccccgnccangggggagcgctgtttctaacgcaagcggaacacctaagcacgactcaaaaagctcgatgagtaccttctcactcgcagctacatcactggctaccaagcttacaaggacgacttggctaggtacacttcgcatacgtctgctccctcgaccaagtatatcaacgtagaaaggtggttcaatcacactgatgcgcacgagaggctgagcagaattactgcagagggccacggtgtgaaggttgaatcctcagcactaccttcagccccaactccaaaatgtgcttgaagcacaggccccagctgctgaggaggaagacgaggatgatggcgacccttttggtgaggagaccgaagatgagaagaaggctgcttaaaagcgtgctgcaactggcaaggcttctggcaagaagaat

SEQ ID NO: 98413 - DNA, 532 bp, Zea mays
agtctccggggggatgggggggcgctggtaccggtccggaattcccgggtcgacccacgcgtccggacgactacaagttcaacggtctgggctggctcttcctgggtgttccaacgagcagctcgttgctctacaaggaggagttcgggaagatgaaggagagagcgccggagaacttccgggtcgactacgccgtcagccgggagcagacgaacgcggcgggggagaggatgtacatccagacccgtatggcggagtacaaagaggagctgggggagctcctgaagaaggacaacacctacgtctacatgtgtgggttgaaaggcatggagaatggtatcgatgacattatggtgtcactggctgaaaaagacggaatcgactggttcgactacaagaagcagctgaagaggggagatcaatggaatgtggaggtctactaaccgctgaattttgcagctgacattttgtgttgtgcgtatctgaagtgaggccagggtgtactacgtatataatggagatagtgaggggg

SEQ ID NO: 98414 - DNA, 532 bp, Zea mays
agtctacgaggagtgggaggcgcgctggtaccggtccggaattcccgggtcgacccacgcgtccggatcgggccatcggggaagcgagggagctcacgcggcgccatggacgaggaggagcacgaggtttacggccaggaaatcccggaggacggcgacatggacggcgctgacgttgatatggctgcctccggggatgacgcggcgaagctgcaggagctcgacgagatgaagcgcaggctgaaggagatggaggaggaagccgccgccctccgcgatatgcaggccaaggtcgccaaggagatgcaaggaggtgaccctagtgcatctacagctgaggcaaaggagcaggtggatgcccgttctgtgtatgttggaaatgtggattatgcttgcaccccagaagaagtgcaacagcatttccaagcttgtggaactgtcaacagggtcacaatcttgactgacaagtttggacagccaaaagggtttgcttatgttgaaattctggaacagggaggtgttcaggaagctt

SEQ ID NO: 98415 - DNA, 530 bp, Zea mays
  unsure (1)..(530): unsure at all n locations
attttccgagggtggggaggtgctctgtaccggtccggaattcccgggtcgacccacgcgtccgcggacgcgtgggcggacgcgtgggcggacgcgtggggtggctactccatgaatgcgatccatggctctgcattctccacaatccatgtgacgcccgaggacggtttcagctatgccagttatgaggttatgggcttggatgccactgctctgtcttatggtgaccttgtcaagagggtccttcggtgctttggcccctcggagttttccgttgccgtgaccatcttcggcgggcgtggccatgccgggacatggggaaaggcacttggtgcagaggtctatgactgcaacaacatggtggagcaggagctgcctggaggcgggctcctcgtgtaccagagcttctgtgctgctgaagacgctgttgctacctcgcccaaatctggtttccactgctttgacggcgagaacgtggagagtgctcctnctcctatgaaagaggactacaaactggctaatcttctatg

SEQ ID NO: 98416 - DNA, 535 bp, Zea mays
  unsure (1)..(535): unsure at all n locations
natctttctcttgtttattcgtctgatgctccggnccggaattcccgggtcgacccacgcgtccgatacctatttacataacaaatcctatggttggtcgcaaattgggggaattcgtgcctactcggcatttcacgagttatgaaagtacaagaaaggatactaaatctcgtcgttaattgaattcagaatagaaagattcagaataaacaaaatttataggattcaaataatcaaataaagtaaaggtaggcgggtaataaccttatttatgacaagtttcaaattggtaaagtatacccctaggataaagaagaagaaagggctgagaaaactcgcaagaaaagttccaaccgatcgtctacttaaattcgaacgggttttcaaagcacaaaaacgcatacatatgtcttgtttcaaagcacaaagagttctagatgagattcgctggcgttactacgaagaaacccgtatgatactgaatctcatgccttatcgagcatcgtaatccatcttaaagnttggttattccgca

SEQ ID NO: 98417 - DNA, 539 bp, Zea mays
  unsure (1)..(539): unsure at all n locations
atgcttgnccccccgcaacctccgcngcacgcaccggnccggaatncccgggtcgacccacgcgtccgcggacgcgtgggcggacgcgtgggcggactcgtgggccacaagaaggaggatgagcaccagaagaaggccgaggagcaccacaagaaggaggagggggagcaccacaagaaggacggcggggagcataaggaaggcatcgtggagaagatcaaggacaagatcaccggcgagcacggcgacaagtccggcgaccacaaggaaaagaaggacaagaaaaagaagaaggagaagaagaagcacggcgagggccacgaccacgaccacgacggcggccacagtagcagcagcagcgacagcgactgagatctggtgtcgcagcacaggtgcaacacaagtatgcttgctggatggaggattcataccagctgatgctgatgtagtgtttcactggtgtcatgcatgcatgtatcgggctattataatcaaaaagaaaaaagaaataacagtcagggatggtttggttgccatgt

SEQ ID NO: 98418 - DNA, 532 bp, Zea mays
atgctttttggtgtatatgggttagtgatgtaccggtccggaattcccgggtcgacccacgcgtccggaagagctgctgccaccaaaccaacaaaagtattctacaataatcatgcttagatcatctctggtgatatcaaccctcctgattgctctatctgtgcctttctttggacttgtgatggccttggttggttctttgtttgccatgcttgtgacctacattttgccttgcgcttgttttttggcgatcctcaagacaaaagtggggtggcatcagatagcagcttgctcgttcatcatagttgtcggggtttgctgtgcctacgtgggaacatactcgtccctgtcgaagataatccagaactacgcatagcacagctgttcctgtgatcctgtatatgcatctgcccgacaaaatcatgtgtgtgctatatgggccgaacatatgtacaagatgaaaagttaccattcaattcactcgatgtataataaaataattgtggcttatcataaggcttcaatgatttcc

SEQ ID NO: 98419 - DNA, 532 bp, Zea mays
atgttacggaggctgcgcgagggcgtggtaccggtccggaattcccgggtcgacccacgcgtccgcccacgcgtccggtgccacggagttggcaactgcaaggagtgatattgtggtacaacactagttctaattgaagtaataaggcggggttgaaactgtctgctaccattgcttccatggcaactaatgagaacctcccgccaaatgtcatcaagcaattggctaaagaactgaagaaccttgatgagtcacctccagaagggattaatgtgattgtcaatgatgatgacttcactactatttttgctgacattgaaggccctgctggaactccatatgagaacggagtattcaggatgaagctattattgtcacgcgatttccctcaatctcccccaaaagggttcttcttgactaaaattttccatcctaacatagctactaatggtgagatatgtgtaaacacacttgaaaaagattggaatccttgcctttgattaagacatgttcttcttggtgtgagatgcct

SEQ ID NO: 98420 - DNA, 531 bp, Zea mays
  unsure (1)..(531): unsure at all n locations
aatgtancccagccttgccagcngctcctccggnccggaatncccgggtcgacccacgcgtccgaatccgaattgccaggattttcaacacctattttccaaggatgaacattgacgatggccgtgtggttagcaacttcattgctcaggctgtgcgtggcgaaccccttactgtccagaagccaggaacacagactaggagcttctgctatgtcgccgatatggttgatggtcttattaggctgatgaacggaaacaacactggaccgattaacttggggaacccaggtgaattcaccatgctggaacttgcttagaatgtgaaagagttgattaacccagatataacagtgacgatgaccgagaacactcctgatgatccccgccagaagaagccggacatcaccaaaggcaaggaagttctagggtgggagcccaaaatcgttctgaaggactgcttggtgctcatggaggatgattttccggagcgcctggccgtgcctcaagaaaccaatggcctaacttgccttg

SEQ ID NO: 98421 - DNA, 532 bp, Zea mays
  unsure (1)..(532): unsure at all n locations
ntgctgnccccagccttggccaccctatgctccggnccggaattcccgggtcgacccacgcgtccgccttgtagctgacttcaaccacatggtaccatcttagcagagtagcaatggctatcaaacagagcatcagcttcacgctgcgtgttcttgctgatctatccctcctactcttttgcgtcctgcttgcacctgtatgttcagccacaccagccacagctcctgctgttctcctgcaagtgaagtccggcctcactgaccccggaggcgtcctctctggctggtcactggaggccgacgtgtgttcatggcatggtattacgtgcctgcccggtgaggtctcaccgggcattgtgacaggcctcaacctgtccgggcacggcctgtcaggcgtgataccgccggcgatgagtggcctcatctccatcgagtccattgacttgtcctccaattccctcaccgggccgatcccgccagagcttggcgcgctggagaacctgaggacgctggttctcttttccacctcctt

SEQ ID NO: 98422 - DNA, 536 bp, Zea mays
  unsure (1)..(536): unsure at all n locations
nattgtncggagggtcgcgaggngctctcccggnccggaattcccgggtcgacccacgcgtccggatttgaggtcgtttttgcaaaggatcttgttcatagattttccttgcccgtggtaccgggcgatggatcccacctacttttcatgggctcacttccaatgcacacgcccaggacggatcgtcacccgtgcaattgtcaatacactagagttcctccgtattgccccagcaggcagcatgggagcctacaacgtcctgatgagtgcctctgatggccttctaaaaggtggccgggaaggtatcttcacagcgaccttcttcgtcctgggccgcaagcctatcaaggaagctgatatggtgaacggcggcgtcctttgagctgcaacattagtatggggttgtactcataagagctatgaatcatggccaacgtgttctgtgctgaggtgtgtttactggggngtcttatggggtatgggttatgaatcatgttnccgcagtaaccctgatctgaatgggggcctgggactat

SEQ ID NO: 98423 - DNA, 529 bp, Zea mays
  unsure (1)..(529): unsure at all n locations
atgttacccagctggcagcctctctaccggnccggaattcccgggtcgacccacgcgtccgactaggtctattggattgccggttgagatttgtttttaacaaattttgtgccaaggaaatgggaccttaatttcccaatgtatgtgttgttacttgtacacctagatgtatcaccagaatttattgatattatatattctgtatatgttgcacggcagttcctttttgcggatagaaggaatttgccattttcgacaggcacggcagagctaaaactaaggtacagactgtagatttgggtagatttatccctcttaataaaacactgaatagttccatctcgaggcccaggctgcttcaaggaaacaagaaaagtgatttttccagaaaactctgggctcttgacaatctctctacacatctctctccatgttctgcagacagctgcacaagcaactacatgtttcctagaaggccatgtatcctcactggtctccaacctctcaatcacatctcgaagtaattcaa

SEQ ID NO: 98424 - DNA, 538 bp, Zea mays
  unsure (1)..(538): unsure at all n locations
actgtgccccagccctgcgccacctgctctcccggtccggaattcccgggtcgacccacgcgtccgacaaaccctnctncagtgctcttttctttcttctcgccgccgcaaccgcttgctagcgctctgcgctctcatcctcgcgtccgtggaaggtcgtctcgacatggcctccgagacggagacgttcgccttccaggcggagatcaaccagctgctatcgctcatcatcaacaccttctactccaacaaggagatcttccttagggagctcatttcaaactcctccgatgccttggataagatcaggttcgagagtttgacggacaagagcaagctggatgcccagccggagctgttcatccacatcgtccctgacaaggccaacaatactctgacaatcattgacagtggcattggtatgaccaagtcagaccttgtgaacaaacctggtaccatngcacgatctggcacaaaagagttcatggaggcactggcttgctgtgccgacgtgtccatgaatggtcaagttggtgtn

SEQ ID NO: 98425 - DNA, 539 bp, Zea mays
  unsure (1)..(539): unsure at all n locations
atgtttaaggggagtanagaggatctgctctaccggtccggaattcccgggtcgacccacgcgtccgccacgcgtccggccgagactaatgaagaataagaaactacgccttcatcaagacgaagatgtctggtctgtctcggcgctgttaccttgatcagcgcgacaggaccaccaaacggactcgctgcggatgcgatgaacaaggccggggtacagaaagctgtttgcaggaactgtaatggcagtggtgctgtgatatgcgacatgtgtggtggcacagggaaatggaaggccctcaatcggaagagggcgaaagatgtttatgaattcaccgagtgcccgaattgctacggccgcggaaagttggtgtgccctgtctgtctcggaactggcctgccaaacaacaaggggctcctgcgacgcccagaagccaagcagctgctcgacaagatgtataacggcaaagatactgccgaggtcgtagagcactctttaccacgcccaggatttttgtgagtcgtcgagtaggaatgacc

SEQ ID NO: 98426 - DNA, 537 bp, Zea mays
  unsure (1)..(537): unsure at all n locations
actgtgcccagccctcgcaacgtactcgcccggnccggaattcccgggtcgacccacgcgtccggtcttcgtactcgcctacctccgcggctcatacctttcccccttctcccaattcccgccgccgctccatcccgtaacgcgacaccatgagggagtgcatttcgatccacatcggccaggccggtatccaggtcggaaacgcgtgctgggagctgtactgccttgagcatggcattcaggctgacggtcagatgcccggtgacaagaccattgggggaggtgatgatgctttcaacaccttcttcagtgagactggtgctgggaagcacgtgccccgtgctgtttttgttgaccttgaacccactgtcatcgatgaggtgagaactggcacctaccgccagctcttccaccctgagcagctcatcagtgggaaagaggatgcaaccaacaactttgcccgtggtcactacaccattggcaaggagattggtgacctgtgccctgatcgcatcaggaagctngncgacaactgcc

SEQ ID NO: 98427 - DNA, 530 bp, Zea mays
  unsure (1)..(530): unsure at all n locations
natgtgccccgccgtcgccgccgngctggtaccggtccggaattcccgggtcgacccacgcgtccgggcttctcctccccctccggttcgggttcgggttcgtgaggttctccggggttcggtttcgtgggtgagcggatcgagatggcggcgtcngatgttgagtaccgctgcttcgtcggcggcctcgcctgggccacggacgaccactccctccacaacgccttcagcacctacggcgaggtcctcgagtccaagatcatcctcgatcgggagacgcaaaggtcccgcggcttcggcttcgtcaccttcttcacggaggaggcgatgcggaacgccatcgagggcatgaacggcaaggagctggacgggcgcaacatcaccgtcaacgaggcccagtcccgcngccgccgtggaggcagcagccgctgccggtacagtggtggccgtagaggctgcagctacagccgtggctggcgccctgattgcagcagctgctactgccgtggcagccgcttacgtggtggcgg

SEQ ID NO: 98428 - DNA, 531 bp, Zea mays
  unsure (1)..(531): unsure at all n locations
atgtgntccccgcccgtcgccgccgctcatctaccggtccggaattcccgggtcgacccacgcgtccgggcctgaagggagttgccaggagcatgccttcatctgctgcccttgatgttgttgcaaagaatttgaaccttaagttctttgaggtgcctactggatggaagttttttgggaatttgatggatgctggaatgtgctcaatctgtggtgaagaaagctttggcactgggtctgaccacattcgtgagaaggatggcatctgggctgtgcttgcatggctttcaattattgctttcaagaataaggacaaccttggaggagataagcttgtcacttgtgaagatattgtccgtcagcactgggccacatatggtcgccattactacacacgctatgactattaaaatgttgatgcacgggctgcttacgagcttatggctaacctaagtagcatgcagacatcactttctgatggtacaaactgggcaaagagataccgactgatgtatttgaagtaatgcactt

SEQ ID NO: 98429 - DNA, 533 bp, Zea mays
  unsure (1)..(533): unsure at all n locations
nagtcntcccagcctcgaccgacagctctccggnccggaattcccgggtcgacccacgcgtccgagctcgcggtcgcggtttcttgcgccactctggctcagccgccgcccgccacccgccacagccgccgcagacgagatgggcatcaagggtttgacgaaactgctggcggacaatgcgcccaaggcgatgaaggagcagaagttcgagagctacttcggccgcaaaatcgccgtcgacgccagcatgagcatataccagttcctgattgtagttggaaggacaggcatggaaactctcacaaatgaagctggtgaagtcactagtcatttgcaaggaatgttcaaccggacaataagattactggaagcgggaatcaagccagtttatgtttttgatggcaagcctcctgatatgaagaaacaagagcttgctaaaagatactcaaaaagagatgatgcaacccaagatctgactgaggcagtaaaggtaggagatatagatgcgatttgaaaaatgagcaagaggactg

SEQ ID NO: 98430 - DNA, 533 bp, Zea mays
  unsure (1)..(533): unsure at all n locations
aatgttcccagcctcgacgagagctgccccggnccggaattcccgggtcgacccacgcgtccgcaaggaccttcggcgcccgttcaggatccacatcttcccgagcgagttcttggttgacctgttgctcttcggaccacctccaaggctcttggtgtagcttgccactctcaccaatcaagttttcatgtctgatctcgacattcagatcccaactgccttcgatcccttcgctgaggccaatgctggggactctggtgcggcagcagggtcaaaggactacgtacacgtgcgcatccagcagcgtaatggtcgcaagagcctgaccaccgtccagggattgaagaaggagttcagctacagcaagatcctcaaagatctcaagaaagagttctgctgcaatggtacagtggtccaggacccagaacttggacaggtcattcagctccaaggtgatcagaggaagaacgtctcgaatttcctcgtccaggccggcattgtgaagaaagagcacatcaagaatcatggtttct

SEQ ID NO: 98431 - DNA, 533 bp, Zea mays
  unsure (1)..(533): unsure at all n locations
actgtgcccagcctcgccagnctgctgctccggtccggaattcccgggtcgacccacgcgtccgggagatgcctagcactgatgataactcaaagtttattggtcatcggtctacaagtcaagaaccgacatattcagctaaaaatattgctgataatggcaaagtaacatccgggactggtgaaaacaaggttgaattcacttcacagactgaaaataatgttgccgggaatctaaagtccaccttgcaaacgattgtacatggaggtgttggctatcatatggtaaactgtggtttgatactgttgaagatgttatccgaatacgttgacatcagtaaatgtttaccatcactatctttggaggtggtccaacgtgttgtggaaatattaaagcttttcaacactaggacttgccaacttgttctctgtgcacgagccatgcacgtgtctggacttaaatcaattacgtccaagcatttaacttttgcgagtcaaatcattaagtttatgcaatctttaatttccgatatc

SEQ ID NO: 98432 - DNA, 537 bp, Zea mays
  unsure (1)..(537): unsure at all n locations
attgtcccagcctccgagccttctcgtaccggnctcggaattcccgggtcgacccacgcgtccgattcaggagtgcctaatccagggtctgaatactgggacgttggatttacaagtcaatggctggggccataaggctgcactggaaggtgaggacaaggagatctactcagaaaaaggtgtgggcaaagttcagtggaaacctgccgagaacggccgggcagccacttggtataagagatacttcgatgagccagatggagatgatcccgttgtacttgacatgagctcaatggacaaaggaatgatttttgtgaatggtgaaggcgtgggtagatactgggtctcataccgaactcttgctggaactccttctcaagcactataccatattccgcgtcctttcttgaaatccaaggacaaccttttggttgtcttcgaggaggagatgggcaaagccgatggcatcctcgtgcagaccgtgacgagagacgacatatgtctgttcatctcggagcacaacccgggacagataan

SEQ ID NO: 98433 - DNA, 532 bp, Zea mays
  unsure (1)..(532): unsure at all n locations
nagtgtccggggggacggggcggcgtgctaccggtccggaattcccgggtcgacccacgcgtccggtggtgggcaagagcaggggcgacacggtcttcaccaccatcgtcaacctggcggaggaggccaagctcgcgcgcgagggcgtcaaggcgcccggccaccagatcctcaccatctgcaagtcgctcgtcgccggcggcgtagcaggcggagtgtctcgtactgctgttgctccacttgaacgattgaaaatattgcttcaggttcaaaatccgcacagcatcaagtacaatggtactgttcagggtctcaagtatatctggagaacagagggcctccgtggacttttcaagggcaatggtaccaattgtgcaaggattgttccaaattctgccgtgaaagtntttagctacgagcaagcgtcaaagggaattctgtgggcctaccgtcaacagactggtgaagaggatgctcagcttactccgctcttgcgcctttgagctggagcatgtgctggtatcataactat

SEQ ID NO: 98434 - DNA, 537 bp, Zea mays
  unsure (1)..(537): unsure at all n locations
actgtgtcccagcttgggagcgnactcgtctgtaccggtccggaattcccgggtcgacccacgcgtccgcggacgcgtggggcagtggaaagaaaaaggtaactctcaggcttgatctggtagagcaatcgtcattgaagtacaaggatgcagactttatcattttcaatacggggcattggtggacacatgagaaaactgctcttgggaaggactactatcaagaaggtaaccatgtgtataatgagctgaatgtcatggatgcctttcataaagctcttctcacctggtccaagtggatcgatgccaatgttaaccccagaaaaactctggtgttattcagaggctactcagcatctcatttcagtggcggacaatggaattcaggcggtggctgtgacaaggagaagtaaccaataaccaacgatcagtacctttcaacctacccaccaaagatgagcatcctggaggacgtgatccacaagatgaaaactccggtcngttaactgaacataacgagaatggctgactacagaa

SEQ ID NO: 98435 - DNA, 544 bp, Zea mays
  unsure (1)..(544): unsure at all n locations
aattgncttcgcccgatcccgcntnctctcccggnccggaattcccgggtcgacccacgcgttcggggagctttgacgcgccgtcgcaaaagaatttttgctttggtcttgccaaggccaaaaatggccacccttaccctgggcaggattatcaactttgacaaggtccagtctgtggttaagccactcaacagggaggtgaagcgcanggagaagaggaagaacccgctcacgaacatggctgctgtgctcaagctcaacccctacctcggcactgcccggaagatggccacccttgctgaggctgcccgagtcaaggcccggaaggagaagcttgattccaagaggaccaagcttacctcggagactgccaaagtcaaggctgccggcaaggcgtggtacaagaccatggtctcggacagtgactacaccgagtttgagaacttcaccaagtggcttcgaatgacgcagtgaagcggcctttgaggcctagttaagttttgagtaggtgtgtcgctgaacttgtattgagacgaaataattn

SEQ ID NO: 98436 - DNA, 539 bp, Zea mays
  unsure (1)..(539): unsure at all n locations
nagtatctgggtgggagtgtggggggtatgtaccgcggtagacccgggtcgacccacgcgtccgagcgaaaccgaaagagagcaaagcttggcattggagctcccgtggggaatgctgctgccgctgctgctggtcctctccgtctcgtcctcgtcatcgtcgtcggctgctgccacgctcgccgtcagcgctccgcccccactgcctgttcctcctcctcgtcatgctcaagacgccgaaggcatgctcatcaacggcaacttcgagacggcgccgcggaagctgaacaagaccctgatcgtggggcgccactcgctgccggggtggacggtgcanggccacgtggagtacgtctcgggcggtccccagcccgggggcatgttcttcgcggtgccgcacggcgtgcacgcgctgcgcctcggcagccgcgcgtcggcgtcgcaaaacgtgacngtgcggcccggggcgctgtacgcgctcacgttcgcggcgacccggacgtgcgcgcaggacgaggccctgcgccgtgcggtgcncc

SEQ ID NO: 98437 - DNA, 529 bp, Zea mays
  unsure (1)..(529): unsure at all n locations
actgttccagcctcgacgatagctctcccggtccggaattcccgggtcgacccacgcgtccgcccacgcgtccggaaaagggtcaggcgcattgtgcggaaatcacaggaaatgttatgaagaaaatggaatactggggaagtcaaccgtgccatgtcaggctacgagattttgctttcaacctcaaaatgctcatctgacatcttgtgtattttccatttagcgtctgttcattggtgcaccagaaatgcattgggacgtggtgtatcgtgtggcctgggctctactaatgtttgacaatcctgaagtgccaccagtggtgaacctggtataagcaggcgccattcatgtcagctaatcgttgagaaaacatatcagtgaaatcgtgcaactgttagtgtaatgaggcagttcctgcttacatattattactcgtgctacctggctacagngtcttgaatgcatggaatgtctcgtattttaaaaaaaaaaaaaaaagggcgccggtctaaaggatccagcctacgtc

SEQ ID NO: 98438 - DNA, 533 bp, Zea mays
  unsure (1)..(533): unsure at all n locations
agtttcccagcttgcggagntccgctgtaccggtccggaattcccgggtcgacccacgcgtccgcgcggagctggacagggcaacgcacgtccacaggctggtgaagggggacgacatcgaggtgcatcttgaccacaggcacatggggctgggcggcgacgacagctggtcgccgtgcgtgcacgagcagtacctgctgccgccgacgcggtacgccttctccctgcggctctgccccctgctgccgtcgtcgtcgtgccatgacatctacaggtctcagctccccagctgatggtgccgtgtgccggagacccgtcgacgtcgagccttgggaaacaacaatgaacgcaatggcctggccagtgaatgaaagtatataatattgtaataaagcagagacgtattagctcctgcnnnnnanaannnnnnnnnnnnnnnnnnnnnnnnnnnnnnnnnnnnnnnnnnnanaaaaagggcggccgctctagaggatccaagcttacgtacgcgtgcatgcgacgtcatagctttt

SEQ ID NO: 98439 - DNA, 577 bp, Zea mays
  unsure (1)..(577): unsure at all n locations
ttgtcnncccttgcctgagcccgcntgntgtatggaccgcggaaggaaccgggtgcggacccacgccgtcnncgcaaattgtattctttcatttagatnnctgtctgagtgttgtataacttannaatgganngcagtagtattctatcagtgagttggtacccctgggttactgagtatttaattttgttttcataatcttatcctnntacagacgattgcacttaaaaaaaanaaaaaaaggggcggccgctctagaggatccaagcttacgtacgcgtgcatgcgacgtcatagctcttctatagtgtcacctaaattcaattcactggccgtcgttttacaacgtcgtgactgggaaaaccctggcgttacccaacttaatcgccttgcagcacatccccctttcgccagcttgcgtaatagcgaagaggcccgcaccgatcgcccttccaacagttgcgcagcctgaatggcgaatgggacgcgccctgtagcggcgcttaaagcgcggcgggtgtggtgggtacncgcaacgtgaccgctacaacttgcagcgccctagcgcccggtcttt

SEQ ID NO: 98440 - DNA, 532 bp, Zea mays
  unsure (1)..(532): unsure at all n locations
nagttatcccaccctcgccacctgctgctccggtccggaattcccgggtcgacccacgcgtccgctcttcttcacctcactaacaccagctagctactttttcttttctgcaataaagggcggttggttcttcttcgacacccaagccgaccccaccgacgtacactcccacaccgaagccgccggccaccaaagccgccacctacacttcgacgccgccggtgtttnacacccccagcccgccgncaccatactactagaaagcgatgcctaccataccacactgctgtcagtctctggagcatttaggtggtctggatcaatggaagggttgtgtcctagccagccggcaaagatgagctgctgatggtaatgatgatgataagaggccactgctaccctactacgtaccctcctctttgtgtgctgccatccgtccccgttagacgatcgaggagagaataacgcagagctctctgctcccgcctgtcttctgccgtcccggcccgttatttactaatgtggtccgtcc

SEQ ID NO: 98441 - DNA, 533 bp, Zea mays
  unsure (1)..(533): unsure at all n locations
actgttccagccatgacgcagagctctcccggtccggaattcccgggtcgacccacgcgtccgcgagcacactgatgttgctgtcctgctcgacaatgaggccatctatgacatctgccgccgctcccttgacattgagcgcccaacctacaccaacctcaacaggcttgtgtcccaggtcatctcatccctgactgcttccctgaggttcgatggtgctctgaacgttgatgtgaacgagttccagaccaacctggtgccctaccctaggatccacttcatgctttcgtcctacgctccagtcatttctgctgagaaggcctaccacgagcagctgtccgtggccgaaatcaccaacagcgccttcgagccatcctccatgatggccaagtgcgacccccgccatggcaagtacatggcatgctgcctcatgtnaccgggtgatgtggttcccaaggacgtgaacgctgcttgggccacaatcaagaccaagcgcaccatccaattcgtggactggtgcccgacttgcttac

SEQ ID NO: 98442 - DNA, 519 bp, Zea mays
tgcgtcgagcctgtctatcccgcacgttctcataggccctggaccattgggtctgtttatgtgcctgtctgctgtaccccttccgtaattgaccgctcactttttctttaattaaagattgacggtgtttaacgctgagaagaagtttgtggtgaacaagttggcggaggaggagtttgtggttgagaagatgattgttgggaagaagtttaaggtggagaagtgggcttttgtcggtaagcttgttggtaaggagggtggtgagggtaagtgcggtaagaagaagggtaagaagagtgcggagatgcataagactcatactcctaaggcgtcgaagtaggcgtatttggatactggtactcttcttaaggttacgcttactacgaatcttcctactaatgatactcctgagaagtcggttggtgaggttgttaagtctgtgtgtcataataagaagtttattactattccctgtgagacttagattcctgcgtgttctgcgtcctttggtgagtctgt

SEQ ID NO: 98443 - DNA, 528 bp, Zea mays
  unsure (1)..(528): unsure at all n locations
nacgcggcacgcgaggggggacgcaacgagcaagtctgcattggctctggacctttgggctgatttatgtgcttgtttatgtgcttgtagatcttctcttgtctcacatttctttcattctgttgctgttgctggactcgttacgggggtgcataagcatgctctggagccacggagaaggaagtaacttgatgcgacgtggcctgcctaatgtgcgtgtcgccgggagcataggtagtagttggttactgcttgttctataaggtttatttgttttgataaggtttgttgttctggtcctaaggttaagtaggggcacgccgcccattgtgcttgcgcgaggtgcggcggtaggaagaggttcgcgttgaagggcaccgctcacggtaagtttaagtattagggcactatttagtctaagccttagaggaataagagactcgccgtcgaggaatgggtcggatgaaagtccggcggatctagggcctctaatcntcatcgggcgaacgaggacagtattcataagca

SEQ ID NO: 98444 - DNA, 520 bp, Zea mays
  unsure (1)..(520): unsure at all n locations
cgctccgcgntttggatcccttgnnangtcatctncgnctgtgcccaaccctcggctttatgtgcctgactgccgtgccccttccgtgcttgaccgcccaccttctcgctcattaacgattgaccgagtacggccctccaccgaagtttgtcgtgaaaaagttggcggaggaggagtttgtggctgagaagatcattgttgggaagaagtttatggtggagaagtgggcttttgtcggtaagcttgttggtcagcacggtcgtgagggtaactgcggtaagaagaacggtaagaagagtgcgcagatgcataagactcatactcctaaggcgtcgaactatgcgtatttggatacccctacgcatcctacgggtacgcctactacgaatcatcctactaatgatactcctgagaagtcggctggtgaggatgctaagaccctgtgtcacaatacgaagcttactactactccctgtgagacttagaatcctgcgtgttccgccgtcttctgcgaggcccc

SEQ ID NO: 98445 - DNA, 517 bp, Zea mays
  unsure (1)..(517): unsure at all n locations
agtcagcggtggctttttgattcccctgtncanatcacgnctggccccgttggacgtgtttatgtgcctgtggatgtgcgggtggatgtgcgggctacccacctatcgtgttaagagccttaagccgtggtcggagatcgtcgggcgaagaagggaggcgtacctatcggcgaaaccagcgtcgaaacgtctgctaattccggtgcctttcgggctacctccggatatctcgaaaggagagtctcgtcgggagaactaaacgagcccgccggagataaggccgtccccgtctcgctctagggatcaaaggctaccgtacgcgccggcgagatttccgaggagagggaggtcggcctaattacggacgccgccgtcgtataaataaaagtaaccgtcgagaagactaaggatcggagtaatgccgcctccgttcacgaattagctcgggtcaccggaatcggtaaagctgctatttaagtctaggtctcagaagcgtatgttccttcgagggacgggn

SEQ ID NO: 98446 - DNA, 511 bp, Zea mays
  unsure (1)..(511): unsure at all n locations
ngcctcgcgcgatacgcggagggagcacgcacattgcctggacctttgggctgatttatgtgcttgggtctaccaaactagccacagcccgcccgacggcatgcgtcatctggacaattgcagcaacctcagagtcaacatgcgtaataaattttgatccttgggaggggtgtacccaccagacaaaaggtcgatgtgggtctcgtttgttgacttgacgacctacgacaatccgatggactgtatggttcctgcgttggtgatgtactacctaaaccctcgtttcactaatccctgacggcaggacaggggttcattacggcggcgatgggcgatggagaaccagggcctgaccttggagagggagttcgagaaatggtcattatacntaaagaaagtagtacgtgtgtaaaccattttacttcgatatgggaggcagcgataacaaacaataacattggttgtgcaacgctcggcaacggaaacgagctactcaaacttccaatgagga

SEQ ID NO: 98447 - DNA, 528 bp, Zea mays
  unsure (1)..(528): unsure at all n locations
ggcccatacggcggtcatgcggaagggagcactgcaacatctgntctggacctttgggctgatttatgtgcttgtttatgtgcttggcttagctaagtaaagcgccagcgtaagcgtcaagactatcgatttacgtgaggccggcgataggggcaatagcggaagacgtaggttcagtataagtagcgatactagtgatgagagcctacgtagcagtacgagtagtatgaagttctataaggtgaatgacctgtggcgggaggtgacttagatggttagagtcagagatgggacttccggattgagctaccctaggtcgtcgaagagatcaggtcttagtgacaccggtagtgcgcactctctggaatcgagcgggattgtgagtcaccctgtgacgaaggctacggataaggtactatccgtaggttggaaaaagtcgtcctgggtctaaatagagaaggagaccccgtaacgttcggattacntcncnntcttcatatcccatatctatccgattgataagcccct

SEQ ID NO: 98448 - DNA, 526 bp, Zea mays
  unsure (1)..(526): unsure at all n locations
nggccatggtcggttcagcaagggaggccaagcatgcttggctctggacctttgggctgatttatgtgcttggccagctcgacggcatgcgtcatctggccaattgcagcaacctcagagtcaacatgcgtaataaattttgatccttggcaggggtgtacccaccagacaaaaggtcgatgtgggtctcgtttgttgacttgacgacctacgacaatccgattgactgtatggttcctgcgttggtgatgtactacctaaaccctcgtttcactaatccctgacggcaggacaggggttcattacggcggcgatgggcgatggagaaccagggcctgaccttggagagggagttcgaaaaatggtcattatacttaaggaaagtagtaggtgtgtaaaccatttaacttcgatatggggaggcagcgataaccaacaataacattgggtgtgccagcgctcggcaaccggaacgagcataactcaaactttccaatgagtacttacccggacggtaagctcgcgt

SEQ ID NO: 98449 - DNA, 525 bp, Zea mays
  unsure (1)..(525): unsure at all n locations
agctatgcgccngtacgagaggggggaaaagcaactctgttggacctttgggctgctttatgtgcttgtttatgtgcttggggtacggtgctgtcgtaggattcgtcgtctctgaataatttgtcggatggtggttcgttgtagcttggtcggggggtgtcggtgggttcggttatgtcggattcgcttaatgctggttctgcgggtgttacattggggcttacggtggtttcgatggggtcttggccttcggtgtcggattataattgttcgatgggggttgcgttagttgagtctgtttggtcgtttagtactggtgtgtcgcattcgaatggtaataattcgatggggatgtcggagcctctggttgggcctcattagtgtacggggtggtggcctgtgctgcgggataattttgggtcgcgtcataatgctgtggttgcggatgtggcttatgtgttgctgggtgcggcggcgcgtaaggattccgtagagtttagtgcgggtagatgtgtgtcggatacg

SEQ ID NO: 98450 - DNA, 518 bp, Zea mays
  unsure (1)..(518): unsure at all n locations
gcgtcnncccgccgggccggaggcagagcctctttggccctggacctttgggtctgtttatgtgcttgtcttctgtaccccttccgtaattgaccgctcactttttctttaattaaagattgacggtgtttaaggttgagaagaagtttgtggtgaagaagttggcggaggaggagtttgtggctgagaagatgattgttgggaagaagtttaaggtggagaagtgggcttttgtcggtaagcttgttggtaaggagggtggtgagggtaagtgcggtaagaagaagggtaagaagagtgcggagatgcataagactcatactcctaaggcgtcgaagtaggcgtatttggatactggtactcttcttaaagttacgcttactacgaatcttcctactaatgatactcctgagaagtcggttggtgaggttgttaagtctgtgtgtcataataagaagtttattactattccttgtgagacttagattcctgcgtgttctgcgtcttttggtgagtct

SEQ ID NO: 98451 - DNA, 515 bp, Zea mays
  unsure (1)..(515): unsure at all n locations
agccngcgctacagaacaggcagcaccgtcgctctggcctggcacctttgggctggtttatgtgcttgtggatgtgcgggtggatgtgcgggctacgcagttagtcgtgttaagagccttaagccgtcgtctagaatcgtcgggcgaagaagggaggcgtacctatcggcgaaaccagcgtcgaaacgtctgctaattccggtgcctttcgggctacctccggatatctcgaaaggagagtctcgtcgggagaactaaacgagcccgccggagataaggccgtccccgtctcgctctagggatcaaaggctaccgtacgcgccggcgagatttccgaggagagggaggtcggcctaattacggacgccgccgtcgtataaataaaagtaaccgtcgagaagactaaggatcggagtaatgccgcctccgttcacgaattagctcgggtcaccggaatcggtaaagctgttattttagtctaggtctangaagcgtatgttccttccgaggacngg

SEQ ID NO: 98452 - DNA, 528 bp, Zea mays
  unsure (1)..(528): unsure at all n locations
cactgctacgnnncccaaatcnncgnanccgcatcgacgtacctgtcttaaattcccgggtcgaccgacgcgtccgggcttgtattgttcattcatgattagttttttggtgctgggacccccgtggagggggttagtctctacaccatcactgctggaacaaggccccagcttcgccttctatgtgcccctggtggtcctcatctccatctcccttgtgctgcagatcggcgtgggggtgctgctcatcttccttgtcaagtacgaccttaacaaccctgacaagcacgccaagctggacttcctcaacaacctggccacgggcctggtgttcatcatcgtggtagtcaacatcttcatcacggccttcggagtccaaaagcccttgatggacatggcaccccagcagtatgacacccaggaccctggatgcttgctgcccttcaactcatctgcccgacctcagtaattgccatacttgtaaagattccacccttcttcacatggcactaccaaaatgccataccc

SEQ ID NO: 98453 - DNA, 529 bp, Zea mays
  unsure (1)..(529): unsure at all n locations
tagtgctagcgnccctcgcaacaagtatcgtagcactgccccggtcttgaattcccgggtcgacccacgcgtccgcttccctggagccgcccgcttgcccttcggtcgctagctcgctcggagcgcgtcgggccggtccatggcgctcttcgggcgggtgctggctctcgccctggctctggccctgggccccgccgcgaccctggcgggtcccgccaagtcgccctaccagctggtgctgcagcacagcaggctccggggccgccagcacggccccaacgtgtgtgctgtgcagaacgttattggcactaataggaagtacttcaccaactgcaagcagcggtaccaaaggaaaatctgtggcaaatcaacagtcatcagctacgagtgctgtcctggatatgacatggtccatggggagaacggctgtccagcatccctaccactgtcaaacctttacgagaccctgggagtcgttggatccaccaccactcagctgcacactggaccggacggagaagctgaggcc

SEQ ID NO: 98454 - DNA, 524 bp, Zea mays
  unsure (1)..(524): unsure at all n locations
aagtctgactgggcaacgctccgnacngcacgatctacctgtctggaattcccgggtcgacccacgcgtccgcacacgcatgccttgaaaatacacttttactctgatccaagcacacaaacagctcaggccgtgacacactattctgcgccaggcccatcttctctcctgccttacaacgccatggggagcaatctcaacccccaactctgcctgatgccctttatcttgggcctcttgtctggaggtgtgaccaccactccatggtctttggcccggccccagggatcctgctctctggagggggtagagatcaaaggcggctccttccgacttctacaagacggccatgcactggactacgtgtgtccttctagcttctacccgtaccctgtgcatacacgtacctgcagatctacggagtcctggagcaccctgaatactcaagaccaaaatactgtcaggaaggcaaagtgcagaacaatccactgcccaaaccacacgacttctacaacgtcgaatct

SEQ ID NO: 98455 - DNA, 528 bp, Zea mays
  unsure (1)..(528): unsure at all n locations
tgaaaggnntnccactactgtatagaagtattcctccccggtcctgaattcccgggtcgacccacgcgtccgggagagatgaaggatggagtcccagagggagcacaacttcagggaccggttcatcgaaatgcaacttaccgcccaaggtaccgtagcaggggacctcctcgcccacgacctgccccagcagttggagaggctgaagataaagaaaatcagcaagccaccagtggtccaaaccagccgtctgttcgccgtggataccggcgtccctacaattaccggcgtcgcccgcgtcctcctaacgctccttcacaagatggcaaagaggccaaggcaggtgaagcaccaactgagaaccctgctccacccacccagcagagcagtgctgagtaacaccaggctcctcaggcaccttcaccatcggcaggtgacctaaagaattaatgaccattcagaaataaagcaaaaagcaggccacaaccttaaccaacaccaaagaaacatccaagcaataaagtggta

SEQ ID NO: 98456 - DNA, 529 bp, Zea mays
  unsure (1)..(529): unsure at all n locations
tgagtntnggccactagaacatagtatagtagncgctctaccggtccggaattcccgggtcgacccacgcgtccgaaatactccatcagcagtgacaactctgacaccactgacagtcatgcgacatctacagccggatcaagatgctccaaactgcccagcagcaccaagtcgggctggccccgacagaacgaaaagaagccctccgaggttttccggacagacttgatcacagccatgaagatcccggactcataccagctcagcccggatgactactacatcctggcagacccatggcgacaggaatgggagaaaggtgtgcaggtgccttgccgggcagaggccatcccagagcccgtggtgaggatcctcccaccactggaaggcccccctgcccaggcatccccgagcagcaccatgcttggtgagggctcccagcctgattggccagggggcagccgctatgactgggacgagattgatgcctactggctggagctcatcaactcggagcttaaggagatgg

SEQ ID NO: 98457 - DNA, 540 bp, Zea mays
  unsure (1)..(540): unsure at all n locations
agttatatggaggaggggctgcgcatcgctgttgggggatagtatcgctgcaccggtccggaattcccgggtcgacccacgcgtccggggaccgcgagcacaggccgctccgtgggcgcttcggatcctcgcgggaccccacgctctgccagcctgcccagcccgctgcagccgccagcgcgccccgtcggcagctctccatctgcacgtctctccgtgaaccccgtgagcggtgtgcagccaccatgttcagctggctgaagcggggcggggcacggggccagcagcccgaggccatccgcacggtgacctcggccctcaaggagctgtaccgcacgaagctgctgccgctggaggagcactaccgctttggggccttccactcgccggccctggaggacgcagacttcgacggcaagcccatggtgctggtggccggccagtacagcacgggcaagaccagcttcatccagtacctgctggagcaggaggtgcccggctcccgcgtggggcctgagcccaccaccgactgctttgtgn

SEQ ID NO: 98458 - DNA, 529 bp, Zea mays
  unsure (1)..(529): unsure at all n locations
tgctgttnnctgaggncccccgactccccgcagcacttctccttgcgttaaattcccgggtcgacccacgcgtccgcttcctcaggcggtggctggaggcttcgcatctggggctttaaacatacaaaggtgttggggggacctgcggcggcggcggcggcagcgggggctggggcgcgggggccggaccatgagccgctgagccgggcaaaccctaggccaccgagccagcggaccctcggagcgcagccctgcgccgcggagcaggctccaaccaggcggcgaggcggccacacgcaccgagccagcgacccccgggcgacgcgcggcgccagggagcgctacgatggaggcgctaatggcccgaggcgcgctcacgggtcccctgagggcgctctgtctgctgggctgcctgctgagccacgccgtcgncgcgccgtcgcccatcaataagttccccggctatgtcgcccccaaaacgacaaagagtggtagtgcaataccgtaacaccttctatggctggcgcan

SEQ ID NO: 98459 - DNA, 522 bp, Zea mays
  unsure (1)..(522): unsure at all n locations
tacggtgctggcctagctcatgacgnatctgctctaccggtctcggaattcccgggtcgacccacgcgtccgcgaagatggtgtcgctgaagctgcagaagttgctcgccgcgagcgtcctcaagtgtggggggggcaaagtctggcttgaccgcaatgaagtcagcgagatctccatggctaactcccgccagaacatccggaaattggttaaggatgggtttatcatcaggaagcctcagaaggttcactctaggtcccgtgcaagaagggcacatgaggccaagcagaagggaaggcactctggatacggcaagcgcaggggtaccagggaggctaggctccccaccaagattctgtggatgaggaggatgcgtgttctgaagcgcctgctccgcaagtaccgtgaggccaagaagattgacaagcacatgtatcatgacatgtacatgaaggtcaagggtaatatgtttaagaacaggatggtacttatggagagtattcacaagtccaaggctgaga

SEQ ID NO: 98460 - DNA, 518 bp, Zea mays
  unsure (1)..(518): unsure at all n locations
tcggtgcttgtgctagctcacgtccgactgacgcaccggtctggaattcccgggccgacccacgcgtccgaactccgctgggccaccagctttgaccgtttcctcccttcccctccgctactgctcctcggcaccccactcccccgcaggagcggcggcggcggcggcgaggtcgtaccccacatcggcgagcggcggcggcaccgccggaggcaaaggcaagatgttcgggcgcgcgccgaagaagagcgacaacaccaagtactacgagatcctcggggtgcccaagtcggcgtcccaggacgatctcaagaaggcctaccgcaaggctgctatcaagaaccaccccgacaagggcggtgaccccgagaagttcaaggagctcgcacaagcctatgaagttttgagtgatccagagaaacgtgagatntatgatcagtatggtgaagatgcccttaaggaaggaatgggccggtggaggacccatgttgatccatttgacatcttctcatcattgt

SEQ ID NO: 98461 - DNA, 534 bp, Zea mays
  unsure (1)..(534): unsure at all n locations
cagtggctagtgncccgttcacgatgtatagctgctccggnctggaaaacccgggccgacgcacgcgtccgcccgcgcgtccgtccacgcgttcgcactgtccctgcctatttcaacgactcgcagaggcagaccacattagatgctggggtgattgctggcctcaatgtgctgcgtatcatcaatgagccaaccgctgctgctattgcctatggtcttgacaagaaggcaaccagtgtctgtgagaagaatgtcctcatttttgaccttggatgtggtaccttcgatgtctccctgcttacaattgaggaaggtatctttgaagttcaaggccacagctggcgacacccatcttggtggtgaggactttgacaacaggatggttaaccactttgtccaggagttcaagagaaagaacaagagggatatcactggcaacccgagggctcttcggcggctgaggacctcttgtgagagggccaagagaactctggcttccactgcccagaccaccatggagattgactcgctgta

SEQ ID NO: 98462 - DNA, 535 bp, Zea mays
  unsure (1)..(535): unsure at all n locations
tattggctagagnaattttcactacagnactgcctgtaccggtctggaattcccgggccgacccacgcgtccgatttagaagcgcccctcctcctctcccccttccgtacccaatctaatcgacacccggccgagatgggccgcaagttcttcgttggtggcaactggaaatgcaatggaaccgcagatcaggttgagaagattgtcaaaaccctgaatgaaggaaatgttccctcttcagatgttgttgaggtcgttgtcagtcctccttatgtgttcctcccggtggtcaagagccagctgcgccaagagttccaagttgctgcttagaactgctgggtgaataagggaggtgcattcactggtgaaattagtgctgaaatgctcgtcaaccttggcgttccctgggtcattcttggacactctgaaaggagagctctgctgggagaatcaaatgagtttgttggagacaaggttggctttgctctgtctaagggactaaaggtcattgcatgtgttggtgagacccttgaag

SEQ ID NO: 98463 - DNA, 516 bp, Zea mays
  unsure (1)..(516): unsure at all n locations
ctgttcttgtcctagctcatgactgnactgccgtaccggtccggaattcccgggtcgacccacgcgtccggcctcgtaacacccatcctcctgaaactgtcgctattgaaatgaacaatgatgctggaaggggtcagacaccacaacaattgcggttgccacggacaaaggatgttattgtaaatggggtcattgtgaaggtcaagtactgtgacacctgcatgctgtacagaccacctcgatgctcacactgctctatctgtaataactgtgtggagcgctttgaccaccactgcccttgggttggccaatgcataggattgcgcaattatcggttcttctatatgtttgtattctctacaacattactgtgcctttatgtatttggtttctgctgggtgtacattatcaagattagagacgcagaacagtcgtcgatctggaaagcaatgttgaagacttcagcataaatggttctgatcatatactgctgcatctgtgtgtggattgtgggtn

SEQ ID NO: 98464 - DNA, 528 bp, Zea mays
  unsure (1)..(528): unsure at all n locations
ttgggctagaccagcncactacgcactgctctaccggtctggaattcccggctcgacccacgcgtccgatcactgttctccttcctcctctccgcttttttgccgccggccctgcgcccccgccccggctccccgccacgccgaccgcgccctgcgcctctacacctcaaatctgctttgtagcataagctcgctgcttgttagggtcgatggcagagagggagcatcgaacagtatttgtcacggtggggaccacgtgctttgatgcccttgtcatggccgtagattctccggaagtgaagaaggctttactgcaaaaaggttacagtaatcttctcattcaaatgggccgaggaacatatgttccatccaaggtcagtacgcttgtacctctgtagtaaactaacaactatttaattcctgtctactagtttgcattatgacaatctgtactctttcttatagggatgttcgtaactggtgatttaagtcatcctaaatgaaaaggcanactgaaagcacaacata

SEQ ID NO: 98465 - DNA, 541 bp, Zea mays
  unsure (1)..(541): unsure at all n locations
tgatgattattagnttaatggccggtanctgatcctgcncactacgcactgcctgtccggttcggaattcccggctcgacccacgcgtccgcccacgcgtccgcccacgcgtccgcccactcgtccgcggacgcgtgggcaaatgcgtgggtttgagacaatgtacaatggtcacactggaagaaaactgactgcgatgattttcctgggccccacatattaccaaagactcaagcacatggtggatgacaagatacattcgagaggacgtggtcctgtgcagatactcacccggcaaccagcagaggggcggtctcgtgatggaggtctccgctttggagaaatggaaagggattgtatgatcgcacatggagcagctttcttcctgaaggaaaggctgtttgaccagagtgacgcatacagagtccatgtatgcgagaaatgtggtcttatcgcaattgcttaacctaaagaaaacctcgtcgaatgcagggggctgaagaacaagactgacattggccaaagtcacataccctatgcn

SEQ ID NO: 98466 - DNA, 530 bp, Zea mays
  unsure (1)..(530): unsure at all n locations
cgtgctggcctagctcatgaatgattgctctaccggtctcggaattcccgggctcgacccacgcgtccgcccacgcgtccgcggacgcgtgggcgcctgttcgcagccggtgcctgctccttcccgatccgggaggcaaagctgcgactccgcaaccgccgccatggcgttcgagaagatcaaggtctccaacccaatcgtcgagatggacggtgatgagatgaccagggtattctggcagtctatcaaggacaagcttatcctcccatttctggacctggacatcaagtactatgatttggggatactgcaccgtgaagcaactgatgacatggtcacagtggaagctgcagaggctactctcaagtacaacgtggctattaagtgtgcgaccattactccagatgaaactcgggttaaggagttcaatctgaaacacatgtggaagagcccaaatggcacaattaggaacattataaatggcactgtgttcagagagcctattatatgcanaaacgttccaagacttg

SEQ ID NO: 98467 - DNA, 539 bp, Zea mays
  unsure (1)..(539): unsure at all n locations
tgatgtgattatatatatagtggtgcttaggccttttcaccttcgnactgccgcaccggtccggaattcccgggccgacccacgcgtccgcccacgcgtccggtgacgtgcgtgaggtgtttggagtcggacggaatcgaaaaggcgacgactcattgcctggagtttcctgggagcggaagcgaaggctgtgaagggagggaaaggcttgctcgccgcgaagactacggctgccaagtccgccgagaaggacaaggggaagaaggccccaatctcacgctcctcccgagccggcctccagttccctgttgggcgtatccaccgtcagctgaagcaaaggactcacgtcaatggtagcgttgctgcccccggaaccgtctgctacgctgccatcctggagtacttgactgacaatgttaccgagctggctgggaatgctatcaaggatcttgaagtgaatgcgttcaccccttgcctttgcagctagccatttttggagacgaggagcttgacacgctcttcattggcaccatcgaatn

SEQ ID NO: 98468 - DNA, 525 bp, Zea mays
  unsure (1)..(525): unsure at all n locations
gcgtgnctgtgnccattcccgatgtactgttcgtaccggttgggatacccgtccggacgcactcatccgctggtacttaatctaatttgagtatacagtattccatactcgatctcatagatccctatggaattctttaaaaggccttgggcgatgaaagtcgtaagtacggcttgtagggagatctttcctatacttcgagatccaccctacaatatggggcctaaaagccaaaaaaataagcgattcatttttagcccttataaaatgataacggattcttgaacctattacacgctcatgtcacgtctaggtactgcagaaaaaataaccgaaaaattctatctataattattaatntttatgataacatgtgagtgaagcattttttttattacctaaagaatgcattgacttttagattattttattatgtgtgaaaatgaaccttcagattaaattcacaatattccttttgctattactagcttcacaatttaaaattcattttgtgcgtagtatatt

SEQ ID NO: 98469 - DNA, 528 bp, Zea mays
  unsure (1)..(528): unsure at all n locations
tatgtgactagtcctagtccatgactgnatctgctctaccggtccggaattcccgggtcgacccacgcgtccgcccacgcgtccgcactcttgaagatgcaattgggttatttgtcaagggtgatgtagataggcattcagtttatgccactgcacttccttcgtcgcatcctagtttttctcttcaacaagtccttgagatgtcagaaaagtggaggtctcggccactaccaaaaggccccgtttcccttttcattggaatactgtctgcatcaaatcatttcgctgagcgcatggctgtgaggaaaacatggatgcaggctccagaaattaagtcttttgaagccgtggctcgattctttgttgcactgaattcaaggaaagaggtcaatgtaatgttgaagaaagaagcagaatacttcggagacattgtcattttgccatttatagaccgctatgagctgggtgttcttaagacaattgctatctgtgagtatggggtccagaacttgactgctgcaaacatca

SEQ ID NO: 98470 - DNA, 490 bp, Zea mays
  unsure (1)..(490): unsure at all n locations
cgggttgtggccgccaagcacggggggacaacgcacgtctgcattggtctggacctttgggctgatttatgtgcttgtttatgtgcttggaacaactctcctcctattctatcaatattagtcagtaatctccctcgcttcgtaacaacggttgtctgtcttcttcttctttagttgtagtcggctgtggtggtggtggcttcggtagtggtgtcgtcgtcgtcggtggtgggggttgggatggtgctggtggtggcgagtcgtggtgaggcgatgctgctggcggtgttgcgttctgggcatgtgacgggtagtgtggtgctgtttcttgtggtgcgtcgtagtggggcgtgtctgtctaatagttgtgtgctgctggtggtggattggtaggttattcgtaatcgttctaagagtacgatgggttggtctggtggtggtgctagtacggttaatgttgntnatactttttgtaagcgttgttgccttt

SEQ ID NO: 98471 - DNA, 540 bp, Zea mays
tgatgttatggtatacaaaatttgcttggctagttcttatatgattgctcgtaccggttcggaattcccggctcgacccacgcgtccgcatagataagtcgtgttttgaagggttcttgtgaataagataaaggcttagatacatttggttgtatgaacgggttttttttaggtgtatctagtgtttggagaaccgcaacatgatgtctatgttgtacatgacctaagtgcatttctctaccaccagcactcttgcccaagcatggtagaccatttgtgtttaatgttcattacatgctaataaaagatactggtgggaaggttaaggttatggttttaggcacaccaaacaagagggagtctaaagaaagttaagttgtcaagtctctagtagagtaagtggtagtctttcatcaaatttgacttgctaaatttttaagctcggcttttatgtgtgttggtgaactatgagatcgaccgaaagtgattgggtaatcgttggattttgacaccacgtctggttagtgatccttattcggt

SEQ ID NO: 98472 - DNA, 492 bp, Zea mays
  unsure (1)..(492): unsure at all n locations
agctgcgtcgacagaggagggaggacacggcccgtctgcttggctctggacctttgggctgatttatgtgcttgtggatgtgcgggtggatgtgcgggggagtatagagtcagtcagttagttagttagtagtgagtccgtctgttgtgtttgcgtcctccttctgttcttgccttgccttgccttgctttgtttgttgttgttgttgtacctagggacggagacgaagaagactgttcgtgttgcttctgctgttgttctggtggttattgcggtgtctgttgtggaggtcttggtcttgggttttattagtggtcttcttgttgctgtgtttgttgctggtgttgnttctggngttgatgctgttcttcctcctgttcatcatacctagcgagttggttgtggttggctgtttggaggttgaagaagagatgaagtgggagagagagcgatacggtcgtgtgtaccttgacgtgcgggtacgcccccccc

SEQ ID NO: 98473 - DNA, 522 bp, Zea mays
  unsure (1)..(522): unsure at all n locations
tcggtacttgtncctggaccctacgtactgacgtaccggtctggaattcccgggccgacccacgcgtccgctagggttttgctgctctccgaccccgagctccgaaggccgcagcatcaggcgaggcccggctcgcgtgtgaccgagatggcgctgccgaatcaggggaccgttgattaccccagcttcaagctcgtcatcgtcggcgatggtggaactggtaaaactacatttgtgaagaggcatctcactggagagtttgagaagaaatatgaaccaaccattggtgtggaagttcatccgttggatttcaccactaactgtggtatgatcaggttctactgctgggataccgcatggcaagagaagtttggtggcctcagggatggatactatatccatggccagtgtgcgatcatcatgtttgatgtaacctcaaggcttacttacaagaatgttcctacgtggcatatggatctgagcagggtctgtgaaaacattcccattggcctttgcggtaat

SEQ ID NO: 98474 - DNA, 528 bp, Zea mays
  unsure (1)..(528): unsure at all n locations
tcggtgnctagtcctagctgatgactgaatctgctctaccggtctggaattcccgggtcgacccacgcgtccgcgaggacaggatcctcaccaccaacctgttttccgctgagctctccaagctcgccgccagggcgttcttggcacagaggatctcctctgtcaatgccatctccgctctctgcgaggcaaccggagccaatgtctctgaggtggcttacgccgtgggcaaggacacgagaattggccccaagttcctgaacgccagtgttgggttcggtggctcatgcttccagaaggacatcctgaacctggtgtacatctgcgagtgcaacggcctgcccgaggtggccaactactggaagcaggtgatcaagatcaacgactaccagaagagccggttcgtgaaccgcgtcgtggcctgcatgttcaacaccgtcgacggcaagaaagatcgccggtcctcggcttcgcctttcaagaaggacaccggttgacaccagggagacccccggccattgacgtttt

SEQ ID NO: 98475 - DNA, 545 bp, Zea mays
  unsure (1)..(545): unsure at all n locations
atatatgtttattnggtggnnnaaagccnctactnccgatcgactgacgtaccggnttggaataacgggccgacccacgcgtccgcccacgcgttcgcttgctgctatggaaggttctagactggctggtgcatcaaggatcatgggcgtggtcatcaacccagcagaatacgagcaagctaagaaatttggctgcactgaattcgttaaccccaaggaccacgacaagccagtgcaagaggtgctgattgagctgaccaacggcggcgtcgaccgcagcgtggagtgcaccggtaacatcaacgccatgatatccgacttcgaatgtgtccacgacggctggagtgtcgccgtgctggtgggtgtcccgctcaatgacgaccagttcaagacccaccccatgaacttcctcatcgagaagacactcaagggcacctttttcggaaactacaagccgcgcaccgaccttgccaacgtcatccagatgtccatgaagaatgaacttggactggagaagttcataacacacaaggaggcccttcttg

SEQ ID NO: 98476 - DNA, 536 bp, Zea mays
  unsure (1)..(536): unsure at all n locations
agggttgcannagtgctgtcttagctcttaagtatctcatcgannnccgaannnnnttacagacccggccgaccacgcgtccgcctttaactctggtgacataagctgttgctagggtagcaaatcaagagctaaggatggcagagtcaatggtagcaagcttctgggggcctgtgacatcaacaactgagttgtgcgaggagaattatgcacactcgtcatatatcgcagaattctacaataccatctctaatgtcccatgcgttcttttggcacttattggattagtgaatgctttctgccaaggctttgagaaacgatttagtgtcctgcacatatccaatatgatacttgctattgggagtatgattttccatgccaccttgcaacttctcctacaacagagtgatgagactcctatggtttgggagatccttctctacatgtatgtcctctattcaccggactggcactacaagagcacaatgccaactatcctgttcctgtatggtgctgcctttgccgtagtacatttc

SEQ ID NO: 98477 - DNA, 519 bp, Zea mays
tggagcccagtggctgccctgcactattgcacactaccgcactgacttaccggtccggaattcccgggtcgacccacgcgtccgcccacgcgtccgctcacgcgtacgtcgacgcttggggtttaaaactgtcaattggcgtgtggggcatcatactcttatgtgtcggcgtcagtttgtttgcgtcatcagtttcgttgtctgttgcatgtcacggcttacttatgtgcttatggattgctactatacaagtattcgttttggatgtgttaaaaagacatgaaaatggagctacatgccagaagacagacggaggcttctttggaagctgctctgacaaaaaaaggggcggccgctctagaggacccgagcttactttcacgtgcatgcgacgtaggaactcttttttggggatgcctaaattcgcttcactggccttggttttacaacgtcgagactgggaaaaccctggcgttacccaactgaatcccatttgacacataccccttttgactgatg

SEQ ID NO: 98478 - DNA, 530 bp, Zea mays
  unsure (1)..(530): unsure at all n locations
gggagcccccaagtgtgatatgaactaggggaatataaaggcacggctcgaattcccgggtcgacccacgcgtccggtcgcagcccgtgttccagcgcatcgcgctctacagggctggcattgtccccgtctcctacggcagggtggcgtgcaacaagaagggcggcatccggttcaccatcaacggccactcctacttcaacctggtgctggtgaccaacgtgggcggcgccggcgacgtgcacgcggtggccgtgaagggcgaccgttccgcggggtggcaggccctgtcgcgcaactggggccagaactggcagagcaacacgctcctggacgggcaggccctctccttccgcgtcaccaccagcgacggccgctccgaggtctccagcaacgcttgcccgcgcggctggggcttcggccagaccttcagcggngcccagttcaactgaacaccctccatggttcccgcagcgtcgtctcgtccgtcgtcggcgcggtgccacangtagtagttttccgttggtcgg

SEQ ID NO: 98479 - DNA, 535 bp, Zea mays
  unsure (1)..(535): unsure at all n locations
aggggagcccctnaggctgcgtcatgctctacagctaccctacgtagtgacggaccggntttgaatacccgggtcgacccacgcgtccggttgctatgaagtaccaagcgctgcttggaatgatggtggctggttgctatgggctgccagagttcacgatgcgtgtgttcctctggggtgctctttcttccatggtgctccctaagtatcctctgcccacctatgatgttgtagtacgtggaggagcccctaatgccttttcgcaatgtatggttgcatatgacgagacacaaaaaccatccctgaagaaagccttgcttcttggtgatgcaatttcagatttaccaaaggttcaaaatcaccagcctaacgatgtgatggagtatggtggttcccccaagaccgaattccagcgctacattcgactcagtcgtaaagacatgttggattggtccttcagtgagggggctggtccaaatgaaggcaagctctttgatcaccaacctttacggcttacaacgatgattatgagcgn

SEQ ID NO: 98480 - DNA, 535 bp, Zea mays
  unsure (1)..(535): unsure at all n locations
tgggtggccnnnttgtgtgagtcagctacttaaagataccctacgtagngactcgaccggnctggaatacccgggtcgacccacgcgtccgcccacgcgtccgagcggatctgttgagacattatgttgaccagcctggttatggtgatctggattggggcatgttcgttccagctataaaaggccaaggaactgaggagcagcagcacaagtggttaccactggcttacaagttccaaataattgggtgctatgctcagacggaacttggtcatggctcaaacgttcagggccttgaaacaactgctacattcgatccgaagactgatgagtttgtcatccacagtccaactctcacgtccagcaaatggtggcctggtggcttggggaaagcttacacccatgcagtggtgtacgctcggttgataactgaaggaaaggactatggcatacatggtttcattgtgcaactgcgaagcttagaggatcacttcncacttnctgggtgtacccctcgtgatattggtggaagttn

SEQ ID NO: 98481 - DNA, 548 bp, Zea mays
agatattatttaattaaaattgactgacctactcatatatgattgctcgtaccggtccggaattcccggctcgacccacgcgtccgaagacgcgtgagcggacgcgtggggaatatatgctactcgacaaaacgagaaccgtgatgagcgctgattatggtgttgctggcctcgaagcttcaaatcccatagacatgacaggcgaaactggaacgctcggttacatggcacctgcgggtctgaatggaaatccctacaacaggaaatgcgatggttacagcttcgggatctgtttgtgggagatatactgctgagatatgccatatcctgacttgagcttttctgaggtcacgtctgcagttgtccgtcagaacctgaagcctgagataccacgctgctgcccgagctctctatcgaacgtgatgaagcgctgctgggacgccaaccccgacaagcgacctgagatggccaagcggtgtcctgctggatgcgatcgacccgtctaaaggtggaggcatgatccctgtggaccaacggccaggatgcct

SEQ ID NO: 98482 - DNA, 530 bp, Zea mays
  unsure (1)..(530): unsure at all n locations
agggatgccagttaggctaccctagctctaaagaagatcacgaattgacttgaattccttggtcgacccacgcgtccgctgcttcttcacagtctgatgggagtggaatatgcgaggtgtctctccatacggagttaaggctatctggggcccagaatgctgatgccacacgtaccacaggagctggcacaaatgatgcattcaggaataagaaaaagcacgatcgctcttcatgcggttctaacacaccttcaagtagtgatgtagatgcgggcaatgttcctgaggaggacaatgctaatgagaaggcgaagcaagcctcctgcagcaactcttcagctggtgacactaaccaccgcagatttagaagcaatggaagcacaagtgattcatggaaggaagtttccgaagagggtcgtctggctttcgatgcgctgttcagtagggaaaagcttccgcanagcttttctcccccacaagcagtagactcgaatgaggttgccaaggaggaggatgatgaagtgaccact

SEQ ID NO: 98483 - DNA, 529 bp, Zea mays
  unsure (1)..(529): unsure at all n locations
tggatgccnnnttggtgcgtagagactcgaggacttattgaatgctctaccggtccggaattcccgggtcgacccacgcgtccggaaggcatcgccagcaacaagacgtttggcactaacaaaaacactccagccactctgcaagagatgccttcgtggttgacctctgaatatgtggcgaaagcgccattccacaccatgcaggtccttggctacaagctcttgtgttggaggttgacgggtcatatcctgaccagaaagccaaagcaaagattaccactaccagtaaagcaacaaatagcaaacctacaactgatgcactggcaatatcaagtcaagaatccagcaagctaccagtggcggaagacactcatctgcatggcgccgcagcaccgagaatccaccatgagtgctggtatcagaggctgtcaatgtcttgcagaaggagtgcacgcgtggccttgcaagtgcagcaggaggtgaagcangcatctnctcactagagccattctnctctggctttgattcc

SEQ ID NO: 98484 - DNA, 514 bp, Zea mays
ggagccaattggcggccctcgacacagaacatgacgtatctgctctaccggtccggaattcccgggtcgacccacgcgtccgcccacgcgtccgcggacgcgtgggcaaacttgtagaaggaacttaaccgatacattcccactgccgctgcatttggtggtgtatgcattggcgcattgaccgtcctggctgatttcatgggtgcgattggttcaggaactggtatattgctcgctgtgacaatcatataccaatacttcgaaacctttgagaaggaaagggcgactgagcttggtttctttggcttttgattagtagctgtggaaccttaacttggctatagctgaattttcttgtaagtacctgtagtgcttagccagttgtaacttaaagagttctcgttaggttgccttcttgcggccacaatcatgtagcagaatgtgcctgtgtttcacgttagcgtgggggtatgtgcatctgtccaaagagagtctgcaattttgcaacccgata

SEQ ID NO: 98485 - DNA, 529 bp, Zea mays
  unsure (1)..(529): unsure at all n locations
tggatgccanataggctttcatgagactacagatctgattcattgctctaccggtccggaattcccgggtcgacccacgcgttcgcccacgcgtccgctgcagatgtaaatgacatgatttctgaaaagttgatggtccaaataagggttaacgaaggcattgaagaagatatcccaccgagccaatatgccaggtgtgaagagaaaataactatgactccagctgccatctcaagggaagctggtcttccaggatatggtcctggtcctggagaaaactttcttcaggtcagttcaaggaatactagctgtgagcagagtgtgatactggctcctaccgctatcgcaagagaagttggtccaccaggatatgcgactggagaaaaccagcgcaatggggctccatggaatacaagttatgagcgaagactatttatgaatcctgtgaccagctcaagagcagtcagtcctccaggatatgggcctgaagaaagccgaggcagtggcatttcctggaatacaagcagtg

SEQ ID NO: 98486 - DNA, 531 bp, Zea mays
aagggctagactagtccatcgatgtactgctctaccggttcggaattcccgggccgacccacgcgtccgcccacgcgtccgcccacgcgtccgcacgtttcctgcctatttcaacgactcgcagaggggggccacaaaggatgctggggtgattgctggcctcaatgtgctgcgtatcatcaatgagccaaccgctgctgctattgcctatggtcttgacaagaaggcaaccagtgtcggtgagaagaatgtcctcatttttgaccttggaggtggtaccttcgatgtctccctccttacaattgaggaaggtatctttgaagtcaaggccacagctggcgacacccatcttggtggtgaggactttgacaacaggatggttaaccactttgtccaggagttcaagagaaagaacaagaaggatatcactggcaacccgagggctctccggcggctgaagaccttttgtgagagggccaagagaactctggcttccactgcccagaccaccattgagattgactcgctgta

SEQ ID NO: 98487 - DNA, 534 bp, Zea mays
  unsure (1)..(534): unsure at all n locations
agganatcncattagagtgcgaacgctgggacttctagctccctacgtactgtctgtaattgcttggtcgacccacgcgtccgacgcgttcgcccaggcattcgctgcagatgtttatgacattttgactgaaaagttgattgtgcaaataagtgttaactaaagcgttgaatgagatattccatctagccaatataccaggttttaatagaaaataactatgactccagcttccatcttaagggaagctggtcttgcaagatatggtcctggtacctgaaaaaactatcttgaggtcaggtcaaggaatactacctgtgaacctaatgtgatactggcttctacccttatctgaaggatagtttggccagcacgatatgcgactgggagaatccagcgcacaggggctacattgaattcaagattatctccatagctcattaatgaatctggtgagatgttaataaccatgctttctccaagataatgtccctgataaaagcctaggcaacggcatttcatgaatacaagcca

SEQ ID NO: 98488 - DNA, 522 bp, Zea mays
  unsure (1)..(522): unsure at all n locations
agggatgcananagtgtgtcccaccncttctactnccctagcgacggttcggaattcccgggtcgacccacgcgtccgcggacgcgtgggcggacgcgtgggctgactcgtgctggtggcttggcttctcgtccccctgcagttcgggaccggattcctgaggctctcacgtgttaagcttcgatggtgagcagatcgatgatgccctactcggatgttgagtaccgctgcttcgtctgcggcctcgtctgggacacggaccaccagtcgctgcataacgacttgaacatctatggcgaggtcctcctagccaacatcatcctccatccggacacgcacagtgcccgcggcttcggcttcgtcaccttctccacggaggatgcgatgcctaacgacatcgagggcatcaacagcaaggagctggactgtcgcaacatcaccgacaactaggtccactcccgctcagccgcggaagctgcggctgccgcagtacagtagcggacgtgaagctgcagctactcc

SEQ ID NO: 98489 - DNA, 525 bp, Zea mays
  unsure (1)..(525): unsure at all n locations
tgggatgccnngagtgctgtgccacgtactagagagatagtcatgcaccggtccggaattcccgggtcgacccacgcgtccggtgcagcagaacgatcggatctagcagaattctctcaacctcatcggcggcggcgaagagcgtgcggatcggagatggcgacaagcgggtggaggaggagagcggcggcgcgggccttctggagccacaccacggtgtacctgtggctcgcgctcgccgcagcagcactgacgctcgcccaggctaagaaggacctaacggaggttacccacaaggtctacttcgatgtcgagattgacggcaagcccgcaggtcggattgtcatggggctttttgggaagactgttcctaagacagcagagaacttccgagctctttgcacaggagagaaaggaattggcaagagtggcaaagctctccactacaagggaagtacattccacagaatcattcccagcttcatgctccaaggaggtgacttcactcttggngatgggaggggt

SEQ ID NO: 98490 - DNA, 530 bp, Zea mays
  unsure (1)..(530): unsure at all n locations
agggatgcnnnagtgtgcgccatgaaactctagaactatataggatctgctctaccggtccggaattcccgggtcgacccacgcgtccgcaggagaacggtctggtgccaattgttgagtctgagatccttgttgatggccctcatgacgttgatcgctgcgcttacgtcactgagacagtccttgctgcctgctacaaggctctcaacgagcaccatgtcctcctggagggtaccctcctgaagcccaacatggtgactcctggctccgactctaagaaggtgacacctgaggtgatcgcccagtacaccgtccgtacccttcagaggaccgtccctgctgctgtgcctgctgttgtcttcctctacggtggacagagcgaggaggaggccaccctgaatctcaatgccatgaacaagctcagcaccaagaagccatgggccctgtccttctncttcggccgtgcccttcaggcgagcacccttaaggcctgngctggcaaggtggagaacgtggagaaggctagagcg

SEQ ID NO: 98491 - DNA, 521 bp, Zea mays
  unsure (1)..(521): unsure at all n locations
tggatgcanttaggctgtcctagtactagaagtaccgtaggaacggtctggaattcccgggtcgacccacgcgtccgcccacgcgtccgtgtttccagaggaagttattgccggtcttgatcgtgctgtgttgaacatgaagaagggcgaggttgctcttgtcacaattcctcctgaatatgcatttggttcaactgagtcaaagcaggatcttgctgttgttccacctaacagcacagtaatatatgaagttgagcttatttcatttgtgaaggtgcggacatgactgatattcgtgtctgttctaaatcattgacctgtgtgcaactgcacatgactgatattcgcgtctgttctaaatcattgacctgtgtgcaattgcaaaattgatcaatataatcttgtcacacaggacaaggagtcgtgggacttgaacaatgaagagaagattgaggctgctggtaagaagaaagaggaagggaatgcattgctcaaatcgggcaaatatgctagagcttcca

SEQ ID NO: 98492 - DNA, 532 bp, Zea mays
  unsure (1)..(532): unsure at all n locations
tggatgcanaaagtgctgcttagctactacgcgggagtataaagtattgctgctaccggtccggaattcccgggtcgacccacgcgtccgccaaaaaatcccccattttcttcgaggcgattagagcgtgaaagacagggcaccggcagcggcgatgtcggggcgcggcaagggccgcaaaggtctgggcaagggcggagcaaagcgccaccgtaaggtgctccgtgacaacattcagggcatcaccaagcccgcgatccgtaggctggctcggaggggcggcgtgaagcgcatttcggggcttatctacgaggagacccgcggcgtcctcaagatcttcctcgagaacgtcatccgcgacgccgtcacctacaccgagcacgcacgccgcaagactgttaccgccatggacgtcgtctacgcgctcaagcgccagggccgaaccctctacggcttaggaggctatgctggatgcctcttctacttgctgtcagggatgcctgtttggtggtaaggttatttccgttagctc

SEQ ID NO: 98493 - DNA, 528 bp, Zea mays
  unsure (1)..(528): unsure at all n locations
atggatgcnnnaagtgcgctttagctactagggggagtatacgtgactgctctaccggtccggaattcccgggtcgacccacgcgtccggttgatgccattgacgagtatgctgttggtcagctcaaggagtttgagggcaagaagcttggctctgccaccaaggagggtctgaagcttgatgagactgaggacgagaagaagaggaaggaggagctgaaggagaagtttgaggggctgtgcaaggtcatcaaggaggttctgggtgacaaagttgagaaggtggtggtgtctgatcgcgttgtggactcaccgtgctgccttgtgactggcgagtatggctggaccgccaacatggagaggatcatgaaggcacaggccctgagggactcgagcatggcgggctacatgtcgagcaaaaagacaatggagatcaacccagagaaccctatcatggatgagctccgcaagcgtgccgaggctgacaagaatgacaagtcagtcaaggatctcgtgatgctgctgttcn

SEQ ID NO: 98494 - DNA, 530 bp, Zea mays
  unsure (1)..(530): unsure at all n locations
cgctgtgctagtcccagcncatgactggactgctcgtaccggttcggaattcccgggtcgacccacgcgtccgcggacgcgtgggcggacgcgtgggcggattcgtgggtggtcttgaagttggtctgacgggctatgcagatgcctactgcactggccttctgttggctcgccgtgtgctcaagatccgtggcttggatcatgagtacgacggcaatgttgaggccactggtgaggacttctctgatgagccagctgatgagaggaggccttgtcgtgctctcttggatgttggccttatcaggactacaacagggaaccgtgtctttggtgccctcaagggagcattggatggaggcctgtatattccttacagcgagaagaggcttgctggattcaagaaggacgacaagcagttggatgctgatacctaccgcacgtacatctatggtggacatgttgctgactacatgaagaaccttgctgaataagacccaggaaaagtccagggccacttgaatgcgtacatt

SEQ ID NO: 98495 - DNA, 520 bp, Zea mays
  unsure (1)..(520): unsure at all n locations
tggtgccgttaggctgactatgactagaggaantcatcgaacggtccggaattcccgggtcgacccacgcgtccgcaacctcaacaggcttgtgtcccaggtcatctcatcccttactgcctccctgaggttcgatggtgctctgaacgtggatgttaacgagttccagaccaacctggtaccctacccgaggatccacttcatgctttcttcgtacgctccagtcatctctgctgagaaggcctaccacgagcagctctctgtggctgagatcaccaacagtgccttcgagccatcttccatgatggccaagtgcgacccacgccatggcaagtacatggcctgctgcctcatgtaccgtggtgatgtggtccccaaggatgtgaatgctgctgtggccaccatcaagaccaaacgcaccatccagttcgtggattggtgcccgactggcttcaagtgcggcatcaactaccagcctcctagcgatgtgcctggtggcgacctggccaaggtgcagcgt

SEQ ID NO: 98496 - DNA, 522 bp, Zea mays
  unsure (1)..(522): unsure at all n locations
tggagcnntagtgctgcctagctctaaagcacgctaggacggtccggaattcccgggtcgacccacgcgtccgcccacgcgtccgattttgataacacactactagagttcttggtgagtgatttcaagaaaacgcgagggcgttgatctgtcaaaggatagattggccctgcaaaggcttcgtgaagctgctgaaaaggcaaaggttgaactttcatcgacttctcagacagaaatcaatctgccattcataacagctgatgcttcaggggcaaaacatttgaacattacactgacaaggtcgaaatttgaatctcttgtacacaatctgattgaacggactagagatccatgcaagaactgcttgaaagatgccggaatatctactaaagaggtggatgaagtacttcttggtggtggaatgactaaggttccaaaggtgcangaggtagtctctgaaatcttcggaaagagcccaagcaaaggagtgaacccagatgaagctgtggccatgggtgctgc

SEQ ID NO: 98497 - DNA, 524 bp, Zea mays
  unsure (1)..(524): unsure at all n locations
aggttgcnnnagtgctgtcctagctctacagcacactacgcatgctctaccggtccggaattcccgggtcgacccacgcgtccgcccacgcgtccgcccacgcgttcgcccacgcgtccgcggacgcgtggggttcgggatagaggtgcatggcaatgtgattggagcagtggaaacttgtttagagtcgtttcatcggtatcacaagtatctaaatttttcgcatcctactatcagctccaagattgatccacatacttgtggatgggcttttggaatgaacatttttgacttgatagcttggaggaaggcaaacgccacatcattgtatcattattggcaagagcaaaattctgacctattgctctggagaacaggaactcttcctgcaagccttttgacattttatggcctgatggagcccctagaccgcagatggcatgtcttgggtctcgggtatgatgtagacatagatgatcgtctgattgagagtgcttgctgtgtgcactataatggaaacatga

SEQ ID NO: 98498 - DNA, 524 bp, Zea mays
  unsure (1)..(524): unsure at all n locations
aggtgccnnaggctgtgctagatctacagcacatattgacgctctaccggtccggaattcccgggtcgacccacgcgtccggtcctgcgctccagcagctgccacagagacatcagagagcggtcctccttgtgagtctgagctgaagaggaggaggaggaggaggagaagcagcagcgcagccggaggagggagagcgaagatgcgccgcgtcgcgctgttgctcgtcgccgacgtgtgcgcgctggcggcgccggctgccgcggtcgtcactgacggtcttctcccgaacggcaacttcgaggatggcccgcccaagtcggcgctggtgaacggcacggcggtgtcgggcgcccacgccatcccgcggtgggagacgttcggcttcgtggagtacatcgagtcagggcacaagcatggggacatgctgctggtggtgccgcaaggcgcgcacgctgtgcggcttggcaacgaggcgtcgatccggcagcgcctggtcgatgcgcgcggcgcctactacgccc

SEQ ID NO: 98499 - DNA, 527 bp, Zea mays
  unsure (1)..(527): unsure at all n locations
atgtgactagtcctagctcatcantgnactgccggtaccggtttggaattcccggctcgacccacgcgtccggtcccttgatgcatgaaatttatgaagatttgactgcttgttgtcaaaaaaggcaacactgctgagttcttggataacactgaactttttttttggataaatatccttccctcagtgttgctataggcagtttctcaaaagcatcgcttagttttgcttgtaccttacgatagacaacgactattgtgcaatcaggtctaaggttcaaacgagtctcctggtctgttagatcatgatccaaccgtatatcatatttaacacttagacccttacatcaccaactcatgaagctttataaaaaacctaacaaaccacagtcatatctacccctaaggtctaattgcacctaaggatcaagagactcgcttgcacacttgcacctaaggtctaattgcacaacaatcggtgccccttactgcattacacaaatgacattttatttttaccccttccat

SEQ ID NO: 98500 - DNA, 541 bp, Zea mays
  unsure (1)..(541): unsure at all n locations
atatgatgtttttntgnnaattaggtggctgagccctccncactacgcactgccgtaccggttcggaattcccggctcgacccacgcgtccggacgtaatgggtcgtgtgccatacggattatcgtttctggataaacaggccgaagaaaggtcctgggacatcaacctaggatggttcttagagccagtggttcgtggtgactaccccttctccatgagatcattggctagggaacgactacccttcttcaaggacgagcagaaggagaagctcgccggttcctataacatgttggggttaaactactacacctcacggttctccaaaaacatcgatatctcaccaaactactcacctgtgctcaacactgacgacgcctacgccagtcaagaagttaacgggcctgacgggaagcccattggtcctcctatgggaaatccatggatctacatgtaccctgaaggcttgaaggatctccttatgatcatgaagaacaaatacgggaacccacctatctacttcacgggagacgggatcgg

SEQ ID NO: 98501 - DNA, 523 bp, Zea mays
  unsure (1)..(523): unsure at all n locations
atgtgcttgacctagtcactacgcacgctcgaccggtctggaattcccggctcgacccacgcgtccgctgtcacacacacacacacagacaagtggtttccaaagccaagtgtgtgtactagcaacgagctagctcgggcggcagcaggcagccatcatgtcggaggagaagcaccaccacttcttcaaccaccacaagaaggacgaggagcagtccgccagtaacgacgggtactccgagaccgaggtggtcaccgccaccggcgagggcgagtacgagaggtacaagaaggaggagaaggagcacaagcacaagcagcacctctgcgaggccggcgccatcgccgccggcgccttcgcactctacgagaagcacgaggcgaagaaggaccccgagcacgcgcacaggcacaagatcacggaagaggtcgctgccgcggcagccgtcggcgccggcggctacgtattccacgagcaccactagaagaagatggaccacatggactccnatgatgccagctgt

SEQ ID NO: 98502 - DNA, 542 bp, Zea mays
  unsure (1)..(542): unsure at all n locations
atgatattatgtanttaaagaattggctgagctagttgatgatgatctgctcgtaccggttcggaattaccgggtcgacccacgcgtccgatcacaccctccgagctcagctgaccttttctgcagctacaatcacagtcgatgaccagagcgagagctagctagagggccgtgaaaatgccgatcaataggatcgccctggggagccaccaataggtgtaccacccgggcgccctcaaggcggcgttcgctgagttcatctacaccctcatattcgtcttcgccggccagggctccggcatggccttcagcaagctgaccggcggcggcccgacgaccccggcgggcctgatcgcgacggcggtggcgcacgcgttcgcgctgttcgtggcggtgtcggtgggcgcgaacatctncggcgggcacgtgaacccggccgtgaccttcggcgccttcgtgggcggcaacatcaccctgttccggaggctcctgtactgggtggcgcaactgctggggtccaccggggcgtgcttcctgctccg

SEQ ID NO: 98503 - DNA, 526 bp, Zea mays
ggatgccctagtgctgtctagctctacagatactcatcgcacggtccggaattcccgggtcgacccacgcgtccgcccacgcgtccgggacatcaagggcacagataatggcttaccgaggttaactgcctggggcggttgaggcatccaaatttggtgaagttgatcggatattgctgcgaagatgaccatcggctgcttgtctacgagttcatgtttcgaggaagtctagaaaaccacttattccgaaagacagctacgccattgccctggggtactaggatgtcaatcgcgctgggagccgctaaagggctcgcttgcctccacaacgctcaaaggcccgtcatctacagagatttcaagacatcaaacattctgctggactccgattatactgccaaactgtctgactttggcctcgcaaaagatggccctgaaggtgatcagacgcatgtgtcgacacgggtgatgggaacctacggttatgcttgccctgaatatgtgatgacccgtcacttgactgctc

SEQ ID NO: 98504 - DNA, 524 bp, Zea mays
  unsure (1)..(524): unsure at all n locations
atggatgccnnnaagtgctaggcacgaatctagaagcaactcatgcgacggtccggaattcccgggtcgacccacgcgtccgatttatctacagatacggaatcataagatctaccgttttattgatgatccagtgcttcagcggtctacagtaagtgatgatgagcatctggcaggttataagctcccaaagttggaaaagagggtgaattacattcagattgtgcatcgtcatgaagatctggaccatggaaacaataacagcttgacatcttggaaaccgtacggtgttcctcttcttgcacaaatttctcgcaatgaaattgtgacgggttttgatatccatgagttggtccataaaatgcttgtgaccgtgctaaggaatacggactctctgcatttggctgttcaaagatcttgttccacaagaactcatagttatcataccgacagcagcaaatttcagcttctggtggttgatgatagcaacacagtcatttgaaaatccaatgatgctatccgga

SEQ ID NO: 98505 - DNA, 524 bp, Zea mays
  unsure (1)..(524): unsure at all n locations
tgaagcccnnnttgtgcgctcatgagataaagacacatgactgaactgcctctaccggtccggaattcccgggtcgacccacgcgtccgcgctggaccgcacgttcggctgcgggttccattcccggcaccagtacctgttcgggaagatggacatgcagatggggctggtgcgccgcaacttcgccggcaacgtcaccggctactacctgtgcttgcaaggcggggcgcacgacgagatccacttcgaggtcctgggcaacgtgttcggcaagccctacacgctggacaacaacctggtcacccaggggcataggccaccggaggagcaagttcagcttttggttcaacccaacgtcgacttgcacaactacttcatcatctgaaccccagcacgtcatcttcatcgtggacgacatgctcatcaggtacttccgcaacctgtatagcaaggtggtgacgttccccaagagccagccgatgcggctctactccagcctgtggaacgcggactactgcgcgacc

SEQ ID NO: 98506 - DNA, 591 bp, Zea mays
  unsure (1)..(591): unsure at all n locations
atggatgccnnnnnagtgctgncgttagtgactatagaaagctttatatncattgcctgctaccggtctcggaattcccgggntcgagcccaacgtcgtctcgcccacgacgtctcggtagcttggaagtagaaagctaacatgnncttgcaacaaatgctgtngnnctgcgtatgctcgagtgagactctataggagggggtttctctgcccatgtgatatgtagtcacggtgtgcacccgaactattggtgtccacttgctcgaagattttacctctccatgtaggaagtcacggagagctcgactgtttcggccatgtccggaaccttctacagctcagcaaanattggctcgttggaaaagggcacggctcaaaggccgtgatgaagtcttatgtcaaaacagttgtctgactacataattgcagcacttgttgaagcactgcacaaggagccagaaacagaaatgtgctcatccatgctggattctttaaacgagtgtatgcagctttcgggtcttttgctcgatgaagcccaagtacgagctatcatagatgagattaaaaacgtcattatagccagtgccaccc

SEQ ID NO: 98507 - DNA, 523 bp, Zea mays
aggtatgtccccaagtgctgactatgtatctgaagtatctcatcagccggtcctgaattcccgggtcgacccacgcgtccgcccacgcgttcgcccacgcgtccggagaaagatggcatctgggctgtgctagcatggctttgtattattgctttcaagaataaggacaaccttggaggagataagcttgtcactgatgaagatattgtccgtcagcattgggccacatatggtcgccattattacacacgctatgactatgagaatgtcgatgctggggctgctaaggagctgatggcaaacctagtaagcatgcagtcatcactttctgatgttaacaagttgatcaaggagatccggtctgatgtttctgaagtagttgcagctgacgagtttgagtacaaggatccagttgatggctctgtgtccaagcaccagggcatccgatacctcttcggagatggttcacgactggtgttccgtctatcccggaccggatctgttggtgccaccattcgtgtct

SEQ ID NO: 98508 - DNA, 541 bp, Zea mays
  unsure (1)..(541): unsure at all n locations
tggatgccnaagtgctgatctcagtctctaaagacatccctacgtactgtctgtaccggtccggaattcccgggtcgacccacgcgtccgggagggtggcgagaagaagggtaagaagaatgcaaagaagtcggtggagacgtgcaagatgcgacatctttaaggtgctgaagcaggtgcacccggacattggcatctcgtccaaggccatgtccatcatgaactccttcatcaacgacatcttcgagaagctggcggcggaggcggccaagctggcgcggtacaacaagaagcctaccattacgtcccgcgagatccagaccttcgtccggctcgtcctccccggcgagctcgccaagcacgccgtctccgagggcaccaaagccgtcaccaagttcactagcttctacgcgagcgatgcgacgtgcactcgtctnctcttcttgcagtagtgcaatagtagtacggttaggtgtgttgccgtggtggtaagtgccgctgtngttgctttctgggctgggctcggttgatgtgatttatg

SEQ ID NO: 98509 - DNA, 529 bp, Zea mays
  unsure (1)..(529): unsure at all n locations
aggatgtcctatngtgtgccgtcgatgaaacttatgcatcatgattgtactgcctctaccggtccggaattcccgggtcgacccacgcgtccgcccacgcgtccggacagctagcacgccggagctgggcctggtgcaaaggagaaggtgcgctggcagggaggatgggactggtcggtgtgcaaccgggagcaggtgccattgttcaaagaaaaggaagctaaggataaggaggtccatcaaagtccctgcaataagcaacaaggttgcagacattccagctgatgaattctcatggaggaagtatgggcagaagccaattaaaggatccccacatcctaggggttattacaagtgtagcagtgtgagaggctgccccgcgaggaagcatgtcgagaggtgcgtggacgacccctcgatgctgattgttacctatgaaggtgaccacaaccacaaccgagttctagcccagccagcctgatctttcaggctatcaattcaagatcggttctacagtcaccctgccttc

SEQ ID NO: 98510 - DNA, 539 bp, Zea mays
  unsure (1)..(539): unsure at all n locations
aggatgcccanagtctnaccatgagacctaagatacttattgtactgctctaccggtccggaattcccgggtcgacccacgcgtccgagatggccgaagatgggaactgtctattcagagctgttgctgatcaagtttatggagacggagaagcttatgacatggctaggcagatgtgtgttgattatatggaaagggaacgggatcatttctctcagttcataactgaaattgaaagttttacattatactgtaagaggaaaaggagagataaggtttatggcaacaatgttgagatccaggcatttgcagagatgtacaatcgtaccattcacatatattcctacagtacagagcccattaatatttttcaaggaagctataacacagacgttcctccaattagattaagttaccatcatgggtatcattacaattcagtgggtgatccccgaccgtagacaattggggcaagacttggatttaactcccttagagggaccaaatattgttacagggaccaagtgaaagcttgaata

SEQ ID NO: 98511 - DNA, 545 bp, Zea mays
  unsure (1)..(545): unsure at all n locations
tgatatagttagtttgtggcnaanaaaccactgataccttttganagccgcaccggtctggaattaccgggccgacccacgcgtccgcgcgtccccatcccaattcacaacgcattgtcgtctcccacaacacggtccactaaccgtggcgacagcctcggctcgtttgatccccgcggggagctctagttccgtcaagcgtgcgtaccggcgtccggatccgggaccgaagatgacggagtccctggtgcggaacaagccggggatggccagcatcaaggagatgccggtggtgcaggacgggccgccggcgggcggtttcgcgcccgtgcgcttcgcccgccggatccccacctcagggcccagcgccaccgtcatcttactcaccaccttcggtgctttcgcatatggcatgtaccaggtcggtcaggggaacaaggtccgtcgggcgcttaaagaagagaaaattgctgctcgcagtgctatactggcgatgctccaagcagaagatgatgaaagattggtcaagagtggaagaagtttcg

SEQ ID NO: 98512 - DNA, 523 bp, Zea mays
  unsure (1)..(523): unsure at all n locations
cgcgggtnnctgaaactagcacatgataggagtgctctaccggtcttgaattcccgggtcgacccacgcgtccgcaaaaagcgcccgattcgcctcgcaaaatctccgccgccatcacctacctactcacagaagttccgccttcctttcctccggcgcgcgccgcgcctgtcgccatggtgaagcgatggcttcccctcgaggccaaccccgacgtcatgaaccagttcatgtggggactgggggtccccgaggacgtggggttctgcgacgtgtacggcctcgatgacgagttgctcgccatggtgccccagccggtgctcgcggtcctacttctctacccccaggaccggagcaaggagtcccaagcttcagctacctcgtcggtggagaccaaggagcccagcaagaacgtatatttcacaaagcaaactgttgggaatgcctgtggcacagttggtattattcatgcactggggaaatgctacttncaagatcaaattangnttggnaaagggtcata

SEQ ID NO: 98513 - DNA, 541 bp, Zea mays
  unsure (1)..(541): unsure at all n locations
ngcggtcgctgaatgtctgaaggggagacagatggaacgctctccggaattcccgggtcgacccacgcgtccgcccacgcgtccggagatctggcgcacgaactaccttgtgcagctgagaggtccacttaccggctacaaccattggcaatgcgtagagattcagagatactcatgttaggaaagatgctgatggtgctggaacatgtgaccgagatatacatcctagagctgaacctgagcaatacttgacatccgatgatgcagctgaactcgcctattctggagcgcatgaattgcatgcactatcgatgcggacagctagagaaagcgatgatcctgtgagggctaagaattctgataaccgtctaggctacggtacccttgtcactaaagctagacatatgagtgaagactgttcagactagcagctgacttgaaactgagctattacaaccgcttcgagtatatttcagtcacgagcgctatgctatgtgctcaagtacgggaatgtactagggccctttttatatcgtgacac

SEQ ID NO: 98514 - DNA, 521 bp, Zea mays
  unsure (1)..(521): unsure at all n locations
gccggtnctnacgcatgcnctcgaatgtagatgcactgctcttccggtccggaattcccgggtcgacccacgcgtccgatcgagaccggctgcccgaccccggtccggcgatccctctgcacccctttctttgcgctgccagccccaatctctcgcatccctgtcaaccatggcggcgtcagcaggcggaggcgcggtgcgcgcgctgtcccagaaggagcaggacatacagatgatgctcgcggccgacgtccacctcggcaccaagaactgcgatttccagatggagcggtatgtctttaagcgtcgcaccgacggcatctacatcatcaacctgggcaagacatgggataagctccagctcgcggcgagggttattggtgccattgagaacccacaagacatcatcgtncaatcggccccgccctacgggcagcgtgctggcctcaagttcgcgcagtacactggcgcccatgccattgctgtggaggcacacccctgggaaccccccctttaacaat

SEQ ID NO: 98515 - DNA, 523 bp, Zea mays
  unsure (1)..(523): unsure at all n locations
atttgtgcttggattgtgatgtgggagacatagtataccgctccggaattcccgggtcgacccacgcgtccgcccacgcgtccgagttctaatctcaggtttggggggaaaaggcctcgcgggtcgcaaaccgctctctgttgatttgggatttgggaggcgctcgagttttcaggtaaaccatagtttagtgaccaatggctcgtactaagcaaactgctcgcaagtccactggagggaaggctcctaggaagcaacttgccaccaaggctgctcgtaagtctgcacccacaactgggggagtaaagaagcctcatcgttaccgccctggaactgttgctcttcgtgaaatccgcaagtatcagaagagcactgacctgctcataaggaagcttccgttccaaaggcttgtcanggagattgcccaggatttcaagactgatcttcgnttccagagccatgncngtgctttgcgcttgcangaggcttgcngangcggtacctttggggggttgggtctatt

SEQ ID NO: 98516 - DNA, 511 bp, Zea mays
  unsure (1)..(511): unsure at all n locations
atttgtctggcactgaatgggagtaggtggatacccgtctcgaattcccgggtcgacccacgcgtccgcccacgcgtccgcccacgcgtccgcccactcgtccgcaacttctttttttccacattcttctgatcaagaagggaatcagtacctatgactacatcattgccctgcgagagcaagagcaagatgatctgagtgggcagcagagtccacagatgtctcgtgtaagctcctacaccggactcagcagtactagctcctttggtccacttcgtcgtggttcatggtgcactccgccaaggctgtttcttgaggatcagtttgatgttattccatcggaagctgcttcttcgcataattctgctacgaagaggaaagaagaccaggggaagaggaagaagggctcaagggccgtgaaaataagcccatgggcattagctcgtcttaacgctgaagaagtttcgagggttgctgcaaaagcacggaagaaaggttttntcaaagtttt

SEQ ID NO: 98517 - DNA, 511 bp, Zea mays
  unsure (1)..(511): unsure at all n locations
ngtatgtgctggatgtggatgggggagatatgctaccggtccggaattcccgggtcgacccacgcgtccgcccacgcgtccgcccacgcgtccggccatgtggaggagggctttagcgatggtcctgttcatggctggcgccgcgctgctcgccggggctgccggcgccggcgcgcagcagggcgtgtggagcatcatcacccggcccatgttccagagcatgctgagccaccgcggcgacagcgggtgccagggcgccttctacacctacgacgccttcatcgaggccgccagcaagttccccggcttcggcaccaccggcgacgagcagacgcgcaggcgggagctcgccgccttcttcggccagacgtcccacgaaaccaccggtggatgggcgactgctccggatggaccgtttgcctggggatactgccgggtgaaggaacagaaacagacggacccaccctactatggacgaggacccatacagctaacccttttcataagtaca

SEQ ID NO: 98518 - DNA, 522 bp, Zea mays
  unsure (1)..(522): unsure at all n locations
agaagtgctcgggccatccacagatcngattgcacctgactgctccggtcttgaattccgggcacgacccacgcgtggcgtctgcacatgcagcgctcgaatatttggcttatgatcttgagattgcttaaaatgccgtggtacaatgatgactggtgagcgacattcatagctggtgcaacactatgttcctttaccggaggatcttcggcagataaatttgggcggacaagaacattcatcctggatgcagccccactggctgtaggtgcattcttgagcgcaacagctcaagatatccgcaccatgattattggtcggttgcttgctggaatcgggattgggatctgatctgcacttgtacccctttacatatctgagatatcaccaactgaaattctgggaacacttggttctgttaatcaactctttatctgcattggaattcttgcaactttgttagcttggatttgccttttggcaagaagatactgccctggtggaaaaggggggacaatgttt

SEQ ID NO: 98519 - DNA, 516 bp, Zea mays
ggcacagtgctcggatagttgatcgtggggggtaaggtgataccgctccggaattcccgggtcgacccacgcgtccgcttggtgtggtcaatggtgcgcttgaatatcttgcgaaggatcttgggattgctgaaaatgccgtcttacagggatgggtggttagcacatccctagctggtgcaacactaggttcctttaccgggggatctttggcagataaatttgggcggacaagaacattcatcctggatgcagccccactggctgtaggtgcattcttgagcgcaacagctcaagatatccgcaccatgattattggtcggttgcttgctggaattggtattgggatctcatctgcacttgtacccctttacatatctgagatatcaccaactgaaattcgtggaacacttggttctggtaatcaactttttatctgcattggaattcttgcagctttggtagctggattggctttggcaggaaaattctggctggtggggaaaaagaccatgt

SEQ ID NO: 98520 - DNA, 519 bp, Zea mays
  unsure (1)..(519): unsure at all n locations
tggactcgcgnntaccatgaacgcgaggtgatagcactgctctaccggtccggaattcccgggtcgacccacgcgtccgcgcggaggaggcacaggcgccgatctaaagacgatggccgccgcgggctcctcgccgtccttctcctcctcgagtaagcggctggaagggaaggtggccctcgtcactggtggcgccaccggcatcggcgaggccatcgttcgcctcttcatggagcacggcgccaaggtctgcatcgcggacatccaggatgaggccgggcagcagctgcgcgacgccctgggaggtgacgcgcagggcgccatgttcgtccactgcgacgtgacgtcggaggaggacgtgagccgcgccgtggacgctgcggcggagcggttcggcgcgctggacgtgatggtgaataacgccggcgtgacgggcaccaaggtgacggacatncgnaccgtggtacttcgcgggaggcgcgcagggtgctcgacgtcaacggttttgggcactgcgtg

SEQ ID NO: 98521 - DNA, 512 bp, Zea mays
  unsure (1)..(512): unsure at all n locations
ggacgggtggtgtggggggggggagggaatgctgtaccggtccggaattcccgggtcgacccacgcgtccgactagttctagaccgcgctctccgcctgctccgtcgcgaccaagctcatctcctccgcattccgccgctgcagaggcaagcaccaggacagggcctcccccgacgatgatgccgctgcgaccagagacggcggatgtcgcgccgacggcaggagggacctataatgtactgcagccgcactatttttgaggatgctactcctgaactggttagagatttcttctgggatggtgattttcgtctaaagtgggatcccatgcttgcatattgcaaatctttggatgagttccctcagaatggagcaacaattgtccactggataaaaaagttcccgttcttttgcagtgaccgtgaatacatctttggaggacgcatatgggaaatctgggaaggacttactattggngttactaaagggtgttttnccccccatatccatcc

SEQ ID NO: 98522 - DNA, 522 bp, Zea mays
  unsure (1)..(522): unsure at all n locations
agggagcgcgtntgaatgacatagatcactaccgacctgctctaccggtccggaattcccgggtcgacccacgcgtccgaggatcctgatgaagtacttgtgaaatatgaggcccgtctggaagatggtactgttgtatccaagtctgagggggttgagtttactgtgaaagatggctacttttgtcctgccctggccaaagctgtcaaaaccatgaaaaaggcagagaaggtgctccttacagtaaagccacaatatggatttggtgagaagggtagaccagcagctggagaggaaggtgctgtgccgccaaatgcttcgctgctcattgaccttgagttgatttcatggaagactgtcacagaaattggggatgataagaaaatccttaagaaggttctcaaggagggagaaggttatgagcgtnccaacgagggtgcttgtgttgaagtcaaaattatcggaaaagcttcangatgggcgcggtgtttacaaaggaangggggcccccaatgactaaaa

SEQ ID NO: 98523 - DNA, 524 bp, Zea mays
  unsure (1)..(524): unsure at all n locations
agggaaggtgctaggcatcgctcatgaatgcactgctctaccggtccggaattcccgggtcgacccacgcgtccgggcccccgccgccgccgacggcttcccggtctccccggacgcctacgcgccctcccccttgggcatgccccactccaacggcgacctccacgacgaccctttcgccgcatctgctgactccaacggtgggcccatccttccgccgcccaccgagatgggccgcgaggagggattcctgctccgcgagtggcgccgacaaaatgctattcaccttgaggaaaaagagaagaaggagaaggagctgaggagccaaatcatcgttgatgctgaagagtttaagaaagcttttgttgagaagagaaagctcaatgctgagacaagcaagggccaaaaccgtgacagggagaagcttttnctagcanaccanggaaaagttccatgctggtgcggataaggcaatactggaaaggcgatatctggacttattccacaatttggggaagatggta

SEQ ID NO: 98524 - DNA, 523 bp, Zea mays
  unsure (1)..(523): unsure at all n locations
aggcgaggtggatagcactgcacggaggagttaagtgnatacccctctggaattcccgggtcgacccacgcgtccgcccacgcgtccgagaaacggcaacgcaataacgcaaagattcggctgacaatggggaaggggttcgcgtcgtacttggcgatgaagacggggccagagggcggcgacggcgcggcggcggcggcgcagcaggcgctcatcgacgctgacctgcggaacctcgccgtcgccgcgcgaaagctcgccaaccacgccttcgtcctcggcggcgggttggggttcggcacttctttcctcaagtggctggccttcctcgccgcagtgtatctcttgatattggaccgcacgaactggaagaccaacatgctgacagctctcttggttccttacattttcttcactctgcctaatgtgctgctttctatgatcagagganaggtgggggaaatggattgccgattatttgcttggtattctgcgactatattntttttttntccgcgctact

SEQ ID NO: 98525 - DNA, 511 bp, Zea mays
  unsure (1)..(511): unsure at all n locations
aggagggcgttaatggaatgggggtttatgtaatgctgtaccggtccggaattcccgggtcgacccacgcgtccgagacacccaagaaacacacagaagcgaggagcactacttgttggttggattctcttcagtctagcagctagtccagttaagtttcagacacacatggggagcattggcagaagcacggccaactgcgccaccgtgccgcaaccgccggcgtcgacagggaagctcatcacgatcctgagcatcgatggcggcggcattcgcggccttatcccggcgaccatcattgcgtacctcgaggccaagctccaggagctggacggcccggacgctcggatcgccgactacttcgacgtgattgccgggacgagcaccggcgccctgctcgcgtcgatgctggcggcgccggacgagaacaaccggncgctgttcgccgccaaggacctnaccacgttctacctcgagaacggcccaaagatcttcnccccccacagaaaag

SEQ ID NO: 98526 - DNA, 521 bp, Zea mays
  unsure (1)..(521): unsure at all n locations
tgtttgggctggattgcgttgggagtttaatgatcgctctaccggtccggaattcccgggtcgacccacgcgtccggaagaagctttccgcggcgaagaagccggcggcgcaccctccctacgctgagatgattgtagaggcgatcgctgccctcaaggagaggaaggggtcgagctcggtggccatcagcaagtacgtcgaggggaagcatggcggcaagctccccaccaacttccgcaagcagctcactgtgcagctgaagaagctcgctgccgccggcaagctgacgagggtgaagaactccttcaagctgccggccaccgacgccaagcccaaggccgtcaagcccaaggcacccaaggccgcgcccaagcccaagccctcgccgaaggcgaaggccaagaccgctgcgaagcccaaggcggcgtcgcccaaacccaaggccaaggccaaggcccaagcctgtcgcttcctgtccgncgcgtncgcccaagnccccgncgggggggggcgccctccc

SEQ ID NO: 98527 - DNA, 521 bp, Zea mays
aggattgtgtgtgagcatggaatgggggtatagtggataccgttccggaattcccgggtcgacccacgcgtccggtcgcttccagccgccgccgcgtccgcctcgccaagcgcagcagccgccgcagcacatcgctctcttgatctcagccatggcggaggtggagcagcaacaggacacgccgaagctcttcaaccgctggaccttcgatgatgtccaggtgaacgacatctcgctgaacgactacctcgctgtgaacgcgacgaagcacgcgatgtacctgccgcacaccgcggggcgctactccaagaagcggttccgcaaggcgcagtgcccgatcgttgagcgccttacaaactccctcatgatgcacgggcgcaacaacggcaagaaggtcatggctgtccgcatcatcaagcataccctggagatcattcacctgctcaccgatgccaacccccatccagggtcgtcgttcgacgcgatcattaacagttggaaccccccggggttgaggatcc

SEQ ID NO: 98528 - DNA, 529 bp, Zea mays
  unsure (1)..(529): unsure at all n locations
ntggaccggcntntnccatgattttgtatgatgattgcatctgctctaccggtccggaattcccgggtcgacccacgcgtccggaaatcgattcccccagcatctgatctcttcggtgctagagaaatataggccgccgccgcctcctcctcattcggtgaaaggtgcgcagttagggttgggagatctcttgcctcacgacacgagcagcagaatttgtcgagggccgctggttgctgcgagaggtccgggccttcgtgggatcttgaaaattgaatgttctaatggagtccaagggtggcaagaagaagtctagcagtagtcgttcctccctgatgtacgaagctccccttggctacagcatcgaggatatccgccctgcaggcggcatcaagaagttctccgctgcttactcgaactgcgcgaggaagccatcctgatatctctggtgtcatccccatcctaagtagcgtagaaaaccaccttgcaattttcaattttgaacctccctttaaaaaatcccttcggc

SEQ ID NO: 98529 - DNA, 548 bp, Zea mays
atggaatgtgcggctcccatgaactcgttgtatatcatcatctgctctaccggtccggaattcccgggtcgacccacgcgtccgcccacgcgtccgcaaaaaacccgtatgaattaaagccattgtctttgtctcagggggaaaggtgctttcacacattcgggtaaaaggcgtaccttcgagacataagatcatgatctctctacgcatgtcagcacgtccttggactacatgctagtaggatcaaaggtcgtctatggtgttccaaaacatggaaagaagaagaagtttatggaagtaagcaaacattatgatgcaggccaatctgacaagatttctgagggcaattcatctaacagattcgtgaaacatctgatgccacaattgccaaggccacgtgaaaatgcttccaaagttgaccctattagaggaaagaaagtaggtgaaacaaggtctagattacctaaaccctacgaagtccccacaatgttttgaacctagccagtggttcctggaaaaggatttcctgtggccccccttatccaaac

SEQ ID NO: 98530 - DNA, 524 bp, Zea mays
  unsure (1)..(524): unsure at all n locations
aggattggcgntntccatgaatgaggaggagtaagcactgctgtaccggtccggaattcccgggtcgacccacgcgtccgcccacgcgtccgaagcaactgaagatcagctgcaacctaaacaatgctgcctgcaaactgaagttgaaggattacaaggaagctgcgaagctttgcaccaaggttctggaactagacagccaaaatgtcaaggctctctacaggagggtgcaagcttacattcaacttgctgacctagagctagcagaggccgatatcaaaaaggcactggaaatcgatcctgacaacagggatgtcaagttggaatataagatcctgaaggagaagatcaaggagtacaacaagaaagacgccaaattctacagcaacatgttcgccaggatgacaaagtacctttggggtgggaggatggtgtggtgaagcgaagggataaaaaccaccgatttctgctggccaaaggaattttgcccggtggttaaactctttgggggcctttttcggatc

SEQ ID NO: 98531 - DNA, 519 bp, Zea mays
  unsure (1)..(519): unsure at all n locations
tgtcaggcgctggcaatgacacgtatgcanatgcatnnncnttccggntcggaattcccgggtcgacccacgcgtccgcccacgcgtccggttcggctgtgtgcaccaatgttaagggggagctggggagcgggcctgcccaagatgagcaggtgaagaagaagcggggtaggccaaggaagtataagcctgatggggcggtgactctcgggttatcaccctcttcatcattaacacctcactcggccagcttggggatgggaaccatgattagtgctccaggttctggatttgggtcggagggatcaggggcttcaggcttgggtgcgccatcagagaagcgtggcagggggcggccacctggctctggaaagatgcaacagttggcttcgcttggaaagtggtttctaggctctgttggaactgggtttactcctcatgtgattattattcagccaggagaggacgtttgctgccaagaataatggccttctcacaancaaaaaaggggcccaaaga

SEQ ID NO: 98532 - DNA, 516 bp, Zea mays
  unsure (1)..(516): unsure at all n locations
tgtacgtnctggcatggatacgatatgcactgctctaccgctccggaattcccgggtcgacccacgcgtccgcccacgcgtccgcccacgcgtccgcggacgcgtgggtgcgcctctacatttcttctctctctgctcctccgcctccgcctgatccatccaagacagggatcgccatgtcggactcggaggagcaccacttcgaatcgaaggccgacgctggggcgtccaagacctacccgcagcaggctggcaccgtccgtaagaacggcttcatcgtcatcaagaaccgtccctgcaaggttgtggaggtttctacctccaagactggtaagcatggccacgccaaatgccactttgtcgccatagacatattcaatgggaaaaagcttgaagatattgttccttcatcacacaactgtgacattccgcatgtgaaccgtactgagtatcagctgattgatatttctgaggatgggattgtgagccttcttacttcaaaannnaatggaacac

SEQ ID NO: 98533 - DNA, 521 bp, Zea mays
  unsure (1)..(521): unsure at all n locations
atggaactggtnctgtgcactgatttgtggagattattgaacgctcgccggaattcccgggtcgacccacgcgtccgcccacgcgtccgcccacgcgtccgcagaaacgagagggccggagcagccgcagtcccggcgatcccgccgccggtcgccctcatacttcctcgtcactgccttcgtttctctttccaacaatcaagatgagccgtggcggtagcgcgggtggtggtcaaagttctctgggttacctctttggaagcggtgagccccccaaaccagcagtggcaccagctgtaagtgctccacctgctgctgcaggtgctccacctgctgagaaaccacctgctgcaaagcctgatggcaccagtcagattgctgctggggttaccagccaaaccaataactaccacagggccgacggtcagaacaccggaaacttccttacggaccgtncttcgaccaaggtccacgcttgctcctggcggtggctcttccctgggattaaccccctgtttggt

SEQ ID NO: 98534 - DNA, 520 bp, Zea mays
  unsure (1)..(520): unsure at all n locations
tggattggnnnnnnnnnactgaaaatgactgtcatagtattgctctaccagtttccgggtcgacccacgcgtccggtgtgaacctgctggtgatatccttgtattccttacaggagaagaggagattgaggatgcatgccggaaaatcaacaaggaaactaataatatgggagatcaggttggcccagttaaagtcgtgcctttgtactccacactgcccccagccatgcagcagaagatttttgaacctgctcctgccccattgaaggaaggaggtcctcctggaaggaaaattgttgtgtccaccaacattgctgaaacatccttaactatagatggcatagtttatgtgatagacccggggttttccaaacagaaagtttacaacccaagaataagggtggaatcccttctggtgtcacccatttctaaggcaagtgctcatcagagagctggtcgtgctggacgaacacaaacccgggaagtgttttaggctatacacgggggnnaagaagagttt

SEQ ID NO: 98535 - DNA, 524 bp, Zea mays
  unsure (1)..(524): unsure at all n locations
tgcaaggnnnnnnnaatgaancactaggctcatcgcactgctcgtaccggtctcggaattcccgggtcgacccacgcgtccggttagtccaaaacttgcttgttcttcgatttgccaaccgattggtcttgcctctttggaaccgcgacaatattgataatatacagattgtattcagggaagactttggtactgaagggcgtggaggatattttgaccaatatggaatcattcgtgatatcattcagaatcatttactgcaggttttgtgtttggttgcaatggaaaagcctgtctcccttaagcctgagcacatcagagatgagaaagtcaaggttctgcaatctgtgaaccctattatgcctgaagaggtagtccttgggcaatacgatggctacaaggatgaccctacagtgccagatgactcgaataccccaacttttgcatctgctgttcttcgggtacacaatgaaaagatgcggaagggtgttcctttcattcttagaaaagggccctggtaaaga

SEQ ID NO: 98536 - DNA, 532 bp, Zea mays
  unsure (1)..(532): unsure at all n locations
gtggtnnnctngtccgcttgacgcctatgatntctcgcatatatcgcagagctcgtaccggctcacgcgtccgaccagcccagctcgctcgtcccagctgatcttgtcgagcacctagtttcgacctgctcgagcatcagtgtagagtgtcggtaggtgtctgtctctcttggtggctggttgcaacggtcatggcgacgtcgtctcgtcgggtgcccttgctgctgctgtgcctgggcgtgctggtgtcctgctccttcgcggcgggcagcttggaccaggagctggacatcacgtggggcgacgggcggggcaaggtccttgacaacgggcggctgctgacgctgtcgctggaccgcacgtccggctccgggttccagtcccggcacgagtacctgttcggcaagatcgacatgcagctgcggctggtgccgggcaactccgncggcaccgtcaccgnctactacctgtcgtcgcagggcggcgcgcacgacgagatcgacttcgagttcctgggcaacgtgtccggcga

SEQ ID NO: 98537 - DNA, 534 bp, Zea mays
  unsure (1)..(534): unsure at all n locations
cgtccaggcnattttcctatgccaagcaaagccacagtcttattggctcggaacctttgggctgatttatgtgcttgtttatgtgcttgtttatgtgcttgcttatccgcttgtttatgtgcttgcttatgtgcttcgttatgtccctggcatccgatcgtttcgatccgcatccacaagaagaatggaaaattcgtcgttacctaacacggaattggcgtaaccgtcggcccccctagcgaggacagtgccaaaccaggcgactcggacgcgaacgactaggaacccaccgaagtcataaaggagttaggttccattcctacggccgtaaaacccgacggtacctccgggtcaggtccctaggaaacactcgccgggaacgtaatattcgcgcggcacaatacggcaaaataaggctctactagcgatttcgcccctctcactcggcccaattgatacgtcggcgaaggagaaggcggcgaaaccgcgcccggcggaacggacctcagctatcataagggcgactatattcac

SEQ ID NO: 98538 - DNA, 535 bp, Zea mays
  unsure (1)..(535): unsure at all n locations
agcgtnnctgacgtctagctgacttgacttagntcacatcgattaccgtgtcgactcacgcgtccgnccacgcgtncggtcactgtatcagttctttatgcacttctgggttttggtggcaagtttgggtgttgaaggcaaggaaaggggttacattcacgtgtaaaacgcctcgtaaatgaatttgatcagatcaagtcaatctctgctttcaaggatgttcacagtaatactggcatctttggaatccatacatctactgatgcatcatttgttcctaaagctattgacctagcagccagagagctcatttcccttgcaactcctggacaagttgaccaaagccaactggaccgtgctaaagcctcagctaaatcagcgatactggcgaatttggaatcacaggcatcactaacagaggacattgggcgccaagatttggcatttggtgaaaagaaacctgcttagcaccttctcaaggctatagatggcgttactatgaaagatataacctctgtgcttaaaagatcattta

SEQ ID NO: 98539 - DNA, 542 bp, Zea mays
  unsure (1)..(542): unsure at all n locations
cggggggctcgattactagacagtgaagtanacagatctcatcgatttctcgggtcgactcacgcgtccgatcgacgcggttcggttccagtttcactcttactgccgtctcggctacctcccctgttccgggcttcgtcctcgcgtgccaggctgccatggccgcgacgtcccccttcgactgcgtcctcctagacctcgacgacaccctgtacccgggcgacaccggcatcggcgcggccctgaggcgcaacatcgacgagttcctccaggccaagctcggcgtgtcggccgacgaggccgncgccacgcgcgccgagctcttccgcgcgcacggcagctccctcgccgggctcatcgcgctcggctacgacgtgcacccggacgagtaccacagctacgtgcacggcaggctaccgtacgacaggatcgcgcgcgacccgcagctggcgcggctgctgcagagcatcccgcagcgcaaagtgctgttcaccaactcggaccgcgcgcacatggagcgggcgctggagcggctgggcgtn

SEQ ID NO: 98540 - DNA, 519 bp, Zea mays
  unsure (1)..(519): unsure at all n locations
cgcttgatgcatcgagtccgttatcangtactgatgtaccgacttaggcgtccggccagacgtacgctgcgcggcggtgacgattttggcgcggttcggtttctaactgctgtgggagtccctatgcaggcgcagctaccacctgtaccagatggagtgcatgcagaacctgaacgcggtgtgccagtactacccgccgtgcccggaacacgcaccgaaccttgggcgtcaagaggcacacggaccctggcttgttcaccatcctcctgcaagacggcatgggcagactgcaggtgcgccttggcatcaacttgcagagcggccgatgctgagtagacatcgtgtcctggcctggggcgctcattgtcaacatctgtgatcttctgcaactcgtgaccaatgaccggttcaagagcgtggagcactctgttccatcctacaagagcagcgacactgcgagagtctaccaggcgtccttcttcaacacggacgtgatgaggttcgagaggatgtactgcg

SEQ ID NO: 98541 - DNA, 542 bp, Zea mays
  unsure (1)..(542): unsure at all n locations
atgggtnnnctcgtcngttcctgcatcatatcgatgtacagatccctactatttactgggtcgactcacgcgtccgcccggaaggccggaacccacctgctgcgcatctgcaagcctcgagttgagctcttccacgggcgctgtggagatggcggcgaatctggaggacgtgccgtcactggatctgatgcacgagctgctccgncgcatgaagtgcagctccaagcccgacaagcgcctcatcctcatcggtccacctggctctggaaagggaactcagtctcctattatcaaggatgaatattgctcngtgccattagccactggtgacatgctgagggctgctgtggcggccaaaacacctctaggtatcaaagctaaagaagctatgaataaaggagagctngtttcagatgatttggttgtgggcattattgatgaagctatgaagaaaccctcatgccagaaaggtttcattcttgatggcttttctagaactgtgactcaagcacaaaagcttgatgagatgttggcaaaacaag

SEQ ID NO: 98542 - DNA, 543 bp, Zea mays
  unsure (1)..(543): unsure at all n locations
agcgtgnactcgacgtccatgctgctcactgagtactgactccctacgtatttactgggtcgactcacgcgtccgcacagagcatgacccctcgtcccatgaattttatgttgactggtcctgtcacaatcctgaggtggtcattcgtcaggaacgaccagcctaggtttgagacatgctaccaaatagctcttgcaatcaaaaaggaggttgaggatcttgaggctgctggtattcaggtgatccagatcgatgaggcagctctaagggagggtctgccactacgcaagtcagagcatgcattctacctggactgggctgtccactctttcaggatcaccaactgcggagtccaggacaccacccagatccacacccacatgtgctactccaacttcaacgacatcatccactccatcatcgacatggatgccgatgtgatcacgatcgagaactcccggtctgacgagaagctactgtccgtcttccgtgagggtgtgaagtacggagctggcattggccctggtgtctacgacatccacn

SEQ ID NO: 98543 - DNA, 527 bp, Zea mays
  unsure (1)..(527): unsure at all n locations
tattttcatcagaaatagaagtatcgctcggcctggaattcccgggtcgacccacgcgtccgataactgggatcatctcgaaaaccatcttttagaaagggatgcttgaagtgtacaactctttgagcgaggaaggcaaaaaggagttcaacaaggcttatagcgcatcgttttacccatgcatggatatactctacgaatgctatgaagatgtggcctctggaagtgaaatccggagcgtggtgttggctgggcggaggttttatgagaaagagggcctcccagcttttccgatgggcaacatcgaccaaactcgcatgtggaaggttggtgaaaaggtgcgctcaacccgttcggaaggtgatcttggcccgctccatgccttcactgctggagtgtacattgccctgatgatggctcanattgagatcctgaggaagaaggggcactcctactctgagatcatcaacgagagcgtgattgagtcggtggactcgctgaaccccgttatgcacgcccggggggtt

SEQ ID NO: 98544 - DNA, 536 bp, Zea mays
ctggctgtccagctcctcttcgattgacccactgcacctgtttggaattcccgggtcgacccacgcgtccgcaaagaccacttcccgtcttcctcctgtggcctgtctgtcatctggctctgaaacgatggcagtcctgcaagttgctgctgctgcccctccccctgtctctgtgattgggttcgagggatttgagaagcgccttgagatcagcttctctgaggcacctgtcttggctgaccccagcggaaggggactgcgtgcgctctcgcgtgcccagatcgactctgttcttgaccttgctcggtgcaccattgtgtccgagctctcaaacgaggacttcgactcttatgtcttatctgagtcgagcctgtttgtctacccatacaagattgtgatcaagacctgtggaactacaaagcttctgctcgctattccgaggatccttgaacttgctgaagagctcctgttgccactcgctgcagttaaatactcccgtggaacggtcatattcccttgagcacaggctttcccac

SEQ ID NO: 98545 - DNA, 541 bp, Zea mays
  unsure (1)..(541): unsure at all n locations
agcttgcctagtagggatatgattgtatcaactcntaccggtctcggaattcccgggtcgacccacgcgtccgcccacgcgtccggagccacttggtgtttgcgctgggatatgcccatttaattttcctggtatgattcccctatggatgtttgccatagcagttacgtgtggcaatacttttggtcttaagccatcggaaaaggacccaagggctgctatgatgcttgcggagctagcaatggaagctggtttgcctaagggtgttttgaacatcgttcatggcaccaatgatgttgtcaataatatttgtgacgatgaggatattaagggctgtatcttttggntggttccaatacagctggtatgcatatttattctagagcatctgctgcaggcaagcgtgttcagtgcaataatggaagcanagaatcatgcaattattncttcccgatgctgatagagatgctacattgaatggccctattgctgctggatttggtgcaacagggcaaaggtgcatggcaatgagcactgctgn

SEQ ID NO: 98546 - DNA, 530 bp, Zea mays
  unsure (1)..(530): unsure at all n locations
atagtggcatatgaatattgagtattcgctcgtaccggtctcggaattcccgggtcgacccacgcgtccggtgcaaagaaaaggattggctgtggttgattgttcctgggcacgtttaagtgatgtcccttttgtgaaactacgttgcggtgctcctcgtctcttaccatggttggtagcagcaaatcctgtgaactatggccggccatgtgaactggcatgtgtggaagctttatcagcagcccttataatatgtggggaggaagaatccgcacatttgctggttgggaaatttaaatggggtcacgcattcttggctctaacagagatcttcttgaagcatacttccaattgtgaaatggagcttgagatatcaatgtgcaaaagtcatggttatcaagtaactcgagtgtttcaaagccacctgtaaacggggcanaggaatcacggcataacaaggacgagggatctggaggtgattcagacgatgacttgccccctctcgagaagaatatgaaccacctgaacct

SEQ ID NO: 98547 - DNA, 528 bp, Zea mays
  unsure (1)..(528): unsure at all n locations
agaactgtggcctgtaggcgtaagaggagtgatgctactcggtctggaattcccgggtcgacccacgcgtccggatggcttttcctcccccttcggttcgggttcgggttcgtgaggatctgcggggttcggaggcgtgggtgagcggatcgagatggccgcgtcagatgttgagtaccgatgcttcgtctgcgggctaggctgggccacggacgatcacttgcttcacaacgtcttgagcacctacggcgaggtcctcgagtacaagatcatcctcgatcggcagacgcataagtaccgcggattatgattcgacaccttctgcacggatgatgcgatgcagaacgccatcgagggcatgaacggtaaagagctgtactgctcgaacatcaccgtgaacgagggccagtcccgcggaggtcgtggaagcgagcgcggcggagggtactgatgttgccgtagacgcngaggctacggcggtggacggcgacgtgatggaggcagcggctaccgggttgccgcctgtac

SEQ ID NO: 98548 - DNA, 528 bp, Zea mays
  unsure (1)..(528): unsure at all n locations
ngaatatctgtattggtgggaggaagaagatgatttactcggtccggaattcccgggtcgacccacgcgtccggtacaagactttctctgaccactcgcccgtgctccagttcaccaacttcaccgcaacgcaggcacttcttgacgaaattggtggcagcacgtcgtcctgtatccatgtcatcgattttgatcttggcgttggaggccagtgggcttctttcttgcaggaacttgcacactgccgtggcgcaagtggcgcagctctgccgttcgttaagctcactgcctttgtatcagctgcttcccaccatccactggagctgtgtcttgcgcgtgacaacattgcacagtttgctgctgaccttggaattccctttgagttcagtgctatcagtgctgatatgatcaaccctgcagaattcatttctgccgctgatgatgaagatgtaagttgtggccttccgactgggtgctctgctcgtgcaccaacacttgcagcgatcctttggttggtgaaacaactac

SEQ ID NO: 98549 - DNA, 531 bp, Zea mays
  unsure (1)..(531): unsure at all n locations
tatgtgatatgatatacgaaagattcgctctaccggtctcggaattcccgggtcgacccacgcgtccgtgttcctgctacaaggaaggaagatgtaactgctgatagtaggaagaccaagaatatcagactatatgttaagcgtgtattcatatcagatgactttgatggagaattgttcccaagatatttgagctttgtgaagggtgttgttgactcaaatgaccttccattgaatgtttctcgtgagattcttcaagaaagtcgaattgttcgtataatgagaaaaaggctggtgcggaaaggccttgatatgatacttggcatttcttgcagtgaaaatagagatgattatgaaaggttctgggagaactttggaaaaattttaaagctgggtgccatggaagataaggaaaatcacaagagaattgctccttttgtgcgcttcttctcttctcaaagcaacaatgaattaattaagctggatggatatgtggaaaacatgaaacctgagcagaaggacatttacttn

SEQ ID NO: 98550 - DNA, 522 bp, Zea mays
  unsure (1)..(522): unsure at all n locations
ngagatgtgtccagtgggtgagggaaaagtgatggttcgtctcgaattcccgggtcgacccacgcgtccgcaagattgataggcgatccggcaaggagctggagtatggagcccaaatttctcaagaacggtgatgctggtatggtgaagatggttcccactaagcccatggtggtggagaccttctctcagtatcctcctcttggtcgatttgctgtccgtgacatgaggcaaacggcgtctgtcggagtcatcaagagtgtggagaagtatgacccaactggagctcatgtgacgaatgctgctgccaagaagaaatgatctatctggctggtgacgaatgctgctgccaagactaaatgatctatctgtctggtgctgtgcttgcttgatggttacctctaggtagctttaaatatctcgtcttgtcgacattcttgcatgtgtcagctgtacaagtaatctatgaaggcaattgtgtgcctgtcatgaattattatgacgcttcgttgaaaccgtggt

SEQ ID NO: 98551 - DNA, 528 bp, Zea mays
  unsure (1)..(528): unsure at all n locations
ngaatatgtagattgggggagaggaagatgtattactcggtccggaattcccgggtcgacccacgcgtccgcccacgcgtccggacgaactagaagcttatcgccaaattcactttcctgtgttgtcagaactcaagaagatgacaaagttgccctctgctgctttcttacggtccgaaggcaaatgtccccttgcacctgaagaggctgtgcttatgctagcagctattggtttcaagcgcagcacaaatatatacgttgcaggtgctgaaatttatggagggaaggataggatggctgccataagtcgtctttatcctgctttagtaactaaagaaacccttctgtctccatcagagctcgaaccatttaggaacttctcatctcagttggcagccctggacttcattgcatgcgcagctgccgatgtatttgctatgactgacccaggaagtcaattctcttcccttgttcaagggtaccgcatgtactacngtgggtgggatcttnccacgataagggcaaaca

SEQ ID NO: 98552 - DNA, 532 bp, Zea mays
tagtgataaagcattaaagagtgctcgcccggtctggaattcccgggtcgacccacgcgtccgatccattccacacaaccaccactgctcttgctcccagcccgccgcaggagttgccagatctgccccggtcacaggagctccgactccgagccctctccaatggcggttaaggtctacgtcgtgtactattccatgtatggacatgttggcaaactagctgaagagatccagaaaggtgcctcgtctgttgaaggtgttgaagctaaaacatggcaggtccctgaaaccctccctgaggaagtgcttggaaagatgggcgcaccccctaagcctgacgtgccagtcatcacgccgcaagaactcgcagaggccgacggaatcctcttcgggttcccaacgaggttcggaatgatggcagcgcagatgaaggcgttcttcgatgccactggtgggctcttgagggagcagagccttgccggcaagcctggcggcgtcttcttctgcactggatcccagggtgggtgccaag

SEQ ID NO: 98553 - DNA, 537 bp, Zea mays
  unsure (1)..(537): unsure at all n locations
agaattgctaatagtggagagatgaagggagtcgttctaccggtccggaattcccgggtcgacccacgcgtccgtacttatttcgtctcaaacttgaagaaatcagcacatatttcttcgaagtccactcagtactcacctcaaggaagtgaaagtagtaatctacaagttggtcaaggcaacttgaaacttcaatataatgaagctggaaaattatccctgtactccgatagtaagactatggttcaagcaaactttgagcagaaatacaagtattatattggacaggatggaaatggaagtgatcctcaggcttctggagcatacatatntccgcctaatggcacagttccaatcagtactgatgggcaggtttctctcacagttctgcgtgggcccatattggatgaagtgcaccagcagataaattcatggatttatcagattaccagggtttacaaggagaaagactttttggaaactgaanttatagttggggccataccagtagatgatggaaatgggaaaagaagtacc

SEQ ID NO: 98554 - DNA, 521 bp, Zea mays
aggagctggtccatgccaaaggggatggtggtctcggtctcgaattcccgggtcgacccacgcgtccgcccacgcgtccgctcgctccagccgcttacagctccgccgctcgcctctccgaccgccgcgagaatgccgttcaagaggttcgtggagatcgggcgcgtggccctggtgaactacggcaaagactatggccgcctcgtcgtcatcgtcgatgtggtcgaccagaacagggcacttgtggacgcccctgatatggtcaggtgccagattaacttcaaacggctctcacttactgacatcaagattgacatcaaacgcgttcccaagaagtcaaccctgatcaaggctatggaggaagctgatgtgaagacgaagtgggaaaacagctcatggggcaagaagctgattgtccagaagaggagggcttcgctcagtgactttgacaggttcaagggcatgcttgcaagggatcaagagggggtgtgcttttaaggcagaacttggcaagcttgaac

SEQ ID NO: 98555 - DNA, 527 bp, Zea mays
  unsure (1)..(527): unsure at all n locations
ggttagctgtgccatcgtatactgatgngtggctatggtctggaattcccgggtcgacccacgcgtccgattcgatttttcaaaggaacaactaatatttggtggaagaagttattatggtgcactgtggtggtgcacttggagctcagatggaaaatatctattaacaggtggtgaagatgatcttgtgcaggtatggggcatggatgatagaaagatagttgcttggggtgaaggacataattcatgggttagtggagttgcttttgattcatattggtccccaccaagttctgatggaaatggagaaaatgtatatcgcttcggttctgttgggcaggacacccaactacttctgtgggacctggcactggatgagattgttgtcccactacggcatccttcaagtgcctcacctacgtttagcagcgggagccctttcacacactgggacaatgcatgcccttcaacaggtgttcttcaaccttctnctagaatgccagatgtcccaaaactatcgaccctag

SEQ ID NO: 98556 - DNA, 520 bp, Zea mays
agaatattagtcatggggttgggagaggatagttatcggtccggaattcccgggtcgacccacgcgtccgctgatgaggacaagacaactgttctggagttgacgtacaactatggagtcacagaatacagcaagggcaatgcatatgctcaggttgccattggcaccaatgatgtgtacaagagcgccgaggcggttgatctggccaccaaagaactaggtggcaagattttgcggcagccagggcctctacctgggatcaacactaagatcgcctcttttgttgatccagatggctggaaagtggttctggttgacaacaccgacttcctcaaggaactccactgaaggctcgggatacccatgtgctgtgctaggatgtagtaatgcttgtctgtggtgtaataagatgtgggtggtttggttacggcctgatgaacttataatactgaattgtgctacagaagttgggcctctggcaatgaggttggggatttgctatgtaactgtgccttgcggc

SEQ ID NO: 98557 - DNA, 528 bp, Zea mays
  unsure (1)..(528): unsure at all n locations
ttatatgtgaatgtgggtaggggagatgtattacttcggtccggaattcccgggtcgacccacgcgtccgcagagacgaaggtcttgttgaaagggctgtaaagttaggacaggagtttagggaccagttacagaaggtccagcagaaattccctcaaatcctaagagaagtgcgcgggaggggtttgctgaacgcagtggatctaaacaacgacgcgctatctcctgcttctgcatatgacatctgcatcaagttgaaggagagaggcattttagcgaaacccacacatgacactataatccgacttgctcctcccctcacaatcagtcctgaggagcttgcagaagcatccaaggcgcttagtgacgtgctggagcatgacttgccacagctgcagctgcagaagcagataaaaaagccagaatctgaggcagagaagccagtctgtgacagatgcggccgggacttgtacggatgaatgaagcctncgaacagagataacttcattttcgtaggcacccatcttg

SEQ ID NO: 98558 - DNA, 536 bp, Zea mays
  unsure (1)..(536): unsure at all n locations
actgtggcactgacactattgtattgctctaccggtccggaattcccgggtcgacccacgcgtccgcgccgccgtcgctctgcccgcattccctttcacaacaccgagacgccaggatgacggcgcagactgcggaggagctcgccacccagatcgagcagcagaagctcgaggagcagaagaccgaggcagaggaggttgtggtggaggatgaggaggacgacgacgatgaggacgatgaggatgatgatgaacttgacggacaagaaggggatgccagcggcaagtcaaagcaaagcaggagtgagaagaagagccgcaaagccatgctgaagcttggcatgaagcccatcactggtgtcagccgtgtcactgtgaagaaaagcaagaatatactgtttgtcatctcgaagccagatgtgttcaagagcccgaactcagacacatacgtcatattcggcgaggccaagatcgaggacctcagnctccagctgcagacccaggccgcagaacaggttaaggcccctggcttgagc

SEQ ID NO: 98559 - DNA, 533 bp, Zea mays
agctagtcctcgacagtgatgttctgctctaccggtccggaattcccgggtcgacccacgcgtccgcgaagaagccccaagcaagcgacactcttgtcctctccgcgccagatcgttgtttatgagctcgaaggagaagcccactcttggaggcacgcggattaagacccgcaagcggaacattgcagctcctttggaccctgcatcattctctgatgcaattgtccagatttatctggataatggtggagatctggaactcgtcgccaaaagtattgagtcttccgacctcaacttctcacgttacggtgacaccttttttgaggtggtttttgttggaggacgcactcagcctggcactgtaaaacctgaagaaggagaccgtcacccttattctatgttagattgtgtggcacagcgtgaaacaattttgcctttcgtactctatatccagaaaacattgcgcaggaagcctttcttaataaaaaatcttgaaaatgttttgcgcaaattccttcaatccttggagtttt

SEQ ID NO: 98560 - DNA, 531 bp, Zea mays
  unsure (1)..(531): unsure at all n locations
aatgtgcctagctntgattgtgtactcgtctcggtctggaattcccgggtcgacccacgcgtccggcttttgctttgctcaccagacaaacagctgcttatggcgtcgacgatcatggccgtcagctggcgcatcgtcgcggccaagacgccgtttcttggccagggtcgcgccgccgccgacgtcgccaatgccagccccctccgcgacgtcgccgccgccgctgctggcggccggatcaccatgggcaacgacctgtggtacggcccggaccgcgtcaagtaccttggccccttctgccgccagacgccctcgtacctgaccggcgagttccccggcgactacggctgggacaccgtcgggctgtccgcggacccggaggcgttcgcgcggaacagggcgctggaggtgatccacgggcggtgggcgatgctgggtgcgctgggctgcatcaccccggaggtgctggagaaagtggtgcgcgtggacttcaggagcccgtgtggttcaaggtcngcgcgcaaatttttt

SEQ ID NO: 98561 - DNA, 533 bp, Zea mays
ggaagcttgcctagttcatcgactgatcgctctaccggttcggaattcccgggtcgacccacgcgtccgctccgcttttactagatcatcagtagccatctcaggagccgagcctggtcagggtagccaagcccatcccggtcctctcccggcgtcttctccctccgcaccgcggctccggcgatggcgggcgtcggctccgcgctgcgtcggctctacctctccgtctacaactgggtcgtcttcttcggatgggcgcaggtgctgtactacgcggtcctgacgctgcgtttgagcgggcacaaggccggctatgccgccgtcgagaggccggtgcagttcgcgcagacagccggcatcatggagatcgttcatgggctcgtagggctggtgaggtctccggtctctggaactcttgcacagattggatccaagttgatgcttacgtggggtggcttgtggagttttcctgagacccagtcacaccttcttggtactaccctggtcataagctggtctatcactgagatcat

SEQ ID NO: 98562 - DNA, 535 bp, Zea mays
  unsure (1)..(535): unsure at all n locations
ttggctgatgaagagtantatagtatcgctcgtaccggtctcggaattcccgggtcgacccacgcgtccggtttcaagaaggatgacaagcagctggatgctgatatccatcgcaagtacatctatggtggccatgttgctgactacatgaggaacctcgctgaagaggagccagagaagtaccagtctcacttcagtgagtacattaagaagggaattgaggctgatgacatggaagctctgtacaagaaggtccatgctgccatccgtgctgatccttctgtggtcaagtcaaccaagcagccaccaaaggagcacaagaggtacaaccccaagaaactgacatacgaacagaggaaggccagtctcattgaaaggctcaaccaactcaactcctcgggcggcgcagatgacgacgatgaggatgacgagtaaagtttggtcccatcgaagtagtgctatcttatgcggcgatcagtatttgtgctatggcatttatcgctacctgtagtcgtgcaacatgcattttttgtta

SEQ ID NO: 98563 - DNA, 531 bp, Zea mays
  unsure (1)..(531): unsure at all n locations
atgtttcctctgatatactgatgtatctcccggtctggaattcccgggtcgacccacgcgtccgcccacgcgtccgcaccaggattcccttcatggttcaagggagttctgcacggagatagagctactatcaagattgcatcatcgcaatttggtttcattggttggctattgcgatgaagaggatgagcagatgctggtttatgaattcatgtcaaatggcactttacgtgatcatctttctgccaagtccaagagacctctaagttttggtttgaggttgaaaatcgcattgggtgctgcaaagggaattttgtatctacatactgaagcagatccacctatattccaccgtgatgttaaggccagcaacattctgttggactccaaattcgttgcaaaggtagccgattttggtctctcgaggcttgctccagtgccagatgtcgaagggacattgccagctcacgtatccactgttgtcaagggcaccccaggctatcttgatcccgaatacttnctaactcacaa

SEQ ID NO: 98564 - DNA, 518 bp, Zea mays
  unsure (1)..(518): unsure at all n locations
agcgtgtccatgacgatgatgtatcgctctaccggtccggaattcccgggtcgacccacgcgtccgcgttctcttccccatcctcctcctcgtcatctccagtcgtcttcagcccttcaccacaggcaggcccacctcccaccaccacatttcttctcatccaaccgccccgtaggatcacagagaagggggatggcgagcggcggggcggtgagggatgtgggctcgcctgcggagctggaggcggcggtggccggggcgcgggcggcggccgtgcacttctgggcgtcctggtgcgaggcgtccaagcagatggacgaggtcttcgcgcacctcgccgtcgacttcccccacgcggccttnctgcgggntgaagctgaagaacaacctgaaatatcagaggcatatggagttacagcgggtccatattttggtntctgccaggaagggaaaattggtgatactttggaggagcaaaaccaagccggcttggcaataaggtgcaaaagtgcttggcc

SEQ ID NO: 98565 - DNA, 523 bp, Zea mays
  unsure (1)..(523): unsure at all n locations
atgtgcatgggtggagagggaggggaagtactcgtccggaattcccgggtcgacccacgcgtccgcacagttcccatataggcagccatcggctacacagcctcgcctccgtaagcagagtgtgtcgttgcggaggcaggaagagagacgacggcggccatggcgacctccttccaggggacgaccaccaagtgcaccgtctgcgacaagacggtgtaccttgtggacaagctcaccgncgacaaccgcatctaccacaaggcctgcttccgctgccaccactgcaagggcaccctcaagctcgccaactacaactccttcgagggagtgctctactgcaggcctcacttcgaccagctgttcaagaggacagggagcttggacaagagcttcgaaggaactcccaaggttgtcaagccagaaagaaacgttgggaatgagaatgctactaaagtctcaagcgcctttgctggcaccagagagaaatgtgttggatgcagcangacagtctatccaactgaga

SEQ ID NO: 98566 - DNA, 534 bp, Zea mays
atgtgtgctaccgcactaagtatgatctaccggtctcggaattcccgggtcgacccacgcgtccggaacttaccaaatatgatgttgtgcttactacatattctatagtaagcatggaagtaccaaaacaatcaaatcctgatagtgatggagaagagaaagggaagcctgacccgtatggtgcacctgtgtcctcttcagggagcaaaaagagaaaggcatcctcttctaagaaaacaaaaaataaaagtgttgcagagagttgcttgcctgaaaaacctcttgcgaaagttgcttggtttagggttattcttgatgaagcacaaagcattaagaactaccgaactcaggttgccagggcttgctggggtttgcgagccaaaagaagatggtgtttgtctgggacacctatacagaatgctgttgaggatctctatagctacttcagatttctcagatacaatccttacgctgtatataagcagttttgcactctgataaagattccaatcagtagggaccccaaatactggg

SEQ ID NO: 98567 - DNA, 532 bp, Zea mays
agtaggtatttgaagtacagatgtatcgctcggtccggaattcccgggtcgacccacgcgtccggccgccctttcttggatattggagttagctccattaaactggtatatcttattttcagcgtctaagacaaacacatcatcatggtttaatgatgaccgggcaaagggaacctctttaacccgaatagctctcttccctctgcaaatatacaaccgtgtttcaaacttctcctcttcaggctttttgaacccagaggcgaaaccaccctccaaaggtataatgcaaggcttgaagtatgacaagaatttgtcagattcataaccttggagttccctatgttggattgcacgacccccaaggatggcatcaagttcaactgtcttgattgctgcagtcccagcttcatcctgcaatacaaacagtcacaaggaaggctagaactagtacacataataaaacagaatttaagttcacaagtgtgtacttgactcggatctttcccaatccagaagtggatatcatatagat

SEQ ID NO: 98568 - DNA, 535 bp, Zea mays
  unsure (1)..(535): unsure at all n locations
attnttgcctcagcttcatttgatgnatcgctcgtaccggtctcggaattcccgggtcgacccacgcgtccgcccacgcgtccggcatcatgtcagaaatgctgtcgagagtttggtttacttgatgttgcctctgagatgcctgtgcggaattttgaggtaattggttcatgggagacaagctcctcgtctcaagtttcttccatggtaaccttccaagtacaggatggtagggtgacatgtgataggtgcaagattgcgtctttgtcaataccattttgctccatgcttaatggaccgttcaatgagtcacagcttgagcttgttgatttgtcagagaatggtatttcgttggagggcatgagagctgtttctgagtttagttctacatgtagtttaggggatcttcctgtggaaatcttattggagatcctggtgtttgcaaacacattttgttgtgacaggctaaaagatgcttgtgataggaaactggcttcatttgtttcaacaaggcaagatgctgttgaactcatgc

SEQ ID NO: 98569 - DNA, 533 bp, Zea mays
  unsure (1)..(533): unsure at all n locations
tgatattcttccctagtttantgatgtatcgctcctccggtctggaattcccggctcgacccacgcgtccgcccacgcgtccgatgaagtgaagcatttctttgagggaacatgtggtgaagtttctcgtgtgaggctacttggtgattatgtgcactccacatgcatcgcttttgttgagtttgtccaagcagatagtgctattctcgctctgaactgcagtggcattgttcttggaacgcttcctgttagggtgagcccatcaaagacaccagtccgctcgcgatcgccccgtgtgacgtcatactgaattcggctcatctgaagccgtcgtccagggcagcaaatttctgggcaacaaagccctagtcgtgtggccttagagactgccgcatcgcggataagtaattgtcgttgagcagagttctcgttggttaaagtccagtctagtaggaggcgcagagacccgtctgtattgtcgctgggaagatctatctgacctctttttctgatctttttggtcttaagtaatn

SEQ ID NO: 98570 - DNA, 528 bp, Zea mays
  unsure (1)..(528): unsure at all n locations
ngaattgctggccctccgctcgttgtattgcatctaccggtccggaattcccgggtcgacccacgcgtccgcccacgcgtccgcccacgcgtccgctctctctctattcgttccccgcctcaccccgagccagccgtctcgctagggtttcgccgccgccgccgccgccgccgccgctatgcctcgccgcagctcaggaaggtctgccccacgcccagctccccgtgctgctccagtgaggaacccgccacagccagcacgccaggctcctactacagctcctgttcgagatggtggtggctccatgtttggaggaattgggtccaccattgctcaaggtatggcgtttggcacgggtagtgccatggcacacagggctgttgatgctgtattagggccccggaccattcagcatgagactgttgcctcagaagctgctgctgctgcccctgccctgcagtgatgaatgctgacgcttgcaacattcattctaaaggctttccaagaatgcctcaaacactatggcag

SEQ ID NO: 98571 - DNA, 531 bp, Zea mays
  unsure (1)..(531): unsure at all n locations
aagtagattagtagagacagatgtaatctctcggtctggaattcccgggtcgacccacgcgtccgaagatatgaacgtggcattagtccttgattaagggcttgcctctccaggggaggagtaccgtgtgttctatgcagagcgtagcccttggtggcttactataaaagcaacgggcgcaccagggcacggtgcgaagttgtatgatggtagtgcaatggagaatttgatgaagagcgtggaggctattaggagattcaggacatcacagtttgatctagtgaaatctggagagaaggctgaaggagatgttgtatcggtgaattttgcgtacctgaaggctggcacacctacaccaacgggttttgtcatgaatcttcaaccatctgaagcaaaggtaggtcttgacatccggatccctnctaatgcccatgtggaagcacttgaaaggcgcctttgtggaaaaatggcaccaactttacgcaacctgacctcgaggtttaaccggacatgttggtcttgacacctttt

SEQ ID NO: 98572 - DNA, 532 bp, Zea mays
atggctgcatcgtttcattgattgatcgctctaccggtctcggaattcccgggtcgacccacgcgtccgcccacgcgtccgcccacgcgtccgctcactcgtccgcccacgcgtccgaacaaactggtgcggagggaaagattgtgagcaaggtctacttgtgtgagaaactgtctctcactaatgagatgtattttgccattacccttgataggaaaactgctggtccgctcattattgcttgcagcaagggaggaaccagtattgaagatcttgcggagaagtatcctgatatgattatcaaggttcctgttgatgtatttaaaggaataacagacgaggatgcagctaaagttggtgatggtctagctctaaagtcagcggataggcagtcttctatagaacagattaagaaactgtatgaacttttctgcaagtctgattgcacattgctggagataaatcctctggcggagacagctgacaacaagcttggtgctgctgatgccaaagtgaactttgatgatattgc

SEQ ID NO: 98573 - DNA, 526 bp, Zea mays
  unsure (1)..(526): unsure at all n locations
nggaagctgacatagtagggagagagtgcatctaccggtccggaattcccgggtcgacccacgcgtccgttcttttctcctttcccttttatcagttgtaggcgcacttgcacacccttacttggcatgacttcatgacataagtgatgagccaggctgctcaatgcccttcagctttgacttcgagcagcatgcattgtctgaagaacaaatgaaggatcttatctaccaagaggctcttgcattcaaccctgattatcagtagccaaagttcaatttcagccggtgattggcttcattgacatggagattttttccccacctgatgtcagtgcaaaaagtcaccaactccgattgctagctgtaaataactgccttacctgaagatactccattcctctgattaaaagctggtgacggtgtcattaagggtagaaaagaacgagcttgtgaaagtcaaatttctgcgaagccatggatttctgtgcttacaaatatgttgtttcaatccgacttttccttcttt

SEQ ID NO: 98574 - DNA, 530 bp, Zea mays
  unsure (1)..(530): unsure at all n locations
nggaaactgtggatagatggggggggagaggagtgttggtctcggaattcccgggtcgacccacgcgtccgctccactcatcttttcgcgtttagaacctttaaaatttcccccactcgccagtcgcagcagcacctgtagccatggacgccagcggagccggtagcaaggggaagaagggtgcggccgggcgcaaggcaggcggccccaggaagaagtcggtgacgcggtccgtcaaggccgggctgcagttccccgtcggccggatcgggcgctacctgaagaagggccggtacgcgcagcgcgtgggcactggcgcccccgtctacctcgccgncgtcctggagtacctcgccgccgaggttctggagttggcagggaacgcggcgaaagacaacatgaagacgcgcatcatcccgcgccacgtgctcctggcgatccgcaacgacgaggagctcgggaagctgctggcaggcgtcaccatcgcgcacggcggcgttcttcccaacatccactccgtgctccttgcc

SEQ ID NO: 98575 - DNA, 530 bp, Zea mays
  unsure (1)..(530): unsure at all n locations
aggataatgttngcaatgagatggaggaggagagagagagtgctcggctcggaattcggccgcncaccgacgcgtaaagaagaccgcatgatgatcacaggtatgcatactgtttctgatatcttctgtgttggctgtggatccatagttgggtggaaatatgatgcggcacatgagaagggccagagatacaaggaaggcaagtttattctggagaggtacaaggtgtcgggccctgacggaagccaatactgggttccacaagatgctcacttgggcggaagcgacgccgatgacatataaaacacgatccaacaagctcaagcctgtcgttgatcccctgtaaataacctgngtggcgttgctctttaggcagccgacagccggggattgctccattgaaataattcgccggcgtaaattgttgctgttccaggtgacatgatcgtatccctcccttcctgccgttgtccctggaagtcattagatgttaccgctgtatatgtgcgtaacctgtgttgcttataagn

SEQ ID NO: 98576 - DNA, 526 bp, Zea mays
  unsure (1)..(526): unsure at all n locations
aggtttgcctagctcacctgagactgactcgctcggaattcccggtcgacccacgcgtccggagaagattgacgtctattcgtttggaattgtcatgtgggagctgcttactggggaagagccatactctgatatgtgtgctgctgaaattattggggccattgtaaacgattccctatgccctcaaatcccttcatggcgtgatcctgagtggaagggattgatggaaagctgttggtccagtgatccagccgagagaccgtccttcactgatatatctcaaaggttgaggaaaatggccgctgcaatgaatgtgaagtgaaggttcggaagccatatttgtcttgattttcttagtcccagctgtcatttgccttgtgtcgaaaataactatgctactggtgctggggttgcatttcaccataccattgtacaagaaggtggtgttagcgacttagtactacgatatgctcaatttgagatggttgccggtgctangtggattcagagctcttaggtcctttct

SEQ ID NO: 98577 - DNA, 535 bp, Zea mays
  unsure (1)..(535): unsure at all n locations
aatgtatctactgcactattgatttcatctctcgcgctggaatggccgggtcgacccacgcgtccgctgccaggtctccctgtccccggctctcttgcttgctgttccagtcctcgcgcgcgagagcgccgccccgtgtgggccctagatcccgatggcctcgcgccgtcgcaccctgctcaaggtcatcatcctcggcgatagtggggttgggaagacttccttgatgaaccaatatgtgaacaagaagttcagcgatcagtacaaggctacgatcggcgcggatttcctcaccaaggaagtgcagttcgaggacaggctcttcactctgcanatatgggacactgctggccaggaaaggtttcagagtctcggcgttgcattctaccggggagcagatnngtggggcccagtctatgaaggtcattctatgaaatcatttgacaaccttgacaactggccagaacagtttctagtcaagctagcccatcagaacctgataatttcccttttgatctcttgggaaccaaaatgc

SEQ ID NO: 98578 - DNA, 536 bp, Zea mays
  unsure (1)..(536): unsure at all n locations
aggggnatgacgtcggatgantcgatcgctcggactggaatggccgggtcgacccacgcgtccgcccacgcgtccgggaagaaagacgtagaatattggatgggttcagattaaaaaggcagtgaagctcgatggatgcgtgtgatgattatataaaggacattataaatcaatgggagcaaaggaaaggaaaggaaaggaaagggagaaaatttcatatagcaattgtttcgcgtataggagggagaacaaaggtcgcgtctcgaaagttcttgccttgttgggaagggatggcgtcggaggtggaggacgacgcggcggtgccgggcgcgccgctggtcgccaatggtgcagccgacgtccgccggaggaaggatcaggcgaaagcgattttgtccaagcaggccggaaagatcgccaacaaaggccgagcaacacgaacgcttcatctttaaggtcacacacttgcttggtggtccttgatttgggggaatttggtatttcttggttgcaagacacaagatggtgcatatgtt

SEQ ID NO: 98579 - DNA, 527 bp, Zea mays
  unsure (1)..(527): unsure at all n locations
taggttccagctagancagatgagcgatccntcctggttggaattcccggactcgacccacgcgtccgcccacgcgtccgcccacgcgtccgtttgaatgcagcagaatcgctgagggatcgtcgatccggagaggcaaacaagtcgagagatcaggcagggcaccatggggcgcgggaaggtggtgctgcagcggatcgagaacaagatcagccggcaggtgaccttcgccaagcgccggaacggcctgctcaagaaggcgtacgagctctccgtcctctgcgacgccgaggtcgcgctcgtcctcttctcccacgccggccgnctctaccaggtctcatcctcctacaatctgcttaagactctaaagcggtaccagaggtacatctatgcttcagccgatgctgcagtccatctagcgatcagatgcagaatactatcaagatatgttaagctaaagcgacaattgaggtttacagaacttacaaagaattttttgggaagacttggcctactaacccagtgag

SEQ ID NO: 98580 - DNA, 527 bp, Zea mays
  unsure (1)..(527): unsure at all n locations
ngaatgtgtatagatggtatagagattgcatctaccggtccggaattcccgggtcgacccacgcgtccgcccacgcgtccggttctacgtccgagtcgtcgcatcaggtcccctcgattcgccggcggcggcgccaccaaccaagctcatacatctgaattgactagtccaactcagggatttctttggggaccaatcaaactcaagaactaagtttcatgtctgatctcgacgtccagcttccatctgcttttgatccgtttgcagaggcaaatgctgaggactccagtgctggtgctggatcaaaggactatgtgcacgtgcgtattcagcagcgcaacggaaggaagagtctgacaactgttcaaggcttgaagaaagagtacagctacaacaagatcctcaaggatctcaaaaaagagttctgctgcaatggtactgtagtccaggatccagagctaggccaggtcattcaactgcaaggtgatcaagcgtaaaatgtcgctacttttctagtncaggcccgg

SEQ ID NO: 98581 - DNA, 530 bp, Zea mays
  unsure (1)..(530): unsure at all n locations
ntttcagtnctgcttacgaacatcantgtactnctanaactctatcggattggaattccggcccacgcgtacgcaagttacaagggaggggaaatatgttcattcagatgtcccaaagcagctgctttatgggacaatggtttttgttcgccagacaatagtcgcagatgcttctaaggctttgtcccgtgctgtttgcattgctgtacgatacagcgccatccgaaagcagtttggctctcaagatggtggacctgagactaaggtccttgattacaagactcaacaaagcagactctttccgttgctggcttcagcatatgcatttagatttgtgggtgactggctgaagtggctatacatggatgtcactcagaaactggaagctaaagactactcaacactgcaagaagcccatgcctgtactgctggtttgaaggctgtgacaacatctgcaacagctgatgccattgaagaatgtagaaagctctgtggcggacatggttacctgaacagcnagtggctttctg

SEQ ID NO: 98582 - DNA, 536 bp, Zea mays
tgggatgatggtgagcacgtatgagacgtattgctctaccggtcttgaattcccgggtcgacccacgcgtccggagcgatcccactcccgatcagcagctgatcgctcactcttgcagctcgatcattctttagctgctctagctctagcctctagccctagctagtagctagccactcggtcgtgtagtcatcagccttctgatcgtcacccatggccactgccgaggtccagaccccgaccgtcgtggcgaccgaggaagcgccggtggtggagaccccggctccgcccgccgtcgtgcccgaggaggctgcccccgccgccgaggccaaggtggaggagccagctgccccggcggagaccgagccagctgccgccgctgagcccgaggcggcccccgtggcggcggaggaagagacgccaaaggaggaagagacggcaaaggaggcggagccggagccggagccggcggcggctgaagaggtgaaggaggaagcggcagcgcccgctgccgagacagaagcagaaccggcagc

SEQ ID NO: 98583 - DNA, 526 bp, Zea mays
  unsure (1)..(526): unsure at all n locations
tgcaaggctggatatgataggaaggaaagtatcgctcnntcnnntggaatacccggctcgacccacgcgtccgggagctctttaatctgtgctagcagcggttccagagaatgcggcagatctcgtcgctgctgcagggcctggcccggtcactctcggtggggagggacagggacagggacagggaccggaaagggaacggcgcaggcgaccgcaagaccgccgtgccggcggtgctgcggacgtcgggcaccctgtggggcgacggctcggacacgttcgccgccgtctgctcgcggcgcggcgagaaaggcatcaaccaggactgctccatcgtctgggagggattcgggtgccaggagggcaccatcttctgcggcatcttcgacggccacgngcccgggggccactacgtggccaaggtggtgcgcgactcgctgccgccgtcgctgctgtgccactggcaggaggcgctcgcgctcgcgtcgctcatcgacgacggcaagaaaaagctcggcgactgtcc

SEQ ID NO: 98584 - DNA, 535 bp, Zea mays
  unsure (1)..(535): unsure at all n locations
gaaaaggatggtggctttacgtncagctacgnagtgatcagtctggnctggaatacccgggccgacccacgcgtccgggagctctttaatctgtgctagcagcgggtctagagaatgcggcagatctcgtcggtgcgtcagggcctggccggggcacggtcggtggggagggacagggacagggacagggaccggaaagggaacggcgcaggcgaccgcaagaccgccgtgccggcggtgctgcggacgtcgggcaccctgtggggcgacggctcggacacgttcgccgccgtctgctcgcggcgcggcgagaaaggcatcaaccaggactgctccatcgtctgggagggattcgggtgccaggagggcaccatcttctgcggcatcttcgacggccacggcccgtggggccactacgtggccaaggtggtgcgcgactcgctgccgccgtcgctgctgtgccactggcaggaggcgctcgcgctcgcgttgctcatcgacgactggaagataaaagctcgcgactgtcaatttg

SEQ ID NO: 98585 - DNA, 549 bp, Zea mays
  unsure (1)..(549): unsure at all n locations
ggggnnggggaaaaggtatgggagaataagaaatgatgccccggtctggaattcccgggccgacccacgcgtccgcttgagaggatctatgaatcggaccgcttgtaggaagaggtagagctgcttgctacatccgccatgcatgaattccagtccaacaataccggaagctatctggatgtcttcaagtcgaaagaattgaggctagctttctttgctggggctggtcttcaggccttccagcaatttaccgggatcaacaccgtgatgtattacagccccacgatagtccagatggctggtttctcctccaacaggctggccttgctcctctccctgatcgtggcggccatgaacgccgncggaaccatcggcgggatctaacctaatcgaccgttgcggccgccgncgcctggcctcacaagcttggccggggtcgtggtcttccttgccatnctcgccacggccttcatactgcagtcatcatccggcctctgcatgagcgccgncagcggcacgtgccanggcgcgctaggctggntcgcggtg

SEQ ID NO: 98586 - DNA, 564 bp, Zea mays
  unsure (1)..(564): unsure at all n locations
gggtgnngtgagggagagagactgttgtggtttatgtggggaaggatgtatgtaccggtctggaattcccgggtcgacccacgcgtccggtcagcattcaggttggagctcaggttgtgtattctaagtacgctggaaccgaggtcgcgttgaacgatcacagccatctggttctcaaagaggatgacgttataggtatcttagaaactgatgacgtgaaagacatgaagcctctgaacgaccgtgttctaatcaaggttgctgaagctgaagacaaaactccaggaggcctactgcttacggaaactgccaaggagaagccatctatcggaacggtcgtagcggttggcccaggccccctggacgaggacggcgagaggctcgcgctgtccgtctccgcggggagcactgtcctgtactccaagtacgccggcagcgaatttcaagggcgccgacngcacgaactacatcgtgcttgaggcgtcngatctgatgggccgtctcttctgaactgggcttgngctggangaccaactgagtgcangtgcangagcangcttagca

SEQ ID NO: 98587 - DNA, 537 bp, Zea mays
  unsure (1)..(537): unsure at all n locations
tgggaggcgtgtggatagaagaggtagtattgctctaccggtcttgaattcccgggtcgacccacgcgtccgcccacgcgtccgcccacgcgtccgcccacgcgtccgcacaaccagaagccacccattggcgtacgcgaggcgatcggagcatcccgtcccaagaggagaaactccggccggcgacgcgggggaaaatggggaagacgccggtgcggatgaaggcggtggtgtacgcgctgtcgcccttccagcagaaggtgatgccggggctgtggaaggacatcaccaccaagatccaccacaaggtcaccgagaactggatctccgncacgctcctcctcacccccgtcgtcggcacctaccaatacgccatgtggtacaaagagcaggagaagctttcccacagatactaaatgggatgtcctccaagttgctgcggcttgtcgcagttgaattttccatgatgggttgtataatctgtcaatgtcatttctttgctcagttttagttcaacccattttcacctttncatan

SEQ ID NO: 98588 - DNA, 524 bp, Zea mays
tggcccgggtgccctactgtaaacagtgacgtactgctcgactgaattctgggaccgacccacgcgtacgcggatcgtcacccgtgcaattgtcaatactctagttttcctccgtattgccccagcaggcggcatgggagcctacaacgtgctgatgagtgcctctgatggccttctaaaaggtggccgggaaggtatcttcacagcgaccttcttcgtcctgggccgcaagcctatcaaggaagctgatatggtgaacggcggcgtcctttgagctgcaacattagtatggggttgtactcataagagctatgaatcatggccaacgtgttctgagctgatgtgtgattactgggttgtcttatgggtactgggttatgaatcatgttcccgcattagccctgatctgaatgtgtgctgtgtactatgcgctatctgaataaacatgcagttttacgcctcatggataacaaatcctggagataaaacccagctggccgggttcactaaagccttaggcccca

SEQ ID NO: 98589 - DNA, 532 bp, Zea mays
tggaaaggctgcaattgaggggggaggaaaagtagtgcttcgtctggaattcccgggtcgacccacgcgtacgcgtgcgggaagatctccagagctgaatacagatgctctcgctccttctccggtgagctgaaggacctgcttttcagaatgctcgatccagatcccagtaccaggatatccatttcaaggatcaagagaagcacttggtacagaaaacctatcgaggcaaacgcggcaaagatcaagcacggcacagcaagagacaccaccgtgcgtgacggtgaagccgccacggcctctagctcgatagagtgcagtaaccgggcagaggaagaccaagggtcgtcgagccttcctaacctgaacgcattcgacatcatttctctctcgactgggtttgacctatctaaccttgtcgaagaaagacacgggcggaaggaagagaggttcaccaccaggcaagcagtgggaagcgtgtttggtaggcttgaaagagctgcttaaacgcgtgaagctctaaaatccagaa

SEQ ID NO: 98590 - DNA, 532 bp, Zea mays
  unsure (1)..(532): unsure at all n locations
attanatgtggntgtatgtatggattatattgatgctctaccggtctggaattcccgggtcgacccacgcgtccggggtggtcaggtggctggagtgtgagggctatattgagacaaacttcaggatgaagtttgttacatggtttagcttacgtgccaccctgcaagagagaaagatagttagcgtatatgtggatactcttatcgaggaccctgtcagtctctctggccagctcgtcgacagcttctcggagaggatatatagcanaaagcggacttccatgccttctggtttctgcatggatctgtggcattaaggaactgcagggtcttaccgttcgctttgtagggagcatattcggcccattcttttgttgcagatcgttgcattgattcttcattggaaatttagctgaagtatttgacttgcacattttcattgaaactttccttggtgatgacagganggtatggtaatcgtctgccaactttcttttcctttccggttatttttatcattgggtcataaaag

SEQ ID NO: 98591 - DNA, 557 bp, Zea mays
  unsure (1)..(557): unsure at all n locations
agtataatgtgtatggggctgggacggaaaggtatcgcttctaccggtcttgaattcccgggtcgacccacgcgtccgcagtactatagcagagatgcttcccactgtatcactgatcgttgatcagtgttccaatattttggcaagtgcagctttgaataaattgaacagattggcctcgtggccattttcctgtatttatctgtagtcaggtccaattcttttctgttggtgagcgcaagttattcatagatgactcggtcatgggaatatttgtaatattatgtcatgtatcgttaaatttcagttgttttgtttcagctgccagaactgttagcaagagtattctggagctggaagctcgaacgcaactggttgtatctatatccgtgaatgccgaataaaggaggggcaataaactgcagcgaaatatgtgctgtcagacattgttgaaaaaaaaaaaaanaanaataaaaaaaaaaaaaaaaagggcggccgctctaaaggatccaagcttacgtacgcgtgcatgcgacgtcataactcttctatagtgg

SEQ ID NO: 98592 - DNA, 535 bp, Zea mays
  unsure (1)..(535): unsure at all n locations
tgggaagaggctagcacgaaagtgaagtagtgctgcaccggtctggaattcccgggtcgacccacgcgtccgcattcatattataaggcgcgaatctatccatctatctaatctacttacgcacgaacatgcgtaacatcggcatgctgcgggcgctggtcctggcgctcgcggtggccgccgccgccgccgccgagaagaggaggacgtacatcgtccacatggccaagtcggcgatgccggccgagtacgcggaccacgccgagtggtacggcgcatcgctgcgctccgtgtccgcctcagcctccgccgccaagatgctctacgcgtacgacaccgtcctgcacggtttctccgcgcgcctcacgccgcaggaggccagcgacctggcgtccgccgagggggtgctcgccgtcaacccggaggcgcggtacgagctgcacaccacgcggacgcccgagttcctgggcatcgncggccagggactgtccccgcagtcccgcacggcgggcgacgtcgtcgtccgcgtgctcgc

SEQ ID NO: 98593 - DNA, 538 bp, Zea mays
  unsure (1)..(538): unsure at all n locations
tgggaagagggtgtcatgataagcantgtatagcactgctcgcccggtctggaattcccgggtcgacccacgcgtccgcggacgcgtggggaagagcgcaagatgttttgcttcgggcaccacggccaccacggccagaacccgccggcgcacggcggcgtgcaccagcccaccttcaagatcttctgcaaggccgacgaggggtactgcctcaccgtccgcgacggcaacgtggtgctggcccccgccaacccgcgcgacgagcaccagcactggtacaaggacatgcgcttcagcacccaggtcaaggacgaggagggcaaccctgcgttcgccctggtcaacaaggccactgggctcgccatcaagcactccctcggccagtcccacccggtgaagctggtgccgttcaacccggagtaccaggacgagtcggtgctgtggacggagagcggcgacgtgggtaagggcttccgctgcatccgcatggtgaacaacatccgnctcaacttcgacgccttccacggcgacaagggcc

SEQ ID NO: 98594 - DNA, 519 bp, Zea mays
  unsure (1)..(519): unsure at all n locations
agaccagctggnccttatccttgtatgcactactgtctcgattactaacgaccagacccacgcagtacgctagtcacccacagattccgacttggttttggaggtgaacctctcctacgtgggacggtacccgtccccgctcggcgccatgaacctgaccgccaacaccctcaagggaacgcacttcgagatccacggtgcagcccaaccacacgattatggttgtgaagaacaatattgaagagatacaaggaaaagacagctatccatggagccaacaactgctgattttcaatggaaaggtcttgaaagatgaaagtacattgcaagagaataaagtcaatgacgatggctttctagctgtcatgcttagtaacgataaaacatctgggtcaactggaactttatattcccagcactcatacactcctgcaacaaagcacgcacatactctagaggccctacaacatgctcctcaacccacgggggaccaatacaacttctaacctgaagacttcc

SEQ ID NO: 98595 - DNA, 551 bp, Zea mays
ggtaatctggtccctccgaattacgtaatgtagcgctctaccggtctggaattcccgggccgacccacgcgtccgcccacgcgtccgaccaacccagctttcttttcccagctgatcaggtcgagcacctggtagggacctgctcgatcatcagtggagagtgtcggtaggtgtctgtctctcttggtggctggttgcaacggtcatggcgacgtcgtctcgtcgggtgcccttgctgctgctgtgcctgggcgtgctggtgtcctgctccttcgcggcgggcagcttgcaccaggagctggacatcacgtggggcgacgggcggggcaaggtccttgacaacgggcggatgctgacgctgtcgctggaccgcacgtccggctccgggttccagttcacgcacgagtaccatgtcggcatgatcgacgtccagctgcagctggtgccatgctactccgtcggcaccgtcaccgactactacctgtcgtcacagagctgcgcgcacgaccagatcgactacgggttctgtgcaacgtgtccggcgagccctt

SEQ ID NO: 98596 - DNA, 559 bp, Zea mays
  unsure (1)..(559): unsure at all n locations
ggtggnttgagggagaatttgatgtggggaatggagggaaatgcttgccccggtctggaattcccgggccgacccacgcgtccgcccacccagaattacactgaatatgttggttgaaagagtacatttcgccttctgaagagaggatccgcaaaggcactagataaagttgttgagttagatggtaagtctgccatctatattttgtcccctatcagtgagatacaaatatgaaaaggcatgctgattttatggttgcagaaacaaaaaaagaggcactgatcgttaagacgacaatacatgatatcatgaaccaaatgattcgggaacttccaataaccaatccagtatacctcatgctaagcacatcatttggttcctcagctaaaggaaccgggcttaaagctcttgaatttgccctctncatctgtgacagtgttgatatgtatggcttcaccgtagacccaggttacaaggaatggacaaggtacttctcagaggtaagaaagggacacacttcactacatggtagagcatattatcagatgatggaatgtct

SEQ ID NO: 98597 - DNA, 529 bp, Zea mays
  unsure (1)..(529): unsure at all n locations
taagaaggttctnccttaacctcttgctcgcactaccgccctggaattcccgggccgacccacgcgtccgagacggctagccggcgcacggaagcgggcttcggttcggaggtgagcctctcctgcgtgggactgtccccgcccccgctaggcgccatgaagctgacggtgaagaccctcaagggaacgcacttcgagatccgggtgcagcccaacgacacgattatggctgtgaagaagaatattgaagagatacaaggaaaagacagctatccatggggccaacaactgctgattttcaatggaaaggtcttgaaagatgaaagtacattggaagagaataaagtcaatgaagatgggtttctaggtggcatgcttaataagggtaaaacatctggttcaactggaacttcatcttcccagcactcaaacactcctgcaacaaggcaagcacctnctctagaggccccacaacaagcttctcaacccctcgtggcaccaattacaacttctcagcctgaaggacttc

SEQ ID NO: 98598 - DNA, 539 bp, Zea mays
  unsure (1)..(539): unsure at all n locations
aggggnaattggtggctcgatggggaggatatagtatcgctcgtaccggtctggaattcccgggtcgacccacgcgtccgcggacgcgtgggtggagacgcaaagagcctctccctgatagtgcacccaataagggtaagctgatgtgctcctactgcaaacatcatactgagtctgaagttccagatccttattatggaggccctcagggatttgaaaaggtgctggacttattggaagatgcttgcgagtcgctgcttgatagtatcgtcgcaaacaatgcaagcatttctgggtgacatcgatgtaaatctccacatacagacatctattttcagacgcaccgaaggctgtagcatccatgcacaaccggagtaatttggtttctaatgcaacattgatcatgtcgtcattacccaggtcttggtctggtttgtatataccaccatccttatacctggttatgtgataagtgacaaanaaactgctcatcatcactttnttccactaaagataatcagaaacaatcagaatgaccg

SEQ ID NO: 98599 - DNA, 531 bp, Zea mays
attaatcgttgctccgtcacgctctagtgatgcatcgctctaccggtctcggattcccgggtcgacccacgcgtccggttccccgtgggaactgtcgcaaatagcctctccctgatagtgcacccaataagggtagggtgatgtgctcctactgcaggcatcatactgagtctgaagttccagatccttattatggaggccctcacggatttgaaaaggtgctggacttattggaagatgcttgcgagtcgctgcttgatagtatcgtcgcaaacaatgcaagcatttctgggtgacatcgatgtaaatctccacatacagacatctattttcagacgcaccgaaggctgtagcatccatgcacaaccggagtaatttggtttctaatgcaacattgatcatgtcgtcattacccaggtcttggtctggtttgtatataccaccatccttatacctggatatgtgataagtgacaaaaaaactgctcatcatcacttttttccacttaagataatcagaaacaatcagaat

SEQ ID NO: 98600 - DNA, 548 bp, Zea mays
ggaaagatgttaatgattggcggggaggggagtgatgctaccggtctggaattcccgggtcgacccacgcgtccgcggacgcgtgggcgcccagctgctgctgctcgcgccgccgcggtgagacccgggaggagggcctggtggtgggcgggcccgatggagtgggcgtcggcggcgtacacggccgcggcgctggtgtgcgcggcggcggcgtgcgtggtagcgctcgcgcacatctaccgccacctcctccactacgccgagccaatctaccagcggttcatcgtccgcatcatattcatggtcccggtatatgctgtgatgtcattcctttcccttatcctccctaacaacgcgatatactttaattctattcgggagatttatgatgcttgggtcatctacaattttctctcactctgcttggcatgggtgggaagtcctggtgctgtggtggtaagtttgagtggccgaacccttgaaccatcatggattctgatgacttgcttgtatccagctattcctctagatgggcgttttatacgaag

SEQ ID NO: 98601 - DNA, 556 bp, Zea mays
  unsure (1)..(556): unsure at all n locations
tgtgatatggactgcatcagtacaaagtatagtagcgcttcgcaccggtctggaattcccgggtcgacccacgcgtccgcttgcacagtggctcacgaacaaggtgacttacagggactacgaggccatcgtggacccgaagctgccggagaagccgtcctccaaggctctcaagaaggcgctcctggtcgcgctgaggtgcgtggatcccgactcgcagaaacggcccaagatggggcacgtaatccacatgctcgaagtcgacgacttcccgtatcgagaggaccgtcgaactcttcggccgggcaacggcagccccctggagaaggcgaggaatccggcggcggggtcatgcgacggcagcagctgctacgggggcgacacgaccaccgcgagcacgccgtccagactagtgcaggacatgtagtagtgatgtgtttgtagccagctgctgctggccttctgagctctgcctgcgggctgcggagcaacatggagatggacatgctgcaactctgctccgtcgntaattaaaggttcccttnctacgtgntgg

SEQ ID NO: 98602 - DNA, 547 bp, Zea mays
  unsure (1)..(547): unsure at all n locations
ntggagaagtctgtagtggaggagggtggagatgatgtaccggtctggaattcccgggtcgacccacgcgtccgcattggatggaatctgtgggctttatgaattgaaaattagggatatcaacccaatgatcggaaacataacttatgacatcagcgacctctataacttcattgatggcctagccgacattagtgcgctggtttatgatcactcgattcaggcattcctgccatatgatcgacagtggataaagcaaaagttgtttcaacacctgaagaaattggctcagcggtagcacaactgttgtttgttctgatgccttttatccaacaagcaagcatgcgtgacaataggtgtccaatcagtggtattgggagttgtttcttgtaaactttgtaatgttacatggcagatttgctcccttgtattctggatgtttgactcggatttcattggtggcttgcttgtggttgtggtatgctaaacttgttttgtttcgcagtgctgggaatcagataacccttttgcctgttgtaaaaaagaa

SEQ ID NO: 98603 - DNA, 531 bp, Zea mays
tgaatatgtgtcatcgaggagatgagagcgtggcaccggtcttgaattcccgggtcgacccacgcgtccgcccacgcgtccggacctagccaaccttgtatacattgcagcaataaaggctgcggttgaaggtgcggacaaattgaatgctgttcagttggagtttgccaaagatcgtattatcatgggaaccgagaggagatcaatgttcatatctgatgaatcgagaaagcttactgcctaccatgaaagtggacatgctattgttgcactcaacacccagggtgctcaccccatacacaaggcaactatccttcctcgtggatctgcccttggaatggtcacacaacttccctcacaggatgagacctctattagcaagaaacaacttcttgcacgtcttgatgtttgcatgggtgggaaggttgcttgagagctgatctttggggaagacaatgttacaactggggcaagaaatgaccttcacacttgaaccagactttgccagtacatggttttgaactgtgggat

SEQ ID NO: 98604 - DNA, 527 bp, Zea mays
attaattgttgtcctccgtcagaagtatagtagcgctctactggtcttgaattcccgggtcgacccacgcgtccgcggacgcgtgggcggacgcgtgggcatcactgcccaaatcatatctgctagtatagcgggtgatatggttcttgcttctgcctactcgcatgagttgccacgatatggtcttgaagttggtctgaccaactatgcagctgcctactgcactggccttctgttggctcgccgtgtgctcaagatccgtggtttggatcaggagtacgagggcaatgttgaggccactggtgaggacttctctgttgagccagctgatgagaggaggcctttccgtgctctcttggatgttggccttatcaggactacaacagggaaccgtgtctttggtgccctcaagggagcattggatggaggcctggatattcctcacaacgagaaaaagtttgctggattcaagaaggacgacaagcaattggatgctgatacccaccgcaagtacatctattggggcc

SEQ ID NO: 98605 - DNA, 551 bp, Zea mays
  unsure (1)..(551): unsure at all n locations
ngtaaagtgtattagtgggataggaagagagtgcttctaccggtctggaattcccgggtcgacccacgcgtccgagcgcgtaaagttacagatatgggatacttttggtcaagagcggtttcgaactatggcaggcgcctactacaggggtgcaatgggaattttgcttgtctatgatgttactgatgagtcatctttcaataatataagaaactggattaggaacatagagcaacatgcttccgacaatgtgaataaaattttggtaggcaacaaagctgacatggatgaaagcaaacgggctgtgccaacttcaagagggcaggctcttgctgatgagtatggcatcaaattttttgaaacgagtgcgaagacgaacctgaatgtggagcaggttttcttctccatagcaagagatatcaagcaaaggcttgctgaatctgattcaaagccagaggatcgcacgatcagtatcaacagacctganggtggtgaggcttcagcgtcacaaaaatcagcttgctgcggatcgtgacggggttacattgtca

SEQ ID NO: 98606 - DNA, 553 bp, Zea mays
agggttaatatgttaattgtggggggatggagggatatcttgtaccggtctggaattcccgggtcgacccacgcgtccgggaacttcacagagcaggctctccctgactacctaatcaagagaggcatggcggtcgcagacccgtcgagcccgtacaaggtacggctgctggtggaggactacccgtacgcgtcggacgggctggccatctggcacgccatcgagcagtgggtgacggagtacctcgccgtctactaccccaacgacggcgtgctgcgggcggacgtggagctgcaggcgtggtggaaggaggcgcgcgaggtcgggcacgccgacctcaaggacgcgccctggtggcccaagatgcagacggtggccgagctggtcaaggcctgcaccaccatcatctggatcgcgtcagcgctccacgcggccgtcaacttcgggcagtacccgtacgccgggtaccttccgaacctgccgtccgtcagccggaagccgatgccggcgccgggcagcgacgagtactccgagctggagcgcaagccggaat

SEQ ID NO: 98607 - DNA, 545 bp, Zea mays
  unsure (1)..(545): unsure at all n locations
tgtnaaatggaatgatcgggacgagagatatgatgtaccggtctggaattcccgggtcgacccacgcgtccgggaaggaacaatcctagctccaatcagtgttaaatcctggggttctggcttgctcgagtggctcgagttcaccaaactaaatgggatagttattcaagggaacggcattataaatggcagagggcaacaatggtggacctactcagacccagaggatgaggatgatgatgacacgtaccatgtagagtttcaaagaatgccacagattaaacctacagcgttgaggttttatggtagtttcaacgttgtagtgtctggtatcactattgtcaacagctcacagtgccatcttaagttcgacaactgtcaaggagtgatggtccatgatgtgaccatatcctnccctgagaacagtctcaacactgacggaatacacctgcagaactccaaagatgtcagcattcatcatacaaccctggcttgtggtgatgattgcatctncatccagacaggatgcagncacataaatatac

SEQ ID NO: 98608 - DNA, 517 bp, Zea mays
ctaaatgtggcctcgatctcgtatgcatctacgtcctgattcccggtcgaccacgcgtccgctcggataaatgccgccgtagatttgaccttggatatgcagattatcttagatatcgtgggatgcgttagtttgaccaggcgatgcagcaccttgagggaaaatatgaattcatgacatctgatcactcatatgtatcacggaagcatgaggaggataaggtgatcatctttgagagaggagatttggtcttcgtgttcaacttccactggagcaatagctattttgactatcgcgttggttgtttcaagcctgggaagtacaagattgttttagattctgacgatggccttttcggtggatttagtcggcttgatcatgacgctgagtacttcactgctgactggccgcatgacaacaggccgtgttctttctcggtctatgcacccagcagaacagccgtcgtatatgcacctgcatgtgcagaggacgaatagggcacaacaacggttgttgg

SEQ ID NO: 98609 - DNA, 538 bp, Zea mays
  unsure (1)..(538): unsure at all n locations
tggnaaaatgctggatgatgtggaggaagacaattattactcgtctggaattcccgggtcgacccacgcgtccgcacatttgttctctgccaggtgttcaacgaattcaattcgcgtaaaccagatgagctgagtatattcaagggcatttcagggaaccatctgtttattggcatcatagctataacagttgtactccaggcgcttatagttgagttccttggcaagtttgcctcaacggtaaggctaagttggcagctgtggttggtatctataggtcttgctttcttcggctggccgctggcattcgtggggaagcttattcctgttcctaaacgtccattgggagaattctttgcatgctgctgtatctgcaaggggagcaaacaagcccctgacgacgcaacctctaatgataaggaagacaacaagcccgagccttgagatgtcagcaagattgatggttgccaacaatgaccttgttgctgttcttacccggttttgacgtgttggatttgtaattaccactgaatactac

SEQ ID NO: 98610 - DNA, 530 bp, Zea mays
  unsure (1)..(530): unsure at all n locations
cggaaatgtggtaagaggagaagagatgcatcacctcgtcttgaattcccgggtcgacccacgcgtccggcggtttctattttaaatactttatttccttcataaatttaggatcgctgcaacagacatgcaactaaaactcgtaatgaccattttatgctatatactgatactaaatatgctacactgtgtagataattatgcaattcggtatactgcgtaaaaatctgctacaggctgcatgcacacgaatttatgatggaaagaatatgcaatgaaaggaaatgaattgcatgcatagaaacaaaaaatcacatttaatgttttatttgcttcataaatataggatccctgcaacagccatgcaactaaacgcattagaactagtttatgatgtatactgaaacaaattatactacacggtgtaggtaattatgcaattacttacactgcgtaaaaaaatctggcatgttgntcactggtggacgcatctnncggtggaacgtaaaaacctaaagtttgagcataan

SEQ ID NO: 98611 - DNA, 541 bp, Zea mays
  unsure (1)..(541): unsure at all n locations
tggaaattggtngccctccncgcatcgnnactgnacttaccgcactcggnttggaattcccgggtcgacccacgcgtccgcccacgcgtccgagggacgaagcatgctgtttacgtggtgcccgcaggcagctgggctggagcatgatgccgtgggggtgttcctgacgcactccgggtggaactccacgctggagagtatttgcggcggcgttcccatgctgtgctggcccttcttcgccgagcagcagaccaactgccgatacaagtgcaccgagtggggcatcggaaaagagatcggtgacgatgtacagcggggcgaggtagagtcgctcatacgggaggccatggagggggagaaagggcaagagatgctccggcgcgtgactgaactcagggacagcgccgtggccgctgcagggcctgacggacggtctatgcgcaacgtagacaggctcatcgaagaggtgctcctagcctagattgagcactggtgagcatcctagcagtcatgtgtcttcgcgtcttgcactccaatcgat

SEQ ID NO: 98612 - DNA, 546 bp, Zea mays
  unsure (1)..(546): unsure at all n locations
agtaattggtatgctggagacggaagtagtcgctctaccggtctcggaattcccgggtcgacccacgcgtccggcaacaattagttcgaagatcattctgaacagtgcgcagtgccttctgtgctacggattggaaaatcattcagaacttgtgctttttgaataaaaccagctgcagccgctaggcaactcgcggtttcgacagaaattagatgtttgcagcagacaagttgggcttaaataattgcagggcgtaatcctaggttctttctagtagctcacagtaccgactaccgagttcaatcattggcatgcagctgctgcagcagcaagtccaacatctgctaccaacctgtacctgaaagagagccaggctctgggcggcacgagtggttcggactccgacagcgattcgctgctggacatcgaaggtggcccgtgcgagcagagcacgaacccacaggacgtgaagaggatgcgacggatggtgtcgaaccgtgagtctgctcgacggtccangaagaggaagcaagcccacctagctgn

SEQ ID NO: 98613 - DNA, 527 bp, Zea mays
  unsure (1)..(527): unsure at all n locations
nttaattgtgcatggttggagagaagaagtatcactcgtctggaattcccgggtcgacccacgcgtccggaaggctcctgccaaggaggaagaggaggattacgaagaggagtctgacaagtccaagtcggaggtcaatgacgaggatgacgaagagggtagcgaggaggatgaagatgatgacgagtgatggagagctcgctcgagacaatggacggtgcttcatccaacaatggagcggctacacaaggccccgtggcgatcaaaaaaaaggagcctatatccatgtactagaattattcagtttcactccacatcgtgatgttttatttttacttttgtcgtgctataacggatagcgctcctcgttggcgccactggcgggtggttctgcctctggtctggtgtgtttgtgtgtggtcacacttgccagctagcagaggcgcctgcttgtacctagattactggttccattgtcgtcgtcatcggctaacattgtcataatgtcaagttgggtaatgttagat

SEQ ID NO: 98614 - DNA, 525 bp, Zea mays
ttaaagtgtatgtgggaggaatatgatattgctctaccggtccggaattcccgggtcgacccacgcgtccgggggttccttgacaggttccttgcttgaccacctacagcagctgcttgacaggttccttgcttgccgccccactggtggcgcaaagcaaagcaggatggtgctggttgcgctgtatcagattgtgagagaaagcttccagctctactctgatatctgcgaggtgctggcggtgctgctggacagattctttgacatggagtatgcggagtgcgtgaaggcttttgaggcatatgctagtgctgcaaagcagattgatgagctctctgcattctatgcatggtgtaaagatactggagttgcaaggtcatctgagtacccagaggtgcagcgtgtcactgataagttgctggagacgctagaaaagttcatgatggaccgggctttcccttcaaatggtggcaacgaggtgacttcggcatggcaaaatcctgcagcttgacctggggaagctgg

SEQ ID NO: 98615 - DNA, 529 bp, Zea mays
  unsure (1)..(529): unsure at all n locations
ntgtgaatgtggggtaggagtaagaggagagcttctcccggtctggaattcccgggtcgacccacgcgtccgccctcgttcctgtcgcgcagccacgacctttacttccacatcttccccggcggcggcgcggtcagttgaaccatggcggactccaaggccacctcggcggtcaccctccgcacccgcaagttcatgaccaaccgcctcctggcccgcaagcaattcgtgcttgaggtgatccaccccggccgcgccaacgtctccaaggcggagttgaaggagaggcttgccaaggcgtacgaggtgaaggaccccaacaccatctttgtcttcaagttccgcacccacttcggaggaggaaagtccactggtttcggcctcatctacgacaacctcgaggctgccaagaagttcgagccgaaataccgcctcatcaggaatggtcttgctactaaggttgagaagtcccgcaagcaaatgaaggagcggaagaacagggccaagaagatccgtggtgtcaagaaga

SEQ ID NO: 98616 - DNA, 531 bp, Zea mays
tgggaaatgttgtatagagggccaagaagacgtagtactcgtctggaattcccgggtcgacccacgcgtccgcggacgcgtgggcgaggccgccgcccagaccgccttcccttccccgcctccggtgcccaaggccaggccaacagttttgaggtggtaatggcggaccaggctaaccaacccactgtccttcataagctaggtggccagttccacctgagctccagcttctctgaaggtgtacgggcccgtaacatctgcctttctttctcatcttatgaaaggagatttgccacgaggaactacatgacccagagcctttggggcccttcaatgtctgttagcggtggcatcaatgttccagtgatgccgactccgctttttgccaatgctccagccgagaaaggtggcaaaaacttcatgattgatttcatgatgggcggtgtttcagctgctgtttcgaagactgcagctgctcccattgaacgagtgaagctgcttattcagaatcaggatgagatgatcaagtct

SEQ ID NO: 98617 - DNA, 522 bp, Zea mays
ctaaatattctgggctaactgactgcatcgcttgacgatcggtaaccgggcgacccacgcgtacgcggacgcgtgggcaggttcgcgccagattgacttccttccaccctacggtgcccacgccggtcaacagttttgaggcctgatggcggaccacgctaaccaacccactgtccttcataagctatgtggccagttccacctgagctccagcttctctgaaggtgtacgggcccgtaacatctgcctttctttctcatcttatgaaaggagatttgccacgaggaactacatgacccatagcctttggggcccttcaatgtctgttagcggtggcatcaatgttccagcgatgccgactccgctttttgccaatgctccagtcgagaaaagtggcaaaaacttcatgattgatttcatgatgggcggtgtttcagctgctgcttcgaaaacttgcactgctcccattggacgagttgatcttgttaattctaatcaggatgagacgatcagttttgtagc

SEQ ID NO: 98618 - DNA, 533 bp, Zea mays
  unsure (1)..(533): unsure at all n locations
nggggccatggtagtccagctagtatagcactgctctaccggtcttgaattcccgggtcgacccacgcgtccggaatgatggattcagtgagaaacttcttattctgttcattactcataagtttgatggaagctacttcatcgagacagaagatggcacttctggtttagatgtcaaagttgatcacaagggtgaccacgattttcgtgtggatgtttctggtctgcaaactgatgtgactctagcatcttattcaaagggaaacagcaaacacatacatgtctggcatgggaatcatcaccaccattacagacagactgtaagagctgagcatgcagttgaagatagctcccaacctagtcatgcttctgaagggaagtcgcatccaaaagggagtgttctggcaccgatggctggcttggttgtgaaagttttgcttgaagacggtgctcaggtggacgcaaggcagcctgtcatggttatggaagcaatgaagatggagcatggtgtgaaggcgcctcgtgccggatan

SEQ ID NO: 98619 - DNA, 529 bp, Zea mays
tggggaatctgtcctcgataaaatatattgatcgctctaccggtctggaattcccgggtcgacccacgcgtccgcccacgcgtccgatgaagtgaagcaattctttgagggaacatgtggtgaagtttctcgtctgaggctacttggtgattatgtgcactccacatgcatcgcttttgttgagtttgtccaagcagatagtgctattctcgctctgaactgcagtggcattgttcttggaacgcttcctgttagggtgagcccatcaaagacaccagtccgctcgcgatcgccccgtgtgacgtcatactgaattcggctcatctgaagccgtcgtccagggcagcaaatttctgggcaacaaagccctagtcgtgtggccttagagactgccgcatcgcggataagtaattgtcgttgagcagagttctccgtggttaaagtccagtctagtaggaagcgcaaagacccgtctgtatggtcgctgggagatctatcttgaccttctttttctggtctttttggtcct

SEQ ID NO: 98620 - DNA, 545 bp, Zea mays
  unsure (1)..(545): unsure at all n locations
tgcactcgtgctgtanggggccccatcccngngcagtacccggctcctaatagcctttcggggtcgacccacgcgtgcgcacacaccacgatctcagcttacttccacttcagctccaatcacagtcgtgaccggggcgagtgctagctagaggggcgtgaaaatgccgatcaataggatcgccctgaggagccaccagtatgtgttccactcgtgcgccctcaaggcggcgttcgctgagttcatctgcaccctcatcttcagattcgccggccagggctccggcatggtcttcaccaagctgaccggtgggggcccgactaccccggcgggcctgatcgcggctgcggtggcacacgcgttcgcgctgttcagtggccgtgtcggtgggcgcgaacatctccggaggacacgtgaaccccgccgtgaccttcggagccttcgtgggcgggaacataaccctgttacaggaggctctgtactgagtggcacagcttctggggtccccccgaggtgtgcttacagcttctcttttaggacggccg

SEQ ID NO: 98621 - DNA, 543 bp, Zea mays
  unsure (1)..(543): unsure at all n locations
tgggatcggnnnnnnncatgagaggtcgactcctcgattgcccnnccggnntggaattcccggctcgacccacgcgtccgccctctccgaaatcaaggtagcgtacacctttgcagtctctagagccctctctgccactggtgatcccactagtcacaatgcctgccctcgccaagcccgccttccgcaccggcaagcccgccgcggctccgaagccgaagcctgccgccgccaagccgaaggcggccaccgctggtgccgtccacccgccttacttcgagatgatcaaggacgctatcacggcgctcaaggagaggaccggctccagctcgcaagcgatcgccaagtatgtgggggacaagcacggcgcgtctctgccggccaacttcaagaggatgctttccatccagctncgtgggttcgcaggcaagggcaagctcgtgaacgtcaaagctatgtacaagctctccgacgccgccaagaaagcttccatcaagaccaaggcaaactcggcaaaggccgacggtgccaagaccaccgncc

SEQ ID NO: 98622 - DNA, 547 bp, Zea mays
  unsure (1)..(547): unsure at all n locations
aggtaacgtctcctccgaatagtatgtagtgctctaccggtctggaattcccgggccgacccacgcgtccgggtgggttggcttctcctccccctccggtttgggttcgggttcgtgaggttctccggggttcggtttcgtgggtgagcggatcgagatggcggcgtcggatgttgagtaccgctgcttcgtcggcggcctcgcctgggccacggacgaccactccctccacaacgccttcagcacctacggcgaggtcctcgagtccaagatcatcctcgatcgggagacgcagaggtcccgcggcttcggcttcgtcaccttctccacggaggaggcgatgcggaacgccatcgagggcatgaacggcaaggagctggacggccgcaacatcaccgtcaacgaggcccagtcccgcggcggccgtggaggcggcggcggcggcgggtacggtggtggccgtggaggcggcggctaccgcggtggcgggcgccgtgatggcngcngcggctaccgccgtggcggcggctaccgtggtggcngcggc

SEQ ID NO: 98623 - DNA, 549 bp, Zea mays
  unsure (1)..(549): unsure at all n locations
cgagtgttntcatagccaaggggagaagtatcgctctactggttcggaattcccggctcgacccacgcgtccgggcggcaagcaaccacgggcggagctcgtgtgcgtcctcctcctcccgtctataagttccgctccttttcttcctccatatataggggccatcagatccaagaagagggaagagcaccaaggaccttcggcgcccgttcaggatccacatcttcccgagcgagttcttggttgacctcttcctcttcggaccacctccaaggctcttggtgtagcttgccactctcaccaatcaagttttcatgtctgatctcgacattcagatcccaactgccttcgatcccttcgctgaggccaatgctggggactctggtgcggcagcagggtcaaaggactacgtacacgtgcgcatncagcagcgtaatggtcgcaagagcctgaccaccgtccagggattgaagaaggagttcagctacagcaagatcctcaaagatctcaagaaagagttctgctgcaatggtacagtggtccangacc

SEQ ID NO: 98624 - DNA, 550 bp, Zea mays
  unsure (1)..(550): unsure at all n locations
ngggcaaagtgtcatctgtaatatagatagtatcgctccaccggtctggaattcccgggtcgacccacgcgtccgctctctctcacccatggcttcggcggcggttgcgactcaggtggggacttacttcgtgcggaactactacaacctgctgcagcaaacccccgatgtcgtccaccagttctacagcgaagccagcaccatggtccgcgtcgacgacctcaccggcacgaccgcggctgccaacaacatgatggacatacactcactcatcatgtctttgaacttcacccaaattgagatcaagactgccaattttgtgaactcatggggcgatggggtgctagttatggtctctggtctagtgcagaccaaggagtacagccaccaaaggaaatttatccagatgttcttccttgcccctcaagagaagggttactttgtcctcaacgattactttcacttcgttgaccaagaacatgtgcagcctgcgccagtgattgctcangaagactactagagcaatttggcaccaacacagtttgttgga

SEQ ID NO: 98625 - DNA, 515 bp, Zea mays
  unsure (1)..(515): unsure at all n locations
tgccggntnnnttatgaagggcagtacgcaatacgtaccgcgtctggaattcccgggtcgacccacgcgtccggttggtatggtcatatatcagaaaccaatgtacaatatttgctatgagaaaagatctgaaaacagcccgccattgtgcaaggaatctgatgatgcagatgctgcttggaatgtaccgttggaagcatgcatgcacaaactgcctggtggctcaaaagtccgaggatcaaaatggccagagttatggccgcaaaggcttgagaagacccctttctggattgatggttccaaggttggtgtctatggaaagcctgcaaatgaagattttgaggcagataatgcccactggaaacgggttgtaagtaaatcgtatgtgaatggcatgggaattgactggtccaaagtgagaaatggcatggacatgagagctgtgtatggaggtttgctgcaactcctaagggaccaaaggtctgggtcatgaatatcgggccgaacgattaacc

SEQ ID NO: 98626 - DNA, 519 bp, Zea mays
aggacccgtgctgaaatagtaatggatagtattgctctaccggtccggaattcccgggtcgacccacgcgtccgcaaagttcggagtcgaggccgccgcccagaccgccttcccttccccgcctccggtgcccaaggccaggccaacagttttgaggtggtaatggcggaccaggctaaccaacccactgtccttcataagctaggtggccagttccacctgagctccagcttctctgaaggtgtacgggcccgtaacatctgcctttctttctcatcttatgaaaggagatttgccacgaggaactacatgacccagagcctttggggcccttcaatgtctgttagcggtggcatcaatgttccagtgatgccgactccgctttttgccaatgctccagccgagaaaagtggcaaaaacttcatgaatgatttcatggatggccgtggttcaacttgctgttcgaaaactgcagcttgctccattgaacgaagtgaactgcctattcagaatcaaggt

SEQ ID NO: 98627 - DNA, 529 bp, Zea mays
  unsure (1)..(529): unsure at all n locations
gatgggctatgcctagctaccgtaccgcantgtctctactcgtctcggaattgaattcccgggtcagacctacgcgtccgataactgggatcatctcgaaaaccatctctaagaaagggatgcttgaagtgtacaactctttgagcgaggaaggcaaaaaggagttcaacaaggcttatagcgcatcgttttacccatgcatggatatactctacgaatgctatgaagatgtggcctctggaagtgaaatccggagcgtggtgttggctgggcggaggttttatgagaaagagggcctnccagcttttccgatgggcaacatcgaccaaactcgcatgtggaaggttggtgaaaaggtgcgctcaacccgtccggaaagtgatcttggcccgctccatgcctttactgctggaatgtacattgccctgatgatggctcaaattgagatccttgagaagaatgggcanctctactctgagatcattaacgagagcgtgaatgaattcggtgactcgctggacccgttcat

SEQ ID NO: 98628 - DNA, 522 bp, Zea mays
  unsure (1)..(522): unsure at all n locations
taagtgttgtatgggggaggaaggagagatcgctgtaccggtccggaattcccgggtcgacccacgcgtccgcccacgcgtccgcggacgcgtgggctggctccgtcctgatggtcttctaccgaggcccatctctgatcgggaccggaggcgcggccgatgcaactgccctgtcagtggttattgaccacagccatgcctataactatgctcctcagtggctggccgcggccatgctccggaacggcgtggaggcatggcatctcggcgtcgtctgcctcatcggaaactgcttcctgatgggcgcttacctcgtcatccaggccccggtgctgatcaaataccccgcgagcttatccctgaccgnctactcctactccttcgcaaccttgttcatggtggtcaccggcgcgttcgccaccagtgggcttcacgagtgggcgctgacagcgaccgagatcttagccaatctgtacgctggagtccntgccgtctggcttgactacgcgacattgacctggc

SEQ ID NO: 98629 - DNA, 522 bp, Zea mays
  unsure (1)..(522): unsure at all n locations
gagatgctggctagaatggggaagtatatgactactcctccggnctggaatacccggctcgacccacgcgtccgcccacgcgtccggttccccgcctcacccctagccagccgtctcgctagggtttcgccggcgccgccgccgccgccgccgctatgcctcgccgcagctcaggaaggtctgccccacgcccagctccccgtgctgctccagtgaggaacccgccacagccagcacgccaggctcctcctccagctcctgttcgagatggtggtggctccatgtttggaggaatcgggtccaccattgctcaaggtatggcgtttggcacgggtagtgccatggcacacagggctgctgatgctgtattaggtccccggaccattcagcatgagactgttgcctcagaagctgctgctgctgcccctgcccctccagtgatgaatgctgacgctngcagcatncattctaaggctttccaagattgtctcaacaactatggcagcgagatcagcaagtgcc

SEQ ID NO: 98630 - DNA, 528 bp, Zea mays
ggtgtcttctgagcgccgtgctggcctgctagagaagtattgtactacccgtccggaattcccgggtcgacccacgcgtccggcgccattggccagctagagccaaccagattagcttgcagttactgagagtgtgtgtgagagagaggatgggtggcagcggcagggctgctctgctgctggccctggtggtggtggccgtgagcctggccgtggagatccaggccgacgccgggtacggttacggcggcgggtacaccccgacgccgacgccggccaccccgaccccgaagcccgagaagccccccaccaaggggccgaagccggacaagccgtccaaggagcacaagccgaccaaggagcacgggcgcaagccggagaagcgcgccaaggagcacaagccgacgccagccacgtacaccctgagccccacacccacgccggcgacgtacactcccatgcgacgcccaccacgctcaagccagccacatacacttatggccctacggcccaaaaactcgaacatag

SEQ ID NO: 98631 - DNA, 513 bp, Zea mays
  unsure (1)..(513): unsure at all n locations
aggagtgtgttngcatgacggatgggagataagtattcctctccggaattcccgggtcgacccacgcgtccgcggacgcgtgggatgatgctcattcaggatgggagcgtgagattcaaagaactatgttggagctgctgaatcagctagatggttttgactcacgtggagatgttaaagtcattctagcaacaaaccgcattgaaagtcttgatccagccttgcttcggccaggccgtatagaccggaagattgaatttcctctaccagatattaaaactagacgacgcatcttccagatacacacatcgaaaatgacattagctgatgatgtgaacttggaagagtttgttatgaccaaagacgagttttcgggtgctgatattaaggcaatctgcacagaggctggattgcttgccttaagagaacgcagaatgaaggtgacccatgcagatttcaagaaagcaaaagagaaggtgatgtacaagaaggaaggaagtgttccggatggtn

SEQ ID NO: 98632 - DNA, 516 bp, Zea mays
  unsure (1)..(516): unsure at all n locations
agaagtgcgnttgccatgaataagcacgtgactcattactctaccggnctggaattcccgggtcgacccacgcgtccgcagccgtggactctcttccgtaagccctagcccctagcccctagccgccagtgtcatgcgttcgtgctgaggctcaactgctgatccgtcttccaagctctggtatcatccctgagcactgatttaagatgtatctccagtactacatcaacgagaagggggacaaggtctacaccaccaagaaggagtcacctcttggggtgccaacgcagtctgctcacccagctcggttctcacctgatgacaagtactctcgccaacgatacctgttgaagaagagatttggacttctgccaacgcagaatccaggaccgaagtactgaagcttcaagtcaactgtccaacctgcgatgttctttttgtgtcaatgcttngtggttggaatgtactatcttcgttctcgaatatttgtggtccgctagttcaattttgaactan

SEQ ID NO: 98633 - DNA, 512 bp, Zea mays
  unsure (1)..(512): unsure at all n locations
gtataggggctgngatagatggtgggagtatagtattgctctaccggtccggaattcccgggtcgacccacgcgtccggtggacagaggataactgaacgacattaccatgttcttgcaaagcaagagttaaccaaggagtatattgtagaagatcttgaaggagctgaccatgtgccagaccttgatcctagccatgttatagagttgaagatattaggactatattaaacatagctgcatattacatcagataaacattgttgatgaatggggaacagcataccggaaacaaatcccaggttgatgttgcaagaaatacgtacgtcattccacttcacctggagacagtgcaaaatgggcctttgtgtgactgtcgcccataaattcttgtgaagcaaaacacaattgctcattcgaagaacaccatttgaaggatctttggtncaatgtaggcctgatagcttttaacangatattacaatcatggggcacatctaacgaattgagata

SEQ ID NO: 98634 - DNA, 518 bp, Zea mays
  unsure (1)..(518): unsure at all n locations
ggggatgggctgcgatgtataggggagtatatgtgattgctgtaccggtctggaattcccgggtcgacccacgcgtccggaacaaaccagtgagaattcttgtgaagagagatgagctgacccttgagggtatcaagcagttctatgtgaatgtggacaaggaagactggaagctggacacactgtgtgacctgtatgagaccctggccattacccagagtgtcatctttgtcaacacccgccgcaaggtggactggctcactgacaagatgaggagcagggaccacaccgtttctgccactcatggtgacatggaccagaacactagagacatcatcatgagggagttccggtctggctcctcccgtgtgctcatcaccactgacctgcttgctcgtggtattgatgttcagcaggtgtccctggtcatcaactatgatcttcccacccagccagagaactacctgcatcgtattggtcgtagtggtcgtnttggtaagaagggtgttgccatcaac

SEQ ID NO: 98635 - DNA, 521 bp, Zea mays
agagagtgacatgtggtaggggagaagtatactcgtccggactcggaattcccgggtcgacgtcacgcgtgcgcccacgcgtccgcccacgcgtcctgacgatactcgcagctagctgacacggccgagaagcagcttgcattgcaggcgtagtacgtacccagcagcagctagcactagcagtccatcggagcgacgatggtgagaaggacggtgctggcggcgctgctggtggccgccgccctcgccggcggcgcgcgggcgcagctcaaggaggggttctacgactactcctgcccacaggcggagaagatcgtcaaggactacgtgaaggcgcacatcctccacgcgcccgacgtcgccttcaccctgctccgcacccacttccacgactgcttcgtcaggggctgcgacgcgtcagtgctgcttaacgcgacgggcggcagcgaggcggaaaaggacgcggcgcccaacctgacgctgcggcggcttcgcttcatcgaccgcatcaaggcgctgct

SEQ ID NO: 98636 - DNA, 527 bp, Zea mays
  unsure (1)..(527): unsure at all n locations
gtaagtgctatgggggggaggtatgtgatcgctcgtaccggtctcggaattcccgggtcgacccacgcgtccgtcgacccacgcgtccgcccacgcgttcggtgatagcagggtgcagcggctcgaagctggaggaagcggacgggttcgccatggggtccgagggatcctcgggtccagttgtcgttcccagaaactttaggctgctagaagaactagaacgtggtgagaagggcattggtgatggaactgtgagctatgggatggacgatgctgatgacatatttatgcggtcctggacaggaactatcattggtcctcccaacactgttcacgagggacgaatctatcagttaaagctgttttgtgatacagattatccagataaaccaccgactgtccgattccagactcggatcaatatgacatgtgtgaaccaagaaactggattggttgaaccaagtctatttcctatgcttggaaagtgggaaagggaacatacgatggaggacattctgaccagcttn

SEQ ID NO: 98637 - DNA, 513 bp, Zea mays
  unsure (1)..(513): unsure at all n locations
tgaggtggtggccatgaggaggaggtatagtagtacccgtccggaattcccgggtcgacccacgcgtccggagctggaatcggtccaggtgtctacgacttccactcgcccaggatcccctccaccgaggagatcgcggaccgcgtcaacaagatgctcgccgtgctggacaccaacatcctctgggtgaaccctgactgcggtctcaagacacgcaagtacacggaggtgaagcctgccctgaccaacatggtctccgccaccaagctcatccgcacccagctcggcagcgcgaaatgagtcagatttggtagatccatggtttgttgaacacaaaagccagcagggtcatttgtttcgaataatttgggtccttactcctgttccatggcgttaggttagcctcattggtgttggtggggtacggcgttacgtgtccgtgttctaagtttggagtgtgtgtttctcttttttggntggggtttgtgtgctttggntatataaacagaaaag

SEQ ID NO: 98638 - DNA, 514 bp, Zea mays
tggatgtgtaggcatgcatagaatagtagcgtcctacccgtccggaattcccgggtcgacccacgcgtccgcggacgcgtgggcggacgcgtgggtccggtacgcgtgggcggacgcgtgggtagatcgcgagcgccgccctttttttttttttttaacaactttctgccttactgaaccactgcaaaaccagaacaggttcactcgctcttgctctcggtctgtctaaacctttgtgcttacacctggcagaacgcacatatccaatatacatccatcaaccatagcaccaggtccaaaagaaaaatccaagaaataatagtcgacttaaatcagacatgatcaatcaagaccaagcaatatccttctatgtatgtactagaacaaaaagatgtgacatgcacacattgtgttggatgtgttggtatcatcaatcaaggaccttcttgacttcctgaacaaacttcgctctctgagagggatccaatttatctaatagcgtagaaagaccctt

SEQ ID NO: 98639 - DNA, 519 bp, Zea mays
agggagggctgcgcagtcaagaattagtatgcactgcctgtactcggtctggaattcccgggtcgacccacgcgtccgctcgccaaatacacccagggtttcagcggtgcagatatcacagagatctgccagcgcgcgtgcaagtatgccatcagggagaacatcgagaaggatatcgagagggagaggcgcagcaaagacaaccccgaagctatggaagaagacgaggtagacgacatcgctgagatcaaggctgctcacttcgaggagtccatgaagtacgcccgtcgcagcgtgagtgacgccgacatccgcaagtaccaggccttcgcccagacactccagcagtcccgcgggtttggcagcgagttccggttccgcgaccaaccgacggcagctgctgctgcagccgatcccttcgcatccgctgcagcagcagctgacgatgatgacttatacagttaaattagcagtcctgtgttgtgacgcatattgaagactttgctttcgtatatgctt

SEQ ID NO: 98640 - DNA, 510 bp, Zea mays
  unsure (1)..(510): unsure at all n locations
agacaggnctnngcatgatggagaggataaagtattgctctaccggtctcggaattcccgggtcgacccacgcgtccgggtgaaatggagaatccaggggatggatgattcatctttacctctgtcagtcaattgctggccgtctgtatctggaaatgaaacctatgtgaacattgaatatgaagcttctgagatgtttgatctgcacaatgttgtcatatctatacctctgcctgcagttcgggaggctccaagtgtcagacagatagatggagagtggaagttggactcaagaaactctgtgttggaatggtctattctccttattgatcagtcgaatcgcagtggttccatggaatttgttgttcccccagctgatccgtcatcatttttccccatctctgntggattttctgcatcgagtactttcagtgatctgaaggttactggaatccttnctctgaaggaaggcacccttccgaagtnttccaccggcttcgttgctacagt

SEQ ID NO: 98641 - DNA, 516 bp, Zea mays
gttatgtctgacatgatggtaaggagtgagagtattgctgtaccggtctcggaattcccgggtcgacccacgcgtccgcggacgcgtgggaaatgatttgaagagccctaagaagcaagacctagagagaactgctggatctgttctttttgactgggagacagaaatatatgtagcaagggcacctggacgtttggacgtcatgggtggcattgctgattattcagggagtcttgttttgcagatgcctcttcgggaagcttgccatgttgctgttcagagaaaccatcccagcaagcagaagctttggaaacatacaaaagcaagacagcttgttaacggaagcttggtacctgtgatacaaattggatcatttggttctgatttgagtaaccgtgcaccaacttttgatatggacctgtcagattttatggaatgatggtaacccatatcctaatgagaaggcagggagcctttctggcaggatccatcccaaaaatgggctggctatgttgt

SEQ ID NO: 98642 - DNA, 519 bp, Zea mays
  unsure (1)..(519): unsure at all n locations
nggaagtgtatagtgggggatggtaatcatcactctnccggntcggaattcccgggtcgacccacgcgtccggttttggagctctgcgcaatgaccatgatatattccaaacgtttgagggggacaatactgttcttctgcagcaggtcgctggagatctcctgaagcagtaccaggagaagtttaagggagggacactttcagtcacttggaattacttaagggactccatgggtacctacctgtcccagcctaatcctgtcactgcccgatgggagggtgaagatcatctgcgggatcctaatttccagctggatgcattcagataccgaacatctcggttgctacatagtgttgctgctcggcttcagaaacacagcaagacgcttggaggttttggtgcgtggaatagatgtttgaatcatcttcttacgcttgcagaatcacacattgagtctgtcatccttgcaaagttcattgaatcagtgaaaagcttgcctgacgaaaaatcgcgggaag

SEQ ID NO: 98643 - DNA, 523 bp, Zea mays
  unsure (1)..(523): unsure at all n locations
ngaatatgtaggatggtggggaggtggaaaggtatncttctaccggatcggaattcccgggtcgacccacgcgtccgcgagaagcccagaaggtgagaagatagatagagagagagagagtgatcggtacaaggatcaccgctgtgcctgcgcgtgctgcttcaccgaatcgagtcagaccctgtccgaatccgagccaagggatggcaaccggtagtgaggcctcgaaggcagctgaggctgtggttgactggcataaacaggacagcaagaggatgctccatgcggattaccgtgttggggatctggaccgtacaatcaagtactacacggaatgctttgggatgaaactgctgaggaaaagggatgttcctgatgagaagtacaccaacgccttncttggctttgggccagagaacaccaactttgcagttgaatngacatacaactatggcgttgacaagtatgatattggaacggggctttgggcattcgcaaatgctaatgatgatgtgtacaagtt

SEQ ID NO: 98644 - DNA, 514 bp, Zea mays
  unsure (1)..(514): unsure at all n locations
tggcgtgctggccatgcacgggaagtagcgtcctaccggtccggaattcccgggtcgacccacgcgtccgcccacgcgtccgcccacgcgtccgcccactcgtccgctcgccttgcgcttcctcgccgccccagttccccaccccctgctcacccacccgtcccctcctgctcgcccatggctcccatcgctgtcggcgacgccctccccgacggccagctcgggtggttcgacgagaacgaccagctgcagcaggtctccgtccacgcgctcgccgccggcaagaaggtcatcctcttcggcgtccccggcgccttcaccccgacctgcagcaaccagcatgtgccaggcttcatcacacaggctgagcagctcaaagccaagggtgtagacgagatcctgcttatcagcgttaacgaccccttcgtcatgaaagcgtgggcgaagacctaccccgagaacaagcacgtggagttccttggcgacggatctggaacgtacaccaaggcgctcn

SEQ ID NO: 98645 - DNA, 511 bp, Zea mays
  unsure (1)..(511): unsure at all n locations
gcaggntngcatgatgacgcggtaaggtaataatcgtccggaattcccgggtcgacccacgcgtccgcccacgcgtccgcccacgcgtccgaataaatagcaatggaggtgcaaaatttgatggaatgccaaggttcaccgctcgagttgctgttattgaggcgctgaaggaaaaggggttgtataaggacacaaagaagaatgaaatgagcttgggtgtttgttcaagaactaatgatgtagtggaacctatgataaaaccacagtggtttgttaattgcaaccacatggccaaggcgggccttgacgctgtaaggtcgaaaaagattgaaattattccccagcagtatgagcaagactggtacagatggcttgaaaatatacgtgattggtgtgtctcaaggcaactttggtggggacatcgtgtacctgcatggtatgtgacactagaggatgacctggataaaaaccttggttcttgaaatgatcccttgatagtcgcaggaaacga

SEQ ID NO: 98646 - DNA, 513 bp, Zea mays
cgatggctggaatgaggtggagggaaaagtggtaccggtccggaattcccgggtcgacccacgcgtccgcggacgcgtgggcgtacccggaggagaactcgcggttcctgcgcacgaacgggatccgcgttcaccagttcgccgtcgaagggagcaagagtggtccgacagtgctggataccatgtcggcgcaggaaccattcgtccacatccccgaagaaacgatccgagaggcgctcaaagttgtccttgacgtgagaaaccagccggtcctcatccactgcaagagaggcaagcaccggactggctgcgtcgtcggatgcctgaggaagctgcagaagtggtgcctgtcctccgtgttcgacgagtacctgcacttcgcggcggcgaaggcgaggaccaccgaccagaggttcatggagctgttcgacgcgtcgagcctgatgcacctgacggcggcctcgcaatactgaccactgaccagagcgggggcagtggttcccgaaccgtccc

SEQ ID NO: 98647 - DNA, 511 bp, Zea mays
  unsure (1)..(511): unsure at all n locations
tgtagggctgcgacgatggggagtatatgtgatctgctgtaccggtccggaattcccgggtcgacccacgcgtccgggttgagattgacaacttcatggtccaacagcttgatggaacctccaatgagtggggctggtgcaaacagaagcttggagcaaatgccatccttgcggtttcacttgctgtgtgcaaagctggagctatggtgaagaagattcctctttaccagcacatcgcaaatcttgctgggaacaaaactctggtgctccctgtacctgcctttaatgtgattaatggagggtcacatgctggaaacaagcttgccatgcaggagttcatgatcctnccaactggtgcctnctcgttcaaagaagccatgaaaatgggaagtgaggtgtaccacaaccttgagagcataatcaagaagaagacggtcaagatgcgaccaatgttgggaataagggtggttttgcacttacaattanggaaaccaagaaaggctttgactat

SEQ ID NO: 98648 - DNA, 514 bp, Zea mays
  unsure (1)..(514): unsure at all n locations
agtggctgagcctggatgtgagggtatagtattgctcgtccggtctggaattcccgggtcgacccacgcgtccggatactcttccttttgccaccatgttgctctggttctcttgctgcaatgtcagtgtttgagtcgaagtacaaagaaggccttactagggaggagggaatacagattgtgtgcgaagcaatctgtgctggtattttcaatgacttgggtagtgggagcaacgtggacgtctgcgtgataaccaaggggaagacagaatacttgagaaaccaccagttgccgaatcccaagacttatgctagttcaaagggatacagtttcaccaaggggcagactgaagtactgtcttcaaaggtcacacttctaaagcagaaggttgaggtcgccgaaggtggtgatgctatggaggagtgatcttgcatcctgcattcatacaagcatattctgaatctgtgtaactttgcttagtggatcagctagaacangaagaaatgaaatttgg

SEQ ID NO: 98649 - DNA, 525 bp, Zea mays
  unsure (1)..(525): unsure at all n locations
tggaagtgcttagtgtggggtgagggacatgtatgtaccggttcggaattcccgggtcgacccacgcgtccgggtcaatgagattctgtctcactatccaatcaactacaagcaatctggtattattccgctgcttgatcttgcacagcagcagcatggtggatgggtgccagttgcagcaatggatgctattgctaaaattgtcgaagttgcaccaatcagggtttatgaagttgcaaccttttataccatgtttaacaggactaaggttggtaaataccaccttctggtgtgtggaactacaccttgtatgattcgtggttcacgtgaaatcgaagagacgttgttggagcaccttggagttaaacgaaatgaggtgaccagtgatggtttattttctgttggagaaatggagtgcatgggttgctgtgtgaatgctcctatgattgctgtggctgactactcgaaaggctcagagggttacacatataactactatgaggacctnactccaaaacgagttgt

SEQ ID NO: 98650 - DNA, 514 bp, Zea mays
agttagtgctgggcttgcaacgctcgtagctccctaccggtcttgaattcccgggtcgacccacgcgtccgcttcaacacattggcaaatcaggctgtggtgcgggcagctggtactgatggccaaaagaggacatacggtgtcataaaacaccgtttgggcgatctattttatcgcctagtatctcaaaagttcgaggatcctgccgaaggtgaagaagctttggtcggcaaatttaagaaactgtatgatgacctcaccactggtttccgcaatctcgaagacgaggcacggtgaactagtgtagattctgtgtaaacaaggactgccaaatgttttataagatacataaattgtagattgagatcatctgtaagaattattcccaccgttgcaccatctcttcggcaccactgttttagtcatcggtgcctgaatggcacccctgttatttcatgtatcaattattgctgtcattgtaataagcgatgggcattgatgtaattgaataaat

SEQ ID NO: 98651 - DNA, 514 bp, Zea mays
aggctgagtaatgtggaagaggggcacggtagctacccgtccggaattcccgggtcgacccacgcgtccgcccacgcgtccgcccacgcgtccgcccacgtgtccgcggacgcgtgggcggagcaacgccgccgccgtcatcttcagcctatccgcgctggacggcaacaaggcgaggatcggcgagctcggcgcgatgaggccgctggtggagctcctcgagcacggcagcacggcagcgaggaaagacgcggcctcggccatcttcaacctgtgcacgctgcacgagaacaagtcgcgggccaccaagagcggggccgtcgacgtgacgctgagggccgtcgcctgcgccggggacggctctggctccggctcgctggtggacgagtctctggccgtactcgcgctgctgtcgggcgaccacgaggcggtggaagaggtcggcgagacgggctgcgtggcctccatgctccacgtcgtgaaggacgacccgtgcaagcgcaacaaggagaac

SEQ ID NO: 98652 - DNA, 514 bp, Zea mays
  unsure (1)..(514): unsure at all n locations
agtctngcctagatggggggaagaaagggagtgctggtaccggtctcggaattcccgggtcgacccacgcgtccgcccacgcgtccggtcgaggccgaggccgtatctgaggctgagccgaccgaggcagagccgaaggaagcagagcccgaggccgccgcgccggcagcagagacggaggctgctgctgccccggtcgaggctgctgagccggagatagccgccgagaccaaggaggcggcggctgtggaggctaacgaggaggagggggaggcatcgcctgcggttgctgccactcctgaggtcgcagcgaccgaggaggaagcggcggtccctgctcccgaggccgccgtcgctgccgtcgagaagtccgtcgagtgagtccagcgccggacggcggccgatctagctcgctgcgtcagcctgtcacctggcgtgcgccgctctggtgccactgccacggcaacagcacggcatggcgccggcataggtcgctaggaaaaaccttgctttg

SEQ ID NO: 98653 - DNA, 516 bp, Zea mays
  unsure (1)..(516): unsure at all n locations
ngtngtgggctcgcattgatacgaactatatagaatctgctctaccggtccggaattcccgggtcgacccacgcgtccgcccacgcgtccgcccacgcgtccgcaaatatatggccctttgcttcgaatatatgcataatggaagccttgacaagttcattattggtattattgcgctcttcttattctcgtatgatcaattgaattcacttgaagtaaccattcttcaaattcacattttgagagactgtttgctccaacagatgaaaatagtgtccatgactggtccacacgctatgcgataatcaaggggatctgtgagggtttgaaataccttcacgaggaattgaatcctcctatttatcatttggatttaaaaccagctaatattttgttggatgacaatatgatgccaaagcttgcagattttggcttgtcaaagatttttgacaggaacgaacacgaatcacacaaagttgtgtaggaacacaatgatatctaccacccgaatattta

SEQ ID NO: 98654 - DNA, 513 bp, Zea mays
agatggtcgtattgatggtggaagtaaagtattgcttctaccggtctcggaattcccgggtcgacccacgcgtccgcccacgcgtccgaaattgacaggaatattacttggtgatcctataagataatgtgctgtgaaccctgatttgttttagctgcttgtgttcgttttgtctacttagtcttgcacactgaggacctttatcgaggttgtcagtctgcaagttgaatcatggcggagcacttggcttcgatctttggtaccgagaaggacagggtcaactgccctttttacttcaagattggggcttgtcgtcatggggatcgctgttctcgtctgcacaacaggccaactatatcgccaactcttgtgcttgctaacatgtatcagcgccctgatatgataactcctggagttgatgctcaaggccaacctattgatcctgagaagatgcaagagcattttgaggacttctatgaggacatctatgaggagttgggcaagtttggtgag

SEQ ID NO: 98655 - DNA, 519 bp, Zea mays
  unsure (1)..(519): unsure at all n locations
ngaaagtatatggggggaggagagaacgatgtaccggtctcggaattcccgggtcgacccacgcgtccgcagcgctcaagttctcgcgcccacagccaaatttttctccactcaatcgcggcataagctgcactgcagccatggacgccagcggagccggtagcaaggcgaagaagggggcggctgggcgcaaggctggcggccccaggaagaagtcggtgtcgcggtccgtcaaggccgggctgcagttccccgtcggccggatcgggcgctacctcaagaaggggcggtacgcgcagcgcgtgggcaccggcgcccccgtctatctcgccgccgtgcttgagtacctcgccgccgaggtgctggagctgggccggaacgcggcgaaggacaacangaagacgcgcatcgtcccgcgacacttgctcctgggcgatcgtaacgacgttgagctcggcaagctgctgtctggcgtcaccatcgcgcacggcgggtgtctcccaacatcaccccggtctc

SEQ ID NO: 98656 - DNA, 514 bp, Zea mays
  unsure (1)..(514): unsure at all n locations
agaaatgtctgacacgaaggggggaattgtatacctcgtccggaattcccgggtcgacccacgcgtccgcccacgcgtccgggctactaacgcccccgatgtcgtcgtctggggatcaggctcgccgctgcgcgagttcctgcacgtcgatgacctcgccgacgccgtcatcttcctgatgggtcactactccggcatggagcatgtcaatgtggggagtgggagcgaggtgaccatcaaggagctcgccgaactagtcaaggaggtggtcggcttccaggggaacctggtgtgggactccagcaagccggacggcacacccaggaagctcatggatagctccaagatacaggggatggggtggaagcccaagatcgccctcaaggaaggcctcgtggaaacctacaaatggtacgtcgagaatgtcatctcgaacaagaagtagagccgtgacatgccagtggtgctgtcttgctcttccgtgctgctttcacaaagtgtntggatatctgat

SEQ ID NO: 98657 - DNA, 509 bp, Zea mays
atgctgcatgtgcgtttagggggggagtagtactcgtccggaattcccgggtcgacccacgcgtccggtgctctgtccacctctctcgctctgggcctccgtcgccgccctaagccacgtgctgaggctttcgttggtctcttcgccggcgacgagcacccagcagttctgtagaaatggctgatggtgaggacatccagcctcttgtctgcgacaatggcactggaatggtcaaggctggttttgctggcgatgatgcaccaagggcggttttccctagcattgttggccgtcctcgccacactggtgtcatggtagggatgggacagaaggacgcatatgttggcgatgaggcacagtccaagagaggtattcttacgctcaagtacccgattgagcacggtattgtgagcaactgggatgacatggagaaaatctggcatcatactttctacaacgagcttcgtgttgccccagaggagcaccctgtgttgctcaccgaggcttct

SEQ ID NO: 98658 - DNA, 519 bp, Zea mays
  unsure (1)..(519): unsure at all n locations
agaatagggctcngcacgaatggggagtataaagtattgctctaccggtccggaattcccgggtcgacccacgcgtccgagagaaactgccaactaagactacctttttttacactgatgaagtgaaggagaggttcaacaggattctcaaatactatattgggacacacaatttccataacttcactacaagaaccaaggcagaggatcctgcagcaaaaagatttatcatttcctttgctgctgaccgtgttgtcagcctggatgggattgattttgtcaggtgtgaagttgttggacagagtttcatgctccatcagatccggaagatgattggtcttgctgtagctgtgatgaggaactgtgcacctgaatcaatttatgatgtcgcctttcgcaaggatgtcaatcttaatgtgcctactgcacctgaggtcggactgtacctagatgaatgtatgttcacatcatacaacangaaatggaaggattcacatgaggcagttttcatggaacctn

SEQ ID NO: 98659 - DNA, 522 bp, Zea mays
  unsure (1)..(522): unsure at all n locations
taaagtgcttagggggggagggagggagtgctgtaccggtctcggaattcccgggtcgacccacgcgtccgggtgggttggcttctcctccccctccggttcgggttcgggttcgtgaggttctccggggttcggtttcgtgggtgagcggatcgagatggcggcgtcggatgttgagtaccgctgcttcgtcggcggcctcgcctgggccacggacgaccactccctccacaacgccttcagcacctacggcgaggtcctcgagtccaagatcatcctcgatcgggagacgcagaggtcccgcggcttcggcttcgtcaccttctccacggaggaggcgatgcggaacgccatcgagggcatgaacggcaaggagctggacggccgcaacatcaccgtcaacgaggcccagtcccgcggcggccgtggaggcggcggccgcggcgggtacggtggtggcccgtgaggcggcggctaccgccgtggcnggcgccgtgatggcngcngcggctaccgccgtgg

SEQ ID NO: 98660 - DNA, 521 bp, Zea mays
agttactttgaggggggagggaaggatatgctggtaccggtccggaattcccgggtcgacccacgcgtccgaacaaaaggcaggctatttgctgaggccgttgtgggtcataagggatttactgaatcagcagcaggaaaggcaagcagcgagaatgaggaagggcaagctgtctcgttagaagatgatgtcgggataagtacagacgcagatgaagagcttccggtatctgaagatgatccagaagtgctactgaggaggcttcaagagcttgctgatgagaattattcgactgggaacaactgttttgttttccctgaagtagtgaaagctgattcgatgattgatctttacttaaaccgcagcatgtcggccttagctagtgagtccgacgtttttgtaaaaggagcattcaatggttggagatggaaccgtttcacttgaacaatgcatagaagcgaattaagaagggattggtggtgctgcaagctctacattcccaaacaggcatacagactaaa

SEQ ID NO: 98661 - DNA, 522 bp, Zea mays
agggccgctgtgtgagcatagaatggggaagtagagtaatacccgtccggaattcccgggtcgacccacgcgtccgcccacgcgtccgcacaaatccttggtgcggtcgataagtacatatgccagttctctgaggaatcaaacaatttttggggaagtaggcatgaactaatgctgggaaacactttcatttccaataaagagtcaaccccaccgcaaggggaggtgccccctcaggatttctctaggcgtgttttggaagggttccaagtcaccccaatatggcatcaaggtttcatacgtgatgatggaaggtcaaactacgtgccaaatgtccaaacagctcgctgggagtacagcactcgtccagtttatgggtggggtgatgtcaaatctaagcagttgtccacagctggttggcttgcagcttttcctttctttgaacctcattgggcaaattgcattgctagtggcttgtccacaggatggaatagatgggaatgggaacgggttggaatttaa

SEQ ID NO: 98662 - DNA, 517 bp, Zea mays
tggtgagggcttgcatgatggggggataaggagatgctctaccggtccggaattcccgggtcgacccacgcgtccgcccacgcgtccggggcgactcagtcaacatgaaccaatgggtctctctcgtgtgcatggtggaggcctcaatacctgacgacaggctcaagatacgcaccttcaatggctcactcatctccttcaaggcattggaatacaacgcaacgatagatttctactggtcaccactactggtggagtctaacagcgacaaccccattatccaccgggtggagtaccggatcataagggcagacagaattgagaagcatgccagtgtctggagggatgccgacatcattgtcttcaattcttacctgtggtggaggaagcagaaggatgacatgaggatgaaggtcatgtatggttcgttcgaagatggtgatgcaaagttagacgagatggaaaatggtccatggtttcgagataactctcaagaaactaaccgaatggcttgggg

SEQ ID NO: 98663 - DNA, 515 bp, Zea mays
atatgctgaaatgtagggggaggaaaagggagtgcttgtaccggtctcggaattcccgggtcgacccacgcgtccgcacggtccctgcctatttcaacgactcgcataggcaggccacaaaggatgctggggtgattgctggcctcaatgtgctgcgtatcatcaatgagccaaccgctgctgctattgcctatggtcttgacaagaaggcaaccagtgtcggtgagaagaatgtcctcatttttgaccttggaggtggtaccttcgatgtctccctccttacaattgaggaaggtatctttgaagtcaaggccacagctggcgacacccatcttggtggtgaggactttgacaacaggatggttaaccactttgtccaggagttcaagagaaagaacaagaaggatatcactggcaacccgagggctctccggcggctgaggacctcttgtgagagggccaagagaactctgtcttccactgcccagaccaccattgagattgactcgctgtac

SEQ ID NO: 98664 - DNA, 526 bp, Zea mays
  unsure (1)..(526): unsure at all n locations
aattgttgtcaatgaggaggaaggacagtatcgctctaccggtccggaattcccgggtcgacccacgcgtccgaccgtacataggcagggacgaagcgttggttggagccaatggagtcggtgggtcggagtccgagcggaagccgctgtcagaggtggtcggcgactgcgtccagcgctggttccaggacgcgtacaaggaggcgcgcaaaggagacatcgccaaccaggtgcttgtagcgcagatgttcttctcgggttatgggacccccaagaacgagtacaagggaaaacaatggatggatagagcatcaaggttcaggtcttccgctttgaaggttggcatgaaacgtccaggatacaatgcaagtgactcagactctgatgacgatgcaaatgatgacgccaaccaataacactcaattacaaattgagttattagttaggagattcacaaggaattntccttggtgcctggactttacggtcgaattacttgggtggttatgcaattaatagcactggg

SEQ ID NO: 98665 - DNA, 532 bp, Zea mays
  unsure (1)..(532): unsure at all n locations
nggaaactggtgaatggttggtaggaagggaaagtgctcgntccggttcggaattcccgggtcgacccacgcgtaaagcccacgcgtccggggagacaagacttgtatttggattccaaaggctattgtaactaaccttgtaggacccaacaagagttgggtacctaaaacccaagcgtaaattgtcttgcaggtttatgcatctgggggctcaagctggattatcgacagcggatgcacaaaccacatgacggaggagaagaagatgttcacctcctacgtcaagaacaaggattcccaggatacgatcatctttggagatgggaaccaaggcaaggtcaaaggcttgggcaagatagccatcaccaacgagcactccatttcaaacgtatttctagtagagtcgcttggttacaaccttctttctgtaagtcaattgtgccacatgggctacaattgtttggttacaaatgttgatgtttctgtctttaagagtgatggttcattagcatttaagggtgtattagacgac

SEQ ID NO: 98666 - DNA, 517 bp, Zea mays
  unsure (1)..(517): unsure at all n locations
tggggctgtgtggcatgaatagatagtactgctctacncgtctggaattcccgggtcgacccacgcgtccgcccacgcgtccgcagctaataaggtaaggtgcgactaaaatggctccaacgaccgccaccaaggacgacagtggctacggcgacgagcgccggcgcgagctgcaggcgttcgacgacacgaagctgggggtgaaaggcctggtggactccggcgtcaagtccatcccgtccatcttccaccacccgccggaagccctgagcgacataatttctccggcgccgcctctgccgccgtcgtcgccctccggcgccgccatcccggtggtggacctctcggtgacgcggcgcgaggacctagtcgagcaggtgaggcacgcggccgggacggtgggcttcttctggctggtgaaccacggcgtggcggaggagctgatgggcggcatgctccgcggggtgcgccaggtcaacgagggccccgtggagggcaaacangcgctctacttgan

SEQ ID NO: 98667 - DNA, 514 bp, Zea mays
  unsure (1)..(514): unsure at all n locations
aggctgtgtgaatagaaaggaagggagtgctctaccggtctggaattcccgggtcgacccacgcgtccggcgacacacgctgacagctcacggctgaccttcccgacggcctccagctccatcttgattgttgaggcgaagccccggtgcgtaagagtctgccatggccagcgagaataaggtctttgggttcgaggaagtcgccaagcacaacgtcaccaaggactgctggatcatcatcgccggcaaggtgtatgacgtcactccgtttatggatgagcatcctggtggagacgaggttttgctagctgtaaccgggaaagatgctacagctgatttcgaagatattggccacagtgattccgcaagggacatgatggagaagtaccacatcgggcagatagatgctttaacaatcccagcaaagcgtgctcatgtgcagccccagcaagcacccagccatgcagacaagataatgaccctcccatcaagatcctacagntncttgtgcccc

SEQ ID NO: 98668 - DNA, 516 bp, Zea mays
  unsure (1)..(516): unsure at all n locations
cgagtgntnngcatagaatgggggagggaagtattactccttcggnctggaattcccgggtcgacccacgcgtccgcacccttgaggtcgagtcttctgataccattgataatgtcaaggccaagatccaggacaaggagggcatccctccggaccagcagcggctcatttttgccggcaagcagctcgaggacgggcgcacgctggccgactacaacattcagaaggagagcaccctccacttggtgctgcgtctcaggggtggcatgcagatcttcgtgaagacacttactggcaagacgatcacccttgaggtggagtcctcagacaccattgacaacgtcaaggccaagatccaggacaaggagggcattccaccggaccagcagcggctgatcttcgccggcaagcagctggaggatggtcgcaccttggctgactacaacatccagaaggagagcaccctncacctgggtgctcgnnctcagggtggtatgcagatttttgtgaagacat

SEQ ID NO: 98669 - DNA, 518 bp, Zea mays
tgtttgcgctgccatgacgggggagtatatagcatcgctctaccggtccggaattcccgggtcgacccacgcgtccgcggacgcgtgggcaagatgtcttgaggttaatgcaccatacctatcgaaaccagggatttcagttgtatgttagcttctttgagatatatggtggcaaattatttgaccttctcaacgataggagcaaactttgcatgagagaggatggaaagcaaaaggtttgtattgttggtttgcaagagtatagagtgtccgatgtagagactatcaaggagttgattgaaaaaggcagtgctaccagaagtactggcacaaccggtgcaaatgaagagtcctcaaggtctcatgccattcttcagcttgccattaaacgccgtgtggatggcaatgactccaaaccacccagaccagtcggcaagttgtcatttattgaccttgctggcagcgagcgtggtgctgatacaactgacaatgataaacaaacaagaatcgagggtgct

SEQ ID NO: 98670 - DNA, 518 bp, Zea mays
  unsure (1)..(518): unsure at all n locations
tttgggnnnnccgactgggactgagcgtagcattagtgctctactcgtctggagtccccggctcgacccacgcgtgcggtggggcacgaacgaggcgctcatcatcatcatcctcggccaccgcgacgccgcgcagcgccgcgccatccgtcgcgcttacgccgaggcctacggcgaggagctcctccgctccatcacggacgagatctccggcgacttcgagagggccgtgatcctgtggacgctggacccagcggagcgcgacgcggtgctggccaacgaggcggcacggaagtggaagcccaggaaccgtgtgctcgacgagatcgcctgcacgcgcaccttcaagcagatcatcgcgaccaggcaggccttatacgagcggctcaagcgcctgatctttgaagtcatgcacttgcacgattggtcgaacttgcgtgagtataacattccactggatagcaccttccaccttgatgttccacttaagggtgggatgcagatatttttgaagcccg

SEQ ID NO: 98671 - DNA, 532 bp, Zea mays
  unsure (1)..(532): unsure at all n locations
ggcaggggnnnnaatgagctgaagttcnnctcattaccncntcggntcggaattcccggcccgacccacgcgtccgctcgggagttgagaggcatgtgaccctcttcactcgcttgaccctcctcttcactcgctggtcccagaagtcacgcaccaaacaccaccaccaaagaaggcgagaacgtactccgtccctcccctcccctcccctccccttcccctcgaggctccaggaccgtctcctcgcctgctcatccgccgctgctccccttctctgggctcggagaaccggagagaagcgcgcgcggccatggcgtccagcgcctctcggttcatcaagtgcgtcacggtcggcgacggtgccgtgggcaagacatgtatgctcatctgctacaccagcaacaagttccccactgactacatacctacggtgttcgacaatttcagtgcaaatgtagttgtggatggcaccactgtgaatttgggcctttgggataccgctgggcangaagattacaaccgnctgaggccc

SEQ ID NO: 98672 - DNA, 777 bp, Zea mays
  unsure (1)..(777): unsure at all n locations
ttggggnnnnttaagagaaagacgtatggaatgctcnaccggnccggaattcccgggtcgacccacgcgtgcggatcgtggaaagcaaagcctagaaacaatatgtcttcttttggcttacaaggtcaagtacccggagaacttctttcttctaaggggcaaccatgaatgcgcatcagtaaatcgcatctatggtttttatgacgagtgcaaacgcagattcagtgtaaagctgtggaaaacattcacagactgttttaactgcttgccagtgtcagcattgatagatgaaaagattctctgtatgcatggtggtctatctccggagttgaacaagcttgagcaaatactcaacctgaatcgccccacagacgtgcctgatactggattgctctgtgatcttctttggtctgatccttccaatgaagcaacaggctgggccatcaatgatcgtggtgtttcattcacatttggtcctgataaaggttctgaatttcttgagaggcatgatttggaccttatctgccgagcacatcangttgtcgaagattgatacgaggttttcgctagccgtcaactcgtaacatattttaagcccctactactngtgagaatcgacacgctggtgcctgatgagtgtagagatcatgatgtgctcgtccaaaattgaactgcaggaaatgatggggggtcactataacaattggttcagcattcagggatgtgacacgccttggttgcaccttcgtcaaagggtcattacagggtggatacagg

SEQ ID NO: 98673 - DNA, 763 bp, Zea mays
  unsure (1)..(763): unsure at all n locations
aggggctntttttttttgattttcttgaaatcgctcnaccggntcagaatacccgggtcgacccacgcgtccgagacgttttatcatcatgttttgttgcttttggttcttgaacagcgtttgcagctagctgtaatgctttaattcgactttctatatattgntgaaccgtgttgtcgnaaaaaaaaaaaaaaaaaaaaaaaaaaaaaaaaaaaaaaaaggggcggccgctctagaggatccaagcttacgtacgcgtgcatgcgacgtcatagctcttctatagtgtcacctaaattcaattcactggccgtcgttttacaacgtcgtgactgggaaaaccctggcgttacccaacttaatcgccttgcagcacatccccctttcgccagctggcgtaatagcgaagaggcccgcaccgatcgcccttcccaacagttgcgcaacctgaatggcgaatgggacgcgccctgtaagcgcgcattaagcgcggcgggtgtggggttacgcgcacgtgaccggtacattgcaagcgccctagcgcccgctctttcgtttttttcctttctttttcgcaacgtcgccgttttcccgtcaagtctaatcggggctccttaaggttcgaataaggcttaagcacctcgaccaaaaactgataggtgatgtcaactatggccatcgcctaaaacggtttcgctctgaatggaccacgtttaaaatgattttgtcaacggacaaaataactattgggtatctttattaa

SEQ ID NO: 98674 - DNA, 774 bp, Zea mays
  unsure (1)..(774): unsure at all n locations
agctggtgtttcccgccaataccgggcaantattgtnacngctcgccaccggtttcggaattcccggctcgacccacgcgtccggggcaggcagaaccgctcgccaacaattgtcatcgtttggtccatccggcttgcgtgtatcttctccttgctgtgggtgaagatcgatcctttcatctccccgacacagaaagctgccgccttggggcaatgtggtgtgaactgctgatccagattgggacctcttatctgaagaggctcatccaaagatctgccccctcgtgtaaatacctgagggggctagatgggaattttttgttgaaaatgaggatggacctccatccaagttctgcctgtgttatttaccgtcttcggggccggggctgttggaaacaatcagggaccctttctaccttgctggaagagcgggccaacagcgaaaatggggattcctgcattttttattccgtggtgtttattgtttaagagtaaataatctttggttggaggcacctttccacacaacctttatggcactgcttgttattttccccaaaggctgtaacttttttggaatggcgagcaccttccaaaccctggattctttaagccactttatagggcggtgttttataacctaataacaaaggttccacaacttacgtttccgaaaacctgaggggcgcctttaagaatcaattctggcgggtccgaggaatattttttaaggcccaaaaaatcctggcggtttaaccctgttggaaccggtct

SEQ ID NO: 98675 - DNA, 778 bp, Zea mays
  unsure (1)..(778): unsure at all n locations
tggtgggaggtcttttttagttttagtttagtatcatcgctctaccggtccggaattcccgggtcgacccacgcgtccgcccacgcgtncgggaggcatttacaagtttgtgatcgaaaggttcgagaaggaggctgctgaaatgaacaagcggtccttcaagtacgcgtgggtgctcgacaagctcaaggctgagcgtgagaaaggtatcaccattgatatcgctctgtggaagtttgagaccaccaagtactactgcacggtcattgatgcccctggacaccgtgacttcatcaagaacatgatcactggtacctcccaagctgactgtgctgtccttatcattgactccaccactggtggttttgaggctggtatctccaaggatggccagacccgtgaacatgctctccttgcgttcaccctttgagtgaagcaaatgatttgctgctgcaacaagatggatgcaaccactcccaaatactccaaagcacgttatgaagagattgtgaaagaagtctcattcctactcaaagaaagntgggtacaaccctgataagatttgcctttgttcccatttctgggttttgaagggcgacaacatgattgagaagttcaccaaccttgactgtacaaagcccacccttgttgaggtcttgaccagatactgaccccagaaggctcngacaacccctgctttgccctcaagatgngtcagattgtgtattgaactgtccggtgtccgtgagactgtgcatcacctggattgaggaactgt

SEQ ID NO: 98676 - DNA, 757 bp, Zea mays
  unsure (1)..(757): unsure at all n locations
naagggnnnttaaaaaagaaaaagaaagtagtgntcggnccggaatncccgggtcgaaccacgcgtncgngcacgcgtgcgtcaaaacacaatgccttgagttgggacggctattgaaaaagcccctggggaacaacttctcttaggcacctgtctttgtggaccctcatgggcgtgggttgcgtgccctctccaggcccagattgactctgttctggatcttgcacggtgcacaattgtgtccgagctctccaacaaggatttcgactcatatgtcctttctgagtcaagcttgcttatctatcctctgaagattgtcatcaagacctgtggcactaccaagctcctgctcaccattccaagaatccttgagcttgctgaagagctgtctatgccacttgctgctgtgaagtactcccgtgggacgttcatctttcctggcgcacagccagcccnccacaggagcttctctgaagaagtngctgcacttaaccgctactttggcgggctgaaatctgggggtatgcttatgtgatgggggatcagcagacctgacagaattggacgtttctacccactgagtcccagagcaacaatgtttaacttgaaagtcctgactgtctggcaagagaaagctttgctttcaagatatgttatggaaaacacttggccaggaatgaaagcttctgcttttgaatatccccaatgagatcggttttacttgacctgggtatcagatcgacatggttgttttcaa

SEQ ID NO: 98677 - DNA, 776 bp, Zea mays
  unsure (1)..(776): unsure at all n locations
aggttgtaaaaagtaaaaaggaagcattgctcgtaccggtccggaattcccgggtcgacccacgcgtccgcccaaaaggcaaaccaaccaccagtcttaccaccctccgcctccgcctgcgccacagctgccgattcgaaagccctcgtcctgacccctcgcaaaaccctagctccaaccaccatgaagggcaaggccaacgcctccaagaaggatgagggcaggctccgggccggcggcggcggcgccggaaagcgcaagaaggccgccgcgagcggcaagcccaagcgccctccctccgccttcttcgtcttcatgtctgaattcaggcaggagtaccaggcgcagcaccctagcaacaagagcgttgcggccgtgagcaaggcagcaggggaaaagtggcgctctatgtcagagcaagagaagcaaccctatgtggaccaagctgggcagaagaagcaggactatgagaagactaaggcaaatattgagaaggagagcacaagctcaaagaagctaagactgatgacgacgatggctcgaagtccgaagtcgatgatgaagatggcggtagtgaccaggaaaacgccaccacgagtaaaatatttctcgctgccggaagtagcaaatcgatggtaggtcccaataactcactggttgctttctttatgtaaagtggtggacagtgttatgaagggactattanttcggaggtggtagttatgcataccaaaaaaacgaggcgctagctaactggttcttgctaacatgggaaa

SEQ ID NO: 98678 - DNA, 784 bp, Zea mays
  unsure (1)..(784): unsure at all n locations
agtctgttcccccctagcccccctcctacggannccgnccngntccgaaggcccggggacggcgcgtncnaacttcccacantccttatcagaagtcttccatcctcactcgctgggaggcctgcacgaagcagacggcgaggaagtccaccggcggcaaggcgccgaggaagcagttggcgactaaagcggcccgcaagtctgcccctgcgaccggcggagttaagaagccccaccgcttccgccccggtaccgtcgcgctccgggagatccgcaagtaccagaagagcacggagctgctgatccgcaagctgncgttccagcgcctggtgcgggagatcgcgcatgactttcagaccgacctacgcttccagagctccgcttttttcccgcttcaggaagcgggttaggcctacctttgtcggtcctctttgaggacaaaaaaccttttcgccatccaggccaagcgcggtaacattatttgccaagggcatccaactgggcccgccgatatccgtggggagagggccttaagatcggattttttggcatcaatgcccgaacaaaaaaataaaaaagtgcctgggttttgtaatttggggttcttgtcaaacaatcaataagtggttggtcattgttgtaccttatttatgatgcttttgaatgggatgaactttttttaatttctcgnnnaaaaaangnntaaaatgaggcggcccgtttaaagattaaatttattcccttttggaagtaaaatttttttgggccctaaataatatgggcg

SEQ ID NO: 98679 - DNA, 759 bp, Zea mays
  unsure (1)..(759): unsure at all n locations
tttatgtcnnagtnttatttattgtatagaaagtagtgttgtaccgcnccggaattcccgggtcgacccacgccgtcggccacgcgttcggccaagcctgccaattttttgttatattggcctaaccctttgacttgacctattgaacaaaacaaggctcagctcgttgtcatcgctcatgatgtggatccgattgaactggttgtttggcttccagccctgtgcaagaagatggaggtcccatactgcattgttaaaggaaaggctcgccttggatcgatcgttcacaagaagactgcatcagtcttgtgtctgaccactgtcaagaacgaggacaagcttgagttcagcaagatcttggaggctattaagtttgatgaagtcaagaagaagtggggaggtggcatcatgggctccaagtcgcatgccaagaccaaggccagggaaaagttgctggccaaagaggccgcccagcagatgacgtagatgatccacttgttgagtctgcccctgtatttgacgttgaagaccgatgagcatgtgcactcggattgtgttgtttcgatctaacttcatatgttgctggacatcagaccgggtttagaacttgggaggacagtctaccgtgttgtgcaatgtttatatcgagattatattggtccttccttatttgaggataaaatcnaggacggcgtctaaagaccaactacttcccggctgtaggataattttttaagggactaatcaatatggcgggtt

SEQ ID NO: 98680 - DNA, 780 bp, Zea mays
  unsure (1)..(780): unsure at all n locations
tggtgctcntttcggcaagtatcncggcagatgacgtaaangctcgnnccggtccggaattcccgggtcgacccacgcgtccgcgtctcgctcgtggctgtcctgctcatactgcttgccctcgccgtatcgtccacccgcaacgcacaggaggattccatggccgacaacaccgggacgttggcgggcggcatcaaggacgtgccggggaacgagaacgaccttcacctccaggagctcgcccgattcgccgtcgatgagcacaacaagaaggccaatgctcttctggggttcgagaagcttgtgaaggccaagacacaagtggttgctggcacgatgtactatctcactattgaagtgaaggatggcgaagtcaagaagctctacgaagctaaggtctgggagaagccatgggagaacttcaaggagctgcaggaattcaagcctgttgaagagggtgctagcgcctaaagatctctccttctccatgtgcgagcctgaagctcaaagcaaaagtgcagaataagaatcatgctcccttgtgtaantntataaaattacaaacctcttaggcttttgtcggtgtgtctgtaccgaagggaaataaaggtgatnaaatttcttctatacaaatagaggggctttantcnnnnnnnnnnnnnnnnnnnnnnnnnnaaaaggcggccggttagagatcaagctactacgctgctgccagtatacttttttagtgcactaaatcaatactggccgggttaaacggggatggaaacctggctc

SEQ ID NO: 98681 - DNA, 769 bp, Zea mays
  unsure (1)..(769): unsure at all n locations
nnttgcncaaggttaatgggggggggggggggggaatgttgtaccggtccggaattcccgggtcgacccacgcgtccgaaagcagcatatgccgaggaatctcatttcaatacggaacgaggtacacccgcgtctcgaacatgcaaattgtgcagctggtctttttgatgtcaagaaaatccctctacaaatggaactcattacgagcacggatgtggtcatgaatctcttgaagaaaatggctccccctcttgttactctttttgcagcaaatcctgaaattcaccatgtaatcttgaggaacattaatctgatagttcaaaagagggctaccatactccctcatgagattaatgatttcttttggaagtacaatgaccctatatatgttcagatggaaaagctggagactatgatgcagcttggctcagatcgaaatatacatcatgtgctcttggaattcaaagagtacgccacagaggatgatgttgattttgttgcgaaagctgttcaggcgattgggagatgtgcaactcaaatggatagagctgctgaaggtgcatcaccgtgttgctcgagctgataaaaataaagctattatgtcgttcaggaagctatattgtatcaaagattttttggagcttgactacacgtattaagtataatgctacactttgagaaaactggacctgtgattaaccaaagctaagcatccttatttggtaatggagatttgcgaaagattgcaatgccatgactttggagcttc

SEQ ID NO: 98682 - DNA, 791 bp, Zea mays
  unsure (1)..(791): unsure at all n locations
nnnttatgtgtnggaaaggagagagagaagggaggggaaatcttcgntcggaattnccgggccgacaccacccgtccgcagaatggcgcanagcaactgggaagctgattaaatgctcgacgggtatatctatgactacctgcttaaaaaggacctgcaaacgacggccaaggctttcatgaccgaaggaaaaggtgctgctgatccagttgcaattgatgctcctggagggtttctctttgagtgggggtctgtcttttgggatatattcatcgcaaggacaaatgaaaagcattctgaagttgcagcggcatatctagaggcacagcaaataaaagcaagagagcaccagcagcagatgcagatgcagcaattgcaacttatgcatcaaagacatgctcaacttcagcgaactaacgcgaatcatccttcacttaatggtccaataaatgctttaaattctgagggcattttggggccatcaacagctagtgtcttagctgccaagatgtatgaagagcgattgaagcacccacattcaatggagtctgagggatcacaactnatttgagctagtagaatggctcttctcagtcagcaacaaaccatgcaggggcattaggtccagggactncttgaaatgtgtctacaactttgcagcaaaccaggcacggattcagcaacgatgatattatagtgaaggtacattggagtacccaaatacttaacccaggatccatctctttttggncaagattatgcacctaactggatggacggccagatgacca

SEQ ID NO: 98683 - DNA, 758 bp, Zea mays
  unsure (1)..(758): unsure at all n locations
nnnggatggcnnnaggnttcccgcctagccgcggntattnccannccgaaaaccggggcgagcccgcgttcgcgtagactttcccgaaatatgccaaaattttttggccttgccgccccccagggcccggggttcccccggggcaaaggcccgccccccacagggtcgggcccttgttgttttgagacatggcccacataaccgggttcgtcgccgcccaggaagctgcaaatccttttgaatattgtgatgtggttaccacaaccacgcacaagtccctcagagggccaagggctggcatgatcttctacaggaaaggccctaagccccccaagaagggccagccagagggtgctgtttatgattatgaagacaagatcaactttgcagtgttcccatctcttcaaggtggccctcacaaccacccaaattgctgcacttgcttgtgctctacacaaactattgtcgctggttcaaaggctatgcaaagccagggaaggccatgcttgtggaaagggaaactatctcatgagcaaaggcttcaaaatgtgactgatgtgactgagaacaaccttgtctctgggaattccaccccttggctttcttgaaccaagttgaaaacttttggactttccccattcaattaacaaaaagttttttggtacaaaatgctttgtctcgtggggcccaattggccccccaatacctcaagggttctgtgaaagattcagccattggggaccttcccggaatacatt

SEQ ID NO: 98684 - DNA, 760 bp, Zea mays
  unsure (1)..(760): unsure at all n locations
atggtcgaatgggaagagagaagaagagaaagttgnaccggtccggaattcccgggtcgacccacgcgtccgcttggtctgatcccatcttaattttttttagaggtcctgaaccaatggaaggacaaatcattaaagcgagcagggctgactgaagaacaattgcaagagcagattgagcagagaaatgtcgcaaggaagaataagcagtttgagatatctgatggaatcaggaaaaaccttgctaccaaaggcatcgccctgatggacgagccttctggtacagtatggagaccatgcgaaccagagcggtctgaagagtcatgattagctcactgactcaacaagtgatggtggtgtaaaatgagatttttgcctgagggcagttatcacattttgaagactaacaaaaatcgccatctctggatgtggtattctacagggtaggggttccaggttgactcaccagttaaaacatgcatttctggttgtataacaagcaatgaaccccgtatatatactngacagtttgactcctttggaggtttgattttaagtttggttnngccccnnnnnnnnnnnnnnnnnnnnnnnnnnnnnnnnnnnnnnnnnnnnnnnaaagggcggcgtttaaaagatcaagtttactcccctgctgcaacgtatacttttctatgggcactaattaattactggcgccgttacacgcgtgctggaaaccctgggtaccaataatgcttgaaaatcccttttcagtggt

SEQ ID NO: 98685 - DNA, 770 bp, Zea mays
  unsure (1)..(770): unsure at all n locations
tggatcncaagggattaggtgtcaagccttggagtaangctcgnaccggtccggaattcccgggtcgacccacgcgtccgcaactgccagattggagcattcttctttcggctggcactaccatcttcctggcagcagagaatcaggggacacttgttgactggaagcccaagaaacccgacatgcttgttgatacatttggttttggcgggatcatccaggatgggatggtgtttatgcaaaacttcattattcggtcctatgagattggtgccgatcgtactgcttctatagagacattaatgaatcacttacaggaaacagctcttaaccatgtgaagacagctggcctttttggagatggttttggcgccacgccagatatgagcaaacgaaacttgatctgggttgtcagcaaaattcaacttcttgttgagaagtacctcttgtgggaagacacggttcaagtggacacatgggtagctgccgcttggaaaaatagcatgcgtagagactggcatgttctcgactgcaagtcttggatgtacgatctatagagcttacaagtgttttggtggtgatgcataaaaacactatatggcttttaaaaatgcagnccgaattagggctgacattagcgcattttcaacgcccggcatcataaccattgaccgagaaggaaattgctaaccaggagactgttgttgcaatctttgagatttcatagaaagggctactctagtggagggtgacctgttcaacaacaatga

SEQ ID NO: 98686 - DNA, 742 bp, Zea mays
  unsure (1)..(742): unsure at all n locations
agggatgggaactgctgataggagaaagagagaagaggagagttggtagcgattcggaattcgagcgacgcgtcacgcgtgaacaggaacttcctgatggggtttgaggttatcgaccacattaaggcttctctgtaggctgcctgcccaggcacaggctcctgtccccacattgctacgcttgcggctcgtgattccaccgccctgtttgagtgaccatactgggacgtgccactcggcccgagagacttgctcggtgcaagcatccagagctccaacaatgacatnagagactgcaacaacacactacctactataatctcaaagtttaagcgccacggcctcaatgttagacgatgatgcatccctctcatgtggccacaccattggtatgtctcgttgcactatgttccggcagaggctatacaaccagacacgcaatggcatggctgacagcacactagatgtatcctactccgcaaagctgaggcagggatgccccccgtctggtagtgaacacaaacctttgctgctggtactcatcagccctgccaagttgcaagtttactacaagaacctctgcctgtcagagcctctaagtntgatgggatccggtaacagaacgttatacagcgcctttggaagctatctgtgagtcatagttttcaaaccttaccactatggatttggaacactccactgacggtcaagcgggacgaaactccgagctacattccctagc

SEQ ID NO: 98687 - DNA, 765 bp, Zea mays
  unsure (1)..(765): unsure at all n locations
nnnttggagtgtnaatggggagggggaaaagtgttaaccgctccggaattcccgggtcgacccacgcgtccggtgcatgggaagagggctatcttgctaatattattcatggagatggtgcaaaggagatgaaagttggtgaggtcattgctataactgtggaagaagagggtgacattgagaagtttaaggattataagccgtcatcttcagctgaacctgtagctcctgctgaatcaaaggctcaaccagaaccttcacaaccaaaggtggaggaaaaaaagcttacccaggctcctgaggttaaggccccaaagattgaagaagcttctcaatctggagatcgcatatttgccagccctcttgcccgtaaactggctgaagataacaatgtcccactatcaagtgtgaaaggtactggtcctgatgggcgtattttgaaggcagacattgaagattactttggccaaggtgggcttgaggaggcttttgcagctccagggttaggttacgttgatattcccaatgcacagataagaaaagttaccgcaaaccgtttgctagcatctaaaccagccatttcttcttacttactgacaggagatgcacgtgtggacaaccttgtcaagtggcaaggggactggatcaattgcagatgttcttgttgaaggaaatttcattaatgatcttgcatcaagcttgactttgtttttaaaaggcctaaggtacactcatggtgagattaattgcaattcaagtggactt

SEQ ID NO: 98688 - DNA, 781 bp, Zea mays
  unsure (1)..(781): unsure at all n locations
acgtttgttcccggtatgtggccgcatcgctccaccggtccggaattcccgggtcgacccacgcgtccgtgatcatccaatatcaagaaatccttgttgctcctatagaatctgatgaagagcttgctaagaagacaaaaagtttctttgctaatgcagcagaaacattcaatgctgcatttatgtatatatcatcattgacgttagcataaaatgcagcattgaatgctaacgtcaatgatgatatatacataaatgtcgatactttgagtgcaatgctcgaaactcactgggacaggcctcgtgtctatataggttgcatgaaatcgggcgaggttttctctgacttaacccacaagtggtacgaatcagactggtggaaatttggtgatgggaaatcgtactttcgacacacttctggtgaaatgtttgtcatatccagggccatagctcagttcatttctataaacaagtccgctctccggacatatgcccatgatgatgttagtgttggatcgtggatgattggccctgccgtgaatcatgtaaatgaagcanaactgtgcctgtcatcgtggccctcaggtgcgttatgttcagcgctataacgaggcacantgcttattgaggaagagttttgcaaaccccgggcctgtggatcgaatcggtttgggaaaggttggtttcttctgcctctggggaggcctttgaagaggctgccgagcccttcatctgataccgaatcggtatctggtttcttttcaaggaaggcttgcttttt

SEQ ID NO: 98689 - DNA, 769 bp, Zea mays
  unsure (1)..(769): unsure at all n locations
agcccctggagcgcannnaggcatcctcgtttacctgnngccangganancncnnnnnnnggnngnnggggggagcgcgcgtgcgnccagcgtccggnttttttttttatttctcaaccgcncnnnntgggggtccgtgggctttcgaggagcaagcncatcccacccaancgccatggccgccgccgcccccgacgcagacgcctactatatcccgtgggtggagaagtaccgccccgcccgcgtcgctgacgtcgtcggaaactccgatgccgtcgcccgcctggaggtcattgcccgcgacggcaacatgcccaacctcatcctcttcaggcctccggggactgggaagacgacgagcatcctggcgctggcgcatgagctcctcgggcccagctatcgtgatgccgtgctggagctcaatgcctcacatgacaggggtttggatgttgtgcggaacaagatcaatattttgcacagaagaaggtcactctacaggctgggcggcccaaaaacggatctttgatgaggcttccaacatgaccttaggaacaccagaagctttgccaagaaaatggtaaactattcaaccacaataaatttccatttcattgcacaaatatcaaagatattcaaccccttcaaagcccagtgctatccgcagtgtttaaggtttttgacacgaaacctcgtcgcttattttttttagcaaataaaaattgccttatcccaaaggctggaacttaaattactcgcatggacaagagac

SEQ ID NO: 98690 - DNA, 766 bp, Zea mays
  unsure (1)..(766): unsure at all n locations
gccccctaaagcntttctctttttgactntntgtagtgaacctcnccggaanncccgggtcgacccacgcgtncgcgcagccgtattcctgtctcgaatcctctctcgtcgctccgatggcccgcacgaagcagacagcaaggaagtcgaccggcggcaaggccccccggaagcagctggccactaaagctgcgcgcaagtcggccccggccaccggcggcgtgaagaagccccaccgcttccgccccggcaccgtcgcgctccgcgagatccgcaagtaccagaagagcactgagctgctcatccgcaagctccccttccagcgcctcgtccgcgagatcgcgcaggacttcaagactgatctgaggttccagtcctccgccgtcgcggcgctgcaagaggccgccgaggcgtacctggtgggtctcttcgaggacaccaacctttgcgccatccacgccaagcgcgtcactatcatgcccaaagacatncagctcgcgcggcgcatcaggggcgagaaggctngagcgcccgtcgtgctgctcgtcggtggaatggtactaaaaagagatggtgggcttcggttccgggcttcctatatcttaggaagaatgtctaggatggctggcttcaaggcaaggactgggttgctcatttctgaaattaataatgcacggtcctggaagaattgggttctactttgaaaacgccgccctggtgaaatgcctataaaacattctttcattaaaaaaaaaaaaaaaaaaaa

SEQ ID NO: 98691 - DNA, 750 bp, Zea mays
  unsure (1)..(750): unsure at all n locations
aggttncctcaccgtactcatcgccatcgccannncgganncccgggcgacccacgcgtncggcggaggacaaacanacagcaagagagcggatcgccgtaaggcaaaggcaaaggcaacggcaacgcaagccagaggcagagcgcgccccgccacgatgaagaaggaggaggtggcctcgccggcggcggcgacggtggtcctgctgctcctgtcgtcgtcgttggcggccgtctccggccagccacagccgcagccgcagcccgggggcagcaagcagactgcggcgaacaacccgcggctgcagaaggcgtacgtggcgctgcaggctttgaagcgcgcggtgacggaggaccccaagaacctgacgcggagctggtgcgggccggacgtgtgcggctacttcggcgtgtactgcgcggcggcgccggacgagccgcggtcgcagacggtggccggggtggacctgaaccacggcgacctggcggggacgctcccggaggagctgggcctgctgcggacctagcgctgctgcacctcactcaaaccggtcgcgggacgctcccggagtcctccccagatcggctctgncgagctgacttgaccacaaccgccttgggccgcttccgcacacatctgtgcttgcaatgtgagacttgactgggttaacagtttgcggccgggcccccggcttttacaagcgtggaagcgnttctaagacacccttgatttgagtgcgaaactggcaac

SEQ ID NO: 98692 - DNA, 765 bp, Zea mays
  unsure (1)..(765): unsure at all n locations
aggatggaggcaatggggaggaggagagaaatgtaaactcnaanccgggggggagcacgcgttccgggcaaaacatatttttgggaaaaacctttttctgatttaaggttacaggtagaatggggtcccgaaggaggcctttgaaggtggcaatccgattcctaacctaactattccaaaaaagttggtggaccccttggtcttggaaaagcaatcctaaatggtgagccctctggattttgtgctgcagcttatggagatgctgaccgcaacatgattcttggtaaaagattctttgtgacaccgtcggactctgttgccattatcgcagccaatgctgttcaatcaattccttactttgcttctggcctgaagggagttgccaggagcatgccaacatctgctgcccttgatgttgttgcaaagaatttgaaccttaagttctttgaggtgcctactggatggaagtttttttgggaatttgatggatgcttnaatgtgctcaatctcgtggtgaagaaagctttgcactgggtcttaacacattccttgagaggattgcactggggctgtgcttgcatggcttttaatttttggtttcaagaaataggaccacccgggagggaataaacttgaccttttcaaaaatttgccctaagcattggccaaattggtgccctttcttcacacctttaccttttaattttattcacggctttaaggactttgggaacctttaactccgcttcatttttgagtaaaaat

SEQ ID NO: 98693 - DNA, 755 bp, Zea mays
  unsure (1)..(755): unsure at all n locations
aagggttctctttgttattgttgttttcttccaccggttcggaattcccgggtcgacccacgcgtgcgctacaactagaatcacgatttctcatttactggagcatccttggttcaaaaaggggtgcaagcctcctgtttttgacgagaaatatcaaactagcttggatgacgtggatgctgcttttggagattcagaagaccggcatgtgaaagaggaaactgaagatcagccaacctcaatgaatgcattcgaactgatttcactaaaccaggcactgaatctggagaatttgtttgaagcaaaggaggagtataaaagagagacaagattcacctcacagtgccccccgaaagagataatcacaaagatcgaagaagctgcaaagccgcttggctttgatgttcaaaagaaaaaatacaagatgcggatggagaacccgaaagcaggtagaaagggcaatctgaatgttgcaactgaggtctccanatagccccatccctgcatgtagtcgagctcaagaaggcgaanggggacactctggnagtncaaaagtctacagaagcctgtcgacccacttgaagatgtgtgtggaatgccacngcaggtgacggcacagcgcgcacatgaaagcgccttggaccttcatggacgcgcngttttcttgtcatagtctctttcgatganccggtcttgcaagccgtttcaagcaatcttgttattgtgacggagtaaccgtgaacacgcttgagttt

SEQ ID NO: 98694 - DNA, 778 bp, Zea mays
  unsure (1)..(778): unsure at all n locations
agggcatgacggtnnnnncctgcagtcccataggcaacgcacnatcgcacngctcgcaccggttcggaattcccgggtcgacccacgcgtccggcgtcccagtcctcggacgtctacagtttcggcgtcttcgtgctggagctcctcacggggaagtcgcccgtccagataaccggcggcggtggcggcgacgtggtccacctggtgagatgggtgcagtcggttgtgcgggaggagtggaccgccgaggtgttcgacggcgagcttctgcggtaccccaacatcgaggaggagatggtagagatgctgcagatcgccatggcgtgcgtgtccaggacccccgagcggcgtcccaagatggcggacgtggtgaggaccatctaggaggtgcgtcngagcggcagcgggaccgcgaccgggaccgggacgcggncgtncaccgagggcttcaccccggccaccggcggtgaagccggccanancaaggcggaagaaggccgctcgtccgcggtggcgccatgaaccggaccccacccaagccgaacttgttggtctgaacttggataatccgggcttatttttggcggggggggaccatttgttttttcggttccaattcgtacaaaatgtggaccttccgtttttcgggtacgaaatcgaaccaaattcactggacttgacccgggggcaaattttgcagaactggtcctgctgctttgattgatttttgccaaaaaaaaaaaaaaaggcggcgtttaagatcaactcctccggcttc

SEQ ID NO: 98695 - DNA, 768 bp, Zea mays
  unsure (1)..(768): unsure at all n locations
ncatggtgtgctctccgttattcgtccgtatcctcggttcggatnccaggctcgacccacgcgtncgcccacgcgtncgcaaaggttactacattttttataagggtgcgaagccaaagccagacgctagtgttaagcatgtgatcgaggagtaccgaaagcaggcaaacacaattgcctggtggaaagcctgttactttaatggatcaagatattttggagatgattttcttcccagttgtgaatgaggcatgcagggttatggatgaaaatgttgtaattcgagcttccgatcttgatattgcttctgttcttggaatgggctttcccaaatacaggggtggtcttgtcttctgggctgacactgttggagcgccttacatacattcgaagctaagcaagtgggccgaaatgtatggtcccttcttcaaaccttcatcgtatttggaacaacgagctaaaagtggtgtaccattgagcgcaccangaacatcacagcaaggttcggcgaggtcgcgcatgtgaagtgctgtccagcatttggaaggaagaattcagaatacttgcggncgggatgagccatagacggctgcttcgcagaaaaaaacacctccttgattacaataggagcccaagaatgatgaaaataaatggtttgcatactgtacagtttgtgccttgactgactatgcanattctgtgacgatggatgcattattactgacactttatgtggtggtggtaattcaatcgtcagactaaattttt

SEQ ID NO: 98696 - DNA, 767 bp, Zea mays
  unsure (1)..(767): unsure at all n locations
atgggtgcgggaataaagaaaaaagaaaatattcccgttcggattccggggcggaccacgcgtttgggcacacgtttccgcacacgtttcggcatttttttcctcacaccttcccaaggactgtgtgtttgtagagcccacaaaaatctctaaaagagatagagttgaaaggagaaaatttgaaaagaaagttcaagaagtagctgacaagatccaaaacacaaacttgtatttgaagaacttaaaagagaacattggtgatgagaaattgcgtggactctttgctgagtatggcaatattacttcctgcaaggttatgcgggattcggatggtgtcagcagaggttctggatttgttgctttcaaatctgctgaagatgctaaccgagctcttacggagatgaatggcaaaatggttggaagcaagcccctttatgtagctcttgcgcagcgtaaagaagacagaaaggcaaagctacacgcacaattttcacaaatgcgtncttgtgcaatggcgccctcaataggtcctcgcattcccatgttttcaactgggtgtcctggagttgtcagcaacttgtctattggcaggcaccaacagccttattcaacctaggctggttttgcttcacacacctttgttcctgtatgagggctgtggtccatgccnactttttgatgcttatgttacagggacggaacccaacgtcttttgttgattctgttgattgcacaccatgcatggtggtcacaccgggtccttagtg

SEQ ID NO: 98697 - DNA, 770 bp, Zea mays
  unsure (1)..(770): unsure at all n locations
nnccgcgagagtggtgntcccgcactcgggcaggcgggaagcgtctcggaattcccgggtcgacccacgcgtccgcggcggaggaagtgtggaaggagatcactggcggaggtggcagtggggaagccgtggctcccgtggcggctcaagttgtcgctcccgatggtggcgccggcacaagcggcccggaggtgacgctggaggacttcctggccagggagagcgcggtgaaggaggatgaggttaagatttctgtcccccccgcgccggtcatggggttaccgggcggagcggagggcgtgagtgtgcctggcggcggaggcgggagggaacggaagcggcagcttgtgagtacagaggatcgcgctcgctctgctatccagcgagagaaacgaatgataaaaaaccgcgagtctgctgccaggtcacgggagaggaagcaagcctatatcgccgagctagaatacatggtaacgccgctcgccgaggaaaaagctgaattgttgagacaacagggaagagcatttccaaacccgcttggatagctggggaacccaacgacgccagccttctgaggaaaaaacataccgagatcttagaagaccaactcaagccggggagaattgaaccaagtcggcgccgcctcttatggtataacataaatgccccccgttgcattttcatttattgcccaactattggagacctactgaattgctggcaatacccccaaaactaatgaaataattggtagctgcccaaaaaaaaaa

SEQ ID NO: 98698 - DNA, 790 bp, Zea mays
  unsure (1)..(790): unsure at all n locations
naggttggagggnnnttaagcaaaaaagaaagatatgtcaagnctcgaanncctggggcgaaccaggctcgacccacgcgtccgatcatttcaatgctctctattacgattgtctagtctgcagcacacaatgaagctgctcggtgcctttgtacagagaagcggtgatgagttctcacagaaggtgacgcaaagtgtactgctgtcttatgagatgctgacttagacgaacattgtggagtcgaatgagtctgcaatcggtgagctgcaattcacaaccaattatctcatgccatcattcttttgctttcccctgtatattttttcaaccggtgtcactcgtatagtggtgttgggtctctttagacaaactcgggacggttgcttatcctaaaaattcgattgtactgcgtggcatgaaatgatcgattcgaagaatattttgaacatgctgccacctaatcaaaaaatttcatgtttaacttcataaggaataacttgtgcttattctaaaaaaaaaaaaaaaaagggcggccgctctaaaggatccaagcttacgtacgcgtgcatgcgacgtcataactcttctatagtgtcaccttaaatcaattcacttggccgcgttttacaacgtcgtgactgggaaaaccctggcgttacccactttaatcgctttgaaacatcccctttcgcagctgggttatagcgagaagccggacgatggccttcccacatttccaacctgatgccatgggaccgccttaacggccattacgcggcgttttgtgtt

SEQ ID NO: 98699 - DNA, 769 bp, Zea mays
  unsure (1)..(769): unsure at all n locations
nttttaatgtgcttgagtgnntnnaaaagccaaaagaaagggagaaagcttgtccggtcggaatcccgggtcgacccacgcgtccggcgcctctgaaagttcggagtttccggtctgttcgcctacgtctccgcctagcgtcccgaagggtaatacttgtcaagtggcaatggcggaccaaggtcaccaacccactgttcttcataagctcggtggccagctacagctgcgctcgatcatctatgaacgtgttctggcacgtaacatattgccatctggcttatcttatgaaaggagatgtgtcacaaggaactacaagaccgagagcctttggggcccttcaatgtgagctagcggtggcatgaatgtaccagcgatgcagaccccggtttgagctaatgctcctgctgagaaaggaggcgagaacttcattaatgatgtacatgagggcggtggttcaggtgctgcttcaaatactgctgctgctgccaatcatcgtgtgaagctgcttttcatgacccagatgagatcagtgaccccgtccgctatcaggaccctacaaggaatngagggctggtgccatcatgcattgaaatgcaagatatgcttccctagggaggagacaccggtaatgtatcatgactcctaaccaggttgcacttgactttaagactcttcagaggtcgcgactcagaacattggttggtttgagaaggtctcaaaactggccagctggccgtggacgcatttggttttgcctccgacacga

SEQ ID NO: 98700 - DNA, 588 bp, Zea mays
  unsure (1)..(588): unsure at all n locations
nagtgttggaagtgagagaaagtggctgagtatagtcatgtgaagtaantgtcacgctcttccggttcggggttcgacgccacgcgtacgcccacgcgttcgcgtgttcacaaacgccggcgcaaactctcgcccgagcccgacagatcttgaattgcccattccggccaccgatcgaccttcacgccagtctcggtctcttccgaaggcgtcgcgcgcggttgtttgagaggagaggaggaagatgagggagtgcatctccgtccacatcgggcaggccggcatccaagtcggcaacgcgtgctgggaactttactgcctcgagcacggcatccagcctgatggccaagtgcctggagataagaccgcgggacatcacgatgatgccttcagcaccttcttcagccagactggtgctgggaagcacgttccccgtgcaatcttcgttgatctagaacccactgtgatcgatgaggtgcgcactggcacgtaccgncagctttttcaccctgagcagctcatcagtggcaagggaggatgccggtaacaatttcgcccgtggccactacacaattggcaaggagatgc

SEQ ID NO: 98701 - DNA, 586 bp, Zea mays
  unsure (1)..(586): unsure at all n locations
taagttgtatggtgtaggtgggtntccttgaatgagacgtaantgtatgnctctaccggtctcggaattcccgggtcgacccacgcgtccgcttccccgccccctccgatggggaacccgtcggagctgtaccacaagatcctcaacatcccggaggacacctcgccgcacgaaatccgcgccgcgtacaagaacctcgtcaagaagtggcaccccgacaagcacccgccgtcgtccaggccggaggccgaggcgcgcttcaaggccatcagcgaggcctacgaggcgctcctggaccagcaggagaacaggggcgtgttcgagctgtgcaacgacggccgggcgggtgagaggacgcgcggcgccttcggcggcgccggcggcggcggtggcggaggaggaggaggcctcggcgccggcgtcggggcgcgcatggagaggacgcgcagcgacgggttctgcacgaggagcgcgcccggcacgccggcgagggagttcaagaaggtgtacagctccggcgaccccggcgggcgccgcgccttcggcgagttcttcagcttcatcgtgcgcatggggccggcgttgt

SEQ ID NO: 98702 - DNA, 587 bp, Zea mays
gtattagtttgtagagaaaatggcttcgtcgtagcagagttcatcgctatgactcttccggttcggaattcccgggtcgacccacgcgtccgtgctcgtgctgttgccgcagcattgtgtatgaagaatatcaaggtagtaatgaccagcaagcaggattaccattttcttaagcctaacatggcagaagatgcagctgagaaccttttgttttcaaagacaactactgcaaaggtgtggttaattggggatggtctagatgcttctgagcagtttaaggcacagaaagggacccagtttatcccatattcacagtttccaccaagaatggcacgcaaggacacctgcacctactcgacaactcctgcaatggttgtacctaaaacactacagaatgtgcactcctgtgagaattggctgccaaggagggtcatgagtgcatggcgcattgctggaatggttcatgcattggaaggatggaacgagcatgagtgtggggacatcgtgctagacatggagaaaatgtggtctggtgctcttctgcatggtttccgaccttgggctcaagtttgattctcccagtgcaa

SEQ ID NO: 98703 - DNA, 581 bp, Zea mays
ggtggagttttgaatgttaatggctgaccactagaaatagtattgctaacacgtctcggaattcccgggtcgacccacgcgtccgcgcgcgtcggtctgggagaacttcaagaactaacccgctgtttgacatctcgaccgaccacgcgaccgacatactacgaagacatgcagcgctccgtgttctgcctctgcccgttgggctgggcaccgtggagtcccaggctggtggaggccgtggtcttcggctgcatcccggtgatcatcgcagacgacatcgtccttcccttcgcggacgccatcccgtgggaggagatcggcgtctttgtacccgatgaggatgtcccgcggctggacagcatcctgacgtccattcccacggacgtcgtgctgaggaagcaacggctcctcgcgaacccgtctatgaagcatgccatgctgttcccacagcctgctcaagcatgagacgcgttccaccagattctgaacggactctcgcgcaagctctcgcacgggagcaatgggttccttgaacccgttatagggccctgaactggacagcggaccaatcagcaatcttc

SEQ ID NO: 98704 - DNA, 644 bp, Zea mays
  unsure (1)..(644): unsure at all n locations
ggggnntaattatattntgatnttggatgtataatatgtatttgtttgtatataggtgatattgtgtagatggcgtgctgaatgtgcgatgtagaggtattcgtatacccgnccggaattcccgggtcgacccacgcgtccgctctaaacgacaagtttgaagtattctatattgactatggcaaccaagaggtggttccctacagtcgtctacgacccgtggacccatctgtttcctcttctcctgctcttgctcagttatgcagccttgctttcataaaagtgcccagtcttgaggatgactttggtcaggaagcagcagagtatctaagtgaatgtttgctcagtagctcaaagcaatatcgggcaatgattgaagaacgtgatgcttctgggggaaaatcaaagggacaaggaaccggaaatgttctcattgttactcttgttgatgcggagacagaaagtagcataaatgctaccatgcttgaggaaggccttgctcggcttgaaagaagcaagagatgggacactagggagaggaagacggctctccagaacctggaacagttccaggagaaggcaaagaaggaaaagctgcggatttggcagtatggcgaatgtgaatcggatgaagactagccagc

SEQ ID NO: 98705 - DNA, 583 bp, Zea mays
  unsure (1)..(583): unsure at all n locations
ggtgtagatttatatgatctgggtaggtagtatagtatgctcagcatgctctaccggtctcggaatcccgggtcgacctacgcgtccgcccgacgccttgctccggcgtcaagggccacaagaccccgccgcagttcccgcggacgccgcggccgtcgttcttgcagtcgccgtcgacgctgttcgcgttccggaaggacgggcagcagaccagccgcgtggagcgcgagcgcgggtccttcctcccgtacctgcgcttctaccgccgaccctacgacgagatttcctaccgcgccatgatgcgcccgccgctcggcggcctgatacccatcgtcgagaagttcaagcacaagccggtgcagcagacgctgcgtcggcacgctgggctccaccagcatcagcagcaccaccattaccaacagcagcagaggatctgagtctcgtctctcggtcggtactgcatggcgacccgagaattttctccatatacagcataaaggcgatgctatattatgctaagttaatcttttgcaaccaaccctntgtccncgtntttnagtagctgcttgcggtnatttgtttc

SEQ ID NO: 98706 - DNA, 627 bp, Zea mays
  unsure (1)..(627): unsure at all n locations
ggggnaatgattgatatggttatattgagatgattataattatatatttttgttatgttgtttgctntgcatgatgaagggatagtgcatgctctaccggtctcggattcccgggtcgacccacgcgtccgaccgaccccttgctccgtcgtcaagggcctcaagaccccgccgcagttcccgcggacgccggggccgtcgttcttgcagtcgccgtccacgctgttcgcgttccggaaggacgggcagcagaccagccgcgtggagcgcgagcgcgggtccttcctcccgtacctgcgcttctaccgccgaccctacgacgagatttcctaccgcgccatgatgcgcccgccgctcggcggcctgatacccatcgtcgagaagttcaagcacaagccggtgcagcagacgctgcgtcggcacgctgggctccaccagcatcagcagcaccaccattaccaacagcagctgaggatctgagtctcgtctctcggtcggtactgcatggcgacccgagaattttctccatatacagcataaaggcgatgctatattatgctaagttgatcttgtggcgaccaacccttttcccatnagtnaattactgcttatagcgcattttgggac

SEQ ID NO: 98707 - DNA, 587 bp, Zea mays
  unsure (1)..(587): unsure at all n locations
tgatgtagaagtagatatatagtagtggtgcgactgtgacgaggtgtattggtatgctctaccggttcggaattcccgggtcgacccacgcgtccgcggacgcgtgggctggcgaggcaaaagcattgcgaccacagacagcgcgcgcttcagggccttttttttttttgagataacaaggaggagaggaggagatggcggtcacgatcacgtgggtgaaggcgaggcagatcttcgacagccgcggcaaccccaccgtcgaggtggacgtgggccttagcgacggcagctacgcgaggggggccgtacccagcggcgcatccactggaatatatgaggccttggagttgagggatggaggatctgattatcttggcaagggtgttcttaaggctgtcagcaatgtaaataacattattggaccagcaattgttggaaaggaccccactgagcatggtgagattgacaacttcatggtccaacagcttgatggaaacctcaatgagtggggctggtgcaaacagaagcttggagctaatgccattcctggggtttcacttggtgngtgccaaagttggactattgtg

SEQ ID NO: 98708 - DNA, 640 bp, Zea mays
  unsure (1)..(640): unsure at all n locations
tgggaagatggatattatatgttgtagtatgagagtattggtaagtatgtggtataataagatgtagatggtgcantgtatgtaggggagggataatagttatgctgtaccggtccggaattcccgggtcgacccacgcgtccgcggacgcgtggggcacttgcatcgctactgtataatccactacaatctgaagtccagcaatgtcttgctagacacgaatggtgagcccagggttggtgattatggtcttgtgaacctgctgccgatgctggatcgctatgtgctcagcagtaagatccagagcgtgctgggatacatggcacctgagttcacttgcacaacggtcaaggtcacggagaagtgcgacatatacagcttcggagtgctagtccttgagattttgtcaagcagaaggcccgtagaatatctggaagatagtgtggttgtgctttctgatcttgtcagtgatgcactcgatgatgacaggctggaggactgcatggatccacggctatcaggtgagttctcgatggtggaagccacactgatcatcaagctgggcctggtctgtgcatctcaagggccttctcaacgaccggacatgggttaaggggtcaatatgcttgaaattgtgaag

SEQ ID NO: 98709 - DNA, 546 bp, Zea mays
agcctcgcacacgcgggagcgggagggagaacagagcccgcatctggccctggacctttgggctgatttagtgcttggaagccgcggatataatcgcggacaagtacgacgaactgaaggagtaagaggaaggcgccctggtcgagtaagacgagaagtaaggagaggaagtagaagaaaaaggaaaagaaacggacgttgacgagaagtaagaagaggaagtagaagaaaaaggcctcgtcgacgagaaagacgaagacgaaggcgattagaagacggaagagaacaaggaggagatcttgaagaacaagaaagtaaggagcgttagggacagaagttagggaaacgacaacaaatacgacggactaaaactcagggaagttaaaagcccgtcgaatattttaagtttacacggcattgactgcttctaatgcgagaggaaaacagcggaaaagccggccgaagcgaccgagaaagagttaaataggaaccctgcggccgagaaaggatgagggatcttctcgaaggacacattaagcgcggtat

SEQ ID NO: 98710 - DNA, 618 bp, Zea mays
gggataggttgatggaaatatgagtaatatgaaagagtaattgtggtgtaggaaggtgataggggggggagatagtgtgatccgctccggaattcccgggtcgacccacgcgtccgcagacgcgtgggcaacgacctcgacgcctgtgcgtgtcgcatgggcggcaccacccagtaggcggggaacaaccagatggtcaacgccaccctgatgaacatcgacgacaaccgcaccaacgtgcagatgccgaggatgtacaacaaggacgacaacccccgcgtgcccatcatcgagaccggcaacgacttctccacgctgtacgcaccgctcatccgcgacggccgcatggagaagttctactgggcgcccacccgctaggaccgcatcggcgtctgcaagggcatattacgcaccgacggcgtctacgaggaacacgtcgtccagctggtctacacctttcctggccagtccatcgacttcttcggcgcgctgcgtgcccgggtctacgacgacgaagtccgacggtgggtgagcgagaccggcgtccaaaacatcgccaggaagcttgtcaacttcaaggagggcgccgccaatttcgagcagcccagataacgaacg

SEQ ID NO: 98711 - DNA, 632 bp, Zea mays
  unsure (1)..(632): unsure at all n locations
ggggaaattatggatttaattataatgatatgaattagtgtatagaggaaataagagtagggagcantngatcgatgtggggatgagagtatgctctaccggttcggaattcccgggtcgacccacgcgtccgactagtcctagatcgaagctgccggagattccactccccgcaccattccgagctttgtccggaccctactccgtggctgccagtcccgcgggagcgcagcgcgcgctgctctacggtcgccgcgcgccgttcgcgggagcgctcctgtttttcagcatcggcgccgacagcgctgcggtcgcgttcaggacagggtgcgccatctcacaccgacgtcccaccttactcggggcaagaggtctcagttccactagaatggactcagcttcgaccacagtgccatccattgtcgtgtatgtgacagttccaaatagggaagcagggaagaagctgtcacagagcatcatcagcgagaagcttgctgcttgtgtcaatatagtacctggcattgaatccgtgtactggtgggagggaaaggtacaatctgatgctgaagaattactcatcatcaagaccagggaatcactcttggatgccttgactggacatgtcaaagcca

SEQ ID NO: 98712 - DNA, 627 bp, Zea mays
  unsure (1)..(627): unsure at all n locations
ggggnaaggaatgatagaagaagaatgatatgaattaaagtatagttagatattagtaagcagcttgtagtgaggggggagaagagtacgctcctccggnntccggntcgacccacgcgtccggatatcactaggagggagaccttcaaccatttcgctagatgcttagaagatgcaaggccgggtgcaggtgctaacatgactgcgacgctgattggaaacaagggagacctttctcatagacgggctgtcagctatgatgaatgtgaacaattatccaaagagcatgctctgctcttaatggaggcatttgccaaaactgcacaaaacattcaagaggcattcattaagaccgctggtacacatatacaaaaccattcaagatggcctatccgaagcatcaaatgactaccacggcatcaaaggactctacacaggtcccaacttatctggacgtggaactggctcatactgctatgctgatggcttgtgcagnccatgagtaggcagcaggtcctacaaatgcacaaaggtcgtcacggcgtatcttgatgcttggctcaaaccaggcccgcgtgcatccagctttcaatgcataaggtagaatccgtcaaccaattattcttt

SEQ ID NO: 98713 - DNA, 636 bp, Zea mays
  unsure (1)..(636): unsure at all n locations
gggtntaatgataggagatattatagaatgatattaagtatattaatagtgtatgtgattgtgtattgggaggtgagtagagtgggtaggagaaatggtatcctcntcggaattcccgggtcgacccacgcgtccgcccacgcgtccgaagcgcgccatcggcgtttaggttaacaagcaggtcaatgggcgcatgggcaggaggcgtatccatgtccgtgtggagcatgtgcagccgtcccgctgcacagaagagttccgcctgaggaaggcgaagaatgaccagctgaaggcggatgccaaaaagtgcggcgaggttatcagcaccaagaggcagccattgggtcccaagcccggcttcatggtcgagggcaccaccattgagaccgttacttccatcccatatgatgtggtcaatgatctcaagggtggatactaggttgtttggtccatctacctgcagtacccaattctacatctgtgttactctagcgcgtgcaactttgctcactctgagcagtagtatgaacctggtgtgtgttcctggtggaagaattcccattttaagtgcaaacctgaggttctgcgaacccgtatacctatgaccttgttattaaaaaaagaaaaattatttta

SEQ ID NO: 98714 - DNA, 574 bp, Zea mays
gaagtgatggttgccatgatggagggttaaagcaatgctgtaccggttcggaattcccgggtcgacccacgcgtccgcggacgcgtgggcgagctagctccgtgaggcggtatggcaggaagcggcacactgctccgagcccactgtctgttgatcccaacatgctcagcgagggtggccaccaacacgccattgcgtacgtccagggcgacaagtactatggtgcaaaggccaccattaatgtgtgggagcccaagattcagcaggctaacgaatttagcctgtcccagctctggatcttgggggggtcatttggggaggatctcaacagcatagaggctggctggcaggttagccctgacctctatggagacaacaacaccaggctgttcacatattggactagtgatgcataccaagccacaggttgctacaacatgttgtgctctggtttcattcagataaacagcgaggttgccatgggggctagtatcttccccatctcgaactacgcgggctcccaatatgatattagcatcctgatctggaaggaccccaaggaaaggaactggtg

SEQ ID NO: 98715 - DNA, 623 bp, Zea mays
  unsure (1)..(623): unsure at all n locations
ggggnaatgtatttataatttgttgatattatgtttttattgtttattagagtagtcatcntntttgtatgtggggaggagatagagttgtaccggttcggaattcccgggtcgacccacgcgtccgcgagagcgtgattgagtcggtggactcgttgaacccgttcatgcacgcccgtggggtcgcggtcatggtggacatctgctccacaactgctcgcctgggatccaagatgtgggcgcctcgcttcgactacatcctgacgcatcaggcctatgtggcggtggacaaggactccactatcaaccaggaccttatcagcaacttcttgtcggaccctgtccatggtgccattgatgtctgcgccaagctgaggcccaccgtcgacatctctgtgcctgccaacgccaactctgtgcgcctggagctcctacagtcttcctagatcgaagcagtgagctgagagtgagatggagagagaaagagaggatgtcgtgtcccgagttacaacacattgctgaatggtttgtgcaactggatgtaagtcaagtctgaactgtgaacctatgatcgcttctatcatatgacccggctgaagcctgggcatttgaatccggattaa

SEQ ID NO: 98716 - DNA, 585 bp, Zea mays
  unsure (1)..(585): unsure at all n locations
naagttattaataggagatggggtgagataggtgggggggaaatgtaacactcctccggttcggaattcccgggtcgacccacgcgcagaccctgctccagtgctcttttcttctagccggcgccgcaaccgcttgctagcgctgtgcgcgctcatactcgcgtccgtggaaggtcgactcgacatggcctccgagacggagacgttcgccttccaggcggagatcaaccagctgctatcgctcatcatcaacaccttctactccaacaaggagatcttccttagggagctcatttcaaactcctccgatgccttggataagatcaggttcgagagtttgacggacaagagcaagctggatgcccagccggagctgttcatccacatcgtccctgacaaggccaacaatactctgacaatcattgacagtggcattggtatgaccaagtcagaccttgtgaacaaccttggtaccattgcacgatctggcacaaaagagttcatggaggcactggctgctggtgccgacgtgttccatgatcgtcaattttgtggccgtttctactcggcataccttggtgctgc

SEQ ID NO: 98717 - DNA, 589 bp, Zea mays
tagtgatgttttttgtagtgtccgtgttcgttgtaaggggggataatagtatgctctaccggtctcggaattcccgggtcgacccacgcgtccgcccacgcgtccggctgcgtagacagtcccttcgccctgataacatcaagatgtttgttcttgacgaagctgatgaaatgctttctcgtggtttcaaggatcagatttatgacatcttccagcttctgccatccaagattcacgttggagtcttctctgctaccatgccacctgaggcccttgagattacccgcaagttcatgaacaaaccagtgagaattcttgtgaagagagatgagctgacccttgagggtatcaagcagttctatgtgaatgtggacaaggaagactggaagctggacacactgtgtgacctgtatgagaccctggccattacccagagtgtcatctttgtcaacacccgccgcaaggtggactggctcactgacaagatgaggagcagggaccacaccgtttctgccactcatggtgacatggaccagaacactagagacatcatcatgagggagttccggatctgcttcttccgtgtgcc

SEQ ID NO: 98718 - DNA, 589 bp, Zea mays
tagtaatgttttggttattcatggttgcctagcagtgggagaagatcatcctcctccagttcggaattcccgggtcgacccacgcgtccgcccacgcgtccgcccacgcgtactgtcattccgccctgatcacatcaacatacaggttcgggaccaatctgatgaagtgctggctcgtggtttcaatgatcagatttatgacatcttccagcttctgccatctaatattcacgatgcagtctcctctgctaccatgccacctgaggccattgagattacccgcaagtacatgaacaaaccagtcagactatcttgtgaagagagattagctcacccttgagggcatcaatcatatctatgagaatgtgcacaatgaatacttgaagctggacacactgtgtgacctgtatgagaccctgaccattatccatagtgtatatttgtcaacaccatgctcatggtaccactggctgactgacaagatgaggaacatgaaccactaccattttgccactcatggtgacatgaaccagatccctagatacattattattagtgaattcatgatgtggtatctcacgtgtctaac

SEQ ID NO: 98719 - DNA, 582 bp, Zea mays
atagtagtaattggtaatgacgcgtgtgattctgcatgatagtattgctcaccgctctggaattcccgggtcgacccacgcgtccggccctactgccaccgcgccgaacgccatggtcgagccggcagagcaccgtccagcggaggaggaggaggccgcggcggccggcgaggatgaggacaccggcgcccaggtcgcgcccatcgtgaagctggaggaggtcgccgttaccaccggagaggaggacgaggacgcgctcctggacatgaaggcgaagctctaccggttcgacaaggaggggaaccagtggaaagagcgcggcacatgcactgtgaagctgctcaagcacaaagacaccgtcaaggtccgtctcgtcatgcgtcaggcgaagacgcttaagatctgcgccaaccatctcgtggtggcgacgactaagatgcaagagcacgcggggagcgacaagtcgtgcgtgtggcacgcgcttgacttcggcgacggcgagcttcaagaggagatgtttgctattccgtttggatctgtcgagaatgcaagaaggtcaggacactggtaataaatagctta

SEQ ID NO: 98720 - DNA, 592 bp, Zea mays
  unsure (1)..(592): unsure at all n locations
tattgtattaattggtagtggcggannaaaatcgatatgtacggtaatagtatgctcctcggaattcccgggtcgacgcactagccacgcgtccgcgcaagctcgccatgaaatggctccccgacatgaaccccaacaacatgaaggagggcgaggacaagttcaagcagatctcggaggcgtacgaggtgctgagcgacccgcagaagcgcgcggtgtacgaccagtacggcgaggagggtctcaaggggcacgtgccgccgacgggcgccggcggggcggtccccggcagcgcaaccttcttgtccaccggcggcgacgggccgacggtgttccggttcaaccgcgtgcaacgcggaggacatcttcgccgagttcttcggtggctacagcctcttcggcggtatgggcggcgatggcatgggcggcaaccgcatgggcggtgggatgcctggcatgcggagctgctggacgaggttctgctggtccatcttaggtgacgatatatttcgctgtgcgttccggtgcaggccggacgggcactgtgtgcacgccaggcggcgggccgtgaatgcgccggcatttaacggag

SEQ ID NO: 98721 - DNA, 539 bp, Zea mays
  unsure (1)..(539): unsure at all n locations
tgtatcaggnttncatgaattccctgcanttgctnttcctnntnncgtaaccggcccgacccacgcgtccgggtgggttggcttctcctccccctccggttcgggttcgggttcgtgaggttctccgggggtcggtttcgtgggtgagcggatcgagatggctgcgtcagatgttgagtaccgctgcttcgtcggcggcctcgcctgggccacggacgaccactccctgcacaacgccttcagcacctacggcgaggtcctcgagtccaagatcatcctcgatcgggagacgcagatgtcccgcggcttcagcttcgtcaccttcttcacggaggaggcgatgcggaacgccatctggggcatgaactggcaggagctgaatcggcgtgatcattccgtatacgaggggccatgcccgctgcgggcgttgaagccgctgccgcagctggtaccgatggtgccgtggatgcagtcggttccgtgcgttggcggtcgccgntaattgctggatagcggttactgatggtagcttgtggttg

SEQ ID NO: 98722 - DNA, 513 bp, Zea mays
cgaaagatatgtccactgacataggatgtattgctctaccggtcttgaattcccgggtcgacccacgcgtccgaaacaaatctagggttccaagcgagcgaataccttcgcctgccgatctccccgcgtcttctcgggctaagacgattcgaggcacgagcgaagatgccgcagcggcattcgaaaaacaacaacgacctcgccttcttcacgtacgaggagaagcgtaagctcgggtacggcacgcagcgggagcgcctgggaaaggactccatcaagcccttcgacgcctgctgcctctgcctcaagccgctcatcggcccgctctgctgccccaagggccacacattctgtaaggagtgcatcctcgagtgcctcctctcccagaagaaggacatcaagcgcaagctagcagcacatgaggcccagaaaaagcaagagaaagaagaggaggaagagaagctaattctgcagaaggctaaggagttggatgcctttgatcagcagaatcat

SEQ ID NO: 98723 - DNA, 526 bp, Zea mays
  unsure (1)..(526): unsure at all n locations
tgaggatatgtggctagcctgaacgtanntnaccctctaccggattgccggatcgacccacgcgtacgcgtgcggtggtccgcgagggcgtcaagtacggcgcttgcatcggccccggtgtctacgacgtccactcccccaggatcccgtcggctgaggagatcgccgaccgcatcgacaagatgctggcggtgctggacaccaacatcctctgggtgaaccccgactgcggcctcaagacccgcaagtacacggaggtcaagcccgccctgaccaacatggtctccgccgctaagctcatccgcacccagctcgccagcgccaagtgagcaccttttttttgcctttttcgtttccgaggagggcgtcgtcgatgccaatttgtttccaataaacagggctgtgcccgccgttctgttgtactccgtctgtggttaggttagtagttttcttgatctcgcccccacgcggtacctgttttactactctctgnttggtggtttctggagcaagttgtccgtgtacc

SEQ ID NO: 98724 - DNA, 556 bp, Zea mays
  unsure (1)..(556): unsure at all n locations
nggaacatgtgaaatgtagtatatgganaagtaatacttctcctgaattcccggatcgacccacgcgtccgctccagagctcatatttggggcaaccgagtacacttcatcaattgatatttggtcagctggatgtggttcttgctgagctgcttcttggccagcctctctttcctggcgaaagtgctgtggatcaacttgttgagataataaaggttcttggtactccaacacgtgaggaaatccgttgtatgaatccaaactacactgagttcagatttcctcagatcaaagctcacccatggcacaagattttccacaagcggatgcctccagaagctatagatctcgcttcacgtttgctccagtattcaccaaatctaagatgcactgctcttgaagcgtgtgcacatccattctttgatgagttgcgagagccacatgcgcggttgccaaatggacggccatttccttcactgttcaactttaaacaggaactagcaaatgccttcccggagctcatcaacaggctgatcccagaacatgctatgcngga

SEQ ID NO: 98725 - DNA, 515 bp, Zea mays
cggaaaggtgtggatgttagaagaggagagaggatgcaccggtccgtaattcccgggtcgacccacgcgtccggcaagatgttcggcttcgggcaccacggccaccacggccagaacccgccggcgcacggcggcgtgcaccagcccaccttcaagatcttctgcaaggccgacgaggggtactgcctcaccgtccgcgacggcaacgtggtgctggcccccgccaacccgcgcgacgagcaccagcactggtacaaggacatgcgcttcagcacccaggtcaaggacgaggagggcaaccctgcgttcgccctggtcaacaaggccactgggctcgccatcaagcactccctcggccagtcccacccggtgaagctggtgccgttcaacccggagtaccaggacgagtcggtgctgtggacggagagcggcgacgtgggcaagggctttcgctgcatccgcatggtgaacaacattcggcttaacttcgacgccttccacggcgacaagggccc

SEQ ID NO: 98726 - DNA, 515 bp, Zea mays
  unsure (1)..(515): unsure at all n locations
tgttataagtgtcctagttgagagtgatgtattcgctctaccggtcttgaattcccgggtcgacccacgcgtccggatccggtctgatgtttctgaagtagttgttgctgacgagtttgagtacaaggatgctgtggatggctctgtgtccaagcaccagggcatccgatacctctttggagatggttcacgactggtgttccgcctctctggaaccggntctgttggtgccaccatccgtgtctacattgaacagtacgaggaggaccttcttaagacccgaagggttcacaggaacgcctttgttccgttggtggaggtgcgcttaaacttttccaaaatgaagaattcactggacgctttggccccaacgggatcacattaatttttaaaagaggtttaaaatgagttgaagcgcttacacaaactttcattccaggctcttgggtcatagtttttcttgcatggtacatctcaccgatgaataaaaatggatgtatcaaaacttgtcttgg

SEQ ID NO: 98727 - DNA, 503 bp, Zea mays
  unsure (1)..(503): unsure at all n locations
agtgttagggatccaggggggggaggctggccccggtctggaattcccgggtcgacccacgcgtccggtctgccagatctaactccccccgactcactaatcccagagagcctccatggcgacgcacggtcactgcctcccactcctgctcgtgggcgncggcctcgccctcgccgncggccctgctcgcgcggcgctgggccggcggccccggcccgttgttggccggttggaaccggatccttgacgtgagcgactggcacatccaggagctaggcgggtgggcgctggggcaggcgaagcaccagaagctggccgccgacgggctgcggttccgccgcgtggtgcgcggcgagcagcaggtcgtgtccgggatgaactaccggctctacgtcgacgccgtcgaccccgccggccgcaccgtgccctacgtcgccgtcgtgtacgagcaggtctggacccgcacccgccagctcgccttcttcaacccggtgccccgcgcc

SEQ ID NO: 98728 - DNA, 528 bp, Zea mays
  unsure (1)..(528): unsure at all n locations
tggntttgatgagtncctccgggaggagggacggatgncttgcgtcctgaattcccgggtcgacccacgcgtccgctcgtagagagaaggaaaaatatccccaattcctttctcccgatctcgatggcgaacccgcgcgtcttcttcgacatgaccgtcggcggcgccccggcgggccggatcgtgatggagctgtacgccaacgaggtgcccaagaccgcggagaacttccgcgcgctgtgcacgggctagaagggcgtgggcaagtccgggaagccgctccactacaagggctccaccttccaccgcgtcatccccgagttcatgtgccatggcggcgacttcacccgcggcaacggcaccggcggcgagtccatctacggcgagaagttccccgacgagaagttcgtgcgcaagcacaccggccccggtgtgctctccatggccaacgtcgggcccaacaccaacggcttccagttcttcatctgcaccgtcgcgaccccttggctcgacggcaagcacgttttg

SEQ ID NO: 98729 - DNA, 508 bp, Zea mays
gggttagatatggtagttggggaaggaaagtaagtctggtctggaattcccgggtcgacccacgcgtccgcccacgcgtccggcatcagtgcgtcacattcaccgggaatggcaacgctcaaggtcccagccactgttcctcccgtcgccgatgactgcgaccagctgcgcaaagcattccaagggtggggcacgaacgaggcgctcatcatctccatcctcggccaccgcgacgccgcgcagcgccgcgccatccgccgcgcttacgccgaggcctacggcgaggagctcctccgctccatcacggacgagatctccggcgacttcgagagggccgtgatcctgtggacgctggacccagcggagcgcgacgcggtgctggccaacgaggcggcgcggaagtggaagcccgggaaccgtgtgctcgtcgagatcgcctgcacgcgcaccttcgcgcagatcttcgcgaccaggcaggcttatcacgagccgttcaagcgctcgcttg

SEQ ID NO: 98730 - DNA, 526 bp, Zea mays
  unsure (1)..(526): unsure at all n locations
ntggggnngagattaatgatgtagatgaaaagtagtcctttccccggtctggaattcccgggtcgacccacgcgtccgcccgtgaactgggaagaaaccttcaactctttcgaagaaaacctcaatccactgacggttgtgcacaactggctgggccccggagtctgcccaaaggttgtggccaagggtttcagatgcataatgagcaaccaaggcgtctggtacctggaccacctcgacgtcccctgggaggacgtctacagcggcgagccgctcgccgggatcagcgacagagagcagcagaagctggtgctcggcggggaggtctgcatgtggggcgagacggccgacacgtccgacgtcctgcagacaatctggccccgagccgtcgcagcggcagagcgtctgtggagccagctggaggccatatccgcccaggacgtcgagacgaccgtgctgtcacggctacaccgcttcaggtgcctgctgaaccaccgtggggtcgccgcggctcctgtcacgaacc

SEQ ID NO: 98731 - DNA, 506 bp, Zea mays
  unsure (1)..(506): unsure at all n locations
tggantgggattctgagttgaaggaggaaaagatgcaccggtcttgaattcccgggtcgacccacgcgtccgcccacgcgtccgggaaaagaagaagaagattatcaaggaggtttctcatgagtggcaattggtaaacaagcagaagccaatctggatgaggaagcctgaggagattaccaaagaagagtatgctgctttctacaagagcttgaccaacgactgggaggagcatcttgccgtgaagcacttctctgttgaaggccagcttgagttcaaggctgtactctttgtgccaaagcgggcccccttcgacctctttgacaccaggaagaagcagaacaacatcaagctctatgtgcgacgtgtcttcatcatggacaactgtgaggagctgatcccagagtggctgagctttgtcaaaggtatttgtgactctgaggatctttcttctcaacatttttcgtgaagactttccagccggaccaagatcctcaaggtcattc

SEQ ID NO: 98732 - DNA, 551 bp, Zea mays
tgtgaatagttaatggaaggaaaatagtatgactcgtctggaattcccgggtcgacccacgcgtccgcccacgcgtccgcccacgcgtccggataaatctacccaaatctacagtctgtaccttagggttagctctgccgtgcctgtcgaaaatggcaaattccttctatccgcaaaaaggaactgccgtgcaacatatacagaatatataatatcaataaattctggtgatacatctaggtgtacaagtaacaacacatacattgggaaattaaggtcaaatttccttggcacaaaatttgtaatatacgatactcatccgccatacaatggaactagtcaaacagtggcagggaaaacaagtcagagattctactccaagaagggatcaaccaaggtttcttgcaggtggtacagtattgcacaaatctcatacgagctgaatgtcttgggaactcgaggcccaaggcggatgaactgtgtaatgcactccatcccagcttcatgccttgaggcttgtggcaatgtcccttgccagccggacaacattt

SEQ ID NO: 98733 - DNA, 557 bp, Zea mays
  unsure (1)..(557): unsure at all n locations
agtttagatgtgtatgaggggaagaagaagaggtattactcgtctggaattcccgggtcgacccacgcgtccgcccacgcgtccgcccacgcgtccggcttcatgggcaacggcagcagctacgccaagaacagcaacaacaacgccggcatgctggcgttcgacaagatggggagctacggcaacaacggcggcggtaataccaacaacaacagcaacggcgtggaggtgaagagctacttcaacaagtccgccgggagggcggcgagcaacaacaacaacaacagcagccacgccggcggcggcaacaagaagggcggcgccggggagtacggcaggaagaagcacgccaagagcgagggcgcggcggcggcggcggccacggacaagcagcggttcaagacgctgccggcgtcggaggcgctgccgcggggccaggccatcggcgggtacatcttcgtctgcaacaacgacaccatggacgagaacctcaggagggagctgttccggctggcgtncaggtacagggactctgtgcgtgctattcgnccgggact

SEQ ID NO: 98734 - DNA, 526 bp, Zea mays
  unsure (1)..(526): unsure at all n locations
tggaacgagttgcctggatataagaaggataggtatctactcgtctggaattcccgggtcgacccacgcgtccggcagagaatccccaagcaaacaaacagggttgagggagaggagaggagaggagaggagaggttgggtctgggacaccatggctccgatgaagctgtacggggcggtgatgtcgtggaacgtgacgaggtgcgcaacggcgctggaggaggctggctccgactacgagatcgtgcccatcaacttcgccaccgccgagcacaagagccccgagcacctcgtccgcaacccgtttggtcaggttccagctctgcaggatggtgacttgtacctcttcgaatcacgagcaatctgcaagtacgctgctcgcaaaaacaagccagagctgttgagggaaggaaacctcgaggaggcagcaatggtggatgtttggatcgaggtggaagctaaccagttcaccgctgcactgaatcccatcctcttccaggtcctcatcagtcctatgcttgggggn

SEQ ID NO: 98735 - DNA, 507 bp, Zea mays
cgaaatagagtggcctccgtagtagtacgtagcttgctcctgaatccgggtcgacccaggcgtacgcgtgcgcccacgcgtccgcccacgcgtccgacggcttccacggccagaacccgccggcgcgcggcggcgtgcaccagcccaccttcaagatcttctgcaaggccgacgaggggtactgcctcaccgtccgcgacggcaacgtggtgctggcccccgccaacccgcgcgacgagcaccagcactggtacaaggacatgcgcttcagcacccaggtcaaggacgaggagggcaaccctgcgttcgccctggtcaacaaggccactgggctcgccatcaagcactccctcggccagtcccacccggtgaagctggtgccagtcaacccggagtaccaggacgagtcggtgctgtggacggagagcggcgacgtgggcaagggcttccgctgcatccgcatggtgaacaacatccgcctcaacttcgacgcctttcacgggggac

SEQ ID NO: 98736 - DNA, 556 bp, Zea mays
atggtaatgtgtccatgaagtaaggggagagtagctactcgtctggaattaccgggtcgacccacgcgtccgcccacgcgtccgctactggaagcgccgatctatcaggttctgatcgattcttctgccccgagtccgcagcggcaagcggagatgaactgcgagacctgtcagctgaaagaactggagctggaactgacggagatcagggatgttctgcgctgtattttgcacaccatattcttccatagaaccctcagcctggttcgccccaaagatgttgactgtgatttcctcgatattacttatgtacaatgtggtctaccggaactagaaaaggaagttgacgaatagatagaccagttcagtgcatgggtggagaaacacccaaaccgcagaagccagatctgcctctcctttttcgacgagaaacacagacaccctggatggtttgtcaacaaaacagagcgcatctattgggagcaatggctcatcaatttgcaagtcatgttccccaaaagatacagcaaggtaaacagctcccaaaggctgacaa

SEQ ID NO: 98737 - DNA, 548 bp, Zea mays
  unsure (1)..(548): unsure at all n locations
ngtagaatgttatgattggggagggacactagttatcggtctggaattcccgggtcgacccacgcgtccgccggagccgccgcctgctcgctcgcctcctctccggcagcgagctctatctcccgcgacgagcagcagctgccaccgacgcacgcagaccggggaataaatattggtattggtagtgtgatatctataagaagtcaagatggtgaagttcacagctgaagagctccgtgccatcatggacaaaaagaacaacattcgtaacatgtctgtcattgctcatgtggaccatggcaagtctacgcttacagattcccttgtggcagctgctgggattattgcccaggaagttgctggtgatgttcgcatgactgatactcgtgcagatgaagcagagcgtggcattacaatcaaatctactggtatatctctttactatgagatgactgacgagtcactgaagaactacaagggtgagagagatggtaaccaatacttgatcaaccttattgactcgcctggacacgttgatttttcttcgg

SEQ ID NO: 98738 - DNA, 518 bp, Zea mays
  unsure (1)..(518): unsure at all n locations
cggggngagatgtattgtggtgaggatagtagttctcgtcctgaattcccgggtcgacccacgcgtccgacctcgccggcggccaaaaatcgaagcaccgaaccagcggctgcggcagcggcggcggcgcggcaagggttgaccatggcggagctaaagcggttgtcggagagccgtgacctgacgcggattgagcgcatcggtgcgcactcccacatccgggggctagggttggactcgtccatggaggcgcgcgatacctcggagggcatggtcgggcagctccacgcgcgccgcgcctcggggctcatactccagctcatccgccagggcaagattgccggccgcgctgtgctccttgcgggccagcccggcaccggcaagaccgcgctcgccatgggtatcgccaagtcgcttggtgcggagacacccttcgccttcgtcgctgcctcggagctcttctcgctcgacctctccaagacggaggctctgacgcangccttncgncgcgccataag

SEQ ID NO: 98739 - DNA, 510 bp, Zea mays
  unsure (1)..(510): unsure at all n locations
aggttnataagatagcacgataaggggaagtagttctcgtcctgaattcccgggtcgacccacgcgtncggcaagacaagaagcagccgtaagcagcagatagcatggcgagatcagggcgggaagcggggcccggagaggaggaacggaagctggtgctgggcaagtacgagctgggccgcctgctggggcagggcaccttcgccaaggtttactacgcgagggacctgagcgccggcgccggcacgggccacagctgcagcgtagccatcaaggtgatcgacaaggcgcggctgcggcgtacggaggggatggtggagcagctgcgccgggagatctccatcatgcggatggtgcggcaccccaacgtggtgggcatccgggaggtgctctgcagccgctcccgcgtcttcgtcgtcatggagtacgcgcgcggcggggagctcttcgccaaggtggcccggggcccgctcgacgaggaccacgcgcgccggtacttgcagcagctgn

SEQ ID NO: 98740 - DNA, 519 bp, Zea mays
  unsure (1)..(519): unsure at all n locations
ggggngagatgtatgacgagaaagaaagtagttctgcaccggtcttgaattcccgggtcgacccacgcgtccgattaatcttctgaaaactggtgatcaagaagcatatatgaggatggttgaagagagcaagaatgaacgcttgaaaatgctccttgataaaacaaatgagcttcttgaaggaattggaaaagctgtacagcgacaaaaagatgctgaacatgttagtaagccagaaggagggagtgaagtgccaaaagggtcagaatctgaggattgttctcaaatttcgggcatcaagagtgaatcagctgaggagtctacttcagatgacgatggagacctccctggccctgcagatgaaagtaaattcaatgcaggacgtagacttgatgttactgttcattctattgaagaaaaagtaacagaacaaccatctgctctcgaaagtggtgaattgagaccatatcaactagaaagtctccaatggatgctttctctatttaacaacaatttgaa

SEQ ID NO: 98741 - DNA, 513 bp, Zea mays
  unsure (1)..(513): unsure at all n locations
ttttattttttgatttcctcgcagcattgtanagtagcgtgcgtaccggtctggaattcccggctcgacccacgcgtccgcggacgcgtgggcttcccagaaaattactttaacagcccgccatcagtcagatgtacctgtgaaatgtggcatccaaatgtttattcagatgggctggtgtgtatctctattcttcatccacctggtgaagatccaagtggttatgagctcgcaagtgagcgttggacacctgtgcatacagttgaaagcatagttctgagcattatatcaatgctctctagtccaaatgacgagtctgcagcaaacattgaggcagctaaggaatggagggataagagggaggatttcaagaaaagggtcaggcgcatcgtgctgaaatcacaggaaatgttatgaagaaaatggaattctggggaagtcaaccgtgccatgtcaggctactagattttgctttcaacctcaaaatgctcatctgacatcttgtgtattttc

SEQ ID NO: 98742 - DNA, 548 bp, Zea mays
  unsure (1)..(548): unsure at all n locations
tgagtattgtcctgctgggagagagtgtggctaccggtctggaattcccgggtcgacccacgcgtccgattcggttcttcgacaaagcgattggaattaatgttccccgctcaaggtttctcccagtggaggctacatctgatctgttgcttgtgcagtctgatctttacaccttggttgatggctttgtcatccgcaacccatccagagcgaatccagctaacccttcaattgagcttggacctgagttcaagaaggttgccaatttccttggtcggttcaagtccatccccagcatagttgagcttgacagcttgaaggtttctggtgatgtctggtttggctctggaattacactcaagggcaaggtgacaattatcgccaagcctggagtgaagttggagattccagatggagacgtacttgagaacaaggatgtcaatggccctgaggatctttaagcaatgtttatcatcaccagttttcccaaggacatgtcacaggaactgccaagcctaatcactnctactgagctctatattttgaaa

SEQ ID NO: 98743 - DNA, 544 bp, Zea mays
  unsure (1)..(544): unsure at all n locations
gttggttgatatgagtgggaggggggaaaggaggtggccctggaattcccgggtcgacccacgcgtccgcccacgcgtccgcccacgcgtccgcaaagttttctctcccctagccgccgccgccgctcggctccctgagaggtgccgggaccgaggatttggccgagttctaggtagagaatcggttttacttgtctcagcccggggtctgctgcgtctggtggtggtgaaggggagaaattcgtgagatctgttccggatcaggcgtgcgagctcgggaatcaggggtttcacacatagcttcgtcgatttgaatttgatgtactaatggagtctaagggtggcaaaaagtctagcagtagtcgttctatgatgtatgaagctcccctgggctacagcattgaggacgttcgnacctgccgaggcgtgaagaagttccagtctgctgcttactccaactgcgcgaagagccatcctgatatcccttttggcttcctcattctagtagtttaggatttcttttctgacactttgattctgacca

SEQ ID NO: 98744 - DNA, 525 bp, Zea mays
  unsure (1)..(525): unsure at all n locations
agaacaagagatttgccctaacctcgtaggtcagctacggtctggaattcccgggtcgacccacgcgtccgcttcatcgaccccgtggacgagtacctgattcagtaccttatggactacgaggacaagaggttcgagaacgtgtccaaggagggactgaagctgggcaaggactcgaagctcaaggagctcaaggagtcgttcaaggatctgtctgactggtggaagaaggccctggagagctagaacttagactctgtgaatatcatcaaccggctgcatgacactctctgcgtcttggtcaacttcaagtactattggagcgccaacatggagaagatcatgcattcgcatactttgtttgactctaacaattatgctatcatgcgcntaaagatatttctctagatcaaccccatgcgccttattattaatgagctctgctgcaaggtctttcaatacaacctagatctatgaagcttaattacaccgctaatgctagtgtaataattatatccttattga

SEQ ID NO: 98745 - DNA, 507 bp, Zea mays
gattttatagataccctccgtaatgtatagagtgctgcaccggttccgaaccgacccacgcgtccgcttggataaatgccgccgtagatttgaccttggatatgcagattatcttagatatcgtgggatgcatcaatttgaccaggcgatgcagcaccttgagggagaatatgaattcatgacatctgatcactcatatgtatcacggaagcatgaggaggataaggtgatcatctctgagagaggagatttggtcttcgtgttcaacttccactggagcaatagctattttgactatcgcgttggttgtttcaagcctgggaagtacaagattgttttagattctgacgatggccttttcagtggatttagatcgcttgatcatgactctgagtactttactgctgactggccgcatgacaacaggccgggttctttctcggtctatgcaccctacagaacagccctcgtatatgcacctgcaggtgcataggacgaatagggcac

SEQ ID NO: 98746 - DNA, 524 bp, Zea mays
  unsure (1)..(524): unsure at all n locations
cganaaaacctgatttcctactagagaattanagtatcactcctctggnctggaattcccgggccgacccacgcgtccgactgtttacacactcaatcaatctgggatttgagcggatcaggacacccgtgaaaattagctctccaggttggaagtattctcactgggaaatgaaaggtgttccattgagaattgagattggtccaaaagatctggcaaacaaacaggtacgcattgtccgccgggacaacggtgcaaaggttgacattccggtgaccaatttggttgaagatgttaaagtgttattggatgagattcaaaaaaatctgttcaaaacagctcaagaaaggagagatgcatgtgttcaggtcgtcaactcttgggatgaattcacaactgctctgaataacaaaaggttgatcttggctccttggtgcgatgaggaggaagttgagaaagatgtgaaaagctcggacaaaaagggtgaactcggagcttgcgaaaaacattggggaccttccatt

SEQ ID NO: 98747 - DNA, 545 bp, Zea mays
  unsure (1)..(545): unsure at all n locations
aggaactgtgcccctcacgctgncgctcagcacggtctggaattaccgggtcgacccacgcgtccgataggtttgacttgtttgggatttaaactctccctatcccactcaatccacatggattgagagctgaccgaacaagcccacacatgtctagttggttcaactgtaccattactagcaggtgatggaccattgggtttatgacaaatggtgacaaatatcatatacacgctctcgcgctcgaaggtcagatcatttttgttgatcttatctagcgaagtgatggcttatatgttcaggatcatgagctcgttgagatgtattgagaggtctctgaatgcttaagttcagacaaccaggaataaggtctcaggtatgngactgtgatgttctatggtgccaatcatggatacagtatctctgaacgctaaattgactttagagagctacgacgctcacgtttggaggagcatgcatacctgttgccgtcttaagatatctgcaggaaccgttggtaactcctccctattaaaacaaagatt

SEQ ID NO: 98748 - DNA, 527 bp, Zea mays
  unsure (1)..(527): unsure at all n locations
ngttattaataagaannagtgtttctacgtatatagtatcgatgctctcgtcctgaattcccgggtcgacccacgcgtccgcggacgcgtgggcggacgcgtgggcccgagcagatttttcagacattgctatagctgtccgagagggtgctgatgcagttatgctttcaggagaaactgcacatgggaaatttcccttgaaagctgttaaggtcatgcacactgttgccctgagaaccgaggcaactattcctggtggggaaacacctgcagaccttggtcaggctttcaagaaccacatgagcgaaatgttcgcataccatgcgacaatgatgtcaaatacccttcgaacatcaatagtggttttcactaggacgggatttatggctatactgcttagtcactaccgtccatctggcactatttttgccttcacagacgaggagagagttaggcaacgattggctttgtaccaaggtgtatgtccggttcaaatggaattttctgatgatgctgaaaagacattt

SEQ ID NO: 98749 - DNA, 516 bp, Zea mays
  unsure (1)..(516): unsure at all n locations
cggggaanncagcatgttatgagttggaagtaatgtagtctcttcgcccggtctggaattcccggctaggcgtccggggatggctattggaagtggtttgctggctacctgtcctctggtggtgctgctggtgctgcctgtttgttttttgtgtactccctggactacgcgagaacaaggttggctaatgacgcgaaggctgccaagggaggaggtgaaaggcagttcaatgggcttgtcgatgtctaccgcaagacactcaagtctgatggtattgctgggctttaccgtggatttaacatctcctgtgttggaatcattgtttatcgtggtctgtactttgggctctatgattccatcaagccagttgtccttactggcaacctccaggacaatttctttgccagtttcgctctgggttggctgatcactaatggtgctggtcttgcatcttaccccatcgataccgtccgcaaaaagatgatgatgacatctggtgaagctgtcaagtacaaa

SEQ ID NO: 98750 - DNA, 513 bp, Zea mays
  unsure (1)..(513): unsure at all n locations
tggtatatagagatgggtagagggcaaggaagagagatagtggtcctgaattacggccgccccgcnnacncnggcgctcgcggaggtcattctggatttctggtttcctacagaaggattaaacagctaggttagtggaaagggatgaagaaagatatccatgcctatgtccagacatgcaatatctgccaacaggccaaaccggacaggaccagctatcccgggctgctcgcgcctctacctgttcccccgcatgcatggcattctatatcaatggacttcattgaagggttaccgaagtccggaacaatggattgcattctggtggtggtagatcgattctcaaaatatggtcatttcttggcgcttgcccaccctttttctgcagcaaaggtagcaaaacttttcttggataatatctataagcttcatggtatgccggacaatatagtatctgatcgggatagagtgttcacaagtctgttctggcagcaattattcactctcagtggc

SEQ ID NO: 98751 - DNA, 516 bp, Zea mays
  unsure (1)..(516): unsure at all n locations
cggggagtgagtatgtggtagaggaggggatgcatgctaccggtctggaattcccgggccgacccacgcgtccggggtttttgattttagccgccgccgctgctcatctcacatccctcgagaagacgcctgcgtgctcgccgatcgatacgatggccgtcttctccgacctccacaccgccgacggcctcaagtccctcgaggctcacctcgccggcaaaacctatgtgtctggtgactccattactaaggatgacattaaggtcttcgccgcggtgccgtcgaagcctggcgctgagtttcctaatgccgcccgctggtacgagaccgtctctgcggctgtagcctcaagattccctggtaaggctgttggtgtaaatctgcctgcgggatcagctcctgcggcagctgctcctgcggatgaggctgangatgatgatgaccttgatctttntggtgatgaaactgaagaggacaagaaagcagctgatgagcgtgccggcgctgccaaagccc

SEQ ID NO: 98752 - DNA, 516 bp, Zea mays
  unsure (1)..(516): unsure at all n locations
aacagtcatgtctttctgnanccannnntngnnntnnntnnatgtncntgtctcctgtatgagtgtaatattacctatccattagcctgaagtggaggtgattggtaattcgtggtggagacgctaggtaggggtaagggtggtaaggggtctgggaagggtggtgtgaagtgctattggaaggcgtcgtgtgataatacttaggggactatgaagttggtgacttggaggtcggtgaggaggggcggtgcgaagtgtactcttgggtcgactcatgaggagatttgtggtgcgtctaagactccctctgagaacgctacttgtgatgtcgcgattcatatggagtatgtttgctgtaaaattgctattgtcacggatgctgcgcatgtttctaaatgttagggttgtatctctcacggtcctggtggtcaggccaggcgcgggcaaccgttcgcttaggcgctctggactcgcggcattcagccggtcgntccttcgcgcctgcaccgcagtagn

SEQ ID NO: 98753 - DNA, 530 bp, Zea mays
  unsure (1)..(530): unsure at all n locations
atggtnatctgcgtatcgaactcctcgannatcgangcnctggaattaccgggtcgacttacgcgtccggtcagacacgcgtccgcccacgcgtccgcctacgcgtccgcggacgtttgggcgacatgaagctcagggacgacctggagaggctcaagaagatcaggaaccaccgtggtctgcgtcactactggggcctncgtgtccgtggccagcacaccaagaccactggcaagcgtggaaaaactgttggtgtcttcaagaagcgantagctacatatctatcgacaaatctcagatgtactagtgtttgttcttgttcaaactgtcttgatgaagggtttctgttgggacagtttcctgaaattatgttttgccctaggataatctngcagttatggaaaccttgtatattgtatcctgcaatttggtttttgcaacttataagagtaattntatttgatgagtcttatgctgaaaaaaaaaaaannanannaaaaaaaaaaaaaaaaaaaaaaaaaaaaaaaaaa

SEQ ID NO: 98754 - DNA, 548 bp, Zea mays
  unsure (1)..(548): unsure at all n locations
ttggttttctngncctatcacgcaacgtactgantcccgattatacagaagtgctgccccggtctggaattcccgggccgacccacgcgtccggaagatttggtgttttggacctgagaccactggcccgaacatggttgtagatatgtgcaagggagtgcagtatctcaatgaaatcaaggattctgttgtggctggtttccagtgggcatcaaaggagggtgcactggctgaggagaacatgcgtggaatttgctttgaggtctgtgatgtcgttcttcatgctgatgctatccacaggggtggtggtcaggtcattcccactgccaggagggtcatctatgcctctcagctcacggccaagccaaggctgctggagccagtctacctggtggagatccaggccccagaaaatgcacttggtggtatctacggtgttctgaaccagaagagaggtcatgtctttgaggagatgcanaggccgggtaccccgctctacaacatcaaggctttcctccctgtcatcgagtcctttggtttctccagcc

SEQ ID NO: 98755 - DNA, 537 bp, Zea mays
  unsure (1)..(537): unsure at all n locations
agcagtnatctngncnngcttgatgnatcattcaggtaacccttttcantattgacacttcgacttacgcgaccggccagacctacccgtcctcaagagcttccgttttctacctcagaccattttcccgaacatgggggtagatatctacaagtgagttctaaatctcaatggagccaacgattctgttgtggctgatttccaccgggcatcaaaggatggtgcactggctgacgagaacatgcgtggaattcgctttgaggtctgagatgtcgatcttcatgctgatgctatccacaggggtggtggtcaagtcattcccactgccaagacggtcatctatgcctttcatctcacggtcaatccaatgctgctgtatccagtctacctggtgtagatccatgccccagaaaatgcacttggtggtatctactgtgttctgaaccacaagaaaggccatgtctttaaggaaatgcataggccgggtacaccgctctacaacatcaaagctttactcactgtcatcgagtcccttga

SEQ ID NO: 98756 - DNA, 548 bp, Zea mays
  unsure (1)..(548): unsure at all n locations
agcgtttnttngtccctaccgatacncttgaanacccgattatatcgtagtgctcgcccggtctggaattcccgggccgacccacgcgtccggcagcatgaagagggagatcagcgagacctacgacaccctccgcttcggcctcaatgccggcgtcaaggccgacctcgcgccgccgcacccgctccagtccagcatccaatcggaggccaagttctgggcggacaagaagaagtttgggacagaggccatctacggatccgccttgaacatccgcaaggatctcgatgcccaaatcctctcaaggttccaaaggccccctggtgctttgccatcatctctgcttggatatgaggcactgacaggttccctagatgattttggttttgaagattatcttaacatgcctcaagattctgaaggtttccgtcaacctgacatgcaccacggaatggaggttcgccttggtttgtccaagggacctatctgccctagcttcagttgaggcagtgaatgtagttctgcggttctgccgcacgttgatgcac

SEQ ID NO: 98757 - DNA, 538 bp, Zea mays
  unsure (1)..(538): unsure at all n locations
cgcatcggatatgctcctgtaantaccgcatctacagtagtgctcgtccggtctggaattcccgggtcgacccacgcgtccgcccacgcgtccgtaggaatctctgacaattatgctggggccgtggagtctgtccaaaagtgagatcttctgaaagatacaaaagtgtctctttctgcaaaccatctgcagaaactgtgtttatcttttcaactaaccacaccgcttgggcacacatttaaacctcaccaggtgttcttgaaattgaggcatgagagtaaggttgaacacttattcgtggtacctggctctgcaaggcagttcaaaattgttcttgacttcctaggtttggtggagaaattttactacctttctggaagatatgaccttgagcttaccgttggtgatgctgtaatggaaaattcatttctacgacctcttggccatttggagttggacctgccagatgccccagaaaaagccccacgtccttctgcacaagctgttgacccattctcaaaatttgggccaaaggcaa

SEQ ID NO: 98758 - DNA, 524 bp, Zea mays
  unsure (1)..(524): unsure at all n locations
gtacgatgctattgacnactcgatctatatcggagtgctccaccggtccggaattcccgggtcgacccacgcgtccgcgttcccggcctcaccccgagccagtcgtttcgctagggtttcgccgccgccgccatgccgcgccgcagctcaggaaggtctgccccacgcccagctccccgtgctgcttcactgaggaacccgccacagccagcacgccaggctcctcctccagctcctgttcgagatggtggtggctccatgtttggaggaattgggtccaccattgctcaaggtatggcgtttggcacgggtagtgccatggcacacagggctgttgactctgtattaggtccccggaccatccagcatgagactcttgccacagaagctcctgctgctgcccctgctgctccagcgatgaatgctgatgctngcagcttccattctaaggctttccaagattgtctcaacaactatggcagcgagatcagcaagtgccagttctacctagacatgctgaacga

SEQ ID NO: 98759 - DNA, 551 bp, Zea mays
  unsure (1)..(551): unsure at all n locations
agtggnnnctngacctatcgtatatcgctacgantcggggatatacagtagtgctctaccggtccggaattcccgggtcgacccacgcgtccgcgagtgccttgcagatgagctgatcaacgttgccaagggctcatgcaacagttacgccatgaagaagaaggacgagattgagcgtgttgccaaggccaaccgttgaactgagcttgtatcctggtgcactctgcgctggaaacttttatgtcgctggcagtcgtatcggttcttgttttaccaatgtttagagttttttgagacctatatgcggttttggttttcagtgcacaattaaaattactgagtaatgtagttgattgggaacagaaatgtttggtgcctggtttaccgaactccaaaataaaaaatatacgtgcacagaatgctaccttacgacaggatcatgcacgatcgcaaattggatgctgatgctgtacaacattccgcaaagcaaaaatgttaaaaaagggcggccgttttaaaagatccaactttacgtcgaatggatggaaatt

SEQ ID NO: 98760 - DNA, 541 bp, Zea mays
  unsure (1)..(541): unsure at all n locations
agtcgtnnnctggccgtaagtgacgctantgacgatcggcatatacggaatgcttctaccggttcggaattcccgggtcgacccacgcgtccggccctcagcaaccagcaccaggtccgtgtttagatcgagtccctctttgacgggaccgatttctcggagccgctgacccgtgccaggtttgaggagctgaacaacgacctcttccgcaagaccatgggccctgtcaagaaggccatggaggatgctggccttgagaagagccagatccacgagatcgtcctggttggtggaagcaccaggattcccaaggtccagcagctcctgcgggactacttcgacggcaaggagcccaacaagggtgtcaaccctgatgaggctgttgcctttggtgccgctgtgcagggaagcatcttgagcggcgagggtggtgacgagaccaaagatatcctnctncttgatgtggctcccctcaccctgggtatcgagaccgtcggtggagtcatgaccaagttgatcccgaggaacactgtcatcccgc

SEQ ID NO: 98761 - DNA, 552 bp, Zea mays
  unsure (1)..(552): unsure at all n locations
aggcgnnnctnantnttaccggagagctcctcgagacggggatatacagcagtgctctaccggtccggaattcccgggtcgacccacgcgtccggaggatcgccgatgtcgacggctcccaggtgccccttccgaggccgcggcgccccgcccgctggcaccggctacgtccgccgcggccccgcccctgccccaggccccgccgacggcgccaagaccctgcgcaagcccgtcttcaccaccgtcgaccagctgcgcccccagacgcacggccacaccctcaccgnccgcgtcatctccgcccgcaccgtcctcgacaagccctncacgcacatcggccgcacccgcgtcgcagagtgcctcgttggagacagcaccggcaccgtcctcgtcaccgcccgcaacgaacaggttgaccttctgaagccagatacaacagtgatcttccgcaacgctaagattgacatgttcaagggtaccatgaggctggtggtggacaagtgggggcggattgaggtgactcagcctgctgatttcaaggtgaaccaagaa

SEQ ID NO: 98762 - DNA, 549 bp, Zea mays
  unsure (1)..(549): unsure at all n locations
agggttnnttgnccttacgtatagtcactgaaacagattataccggagtgcttctaccggttcggaattcccgggtcgacccacgcgtccggctgcagcgcctccgtcgccgctgccgcatctaacgcagttccctccgccgcagcccgaggcaagatggttctccagaacgacattgatctgctcaacccgccggcagaactcgagaagctcaagcacaagaaaaagagactcgtccagtcgcccaactccttcttcatggatgttaagtgccaggggtgcttcagcataaccactgttttcagccactcccagactgttgttgtgtgccctggctgccaaactgtcctctgccaacccacaggaggaaaggcaaggctcactgagggctgttctttccgcaggaagggagactagagcggatgtggtcttcaagttttgctctatgccagatactagcgtcatgaactgcctttagctaagattttccataagttgttctcgagcagctatgtgttgcatgttggctacttccaaacttatatctgg

SEQ ID NO: 98763 - DNA, 550 bp, Zea mays
  unsure (1)..(550): unsure at all n locations
agggtnnctccncctaacgaagactcactgantacggatctattacgtagagctcgtccggtccggaattcccggctcgacccacgcgtccgaggcaccacaccttctcctcctcctcctcctagcacagctagcgcctgctccccttcgcctgtgatcatgtcttgcagcagcggcaagtgcgactgcggctccagctgctcctgcggcagctcatgcaactgcatgtcccctaacgtggagaccgncgncgncagcagcatcaagaccatggtcctcgctgcgccgaccaccaaggccagcgccggcggcttcgaggcggccaccgagggcggcggctgcgactgcaacacctgcaagtgcggcaccagctgcngctgctcctgctgcagctgcaactgagcgccggccggcccggcgatggcgcgcacgagtcgacggaaggacgacgacgagtcgtataaatataatagcggcgtctaaataagatcctgtcaactgcacccgccatcatcgatccatggtcgctcctggggttcatgttcatctg

SEQ ID NO: 98764 - DNA, 533 bp, Zea mays
  unsure (1)..(533): unsure at all n locations
ccgatcggagatactnttgtaantaccgcacatcacagtattgctctaccggtccggaattcccgggtcgacccacgcgtccgggaaattattccaaaccccaaggaagttgttggtgtgaaagtccttcaacttgaaactgcagctggtgcagctattcgtttctttgacaaagcgattggaattaatgttccccgctcaagatttctcccggtgaaggctacatctgatttattgcttgtgcagtctgatctttacaccttggttgatggctttgtcatccgcaatccatccagagcgaatccagctaacccttcgattgagcttggacctgagttcaagaaggttgccaatttccttgctcggttcaagtccatccccagcatcgtcgagcttgacagcttgaaggtttctggtgatgtctggtttggttctggaattacgctcaagggcaaggtgacaatcaccgccaagtctggagtgaagttggaggttccagatggagcttgatttgaaaacaaggatgtcaatgg

SEQ ID NO: 98765 - DNA, 550 bp, Zea mays
  unsure (1)..(550): unsure at all n locations
agggtttttnnnntttcctgaaagtcatggantccgaattctatcgtatnactcctccggtccggaattcccggctcgacccacgcgtccgagataaaccaccgtcagtccgattccagattcggatcaatatgacatgcgtgaaccaagaaactggattggttgaaccaagtctatttcctatgcttggcaagtgggaaagggaacatacaatggaggacatcctggccagcttaaaaagggagatgtcaactcctcagaaccgcaggctgtaccaacctcatgaaggtaacgaagatcaaagagtagagcagaaagggctgtcccttagatgtgtcgtcatgtaataatgtacatttgaattgagcagcgagatgccgagcttgagcgaaccctcttagggcatgtttaggaacaatccccttcaattcccttgctttcaaagaagccctgtaggaaccctnctgtagctcaccttaatcgcaataaagtgtcgatgactgttaaattgcctgcacggctgcacaccatgtaacagcaaccgattcat

SEQ ID NO: 98766 - DNA, 542 bp, Zea mays
  unsure (1)..(542): unsure at all n locations
agcgtnnnntggcctaccgacacgtcatgaataacgcactatacgtagtgctctaccggtctggaattcccgggtcgacccacgcgtccgcacgcccctgtcactgaggtgcgccgtggttcttggcatccccacggcgatctaccgccgtggcggggctgcctcagccgctgagctggtcacggcgctgtctctcccctccactaagctgccgttccttcgccgnctgctgcggctcctcgccgcgtcgggcgtgttcaccgtcgacaagcagagcacggaggaggagcggtaccgcatcagccccgtgtcctacctcctggtggacggcatccctcacgaggaccacatgaaccacaccgctctggtgctcacctgcacctcgacgcgctacatcgaggcggggatagggctggcggagtggttcaagagggacgtggtcacgtcaccgttcgaggagctgcacggngcgactctgttccacgagagcatggggagcctcgacgcagatttccacgacatggccagcgaggccttggacc

SEQ ID NO: 98767 - DNA, 553 bp, Zea mays
  unsure (1)..(553): unsure at all n locations
agcgtttctnnnnnttactaatagctcactgatacgcgggtaatacggaattgctcctnncnnntnnnnnnannnnnncggacccacgcgtccgagcggctcgtctacgactacctccccaactgcagcctctccgccatgctccacgggagccggggctcgggccggacgccgctggactgggaggcgcggatgcgggcggcgctgtccgccgcgcgcgggctggcgcacctgcacacggcgcacaacctggtgcacggcaacgtgaaggcgtcgaacgtgctgctccgcccggacgcggacgcggcggcgctctccgacttcgggctgcaccagctgttcgcggcgtcgacggcggcgcgggccggcgggtaccgcgccccggaggcggtggacgcgcggcggctgacgtacaagtcggacgtgtactccctgggcgtgctgctgctggagctcctgacgggcaagtccccctcgcacgcgtcgctggagggcgacggcacgctggacctgccccgctgggtgcagtccgtggtgcgggaggagtggaccc

SEQ ID NO: 98768 - DNA, 530 bp, Zea mays
  unsure (1)..(530): unsure at all n locations
nttttgagatgccctctagatccgattatacggaatgctctaccggtctggaattcccgggtcgacccacgcgtccgcccacgcgtccgcccacgcgtccgcggactcgtgggcttcgccacgaacaaaagcgcatcgatctcgctgtcgtcactcctcgtcacccagccacgaacagaggcaccacccagcatggccctgcaggcggcgctcctcccatccaccctctcatccgtccccaagaagtgcagcctcgccgtcgcggcgaaggacacggcattccttagcgtatcccagaagaaggtgcaggcggcgtcgctgtcggtgagaacgcgggtggcgacgacggcgcctgtggccacgccggggtccagcacggcggccaaggatgggaagaagaccgtgcggcagggcgtggtggtgatcacgggcgcgtcgtcggggttgggcctggcggcggccaaggcgctggcggagaccggcaagtggcacgtggtgatggcctgccgcgacttcctcaaggcggccaa

SEQ ID NO: 98769 - DNA, 530 bp, Zea mays
  unsure (1)..(530): unsure at all n locations
nactggagtgcctctgaatcagaactatacagaagagctctaccggtctggaattcccgggtcgacccacgcgtccgctatttctcaaagaactttaatcacttggttgatcaactggcatacggcacacaactgtagtaaaaaatggagaaatgcttggtgtatcgcatctaagaaacagaagagttttgtccaatgggtttgtttcattagggaaggaggatcttcagctcatgtatagtgatggtgataaggcttttggtacatccactgatctctgcattgatgagagactaagaatcgcatctgatggcattatttttgtcaggtcaggttaaagttacttgcttcagatacttagtaattttgaaaggaacatcaagagccttatcttattctttctggcgggcattgatccagtacactgatgcggctactgcttcagctgctagagaatccttagatggaaggagcatcccaagttacttgcttccggagcatgtaacatcctgctgcctgcgaatttcttt

SEQ ID NO: 98770 - DNA, 548 bp, Zea mays
  unsure (1)..(548): unsure at all n locations
agcgtnnnctngntttactgagacgtctgaantcagcagtatacgggaatgctcgtaccggtccggaattcccgggtcgacccacgcgtccgcccacgcgtccgcggacgcgtgggtccaatctgcccttgccgccgccgcccgatccaggtgtgtagactgctcactcctctccgctccggtccgaatggcccgcacgaagcagacggcgcgcaagtcgaccggcggcaaggcgccgcggaagcagctggccaccaaggcggcgcgcaagtcggccccggccacggggggcgtgaagaagccgcaccgcttccgccccggcaccgtcgcgctccgcgagatccgcaagtaccagaagagcacggagctgctcatccgcaagctccccttccagcgcctggttcgcgagatcgcgcaggacttcaagacggacctgcggttccagtcgtcggcggtggcggcgctgcaggaggccgcggaggcgtacctggtggggctcttcgaggacaccaacctctgcgccatccacgccaagagggtcaccatcc

SEQ ID NO: 98771 - DNA, 547 bp, Zea mays
  unsure (1)..(547): unsure at all n locations
gtcttatgccgacttgctgatgnccttttgagctttgcanctacattccggtctggaattaccgggtcgacccacgcgtccgcccacgcgtccgcccacgcgtccgggcactttacctcctcctcctcctcctcctagcacaggtagcgcctgctccccttcgcctgtgatcatgtcttgcagcagcggcaagtgcgactgcggctccagctgctcctgcggcagctcatgcaactgcatgtcccctaacgtggagaccgccgccgccagcagcatcaagaccatggtcctcgctgcgccgaccaccaaggccagcgccggcggcttcgaggcggccaccgagggcggcggctgcgactgcaacacctgcaagtgcggcaccagctgcggctgctcctgctgcagctgcaactgagcgccggccggcccggcgatggcgcgcacgagtcgacggaaggacgacgacgagtcgtataaatataatagcggcgtctaaataagatcctgtcaactgcacccgccatcatcgatccatggtcgcttctgg

SEQ ID NO: 98772 - DNA, 548 bp, Zea mays
  unsure (1)..(548): unsure at all n locations
cgaaatggccagcttgctgatgnttggggagcttgcctacnatcgtacggtcttgaattcccgggtcgacccacgcgtccgcggacgcgtgggtgcagattgacccagcgatttacaagagtatctcatctggatttggtaggctgttaaaggagcaaggggccaggggtttcttcaggggatgggtgcctactttgcttggttacagtgctcagggggcttgcaagtttggcttctatgagttctttaagaagtattactcggacatcgcagggcctgagtatgcccaaaagtacaagactctaatctacctcgcaggatctgcatctgctgaggtaattgctgatgtggctctctgcccttttgaagctgtgaaggtacgtgtgcagacacaacctgtatttgctcgtggattgagtgatgggctccccaaaatttgtccgatctgaaggtggtcttgggctctacaagggaatttgtcctctctggggtcgtcagaattcttattccatgatgaagtttctttctttgagaccatcgttgagctt

SEQ ID NO: 98773 - DNA, 548 bp, Zea mays
  unsure (1)..(548): unsure at all n locations
agagcggtcgaggttcagttcatgctaacggatcaatctggtctggaacattggtctgatttatgtgcttgtttatgtgcttgtttatgtgcttggctgatcccaaaacttgtatggctgaggcggagggtaggattgcaaagtcgtagacccgggatatagtacggtaggagtggcctaggattactatgagtagtcatcattgaggagtctatgggacaaccaccgcccacgatactatggatacggagagtcctaataatgcgaagtagcggtccgacgagactgattgacatgttaatgatagtgcacgtaagtcctctgccggcaataaacgcgactcggttgagaatagggtcgctgatatcctagcagtataggtccatgtcgaagaggcaggtaccttgccttctgaaatgagtgtcaaggagctgactaatgctgaagaggtgcctccggtaacgttcgtcgtaccaagaaaaagcaaatagggagctaggtaagttccgagaaggaagtttcntaacggaacctagacgaaagggtgg

SEQ ID NO: 98774 - DNA, 539 bp, Zea mays
  unsure (1)..(539): unsure at all n locations
agtatgatagagcctgatgnaaggggccctagcnacctacgtaccggcctcgaattcccgggtcgacccacgcgtccgatttgatcttattggaagagacaagagcatgattcactggagggtgctaaaaattgatcgggtggagtgcactgagctgggtgtcgatgaggatccaactatttacacggaaagtgaatgtcaagaactgctttggcggatccatgaggggaacaggttgactggtggactgaaatttgtcacaaaatgttacggaatagttggttttgtaaagtttcttggtccttattacatggttataataaccagtagaaggaaaatcggcacaatatgcggccatgaaatttattccgtcggcaagagtgaaatgattgcaatttcaagtgttacagtctggcccaacgtggcttattctatggacgagaacagatataagcgccttctttgctcagttgacctttcgaaggatttcttcttcagctactcttacaacatcatgcgcaggcttcagaagaacataa

SEQ ID NO: 98775 - DNA, 544 bp, Zea mays
  unsure (1)..(544): unsure at all n locations
tgtttgccagctgctgaagncagggcccctaaagntctggaacggctcgaattccgggtcgacccacgcgtccgcccacgcgtccgcccacgcgtccgaagcatgccatgtggaggagggctttagcgatggtcgggttcatggctggcgccgcgctgctcgccggggctgccggcgccggcgcgcagcagggcgtgtggagcatcatcacccggcccatgttccagagcatgctgagccaccgcggcgacagcgggtgccagggcgccttctacacctacgacgccttcatcgaggccgccagcaagttccccggcttcggcaccaccggcgacgagcagacgcgcaggcgggagctcgccgtcttcttcggccagacgtnccacgaaaccaccggtggatgggcgactgctccggatggacccgttgcctggggatactgccgggtgaaggaacagaaacagacggacccaccctactatggacgaggacccatacagctaactcataagtacaactacagggctcgncgggcaagcgctgn

SEQ ID NO: 98776 - DNA, 551 bp, Zea mays
  unsure (1)..(551): unsure at all n locations
agactatgccagggtgctgatgnaaggggcacctcaactccaatctaacggtctggaattcccgggtcgacccacgcgtccgcggacgcgtgggcggacgcgtgggcagctgtctggacagcaaccagctggctgaagtggaggagttcgaagacaagatgaaggagcttgaggggatctgcaaccccatcatcgcgaagatgtaccagggcgagggcgcgggcatgggcgctgctgctggcatggatgaggatgccccgtctggtgggagcggtgctggtcccaagatcgaggaggtggattaaattggttagtgttcgaggtttggtttggtgaggtgtcaagtgcctgaactctgaaggttgtttgtgagataagtgatcttacgaagtggtcgcaatagctgcggcctgtgttgaacttctcagaaataaataagttttcgttccttaaaaaaaaaannnnnnnnnaaaaaaaaaaaaaaaagggcggccgctctagaggatccaagcttacgtacgcgtgcatgcgacgtcatagctcttctatag

SEQ ID NO: 98777 - DNA, 539 bp, Zea mays
  unsure (1)..(539): unsure at all n locations
tgatagtcagagtgctgtgcctttgccctcggatcgctctaacggccctgaattcccgggtcgacccacgcgtccgcccacgcgtccgcccacgcgtccggtcacttgctgcctccgcttcccaggacagcttaacgctgacctgcgcaagcttgcagtcaacctgatcccgttccctcggctccacttcttcatggtcggctttgcgccactcacctcgcgtggctcgcagcagtaccgtgcactcactgtccctgagctaacccagcagatgtgggatgccaagaacatgatgtgtgctgctgacccacgccatggtcgttatctcacagcctctgccatgttccgtggcaagatgagcactaaggaggttgatgaacaaatgattaatgtccagaacaagaactcgtnctactttgtggagtggatccccaacaacgtcaagtccagtgtttgtgatatccctccgcgtggcctctncatggcctncaccttcattggcaactccacgtncatccangagatngtccgncgtgtga

SEQ ID NO: 98778 - DNA, 542 bp, Zea mays
  unsure (1)..(542): unsure at all n locations
tgttagttatggcctgtcgccaggangctagnngtcatgcatcgacttccatactgggccgacccacccgtgcggattgtagccggcgccgctgctcatctcatatccctctagaagacgcctgctcctcgccggtcgataggatggccgtcttctgcgacctccacaccgccgacggcctcaagtccctcgaggctcacctcgccggcaaaacctatgtgtctggtgactccattactaaggatgacattaaggtcttcgccgcggtgccgtcgaagcctggcgctgagtttcctaatgccgcccgctggtacgagaccgtctctgcggctgtagcctcaagattccctggtaaggctgttggtgtaaatctgcctgcgggatcagctcctgcggcagctgctcctgcggatgangctgangatgatgatgaccttgatcttttttgtgatgaaactgatgaggacaagaggcagctgatgagcgtgccgncgctgccaaggcctctttctaaaagaaagaaagtggtaaaatcctccgcn

SEQ ID NO: 98779 - DNA, 538 bp, Zea mays
  unsure (1)..(538): unsure at all n locations
agttagtcagctgctgtgcctgcnccaatggactcctctaacggcctggaattcccgggtcgacccacgcgtccgcacatgttgtgggttggtgagcgcactcgttaactcgatggagcgcatgttgaattccttggtggtgtggccaatcctcttggcataaaggtgagcgacaaaatgaaccccagtgacttggtgaagctgattgagattctgaacccttcaaacaaacctggaaggatcaccataattacaaggatgggggcagagaacatgagagtgaagttgcctcatcttatccgtgctgttcgcaatgctggattaattgtcacatggattactgatcctatgcatggaaacaccatcaaggccccttgtggccctgagactcgtncatttgactcaattctggctgaagtgcgcgcattcttcgatgtgcatgatcaagaaggaagtcacccaggaggcatncaccttgaaatgacntggcagaacgtgaccgagtgcatttggtgatcacngactgtgaccttcgata

SEQ ID NO: 98780 - DNA, 543 bp, Zea mays
  unsure (1)..(543): unsure at all n locations
gatttgccgggcctgatgcctccaccctcggactcatctaacggccttgaattcccgggtcgacccacgcgtccgcccacgcgtccgctctactaatccagcccatttcgaactctctctagacgcttcctcggtgtctctgggcaccgctgccccgtaccgtactcctcttcgcgccgtagaaatggcgctgccgaatcagcagggcgtggattaccccagcttcaagctcgtcatcgttggcgacggtggaactggtaaaaccacatttgtgaaaaggcatcttactggcgagtttgagaagaaatatgagcccaccattggtgttgaagttcaccctctggattttagcactaactgtggcaaaattcgcttttattgctgggacactgctgggcaagaaaagttcggtggccttagggatggctactacattcatggtcagtgtgccatcattatgtttgatgtcacttctaggctgacatacaagaatgttccgacatggcacanggacctgtgcanggtctgtgagaacatncnctn

SEQ ID NO: 98781 - DNA, 542 bp, Zea mays
  unsure (1)..(542): unsure at all n locations
cgacgcgtcgattcagaacacatagtangtcctcattggtctcgaactttgggctgatttatgtgcttggccggacttcggtctagaaggaatgtcagtcacacgtccaatatacgtaagctgaatgcggggcctggggagtcgggtagaaggaaaagaggtcttcagtcaaagccgctctgtttcgttcgtagggtgtgtgtaatggtcccgattcaatggttcttgcccgtcggaactggaacagccgagaataaagcggtgaatgggcgtgcaatgtgcgggaactcgttgaatagcctgggttaaacttcgaagaaagtctaaaagtgtcgcccgacgagttcgtgcagcaccaggcagccggctaggcaaaggtcgattaagttaacgacgtccagtcggctcccctggacgactagttatatcgggatcgagatatggtttggatctttatggngggtagtagcggggaactccggataacgggtgaaagtttgacttagtaacactgtgcgagcgaagaagggtacgttgtcngc

SEQ ID NO: 98782 - DNA, 542 bp, Zea mays
  unsure (1)..(542): unsure at all n locations
agttagtcaggtgctgtgnctttccactaggtacaacggtacggtctggaattcccgggtcgacccacgcgtccgcccacgcgtccggtacaagtgagccaagtttcgtgccctgcagcgcgaggttagctgctggaagggagcgtagaaaggcgagattagctgtgggattgtgttgggcttgtcgtgttttcttttgcgttctttcctagtcattgctgttgcgcttttgtatttgtcggacccgtaactaccagggctctgctattagcggcacggagcctgtaattgtattgtatgataatgtgatcgagggtgctacttcccctcggcattcctagtgttggttaaaaaaaaaaaaacataaaaaagcacataaaaaaaaaaagggcggccgctctagaggatccaagcttacgtacgcgtgcatgcgacgtcatagcttttctatagggtcacctaaattcaattcacttgcccgtcgtttacaacgtcgtgacttggaaaacccttggcgtacccaactttatccgctttgagcn

SEQ ID NO: 98783 - DNA, 544 bp, Zea mays
  unsure (1)..(544): unsure at all n locations
tgtagccaggtgctgatgccaaagagcttggagcaacgtaccggccctgaattaccgggccgacccacgcgtccgagccaagtcgtcgcctccccgacccaacgttttgacccccttgcccgtccgcgagcgctgcagcacctgggatcccgccccaatggcaacagcgtgtccgccgctctcgctgccgtccacctccctcttccgcggcaggtccgcccgcgccgggcccagacgcaggcagctcacggccgtccgctgcagcgccgtcggagaggcggtagtggaggaggcctcgcccgggacggcggaagagccgctgctggtgagcgcaatcagagggaggaaggtcgagaggccacccgtctggctcatgaggcaagccgggaggtacatgaagagctaccaattgctctgcgagcggtatccttcgttccgtgaaagatcagaaaatgtcgacctagttgttgagatctctttgcaaccatggaaaggttttcaagcctgatggagtcatcttgttctcggacatccttactccacn

SEQ ID NO: 98784 - DNA, 528 bp, Zea mays
  unsure (1)..(528): unsure at all n locations
gtagcaggtgctgaagccaaagccttcaatgtgctggtacggcttgaattcccgggccgacccacgcgtccgccaccgcgggatcctcctcgacaccgcacgttactactaccccgtccgtgacatcctccggaccatccgcgccatggcctccaacaagctcaatgtattccactggcacatcaccgactcccagtccttccccatcgtcctcccctcggtccccaatctcgccaacttcggctcctactnccccgtcatgcgctacaccgaccaggacgtccgccgcatcgtccgatacgccggggcctttggcatcgcgttaatccttgaatcgacatgcccgggcacacggggtcctgggccggcgcgtacccggagatcgtgacgtgcgcgaaccaggtctgggcgccaactgcaaacccggcgctgcagcggagccctgcacgtgcagctgaacccgtgaccccaagacgtaccggtgcngatgacttctgtgcgactgggcgcttgtcccgacccgacctn

SEQ ID NO: 98785 - DNA, 545 bp, Zea mays
  unsure (1)..(545): unsure at all n locations
cgatatgccagagcctnatggcagcnacnaatgggacgaatcgcaccggcctggaattcccgggtcgacccacgcgtccgcccacgcgtccggcgccgcgcgagcacgttttgcgccggtgcggcaggcgaaatccgagagcactccggccccgctacgccgcaccgcccatggccgcagctagccgcagatagagagaggcgcaggcgagggcgtgcagatccagatccggtgggcgggaaggacttgatcgcccccaccaccatggccggcgcggtgtcggcgctcttcctgctggacatgaagggccgcgttctcgtctggcgcgactaccgcggcgatgtctccgcgctccaggccgagcgcttcttcaccaagctcctcgacaaggagggcgattcggaagtgcactcgcctgtggtctacgacgacgctggcgtcacttacatgttcatncagcacaacaatgtcttcctnctcaccggcgctcgccagaactggtacgcggncagcattctnctcttnctcaccgtgtatagatgtgt

SEQ ID NO: 98786 - DNA, 542 bp, Zea mays
  unsure (1)..(542): unsure at all n locations
cgcggnncgactttagtttacgcaggcacgtctgcattggtcggaaccattgggttgatttatgtgcttgtgtaggcgcttcaagacgagtctaatgagcctagaaactctgcgcggaataaaagggcaggggtctgcccgacctcgacccgtagcatgaacatgaattgcgaaagtgcggttcactgacttcccagattcctggagcccgaagtcagaggcgctagaaaagccattatagggacaatcggtccgcggtagttaagtgcctacagtgatgccgtcccccgacttcctgacgctggtctccttcactaccgcgaagtagaacctattaagcgccggaccgcctatttattaacagggaatgcgagtcgggaccagattgctgcgagataggccagccccatttcatcgacgattgtgttgtgacagcaacctaattcagcatgagaggaattgccgacctatataaccggctactgtgtccggccgaaaagttagcggtgtgaagtcattgcgcgttcgaccacgatcgaatg

SEQ ID NO: 98787 - DNA, 543 bp, Zea mays
  unsure (1)..(543): unsure at all n locations
aggatgccagatggctatgttaaagtcctgnnnacgatgtaccggtctggaattactgggccgacccacgcgtccgaaaaagtccaggagtttcagcacaagcggttttatggatctgacatgtccttaaaaggacgagttagtgaacttggaaaaaaggaagacgtgagtgaagatgggggtgatgagtatcctccaccagattcagatcatgaatcaacagaatctgatgaggacttctatatgtgtcagatttgcaacactgaagaggagaaaaactcattgttttgttgctgtatttgtgcttcacgggttcaccctggttgcctcactccaccttcgactgacatcgtgaatgatgattggtcatgttatggttgcaaggagaaagttaaaagctacttaaaagaaagagatgcttacttgactgaactctcaaagaggtatgatgctgcattggacagaaagtcaaaaattcttgacataatcccgtccttggatttacctagtaatcctttagatgatatcatcgatcagcttgtg

SEQ ID NO: 98788 - DNA, 546 bp, Zea mays
  unsure (1)..(546): unsure at all n locations
tggtagcgcgtgtnnntatncgcagcnanccctacnnccctcgcaccggtctggaattcctgggtcgacccacgcgtccgcccacgcgtccgcttccgtgaaacggttcttgagaagtcctgccgtactgtcatgagcaagtctcccagcaagcacaaccgtctgtacatggaagcgcgccccttggaggagggtctcgctgaggccatcgatgacggccgtattggcccacgtgatgatccgaaggtgcgctcccagatcctctctcaggagtttgggtgggacaaggacctggccaggaagatttggtgttttggacctgagaccactggcccgaacatggttgtcgatatgtgtaagggagtgcagtatctcaatgaaatcaaggattctgttgtggccggtttccagtgggcatcgaaggatggtgcacttgctgangagaacatgcgtggaattgctttgaggtatgtgatgtcgtcttcatgctgatgctatcacaagggtggttgacaggtcattccacttgcggagggtcaattttct

SEQ ID NO: 98789 - DNA, 507 bp, Zea mays
  unsure (1)..(507): unsure at all n locations
agcctgatgctcgcagggggggagagtcacggnctggaattcccgggccgacccacgcgtccggctgtgcatccacttctcggtggagttccttgactcgctgagcccggagcagtgcaaggccctggatgctgtgctcccgcccaagccggtgtcgcagtacaccgacatggagctggacgagtgcgaggagacgatgccctatgacgtgaacatcgaagcggagatgcggaggcggcagcagcagcaccaggaggcctacgacgaggatgaggacatgccgggcggcgcgcagagggtgcagtgcgcccagcagtaggcagcagcttggtagcagtgataaaatattcgacggcggcggaaaaatttgtgcgactactgttaggtccaaccgtccaagtttacacgcgcgtattaatgtgatgaccatacttctcttaaaaaaaaaaaaaaagggcggccgctctagaggatccaagcttacgtacgcgtgcatgcgacgtcata

SEQ ID NO: 98790 - DNA, 525 bp, Zea mays
  unsure (1)..(525): unsure at all n locations
tttagatggtgtgcctcganatctgaaagccattgcctcctccctgnctggaatacccgggtcgacccacgcgtccgcccacgcgtccgctcaccacctctcctcttagcttctccccacctttggtcaggcgggctgaggcaaagggggcggccaacaaggacgagcgatggcgaccaaggtcatctgcttccttgtgctcgcatccctgctcctcgccgtcgcctttcccgtgtctgctctgcggcagcaggtgaagaaaggcggcggcggaagcggaagcggaagcagtgttagcggaagcggaagcggcaacctgaatccctgggagtgctcgcccaagtgcgggtcgcggtgctccaagacgcagtacaagaaggcctgcctcaccttatgtaacaagtgctgcgccaagtgcctctgcgtgccaccggggttctacggcaacaagggcgcctgcccctgctacaacaactggaaaaccaatgaanggagggcccagtgcccctaggggatccaccgcac

SEQ ID NO: 98791 - DNA, 524 bp, Zea mays
  unsure (1)..(524): unsure at all n locations
atgagggnctgtggaaccccgtcgacgcanggctgtttcggnctggaataaccgggccgacccacgcgtccggaagggaaagaagaagaaccagtagctctgatacgcattcgaactgatttcgatgtcagcgtgcctaaaccttggaaacttgtttgactcagagcaggagttcaaaagagaaacaaggtttacatcaaaatgtccccccaaagaaattgtccgcaagatcgaggaagctgcaaaacctctaggatttgatgttcagaagaaaaattacaagttgaggctcgaaaaggtaaaggcagggaggaagggaaacctcaacgttgctactgagatactgcaagttgcgccctctctccacatggtagaagtccgaaaagcaaagggtgacactctggaatttcataagttctacaagaacctttccaagaccttgaaagacgtcgtctggaaatccgacgatcttcaaacgcaacatgcttcttaacagaacctcagagaggaagaatggcacactn

SEQ ID NO: 98792 - DNA, 511 bp, Zea mays
  unsure (1)..(511): unsure at all n locations
ggtggntgtccatgcgagatggangtagtccttcccctggatggaccggctcgacccacgcgtccgcggacgcgtgggcggacgcgtgggctgaatagctgtctatgccacttgctgctgtgaaggcggccgtgggacgttcatctttcctggcgcacagccagccccccacaggagcttctctgaggaagttgctgcacttaaccgctactttggcggcctgaaatctggtggtaatgcttatgtgattggagatccagcaagacctggacagaagtggcacgtcttctacgccactgagtacccagagcaaccaatggttaaccttgaaatgtgcatgactggtctggacaagaagaaagcttctgtctttttcaagactaatgctgatgggaacacaacatgtgccaaggaaatgacaaagctctctggcatctctgaaatcatccccgagatggagatctgcgattttgactttgaaccctgtggctactccatgaatgcgatccan

SEQ ID NO: 98793 - DNA, 508 bp, Zea mays
  unsure (1)..(508): unsure at all n locations
agtatgatgctcttcttggggggaaagttgcggnctggaattcccgggccgacccacgcgtccgcccacgcgtccgcaagaacaactccaactttcatctctcactacggcaacactttgcgagctgagccatcaaagctcggggcggatggcggggcggcggcagatcaagaaggagtgggtgcaggcggcggcggacgcggcgtcgtggtgcgtggcgctgtcgctggtggcgatgctggtggtgctgtgcacgctgggcgccggggaaggcggcggcggcgcgccggtggtggtggtgcgcggcgcggcgctgtcggcgcggccgtgcgaggagatctacgtggtggcggagggcgagacgctgcacagcatcagcgacaagtgcggcgaccctctcatcctggagcggaacccgcacgtgcacgacccggacgacgtcttccccggcctcgtcatccggatcacaccgtccaagcccaggtagatcgatggcgatccatcggtc

SEQ ID NO: 98794 - DNA, 512 bp, Zea mays
cgaagactgctccacctgaaacaaagcatgctcggtctgatttaccgggccgaccgacgcgtccggcatgagcggcttcgatttctcatggttcttagttgaaagcctggctcatccttgcatgggtgagcaccgtggctgggaacctcaccctcctaggctctgcggcgaatctgattgtctgcgagcaggccaggcgggcccagttcttcggctacaacctcaccttctggagccacctccgattcggggtcccgtcgaccatcatcgtcacggcgattggtttgctcatcgtcatcagttactgaaacagctgaaggcagaagagcgtagtgtaagagaagcagaatggataaaaatccttccaataagaagtacatgtaaattaggcttgccctataactcaagtgtgtatcggtacgttatgtctccgtctgtgctcttgctcgtgagcaagcagcacatggctgaccgtgtagcttgcatttccattgcataataagcttatgaag

SEQ ID NO: 98795 - DNA, 517 bp, Zea mays
  unsure (1)..(517): unsure at all n locations
tgaaactggtgtctagtgttgaggggggagtattcctcggcctggattacccgggtcgaccgacgcgtccgcgcctcccggttcaaccaaatccctctcgtcttatccccaccagcgcaaagccgccctagcgggctgtcgtgagaagcaatggcgggccgtggcaaggcgattggcgctggtgccgcgaagaaggcgacgtcaaggagctccaaggctgggctgcagtttcccgtcggcaggatcgctcggttcctcaaggccggcaagtacgccgagcgcgtgggcgccggcgcccctgtctacctcgccgctgtcctcgagtacctcgccgctgaggtcctggagcttgctgggaacgcagcgagggataacaagaagacccgcatcgtgccgcgtcacatccagctcgccgtgcgcaacgacgaggagctgaccaagctgcttggtggtgccaccatcgcgagcggcggcgttatgcccaacatccaccagcaccttcttcccaagaaggctn

SEQ ID NO: 98796 - DNA, 516 bp, Zea mays
  unsure (1)..(516): unsure at all n locations
atgaatgtgtcatgttgggagaaggaagtaatcctcggtctggaattcccgggccgacccacgcgtccgaaatgtacttcgctgacaaataatcatggttcctaattttaatctccaaatatgtgtaggaagtggatgacccatggcaggttgatatgtcggaattatgtctaagtgaaggcctctctcgtaacatgccagacaatggtgcagaaaatggcaccgagggaggaggctctagagttaaatatgctgtgatggatgttcccatcaccttaccttcgttgaaaccagcttttgacaagcctaaccccaaacaaggcattggtatgctgtcatggagcagcgacagccactatttcttcaccaggaatgacaacatgccaactgttctttggatatgggatatatgccgncttgagcttgccgctgtgctcgtgcagaaagatccaatccgtgctgcagcatgggaccctacctgcacacgccttgtttatgcacagagagccctcactn

SEQ ID NO: 98797 - DNA, 519 bp, Zea mays
  unsure (1)..(519): unsure at all n locations
ctgagctgctgcatgatgtttgggggggaggcttcggnctggaattcccgggtcgacccacgcgtccgcccacgcgtccggttgagctgctttcatgtgtaccagtgtcaaagacatttgcaaagatggcggcatattcaagaagatccttaaagagggagagaaatgggagaacccaaaggatcctgatgaagtacttgtgaaatatgaggcccgtctggaagatggtactgttgtatccaagtctgagggggttgagtttactgtgaaagatggctacttttgtcctgccctggccaaagctgtcaaaaccatgaaaaaggcagagaaggtgctccttacagtaaagccacaatatggatttggtgagaagggtagaccagcagctggagaagaaggtgctgtgccgtcaaatgcttcgctgctcattgaccttgagttgatttcatggaagactgtcacagaaattggggatgataagaaaatccttaagaaggttctcaaggaaggagaaggttn

SEQ ID NO: 98798 - DNA, 506 bp, Zea mays
  unsure (1)..(506): unsure at all n locations
cgataatgtagggaagggagagaagtaccggtctggaattaccgggtcgacccacgcgtccgagcacacttatgttgaaactgaaaatgtgttttatgtttatcaacctattgaaggattagatgttctacttatcacaaacaagcagagcaatattcttgaagatctggacacattgaggctcctctccaagcttgtgcctgaatactccccttccttggatgaggacggtatttgtaaaacagcatttgagattatatttgctttcgatgaagccatctctcttgggaacaaggaaaatgtgacagtgcaacaagttaaacaatattgtgagatggagagccatgaagagaaggcacacaagctgatgatgcaagccaaaatcaacgaaaccaaggatctcatgaagaagagggctaatgaacttgacaaaatgaggatggaaagaggcaagcttgacaaaggaggatactcatcaatatctggtccacgcgtgattgaaaaan

SEQ ID NO: 98799 - DNA, 517 bp, Zea mays
  unsure (1)..(517): unsure at all n locations
agcgtcggctagtgcctgacnctttgnangtacctacaggcctggaattcccgggccgaccgacgcgtccgagaatgttctcttggatggcagcccagcttcacttcttaagatctgcgattttggctatgccgagtcatcagtgttgcattcaagacccaaatcagcagtaggaacgccagcatatattgcacctgaggtgctatcccgtcgcgagtatgatggaaagcttgcagacgtatggtcctgtggggtgactctttacgtcatgcttgtgggagcatacccatttgaagacccagatgaccccaagaatatacgcaagaccattcagcaaataatgcaagtgcaatacaagataccagatcatgtccacatatctacggaatgccagcaacttattgcccgtatctttgttgccaatccaatgaggagaatcacaatgaaggaaataaagagccatccatggtttttgaagaacctaccacgggaactcacggagactgcacaaggcatt

SEQ ID NO: 98800 - DNA, 522 bp, Zea mays
  unsure (1)..(522): unsure at all n locations
tggaagtgctgtgncctgaccctttgtatgtcatctcatgtctggaattaccgggccgaccgacgcgtccgaaaagatctggcatcacatccttctacaatgtatcttcgtgtcgcaccagaaaagcacccagttcgttttacaaaagcccctgttaacccgaaggctaacagggaaaagatgacacaaatcatgtttgaaaccttcagtgttcctgctatgtatggtgctattcaagctgtgctttccctatatgctagtggccgtaccactggcatcgtcctggattctggagaatggtgtcagtcacactgtcccaatctatgaaagctacgcccttccacatgccattcttcgtctcgatcttgctggcagggacctcactgattccctcatgaagatcctcaccgagaggggctactcttttacaaacactgccgagcgggaaaattgtccgtgacatcaatgaaaagcttgcatatgtcgcgctagactatgaaccaagacctcgagaaccgccaa

SEQ ID NO: 98801 - DNA, 487 bp, Zea mays
ccccgcccctggctggaattcccggcccgacccacgcgtccgctccgctagccgccgccgccgctcgtctttttgttaggtgccgggaccgaggatttgggcgagttctaggtagagaatcggttttacttgtctcagcccggggtctgctgcgtctggtggtggtgaaggggagaaattcgtgagatctgttccggatcaggcgtgcgagctcgggaatcaggggtttcacacatagcttcgtcgatttgaatttgatgtactaatggagtctaagggtggcaaaaagtctagcagtagtcgttctatgatgtatgaagctccccttggctacagcattgaggacgttcgacctgccggaagcgtgaaaaaattccagtctggtgcttactccaactgcgcgaaagaaccattctgatattccttttggcttcctcaatctagtagtttaagatttcttttctgacactttgattctgaccaatct

SEQ ID NO: 98802 - DNA, 517 bp, Zea mays
  unsure (1)..(517): unsure at all n locations
tgagatggctagtccctgacctttgtangtacctacnggtctggaattcccggcccgaccgacgcgtccgttcttcggcctcacgcatctcctcctccttctccaatccaattcacaaacacacacggggaatgaattagcagaacccgggccacccccccttcctcggagtcggagcgagtcgaggaacggctcgtctgcctctcccgttctccttcctctcctccccagaagatctgatccatcatcgaggactcgccgggaagaatcaaggatatatagataataaacaaacaaaggttcctccagagcccagaggagggaagtcaccggccgtcggcggggaggagatgtcggacggcgcgggctcccggacgggcgtcgctggcgcgctgggcctctcggtcacctcgtcggtggccatcgtcatctgcaacaagtacctcatcagcactctaggcttcttctttgcgacgacgctgacgagctggcacctcatggtgaccttcttcacgct

SEQ ID NO: 98803 - DNA, 514 bp, Zea mays
atgtatctgtcatgcgggagaggaggtatgcttcggtctggaatacccgggtcgacccacgcgtccgaaacgctcacaaaaaccctcgctccccacattccttcgccgcccacgccgccgcctgtacgagcggcgtcaagatgagtcggcaccctgaagtgaagtgggctcagaggatcgacaaggtttacatcactgtacagttacctgatgccaaggacgctaaggtcaatttggaaccagatggtgtcttcacattctctggcagtgttggtacaaacttatatgaattgaaactagatctgaatgacaaagtaaacgttgaggctagcaaaataagtgtgggtgtcaggtccatattctgtattgtagaaaaagctgaggccaaatggtggaagaaacttgttcgagatgatcaaagggcacctcactttgtgaaaagtgattgggacaaatgggttgacgaagatgatgatggtgctgatgtcaacttgggatggatggacttttcgaa

SEQ ID NO: 98804 - DNA, 510 bp, Zea mays
  unsure (1)..(510): unsure at all n locations
atgagcgttgctaggggcagggaagaaggttcggnctgaattcccggcccgacccacgcgtccgcggacgcgtgggctatagcaaccggtccatcactttcacgctcagcttcagcaatggctgcctgcaccatggcgatctcctccacggcgatggccggcacccccatcaaggtgggttccttcggcgagggccgcatcaccatgcgcaagaccgtgggcaagcccaaggtggcggcgtccggcagcccctggtacggccccgaccgcgtcaagtacctcggccccttctccggcgagcccccgagctacctcaccggcgagttccccggcgactacggctgggacaccgncgggctgtccgccgaccccgagacattcgccaagaaccgcgagctggaagtgatccactcccgctgggccatgctcggcgcgctcggctgcgtcttccccgagctgctcttccgcaacggcgtcaagttcggcgaggccgtctggttcaaggccggn

SEQ ID NO: 98805 - DNA, 510 bp, Zea mays
  unsure (1)..(510): unsure at all n locations
tgagagctgcatcgtggaggggagagagtcgctccggnctggaattcccgggtcgacccacgcgtccggcaatatggggacgtacagacattcgacatatcctgcaagagccatggaattgttacagggtcttactatgacattagagctgcacaggacgcagtgagagcagtccataacaaacctctggggctgatgaaacttgatgttcaattttcccttcctaaggaaaatgttccaaacaaagatcccaacaatggaacactggtggtatctcttattgactcttccatctccagccatgatcttctccaaaaatttagtgtttatggcgatgtcaaggagatttacaagtctcctacaagctgcaataagaaatttgtagaattctatgatatcagagcagcacaagaagcactgaatgacctcaacaagggtgaaatatcatgctcacaaatcaaagttgagcatagcttttctggaggagcaggatcttgcttcgcagagcaa

SEQ ID NO: 98806 - DNA, 511 bp, Zea mays
  unsure (1)..(511): unsure at all n locations
atagtctgatatctgttggagggaagaggctgctcccgtnctggaattaccgggctcgacccacgcgtccgcccacgcgtccgggaacagctagatgagtttgaactggaagctaaaatacaaggagcagggatatctaatgtctgcgtccaggttgctgaaactggtcagagtgagtcactctactgtaataactgtaagctctcgatgagccgattattaaggtgctgcccaacatgcccgtttaagctgtgcctaagttgctgtcagaagatacgtgaaggaaacatgtcggacaacacccctgaagataaattcaagaatcggttgattcaacangagtctgtccatgaggatggcagtattacttgcccttcgattgagctgggtggatgtggtgacgccatgctgaacctaatatattcatctccatctagccaagtccgaagagctcagttcagaatgtgagctagatgcttgaggcaatcattctggagtgaaggatgctcag

SEQ ID NO: 98807 - DNA, 522 bp, Zea mays
  unsure (1)..(522): unsure at all n locations
atanaaatggctgtgcctacgcatatagaagcattgctcggccctgatttaccggcccgaccgacgcgtccggagacgttgtgcgcctcttgttacgacacttgatgaacagcatagggaatgataccatcgtagttttagtagtccttcgtggccttcagtttgtcttcaaagagttcttgttgcctcttcacatacatgtaaacactgtaaataccgttacctgaataaagcttcagcctgctaggctacaagcagggttcactaaaaaaaaaaaaaaaaaaaaaaaaaaaaaaaaaaaaaaaaaaaaaaaaaaaaaaaaaaaaaaaaaaaaaaaaaaaaaaaggggcggccgttttaaaggatccaagcttacgtacgcgtgcatgcaacgtcatagctcttctatagggtcacctaaattcaattcactggccgtcgttttacaacgtcgtgactgggaaaaccctggcgttacccaacttaatcgccttgcagcacatccccctttcgccagctggg

SEQ ID NO: 98808 - DNA, 507 bp, Zea mays
cgagatgccatcaggagaaggagagacgtcgctcctcgaattcccgggtcgacccacgcgtccgcccacgcgtccgcccacgcgtccggctgctgaggcgctcctgctgcggcttctgcgtgcgaaggttgatgagtttatgagacaatctgatggtatcaactggatggctgatgactctcctcctggcggcaatgagtatgcgaatgaggtcatcatctaccttgagacgctcacatcaacggcacagcagatccttccccttcctgtgctacaccgtgtacttgtggcagtgcttgcccacatctctgaaaggatcatcgagctcttcttgaacgattcagtaaagcggttcaatgccaatgcggtcactggtatagatactgatctcaaaatgtttgagacgtttgcagagggcatgtctagcctgtttgtggactcaggtcaagaatctgcaaaaaatgaaatgaaggctgcactagtggaagcaaggcagctagtgaatct

SEQ ID NO: 98809 - DNA, 510 bp, Zea mays
  unsure (1)..(510): unsure at all n locations
tagatgatagtgggtgggggggggacgtaacggnctggaattaccgggccgacccacgcgtccgcccacgcgtccggctcaagaagctcgtcgtctgctgcaagctgaccaaggtgaagaactggggaagctgtcgtccgccacgaagccgaatcccaagcccaaggccgccccgaagaagcccaagaccggcgctaagaagcccaaggccgctgccaagcccaaagctaagacccccgccaaggcgaagcccgccacaaagcccaagcccgccgcgaagccgaaagccgtagtgaaaccgaagacacccgccaagcccaaggccaagccagctgccaaggcgaagcccaagaccgccggcgctaagccgaagccacttgctaagaaggccggccgccccgccaaggcggcgaagacgtcggccaaagacacgccagggaagaaggcccctgccaagaaggccgctccctcgaagaaggcggcgaccccggtgcggaaagcgccgtcccc

SEQ ID NO: 98810 - DNA, 511 bp, Zea mays
  unsure (1)..(511): unsure at all n locations
tagtgtgctcgtggcgaggggaggagcgatgccccgtnctcggaattcccgggtcgacccacgcgtccgctagtcgtcgcttgaagactgagctacttattcagatggatggtttgacaaagacggacgacttggtatttgtacttgcagctacaaatcttccctgggaattggatgcagccatgctccgccggcttgagaagcggattcttgtaccgcttcctgaaggtgaagcaaggcaagcgatgtttgaggaacttctgccagcaactacctcaaagttagaaatcccgtacgacatactagttgaaaagactgaaggttactctggttcagatattcgtctcgtgtgcaaagaagctgccatgcaaccactgagacgtctcatgtcagttcttgaagccagtgacgagttggttccggaggaagaactgcctgaggttggccctctgaaacctgatgatattgaacttgcattaaggaacactaggccgtcagcacatctccatgc

SEQ ID NO: 98811 - DNA, 487 bp, Zea mays
  unsure (1)..(487): unsure at all n locations
tctcgatgccccgtnctggaattcccgggccgacccacgcgtccgcgctgcttcaagaaaccaccgagagcccattcgcacaggcaggagagagagcagggagcgagggacagtagagtggggccggggagcaaagatggaggggaaggaggaggacgtgcgcctgggcgccaacaagttctcggagcggcagcccatcggcacggcggcgcagggcgccggggccggggacgacgacaaggactacaaggagcccccgccggcgccgctgttcgagcccggggagctcaagtcctggtccttctaccgcgcgggcatcgccgagttcgtcgccaccttcctcttcctctacatcaccgtcctcaccgtcatgggcgtctccaagtccacctccaagtgcgccaccgtcggcatccagggcatcgcctggtccttcggagggatgatcttcgcgctcgtctactgcaccgncggcatctccggagga

SEQ ID NO: 98812 - DNA, 519 bp, Zea mays
  unsure (1)..(519): unsure at all n locations
tggttatgttatctgtgcctcgcaaattgatgtatgcaccggtctggaattcccgggtcgacccacgcgtccgcaaattgtatctcatttagatctgtctgttttttaaacttaaatggagcagtagtatcgacgtattggtacccctgttactgagtataattttgttttcatatctatccttacagacgattgcacttaaaaaaaaaaaaaaagggcggccgctctagaggatccaagcttacgtacgcgtgcatgcgacgtcatagctcttctatagtgtcacctaaattcaattcactggccgtcgttttacaacgtcgtgactgggaaaaccctggcgttacccaacttaatcgccttgcagcacatccccctttcgccagctggcgtaatagcgaagaggcccgcaccgatcgcccttcccaacagttgcgcagcctgaatggcgaatgggacgcgccctgtagcggcgcattaagcgcggccggtgtggtggttacgcgcagcgtgaccgcn

SEQ ID NO: 98813 - DNA, 517 bp, Zea mays
atcagtatgctgtgcttacgctttatggatgcattgctcggtctggatttaccgggccgaccgacgcgtccgccttgctcttcgtcttcgccggcgttggcttcttcatggcaacagggaagctggccggcggcggctttgacacggtagtgggcctgacggcggtggcgctggcgcacacgctggtggtggccgtcatggtgtcagcggggctgcacgtctccggcggccacatcaacccggccgtgacgctgggcctcgccgccacgggccgcatcacgctgttccgctccgcgctctacgtggccgcccagctgctcggctccacgctcgcctgcctcctcctcgctttcctcgcagttgccgacagcggcgtgcccgtgcacgcgctgggcgccggcgtcggcgcgctccggggcgtgctcatggaggccgtgctcaccttctcgctgctcttcgcggtctacgccaccgtcgtcgacccgcgccgcgccgtccgcggcatgggcccgctgct

SEQ ID NO: 98814 - DNA, 531 bp, Zea mays
  unsure (1)..(531): unsure at all n locations
cggtnttctctgtgatgagtatcctgctacgtggataggacaacgaacgtcgctcctggtattcccgggccgacccacgcgtccgaggcaatccaaagggttaaagagctggctgttatcatagaaggaaaaagccttgaagagaggagatcactgctagccaagtgcgctgctacaacactctcttcaaaacttataggtggtgaaaaagaattctttgcttctatggttgtggatgctgtccttgccattggcaatgatgacaggcttaatcttattgggattaaaaaggttcctggaggtaccatgagagactcttttttggtgaatggtgttgcattcaagaagacgttttcatatgcaggatttgagcaacaaccaaagaagtcccttaatccaaagattcttttgttaaacattgaactagaattgaaatctgagaaggaaaatgcagagatcagattgtctgaccctctgcaataccaatcaattgttgatgctgagtggaacattatttatgacaaactggat

SEQ ID NO: 98815 - DNA, 507 bp, Zea mays
gatgtgacagtaggaaggagtagcgtcgctccgttctggaattcccgggccgacccacgcgtccgcctgtcctcgcgtctcccttcccagatccatcgactcgctcgggccgcccctcccgggggccccgttcgaaggtgcggcagccggcaggcgagcgatttcattcgacatgaatcccgagtacgactaccttttcaaacttctgcttattggtgattctggtgttgggaaatcatgcttgcttctcagatttgcagacgattcttatttggacagctatatcagcacaattggggttgatttcaaaattcgcacagtggagcaagatgggaagaccataaaacttcaaatttgggatactgctgggcaagagcgcttcaggacaatcactagcagctactaccgcggagctcatggaatcattattgtatatgacgtgacagaccaagaaagcttcaataatgtgaagcaatggttgaacgagatagaccgttatgcaagtgg

SEQ ID NO: 98816 - DNA, 516 bp, Zea mays
  unsure (1)..(516): unsure at all n locations
ctggtgactgtgctctgtagaaaggagagtagctcttgctccgtnctggaattcccgggtcgacccacgcgtccgattgttgtagcagatgactctggcaaaactgttactatttctctctggaatgatcttgcgactacgactggccaagagcttttggacatggttgacagttcgcctgttgttgcgataaagagcctaaaagtatctgacttccaaggcgtatctctttcaactattggcagaagtactctcgagattaatcctgacctgcctgaggctaagaatctgaagtcctggtatgactctgaaggcaaagatacttcactggcaccaatcagtgcagaagtgggtgccacacgcgctggtggtttcaagtccatgtattctgatagagtttttctgtctcacatcaccagtgatcctgctatgggccaggaaaagcctgttttcttcagtctgtacgccatcataagccacatcaagcctgatcagaatatgtggtaccgtgcttgg

SEQ ID NO: 98817 - DNA, 515 bp, Zea mays
  unsure (1)..(515): unsure at all n locations
cgagaagctgtcatcgagagaaggaagcattcctcggtctctgttacccgggccgaccgacgcgtccggaatccgcgaatcacagacgcgtctatcttagcttgctgcgctgcactaccctgccctggcaggatatcgtacgtgagcccggccgagcgagagcgagggagaggcatggctgctccgaagctcgcgacgctggcgctggccgtgctcctggcggcgaccgtggtggctcccccggccgcggtgcgcgcggcgatgtcgtgttccaccgtgtacagcacgctgatgccgtgcctgccgttcgtccagatgggcggggccatgccgncccagccgtgctgcggcggcatccgcagcctgctgcagcaggccaacaacacccccgaccggcgcaccatctgcggctgcctcaagaacgtcgccaacggcgccaacgggagcggcacctacatcagccgcgccgncgcgctgcccagcaagtgcggcgtcgccctggcgtacaagatcan

SEQ ID NO: 98818 - DNA, 524 bp, Zea mays
  unsure (1)..(524): unsure at all n locations
tggagatggnnnnaacgtccgactgggattgcaccaccgctcctgnctggaatacccgggccgacccacgcgtccggagagaaacagcccaacatcactattggcattttggtctccgttgtcatcgtgttcggggccgttctcttcaagctcctgtttggtggcaagaaaccagtggcacctgtgaaacctgcagctgaggcgaagaagcccaaggccgcggagacggacggtgctggaagcagtggtgacaaggatgagaaagaggatgaaaaggaggagacaggcccacgtcggaggacccgaagggagacatagacctgtttttgacgtgttttagctcttctggcgtctgcttattttgagacctcttaatatttgtgagtgtataataggagcttatgtcacctctgcggcttcccccgctgctgatttgtttttaatggttagaccaggacccttcacgagcgtaaaaaataaaattattttnaaattttttattaatgaataaaattaataagtat

SEQ ID NO: 98819 - DNA, 514 bp, Zea mays
  unsure (1)..(514): unsure at all n locations
agacgatgctgtgcatgcaatagatgctncctcctcctctttagcaaccggccggcgcgtccgggaggaggtgagccaccggaagcggagacttgtgtagtcgaccaaccccgtcggtccggcgagtccggctgcggcgcggcgtgctagatcgctaccgaccatggtggtggaggagatcgccgagggggtgaaaaacctcaccgttaccggagatgcggcggcttcaggcggagaggggcagaggaggggcggcggcggcagcagcaaccgcatccaggtgtccaacaccaagaagcccctcttcttctacgtcaacctcgccaagaggtatatgcaacagcacgacgatgtagagctatccgctcttgggatggccatagcaacagttgtgaccgtggcagaaattctgaagaacaatggatttgccgttgaaaagaaaattaggacctctactgttgaaataaacgacgaatcaagagggcgtncattccaaaaaggccaagatngagat

SEQ ID NO: 98820 - DNA, 519 bp, Zea mays
  unsure (1)..(519): unsure at all n locations
cgagagtgcttggcctccgaataatagtagtaatcactcggtctggaattcccgggccgacccacgcgtccggctccttcgcctcgaaccctctcgcgcttgtcttgctttcactctccagggccccactcgcacgtcgccgccgcagccatggcgatcacagcgccaactcccgacatcctcggcgagcgccagtccggccaggacgtccgcacgcagaacgtgatggcttgcggggcggtggccaacatcgtcaaatcctcgctcggccccgttggtctcgacaagatgctagtggatgatattggtgatgttacaatcactaatgatggagcaaccatacttaagatgttggaagttgagcatncagccgncaaggttcttgttgagttggctgagctccaagatcgtgaggtaggagatggaactacttncgttgtcatcataagcggcagagtactcaagagaggcaatgatcttgtgaagaataagatccaatccacctctattatcagtggc

SEQ ID NO: 98821 - DNA, 519 bp, Zea mays
  unsure (1)..(519): unsure at all n locations
ggataagtgnnttngccagtccacacgtactcatcactcctcctgnatggaattaccgggccgacccatgcgtgccctgctcctctgcaggatatggcaattcattttgctacagccaatggccctactggtatgatagggattacctgttctcaatggagaaggcattagccagcattagccacgaagatgattcgatcatagagcttgcaaacgaggtgaggaaggtgctcaacagaacaaaggagaccaagatcactggtgccaatgcttccctgaaatcacatgcccctcttgtgcacctgtccgcgcttccagaaggcaccgttgtggactcgagatagcgagagccttggacgttggacctctactcggaatttacttccagctcttgcatgtttgtggccaaaaaaaaaaaananaaaacatannaattaaaaaaaaaaaaaaatataaatacttaatatagtatttaattttataaaaaaaaaaaggccgccgctctaaggatccaacttn

SEQ ID NO: 98822 - DNA, 496 bp, Zea mays
  unsure (1)..(496): unsure at all n locations
atatgttccacgcctcacagnaggactctaccggtcttgaattcccgggtcgacccacgcgtccgcccacgcgtccgtgagcttctgaggaggatcttttgtgatactggctgctttggttttggtattcaggagcacattgatcttggaatcaagtatgacccgtctactggtatttatggcatggacttttacgtcgttctggaacgagctggttatcgtgttgcacgccggcgcaggtgcaagtcccgcgttggcatccagcacagggtgaccaaagaagacgccatgaagtggttccaggtgaagtacgagggtgtcatcctcaacaaggcccaaaacacctcgtaatcattgatagtcatcaaacgacttgccctttagcactccagttcaagtataatctgtgtactatgaattctgtgtttggtggataccaaatgcactgccagttttgcgtctgtgcccataattcccatctgatcagactagcagt

SEQ ID NO: 98823 - DNA, 482 bp, Zea mays
tagtttgcactaacacgatgatcctcaccgggctcgaattccggccgacccacgcgtcgccacgcgtcgccacgcgtcggttctttgagcctactacctgccttgttcgagtgggagaaggatataaacgggcaattgagtggccaaagagcagggacaaggtatggtacagcaatgttcctcacactaggcttgcagagtacaaggggcatcaaaattgggttaaggtctcaggtgactatctattgttccctgggggtgggacttaggtcaagaatggtggcctccactatattgatactattcaggacgcactaactgatattgcatggggcaaacgaaacccggtcatattcgatgctggctgtagagttgccagctgtggaagctacatgtttgataaagatgcgcttaccatgtgttttgctccaaaagatgagcctgaaggtcaaagtcaatttgcattagatagggggagttcc

SEQ ID NO: 98824 - DNA, 512 bp, Zea mays
  unsure (1)..(512): unsure at all n locations
ggtttgggtnctgtccatcgactatagtattgctctccggtcttgaattcccgggtcgacccacgcgtccgcagggtcgtctggctttccatgcgctgttttgtagagaaaagcttccgcaaagcttttgtgccccacaagcagaaggctcgaaggaagttggcaaggaggaggaagatgaagtcaccacagtggcagttgacctcaacaagagtaccacaagcattgatcatgacctcgacacaattggcttcaaaccatacaagagatgttctgtggaagcgaaggagaatagggtgccggctagcgacgaggttggtaccaagaggattcgtcttgatagtgaagcatcaacatgagcgatttctacatggttaccgctcggactttctctgccgccatgaagtttatgacaaagttgtatttacatctaaactagtataggacttaaagaccttgcaatgcaatgctttatggaacttgtgtgtgctcgaatttaatacttgtgaaag

SEQ ID NO: 98825 - DNA, 501 bp, Zea mays
  unsure (1)..(501): unsure at all n locations
cagttactgncatggacataatctgatnnctagctccgggctggaattaccgggcggacccacgcgtccggctggggcacgactggtgagccattttgttgtggcagctttgtctgcttcggcggcacgtgttgcttacgctcgtgaacgtgagcgtagtgtaccacccgcggcggccggagatgagcccgctccaggccatcagagctgcctgcggcgaagaccactacatgtgccgcttccaggaatttggtgtcgctgaagctgaatttgctctatatgacatcaagtgggtgtttaagaagacatttggcatgcgcaagccagctcctattattctgcccaaggacaagagcttctttgactctcttgattcagatggaacttgtccaccatggctatcagaggaagatatttcttactatgcagaaaaatttgcaaaaacaggctttactggaagacttaactactacaggtgcatagacaggagttgggagcttt

SEQ ID NO: 98826 - DNA, 503 bp, Zea mays
tatgtgctcttgcaacgtatataaagttatgactcgctcctggttggaattcccggctcgacccacgcgtccgggtggggcacgactggggagccattttgtgtttggcagctttgtctgcttcggcgggacgtggtgcgggcgctcgtgaacctaagcgtcgtgtaccacccgcggcggccggagatgagcccgctccaggccatcagagctgcctgcggcgaagaccactacatgtgccgcttccaggaatttggtgttgctgaagctgaatttgctctatatgacatcaagtgggtgtttaagaagacatttggcatgcgcaagccagctcctcttattctgcccaaggacaagagcttctttgactctcttgattcagatggaacttgtccaccatggctatcagaggaagatatttcttactatgcagaaaaatttgcaaaaacaggctttactggaggacttaactactacaggtgcatagacaggagttgggagct

SEQ ID NO: 98827 - DNA, 516 bp, Zea mays
  unsure (1)..(516): unsure at all n locations
tgatgatgtgctgcgcacttgatanatagattgcatcgactgtcttgtctcaactggccgacccacgcgtccggcttctggggggcacatcatcttcttccattgcctgagtcttcttggctattgcctattgccattggatgttggtgctctagtttgcatgctgaaggacaatgtcatacttaagattgtcgtggtgacaatcacattggcttggagctcctgggctgcgtatccattcatgagcgctgctgttaacccaaggagaaaagctctggccctatatcctgtcttcctcatgtatatctcagttggtttcctcataattgccattgattaacggggttgagctttgtagtaacatctgaagagttgagagtttccttggatggttgaaccaccagaatacatacaagtttgagtagacaatgcttctatccttgtaccctcgtggagtctttgtgaattgcctcgtaagaatttttgtttttacatgatcttgaagcataaggttgg

SEQ ID NO: 98828 - DNA, 497 bp, Zea mays
taatgtgtcccctccatatagtagtaggtcacggtccggaattcccgggtcgacccactcgtccggcttcacaacatgctatcttcttttttgcttgagttccacagatatggaagaattttacgaatgaagggaccggcgagctaagcttccttacctgtttcatgaactttgctggttccatcgtaagagtttttaccagcatccaggagaagactcccttaagtgtgatcatgggctccgcaatcggcatcgtcatgaatggtacgctcttgggtcagatagtactgtaccagaaacccgcttcaaagaaaccgaagaaaggagatttagccaccttgagaaacctccaaaaggtctttccgggtggttaagaatctggttcaacacttggttcacattttaaccaatggcgccagtataagaagttgttggcaacttgtaccaggaaagaacataatccgactattgctatattacaacatttctgtgctgtt

SEQ ID NO: 98829 - DNA, 498 bp, Zea mays
  unsure (1)..(498): unsure at all n locations
tgagcgtgtgccccgccactgcctngacatctaccggtctcggattcccggtcgaccacgcgtccgcccacgcgtccgcccatcgtccgttgacttgtgggcggacgcgtgggctcccgggggggtgtcttgtcgcatccggcgggccaaagctctctctgctcgcaggtcgcagccatggcgaagaactacccgaccgtgagcgccgagtacagctaggctgtggacaaggccaggcgcaagcttcgagccctcatcgccgagaagagctgcaccccgctcatgctccgtcttacgtggcactacgcggggacatgcgacatgtaagctaggaccccgctgcgcatacagcacgacgaaacatttagtcggaattggctcacggtgctaacgcggagcttgacatagtggatcggctgctttagcccatcctagagggagtcccaaggctttcttactccaaagttgaccatcctgccgtaattccagcctgaaagg

SEQ ID NO: 98830 - DNA, 496 bp, Zea mays
  unsure (1)..(496): unsure at all n locations
attctgcatagattatatgaaagtatactggctaccggtcttgaattcccgggtcgacccacgcgtccgcccacgcgtccggaaagaattgtcactaactattcatttatggagaccctaagaggcttagatcagaggggactgctagcaagatttgtgattgatgaagcacattgtgtaagtcaatggggacacgatttccgtccagattaccgtggtctaagatgcctcaaacagaactttcctacggtcccgatcatggctttaaccgcaacagcaaccgaatctgttcgtaaggacgttctttgtgccttgaggatccccaacgctgtggtacttgaaaagagcttcgacagactgaacctcaactacgaggtaatcggcaagacgaaaactttccagaagcagctgggcgatctcctgaaagagcgcttcatgaatgagtctgggatcgngtactgggtctctgaaaacgagtgtgcagacactgtgcagt

SEQ ID NO: 98831 - DNA, 494 bp, Zea mays
cgtatgttcatgcatatgggagtagactgctcctgaccgaattaccggccgacccacgcgtccggatcctgtccagccactcctccgacttggtgtacctcggccagcgcgacaccaaggaggggacgtttgacaccaaggtgcaggaggcgttcaagcggttcggctcgcgggtgacctagatcgagaaacgcgtcttcaccatgaacgcggaccctttgctcaagaaccgtaacgggccggccgagttgccctacacgctgctctaccccaacacctgcgacacgaacggcgacgccaccggcatcaccggcaagggcattccaaacagcatctacatttgagttctgtctgagctgaagacgtacggtcgtcgcactagttgtttgcgtttccccgttccgttccgtgaagtgtggttctcacttgcgcggtattgtgcaaatagccaagtactccttacggaagtcgctacgtgaggactgttgtaataa

SEQ ID NO: 98832 - DNA, 493 bp, Zea mays
  unsure (1)..(493): unsure at all n locations
atgaatgtgcactagaaatagaagtatcctcggtctctgaattcgggtcgattacgcgtccgcccacgcgtccgcccacgcgtccgcccacttttttgcccacgcgtccgcccacgcgtccgctgggccctgaaggacaagcaagagttcatcgacattgtggagaccgtatacaggggcgcccggaaaggccgtggtctggtgattgctccaaaggactactccaccaagtaccgttactaagaaggcaggcattccccttatgcaatctattggggatgtttacacggacagttagtccgacaggtgatccctaactgtatcttggcataccctaataattcaagttgctggcttgagtgatgcttatccatggcttggcatgccatagtgaacatgtaaacctgtgatttgaggtgattattcgagtgtaaagaaaccaggattgcgttcggctatgactatgtgtctagntggctacttaataagaaac

SEQ ID NO: 98833 - DNA, 503 bp, Zea mays
tgaatgctgtgccatgcccagtaatgtatggcctagctacctggatttcccgggccgacccacgcgtccgcggacgcgtggggcaccacaagcgagcgatgtattcggggcggaagaagagagagaagacgtggctctcctctcggcgtgcgcggtccccaacctctcgtctgctgcctgcctgcctgcctgcctgcaaaaaggagtttgtcatggcgtctaagcgcatcctcaaggagctgaaggacctgcagaaagacccccccacatcatgcagtgcaggtcctgctggtgaggacatgtttcattggcaagcaacaattatgggaccacctgacagtccctatgctggtggtgtcttcttagtgaacattcatttcccgccagattaccccttcaaaccttcaaaggtttctttcaagacaaaggtcttccatcctaatatcaacagcaatggaagtatatgccttgacattctcaaagagcagtggagccctgctttg

SEQ ID NO: 98834 - DNA, 499 bp, Zea mays
  unsure (1)..(499): unsure at all n locations
taatgtaggcatcgaacataagtagcatcctctcggtcttgaattcccgggtcgacccacgcgtccgccagccgccaccaggtgcagagtctttcgttatctcttctccggcgaagaacccccaggcgcgcaccagatcacttgttaaactttgttgaggggtgatggcggtttctttcgcaaacctcaacaccgaggcagggcttaaaaagcttgatgagtaccttctcactcgcagctacatcactggctaccaagcttccaaggatgacttggctgtctacactttcgtttcgtctgctccctcgtccaagtatatcaacgtagcaaggtggtttaatcacattgatgcgctcgtgaggctgagcggaattactgcagagggccaaggtgtgaaggttgaatcctcagcagttccttcagccccaactccagatgttgctgaagcacaggccccagctgctgaggaggaagacgatgatgatgttgacctttttgn

SEQ ID NO: 98835 - DNA, 481 bp, Zea mays
  unsure (1)..(481): unsure at all n locations
cggggacaggactggaattcccgggccgacccacgcgtccggcacctcctttcccacgactcccgagcgctttgcgtgtggcgcgcggcagcatggcgactgcgagctggagcagcaagggggcgttcgaggtgcccaaggtggaggtcaggttcaccaagctcttcatcgacggcaagttcgtcgacgccgtctccggcaagacgttcgagacccgggaccctcgcaccggcgaggtgatcgccagcatcgcggagggaggcaaggccgacgtcgacctcgccgtcaaggccgcccgggaggccttcgacaacgggccctggcccaggatgacgggatacgagcgtggtcggatcctccacaagttcgcggacctgatcgacgagcacgttgaagagctggcggcgcttgacacngtggacgccggccagctgttcgtcgtgggcaggcactggacatccttggcgccgtgcaacttgtt

SEQ ID NO: 98836 - DNA, 513 bp, Zea mays
  unsure (1)..(513): unsure at all n locations
ggatagatgttctgcctagcggtaaggaagaggatgctcggtctggaattcccgggtcgacccacgcgtccgcttcaattgaggctgcgaagcagcgcatgttagagcagctgagtgcagcaactgctgaaggggtgatgctgtcgactgaggagactgagaagaagatgaaacaggcaacccacaaagatggaagcactaatggttcagcaaaagaaatccctaatgacaagcctgccgtcactaagcctagtccctatgaagaactgattggagacatcaaggctagcctaggaagtgctccgacccctacccagctcaaggctgtgctggcctcatcaacccttcctccccaggacgtgatgaatgctctcctggaagctctctttggtggtgtgggtaaaggattcaccaagaggttgtgaagaacangaagtaccttgcagttgctgtgccaaatgagggtgcccagaccctttctggtcaagcccatgaggcttttggtgggaaggc

SEQ ID NO: 98837 - DNA, 497 bp, Zea mays
ttaattttccatgcatgtatggaagtatgctcccttctggaattcccgggtcgacccacgcgtccgcccacgcgtccgcatttcccgtgtacgcttcttttcccgaggagttccggcggcaggtggcggctcttatcgggtacacgtcgctgggagcgttcgacacgtgcttcaacactgactaggtgtctgcgggcggcgcgctcgccgtgacgctgcacatggaccggagccgtggacctgacgctgcctatggagaacacgctgatccacagcagctccacgccgctggcatgccttgccattgccgaagcgccctcatacgtgaacgccgttgtgaacatggttgccaatctttaacaacaaaacctgccggttcttatcgaacttgaccgatttcgcctttggttccccaaggaagccttcaactgaacccctggattccatccatgcctattcacggaaggaaggagagaccccttgtggtttttgaattt

SEQ ID NO: 98838 - DNA, 499 bp, Zea mays
agtctcatagaggagaggggaagtagagtggccccgggctcggaattcccgggtcgacccacgcgtccgctacatttcttctctctctgctcctccgttttcgcctgatccatccaagacagggatcgccatgtcggactcggaggagcaccacttcgaatcgaaggccgacgctggggcgtccaagacctacccgcagcaggctggcaccgtccgtaagaacggcttcatcgtcatcaagaaccgtccctgcaagggtgtggaggtttctaccttcaagactggtaagcatggccacgccaaatgccactttgtcgccatagacatattcaatgggaaaaagcttgaagatattgctccttcatcacacaactgtgacattccgcatgtgaaccgtactgagtatcagctgattgatatttctgaggatggatttgtgagccttcttacttcagatggcaacactaaggatgatcttagactcccaactgatgagact

SEQ ID NO: 98839 - DNA, 521 bp, Zea mays
  unsure (1)..(521): unsure at all n locations
ttttttgttgttagtgtgcttggtagcgctggaggaagggaaggatcaccggncttgaattaccgggtcgacccacgcgtccggcattttgcactctaccagtcgctgaagatttccctttataagcctgcggcatttaacaagggaattttgctaccactctgtcgggaaaggaattgcaccctacgcgaagcagtgattattgggagtattatccagaaagtttccattccatttctccatgcaagtgtagctctagtaaaactagcagagatggagtactgtggcactacaagttacttcatcaagctatttctagacaagaaatatgctttgccataccgtgcacttgatgcagtgcttgcccatttcatgcgttttgttgatgatgagaagatcatgcctgttatatggcatcaatcactgcttgcatttgtggaaagatacaagaacgagttatagaaaaagggatatgaggaacttgcacgtttgttggatcaccagaacactatttagttctt

SEQ ID NO: 98840 - DNA, 516 bp, Zea mays
  unsure (1)..(516): unsure at all n locations
ngtttagatgttctgacatcgaaagaaagaacgatccncggtcttgaattcccgggtcgacccacgcgtccgtccacttcccttccacaacggaataacaatttggatacactactatgttcatgcaagtcgagaggccatacatggtatttacaggacttgaagactataaagcacgaggcacacaagcaagtccttactacacagtcactcattacacagagtttgctgagaccaaggacactgtgcttattcgaggagatgttgtttttaccagcaaactaaccgattcagaggcaaagactcttctagagactgctcactcgttctacctgaatgatgtgagatacagactcgtggagcgcttcaacaaagagactcatgattttgagttcggggacgtccttaaagtgcttgacatgccaaccatgtgacccagtttaattcccaaccaatgtgctctagggatanaagacattggttgtctgggaaccttaaagtctcaagttagcaccg

SEQ ID NO: 98841 - DNA, 493 bp, Zea mays
  unsure (1)..(493): unsure at all n locations
agttgcatgaagatagaaggtatcctcggtctggaattcccgggtcgacccacgcgtccgcggacgcgtgggcgaaggcgtgggcatgcttccttggtcccaccacgtccctgtgagcggcgtggacgaaggcgacgagatgacgccgtacctgctcgcggcgctgcgccagtacctgccgtgcaacgacgccggcgccgaggccgaggccgaggaggatgaggcggcggcggccatggcggcgggcgtggacggctacggctgcgacgagttccgcatgtacgagttcaaggtccggcggtgcgcgcgcgcgcgcagccacgactggaccgagtgccccttcggggcacccggggagaaaggcccgggcccggaccccgggcaggtccactactccggcgccgncttgcccgactttcgcaagggcnggtgcaagcgccgcgacggctgggacatggcgcacggngtcttcgagtgctggcttcaccccggc

SEQ ID NO: 98842 - DNA, 498 bp, Zea mays
  unsure (1)..(498): unsure at all n locations
agtntactgttggataagataggtacnataattcttcntnnnnaatnnggcggacccactcgtccgcggacgcgtgggcggactcgtgggtgattttgatgggttcatccatttgcagattgaaagccaagatatgcctgggcttagcttcaaaacacacccaaatatcaataaggatttgtttaacagtcagcaaattttgggagcaaaagatccaaacaggccctttccgagtggtcaaaatgaaactcctctggtgaaatggagaatccaggggatggatgagtcgtctttacctctgtcagtcaattgctggccgtcagtatctggaaatgaaacctatttgaacattggattttgaaccttttagaatgtttgacttgcccaccgttgcatatctataccctttgcaacactttcggagggcttccagtggtagacaaatccattgaaaatgggaagtccacttaagaaacactttgttgtggaagtctcttt

SEQ ID NO: 98843 - DNA, 510 bp, Zea mays
  unsure (1)..(510): unsure at all n locations
tcgtaagggtgactgcaccgtacatagaatgctgctccggtcttgaattcccgggtcgacccacgcgtccgtgactgatggcgatccaacagggttttgtttacatactctatcaattcttgtgaatgatgtccgtggagttctcaatcttggaacaggtgtattctccagaaggggctacaatattcagagtcttgctgttggcccagctgaaaaagaaggaacttctcgcatcactactgttgttcctggaactgatgaatccattgccaagctagtacatcaactgtacaagctcattgatgtttatgaagttcaggattttacccacttaccatttgctgctagagagttaatgatcataaaggtcgcggcaaatgctacagctcgaagggatgtcttagatattgctcagatttttgaggcacagaaagttgacatatcagaccacacaattacactactgctcaccggagacattgacagaatggntagattgcaaaagatgct

SEQ ID NO: 98844 - DNA, 500 bp, Zea mays
  unsure (1)..(500): unsure at all n locations
nctgatagtttgtttttgggaggagaggaaaatgactcgaattcccgggtcgacccacgcgtccggccaccgtccgtaggagcatctgcaggcactagctccgcaacctggacccgttcctccagctcgacgagttcactgtctccaagcccgccgggttccccgaccacccgcacagaggattcgagaccgtcacccacatgtttgagggggccatcatccaccaggacttcgctggtcacaagggcaccatcaggacaggggacgtgcagtggatgacggcggggcgaggcatcgtgcactcggagatgccggctggggacggcgtgaacgaggccctgcagctctggatcaacctctcttccaaggacaggatgatcgaaccgcgataccaagagcttgaaccgcaggacatcagccgcgcggagacccangacccgcgtgaggcnccgcgtcatcggccgggaggcccctcggcgtggcgtcccccgtgtacacac

SEQ ID NO: 98845 - DNA, 501 bp, Zea mays
  unsure (1)..(501): unsure at all n locations
ttgtntacgtgggtgattgggtatgatgcctcggtctggaattcccgggtcgacccacgcgtccggcagcaagcaggagcagtacaggaggcgcctagagcccagcgtcggagatctccgccgccgtggagacgctggccagcgccatgcggcgcgagaaccgccggtccaaggccccgccctcctcctctgcttcctccgccctcgcctcgggcagggtccctctcgtcatggccttcctctcctgcctcgcctggctctacgtcgccggccgtttgtggcaggacgcgcagacccgggcgatcctgtccggcctcctcgagaagagctctaccagcgtcccgaaagtgctctcggtggaggacaagcttaggaacccggggtgcaaggcgattggaaagaaaattggtgaggccgaaattgaccttgccaaggccaagaacgaggggtaccttgtgggggaccggaccgcaactgtggacctcgacaagaagccacacc

SEQ ID NO: 98846 - DNA, 493 bp, Zea mays
atagatgctgtttttggggggggaggaatcccgctctactggccggaccgacgcattcgtccgcccacccgtccaccttttttaggcactagtctttcaacctggacccattcctccagctcgacgagttcactgtcttcgaggccgccgtcttccccgaccacccgcacagaggattcgagaccgtcacccacatgtttgatggggccatgatccaccaggacttccctggtcacaagggcaccatcaggacaggggacgtgcagtggatgactgcggggcgaggcatcgtgcactcggagatgccggctggtgacagcgtgagcgagggcctgcagctctggatcaacctctccttcaaggacaagatgatcgagccgcgataccaggagcttgagcgcaaggacatcaatcgcgcggagaccgatgactgcgtggaggcccgcgtcatcagacgggaggccctcggcgtggcgtaccccgtgtacacgcg

SEQ ID NO: 98847 - DNA, 498 bp, Zea mays
  unsure (1)..(498): unsure at all n locations
actgtgtgncccaatccncgacngacgttcgcncttgaatacccggccgacccacgcgtccggcagcaagcatgagcagtcaggaggcgccttgattccagcgtcggagatctccgccgccgtggagactctgaccagcgcggtgcggcgcgagaaccgccggtccaaggccccgccctcctcctctgcttcctccgccctcgcctcgggcagggtccctctcgtcatggccttcctctcctgcctcgcctggctctacgtcgccggccgtttgtggcaggacgcgcagacccgggcgatcctgtccggcctgctcgagaagagctctaccagcgtcccgaaggtgctctcggtggaggacaagcttaggaacctcgggtgcaaggcgattggaaagaaaattgttgaggctgagattgacctgaccaatgccaaagcgagggggaccctgtggggaacaagactgcatcctgtgactgcaacaagaagcatgcactn

SEQ ID NO: 98848 - DNA, 515 bp, Zea mays
  unsure (1)..(515): unsure at all n locations
ngggtttagatggctgcgaagttgcagagatgaagaaagtaagtttcggtctggaattcccgggtcgacccacgcgtccgcccacgcgtccggtagctattgccccttttttaaaggatgtattggacagtctggaatttgcaagggggagtgcagattcagcatggggctctgttagggctgcaatggggcaccctgaacctttcctggtcaaacatgtcgcaattggaaatgaagattgcgggaaaaagttctaccgtggtaattacctcaaattctacaatgctataagagaggcctatccagacattcagatgatttcaaactgtgatggttcatctagaccacttgaccatnnctgcggattgtatgaattccatgtctatactgattcctaggacttgttaacatgaggagcacaattgacagaacatctcgtaatggaccttaaggctttgtgaacgaatacgctgtctggagaagtgacccggtagaagcaagcttctggctcggtg

SEQ ID NO: 98849 - DNA, 489 bp, Zea mays
  unsure (1)..(489): unsure at all n locations
tcagtccacggctggaattcccgggtcgacccacgcgtccgtgctcgcctcgggtcaaaccctaagcaggtagttgatttatccgctgcagccatgagtgagttgcagtctgagtctgtcgaggatgccatctcccagattgttggggatgccaaggagaagaataggaagttcactgagactgtggaacttcagattggtctgaagaattatgatccacagaaggacaagcgtttcagtggctctgttaagttgccccatatccctcgtcccaagatgaaggtgtgcatgcttggtgatgcccagcatgttgaggaggccgagaagatgggacttgactacatggatgttgaggctctcaagaaaatgaacaagaacaagaagcttgttaagaggcttgccaagaagtaccatgctttcttggcatcagaggccatcatcaagcagattccccgtctccttggtcctggtcttaacaaggcanggcaa

SEQ ID NO: 98850 - DNA, 510 bp, Zea mays
  unsure (1)..(510): unsure at all n locations
ngtttagatggctgaatgatgggcgaggagaaagtaatcttcggtctggaattcccgggtcgacccacgcgtccgcggacgcgtgggcggacgcgtgggcgccttcctccgcggctcaaacctttcccccttctggcaattcccgccgccgctccatgccgtaacgcgacaccatgagggagtgcatttcgatccacatcggccaggccggtatccaggtcggaaacgcgtgctgggagctgtactgccttgagcatggcattcaggctgacggtcagatgcccggtgacaagaccattgggggaggtgatgatgctttcaacaccttcttcagtgagactggtgctgggaagcacgtgccccgtgctgtttttgctgaccttgaacccactgtcatcgatgaggtgagaactggcacctaaccgcagctcttcaccctgggcaggtcattaatgggaaagaggatgcagccaacacttttccctggtcaactacaccatggccaggaaa

SEQ ID NO: 98851 - DNA, 519 bp, Zea mays
  unsure (1)..(519): unsure at all n locations
nggggtgagcttgtaagggtggaagaggaggagtagttctcgtctggaattaccgggtcgacccacgcgtccggcaatggcggaccaggctaaccaacccactgtccttcataagctcggtggccagttccaggtgcgctcgatcatctctgaaggtgtacgggcccgtaacatatgcccatctgtctcatcttatgaaaggagatttgccacaaggaactacatgacccagagcctttggggcccttcaatgtctgttagcggtggcatcaatgtcccagtgatgcagaccccgctctgtgctaatgctcctgctgagaaaggaggcaagaacttcatgattgatttcatgatgggcggtgtttcagctgctgtttcaaagactgctgcttgctccatcgagcgtgtgaagctgcttattcagaaccaagatgagatgattaagtctggtaggctaatagagccgtacaagggtatttgtgactgcttcaaacgtaccttaaggattgaagttttctt

SEQ ID NO: 98852 - DNA, 500 bp, Zea mays
  unsure (1)..(500): unsure at all n locations
atgtgtcctccgacataactaccgatcgacgggtctggaattcccgggtcgacccacgcgtccgaggagctcgcacaagcctatgaggttttgtttgatccagagaaacgtgagatttatgatgagtatggtgaagatgcccttaaggaaggaatgggcggtggaggatcccatgttgatccatttgacatcttctcatcattttttggaccctcttttggaggaggtggtggaagcagcaggggaagaaggcaaaggaggggagaagatgtagtccacccacttaaagtttctctggaagatctttacaatggcacctcaaagaagctctctctttcgcgcaatgtcatctgctccaagtgcanaggcaagggcctcgaatctggttgcctaatgaagtgcccctggttgccaggcttaagccttgaagtcactattcgtcaactgggccctttcatgatacaacagatgcagcaacctttgcatgagtgcaaggggct

SEQ ID NO: 98853 - DNA, 508 bp, Zea mays
  unsure (1)..(508): unsure at all n locations
agggttnncccccactccngcacgactttcccccttggttttaattcccgggtcgacccacgcgtccgcccacgcgtccgcccacacgtgcgtttgctttttacaagatgctgctaacaagcaggtggattttgtgaaggagtacaaggaagattttgaacgtgatcttgacccagagagcgctactacttttcctgcaacccttgctgaacttacggagagattgaaacactggaagaacattcttcaaagtaatgtacaggatcgggtcccagcagtattaaaactggaggaagaaaaggaaacacttagggattttcatgttgatgatattgaactcccaaggcagtactttacagatcaggaaatcgcacccgaccacacttgtaaagttggacagagcttgaacctgacatttccaattgtccggaggcattggcaaagccttttgacggtggacactcattggtttctgatggttcacaagggccattttattggtcagaca

SEQ ID NO: 98854 - DNA, 497 bp, Zea mays
  unsure (1)..(497): unsure at all n locations
tttgtgaactacgtattatgaagtattgctcgtaccggtccggaattcccgggtcgacccacgcgtccgctagggtttttgattttagccgccgccgctgctcatctcacatccctcgagaagacgcctgctcctcgccgatcgatacgatggccgtcttctccgacctccacaccgccgacggcctcaagtccctcgaggctcacctcgccggcaaaacctatgtgtctggtgactccattactaaggatgacattaaggtcttcgccgcggtgccgtcgaagcctggcgctgagtttcctaatgccgcccgctggtacgagaccgtctctgcggctgtagcctcaagattccctggtaaggctgttggtgtaaatctgcctgcgggatcagcttctgcggcagctgctcctgcggatgaagcttangatgatgatgaacttgatctttttggtgatgaaactgaagaggaccagaaggcagcttatgagcctgcc

SEQ ID NO: 98855 - DNA, 530 bp, Zea mays
  unsure (1)..(530): unsure at all n locations
tcgtgnttccgnnccttgccacttngtntcgctgcgacgtactgggctcaaaattcccgggtcgacccacgcgtcggcccacgcgtccgttccacgcgtccgttcacgcgtccgagacgggcctgggcgtctgcgtgggtatatagctcttcagggtcctgctgcaggtcacccgccccaacgtcgtggtggagggcctcgtcccggggacgcagagctaccgcagcgtggcgcagtaccgcgaggccgtccgcgtgccgggcttcctcgtcgtcggcgtcgagtccgccgtctacttcgccaactccatgtacctggtggagcgggtcatgcgctacctccgcgacgaggaggagcgcgcgctcaagtccaaccaccccttcatccgatgcgtcgacctcgacatgggcgccgtctcggctatcgacacgagcggtctatacgcgctgtgcgagctcaagaaagtcctgaacaaaagaaacatccaacctggtgcttgcccaacccggtggggtcggagccggaaagga

SEQ ID NO: 98856 - DNA, 613 bp, Zea mays
  unsure (1)..(613): unsure at all n locations
attaaatatgtttatatttgtnnnagaaagttggtagttaatgttgttatatncnntnnnaatatttatgnnaganagattgcctttcgtcgagtttagtcatgatgcactncgaacngcntcggaattcccgggtcgacccacgcgtccgcccacgcgtccgagaactgatgctcttgatgctgctggcaacacaactgctgctattgggaaggggtttgccattggttcagctgctcttgtgtccctggcgctttttggtgcctttgtcagcagagctggagtgaaggtcgtcgacgtcctctcccccaaggttttcattggtttgattgttggagccatgctttcctactggttctctgccatgaccatgaagagtgttggaagcgccgccctgaagatggtggaggaggtccgcaagcagttcaacaccattcctgggttgatggaaggaacagccaagcccgactactcaacctgtgtgaagatcttcactgatgctgtcatcaaggagatgattccttccggcgctctggtcattctgacttccctcatcggtggaaccctcttttgcgtttagaatcttttcggagtgttgttggggccctggttt

SEQ ID NO: 98857 - DNA, 518 bp, Zea mays
  unsure (1)..(518): unsure at all n locations
gaagttactgcccacgtagggacagtagtgcatcttccgtacttgtccggaattcccgggtcgacccacgcgtccggccagcggcgtccgtggagtcaccttctacccaacgattttccaaaaggccatttgagtcgtccagcgcatatgatgagcagttcaagcagctcatttcggcaggaaaggatgcggagagcgcttactgggaactcgttataaaggatatccaagatgcgtgcaaactttttgagcccatctacgacgagactgatggggctgatgggtatgtctccgtagaggtgtctcctaggttggcaaatgacactcaaggaactgttgaagcggcaaagtggttacacaaagtggtcaaccgccccaatgtctacataaagatcccagctactgcagaatgtgttccttccatccaggaagttatcgctaatggcattagcgtcaacgtcacgcttatnntctcaattgcgagatatgaggctgtgattgatgcttacctcgatggg

SEQ ID NO: 98858 - DNA, 509 bp, Zea mays
  unsure (1)..(509): unsure at all n locations
gctttgggtnntntcatccgatataagattgatcgcctaccggtccggaattcccgggtcgacccacgcgtccgcccacgcgtccgcgcaatataaacgttcacagcgcttaccttcatgtgcttggggactccatccagagcatcggggtgatgatcggcggggctatcatctggtacaagcccgagtggaaaatcatcgatctgatctgcaccctcatcttctcggtggtcgtgctgttcaccacgatcaggatgctgcgcaacatcctcgaggtcctgatggagagcacgccccgtgagatcgacgccaccaggctggagagggggctctgcgagatggaaggcgtggttgccgtccacgagctgcatatctgggccatcacagtggggaaagtgctactggcttgccatgtgacggtcgccaaggaagccgacgcagacgagatccttgacaaggtgattgggtacatcaagacggagtacaacatcaggcatgggaccattcag

SEQ ID NO: 98859 - DNA, 575 bp, Zea mays
  unsure (1)..(575): unsure at all n locations
gttatagnctnatnnnnatgaaagatnncgagtatataggcgatggctgacttcaggttttgatgtantnacgaaccgcntcggaattcccgggtcgacccacgcgtccgcggacgcgngggnccccanccgcaccgctctccatctccctgctcctccgcctccttcttgatccagccaagccagggatcgccatgtcggactcggaggagcaccacttcgaatcgaaggccgacgccggagcgtccaagacctacccgcagcaggctggcaccgtccgtaagaacggcttcatcgtcatcaagaaccgcccctgcaaggttgtggaggtttctacctcaaagactggtaagcatggccatgccaaatgccactttgttgccatagacatattcaacgggaaaaagctcgaagatattgtgccttcgtaacacaactgggatattccgcatgtgaaccgtactgagtaccagcttgatgatagatcagaggatggaattgagagccttcntacttctaagtgcaacactaaggatgatcttagacctcccaccgattatactcttggggcccta

SEQ ID NO: 98860 - DNA, 566 bp, Zea mays
  unsure (1)..(566): unsure at all n locations
ggtattnncnnnncaattaagatgnnagaatattggcgtgctttctttataagatcttctagcatgncgtaccggnccggaattcccgggtcgacccacgcgtccgcccacgcgtccgnacacataatatttctgctgtttgtttccatcctgagctccctataatcattactggatctgaagatggtacagttcgtatatggcattcgacaacttacagacttgagaacacactaaactatggccttgagagagtctgggctgttggatacatgaaggggtctagaaggatggtgattggttatgatgaggggaccattatgataaaaatgggccgtgaagtacccatagcaagtatggataccggtgggaaaatcatttgggcgaaacataatgaaatacaaactgtaaatatcaagacagtcggtgcaagttttgaagccacagatggagaaagattacccttggctgtaaaagagttaggaagctgtgatttgtacccacagagcttggagcataaccctaatggacggttccgtggtggatgttgagaatgcgagtacatt

SEQ ID NO: 98861 - DNA, 519 bp, Zea mays
  unsure (1)..(519): unsure at all n locations
ngagatgtgcttgcctagatgggaggatgagatggtatgctctaccggtccggaattcccgggtcgacccacgcgtccgcccacgcgtccgcccacgcgtccgttgacgcgtggggcgaaggcgaccctccctggttcgctccttccgcgccgcctgccggccgtcgccgccatggtgaagtactcgcaggagccgggcaaccctaccaagtcggctaaggccatgggcagggatctgagggtccacttcaagaacacaagggagacagcctttgcgcttcgcaagttgtctttgaccaaggctaagcgataccttgaggatgttattgctcacaagcaggcaattcccttccggagatactgtgggggtgttggtcgcaccgcgcaagctaagtcgcgccactccaatgggcagggccgctggcccgttaaatcagccaggttcatcctggatttgctgaagaatgctgagagtaacgctgatgtgaaaggctgggatgtggacaacctctattgtta

SEQ ID NO: 98862 - DNA, 508 bp, Zea mays
  unsure (1)..(508): unsure at all n locations
gtgtnctatatggaagggaagaggacaggatcgctcaccggtccggaattcccgggtcgacccacgcgtccggttcaagattcagatgatgtctggtttaagaaattggaatcttgtataacacctgcgatagaggcagcacagctaaagaagtttccagagagactatctgccattcctcccagaattctggagggtcaggtcccagacataacagaagaagtctatgaggaggataataagttgtggaagaagcatgttaatacttataagagggtgaacaagctgataggttcttcaaggtacaggaatattatggacatgaatgcaggccttggaagttttgctgcaactcttcattcttccagttcctgggtaatgaacgttgtgccctctatatcagaaaggaacactctnggtatcatatatgagcgaggtctgattggtatataccatgattggtgcgaagccttctcaacataccctaggacatacgacctgatacatg

SEQ ID NO: 98863 - DNA, 520 bp, Zea mays
  unsure (1)..(520): unsure at all n locations
nggagatgttcttgttagttgggcagaagggaagtgatcgctctaccggtccggaattcccgggtcgacccacgcgtccgctcgcccttgccaaggtcgacgccatcgaggaaaccgacctcgcccagaagtacgaggtgcagggcttccccaccatgctgttcttcatcgatggcgtccccagaggctataacggagccaggaccaaggaagccatcgtcgactggatcaacaagaagctcggcccagccgtgcaaaatgtcaccagcgtcgacgaggcccagagcatactcaccggagatgacaaagccgtccttgccttcctcgacacactatccggtgctcacagtgatgagcttgctgctgcttcgaggctggaagatagcatcaacttttatcagacttcgactcctgatgttgctaagctnttccatatcgatgcagcagcgaagcgtccatccgtagtgctgctgaagaaagaggaagagaagttgaccttctatgatggggagtttaaaac

SEQ ID NO: 98864 - DNA, 618 bp, Zea mays
  unsure (1)..(618): unsure at all n locations
ttaaatatgtgaatatttatcnnatgaatttgagtatcaaatgttaattaggnnttnnaattaagttgncntggtgatgctgtcgctgtcttatgcatcagatgtcattgcgacgncgcntcgaatcccggccgcgcccacgcgnccgcggaacgctgangccncaaccacgcggatagaggagnagcggaccgaccatggccaccggggccgacaaccgcgacggcatgggctaccagacccgcgncgggctccgactcgccgacgcgctctccttcccacccccattccccgccagcaacttcgacttctacccgctctccctccacgtcgcgctcagacttcttgccagcggcgcgggtggcgccactcgctaacagctttgcctcgtccttggaggcgacgcgcccttcggggcctacggcctgtacgcgctctccgagcacgtttggccagctcgtgctcgcctacaggtcttgcgcctggagaccccgcgatagacttattcgtcaggtgtattaagaacttctcgctgaaacttaaatactgcctttaggatgttttcctgggaaaattcctgggtctcataccagatccattagcttttaaaaaaaggat

SEQ ID NO: 98865 - DNA, 570 bp, Zea mays
  unsure (1)..(570): unsure at all n locations
cggtatgntntcccntatttctaatnnnagtatattgctatggtgattttagtattgatgcantgcgaacngcntcggaattcccgggtcgacccacgcgtccgcccacgcgtccgcccacgcgtccgcccacgcgtccgcccacgcgtccgcccacgcgtccggaccaccatccacgcactgctagtaagcgagcttagctactgatcgtcgtcaagcactctcgagctcgatctctcgaagcggctagctgctagcagccaattaatggcgaagccttcgcaggtgctggtgtcggcgctcgccgcctgggcggtggtcctgctgctgctgtgcgccgccgcgccgcggggcgccgacgcggccacggcgtgcgacgccgcgcagctgaccccgtgcgcgggcgccatcatcgggagctcgtcgaccaccgcggcgtgctgcaacaagctcagggagcagcagccgtgcctgtgcacgtacgcgcgcgaccccaagctgcagcgctcgtcagctcggccaacggcaagaacgccattggccgcgtgcaaggggcccgtgccggcttgc

SEQ ID NO: 98866 - DNA, 623 bp, Zea mays
  unsure (1)..(623): unsure at all n locations
attataatatattatagatnatatnnattatttattatttattatattgtttaatcntnnnnnnattaaattttccnggtatatatgcctgtctatactatgtattagagagtcattgtcatgntgtaccggttcggaattcccgggtcgacccacgcgtccggtttggatcaaagcttaaagagcacatgcagtactgtgtggaccaccctgaggaggttagcaagcttgccaaggtgaaggcccaagtctccgaagtcaaaggagttatgatggaaaacattgagaaggttcttgaccgtggcgagaagattgaactgcttgtcgacaaaactgaaaatctgcgttctcaggcacaagatttcaggcagcagggcaccaaggtgcggcggaagatgtggctccaaaacatgaaaatcaagctgatcgtcctgggcatcatcatcgcgctcatcctcatcatcatcctgtcggtgtgccatggcttcaagtgcggcagcaagtgaagaaggggacttacagatggccgtgccctgccctgcccttgcctggcacctgcgagaaggaagagacttcatgtggaggtttttttttttgcttcctttaatcgagtgttaaatcct

SEQ ID NO: 98867 - DNA, 514 bp, Zea mays
  unsure (1)..(514): unsure at all n locations
nggttagacggntgattagggggatgagggaggggagtgctgtcccggtccggaattcccgggtcgacccacgcgtccgcccacgcgtncgtccacgcgtncgactgcgcgggcatcggccccggtgtctacgacatccactcccccaggatcccgtcggctgaagagatcgccgaccgcatcgacaagatgctggcggtgctggacaccaacatcctctgggtgaaccccgactgcggcctcaagacccgcaagtacacggaggtcaaagcccgcctgaccaacatggtctccgccgctaagctcatccgcacccagctcgccagcgccaagtgagcaccttttttttgcctttttcgtttccgaggagggcgtcgtcgatgccaatttggttccaataaacagggctgtgccccgccgtctggtgtacctccggctggggtagggtaggaagtttcttgatctcgcccccacgcggtacctgtttactactctctgtttggtgtttctgagg

SEQ ID NO: 98868 - DNA, 516 bp, Zea mays
  unsure (1)..(516): unsure at all n locations
tttgtgtgttaagttctgcctagttggggagggatgtatcctctaccggtccggaattcccgggtcgacccacgcgtccgaagcaagagccaagttctggtggttgtagattgtttggaattaatatatgctcagctgaggaagaagtattacctgaggttactgctccaggtgttggttatgagcagactgctgcctctgtagagttgaactcggataagctctcacagccatctgatgtcaacaattctgatgccctagcagctagcagtgaacgttcacctcttgaatcccaaagccggcaagtgaggagctgtaccaaggtaattatgcaaggaatggcagtaggaagggctgtagacctgacaaagcttagtggctacagcgatctttgccagaagctggaggagatgtttgacatcccaggggagctgggttccacactaaagaaatggcgggtcattttcactgatgatgangatgacatgatgcttgntggagatgatccttgggatt

SEQ ID NO: 98869 - DNA, 514 bp, Zea mays
  unsure (1)..(514): unsure at all n locations
ngtttagatggnttatgcaggggaagaggacagtatcctgcaccggtccggaattcccgggtcgacccacgcgtccgtccccgtattgttggtgaaggccttgtgattgacgaatggaaggaacgaagagagaggtgccttgctcgccagcagattgaaggtgttgattcggtgtagacacgaggcagccctgtaaactatgcagaatgaacataccgttttatgggcacgcactccagctgtcaaatggatttggagcttgattttgcgaaggttcggatttggagcaatcaagcaacaatgaggcttttgtgtatttggggttcacgctgaacttctgtcctgggtttgggtgtgtgtagataagcagccactgcttggtaatagtacgtccttcagccatgtactcgtgttgntgaatgtgggtctctatgtgaatgtgatgcattctctagctgctgtcctgtcaacattaaaagtgtaattgtaatgtcaaaaagcacactccaaaggn

SEQ ID NO: 98870 - DNA, 568 bp, Zea mays
  unsure (1)..(568): unsure at all n locations
cgtatgncntnnncnttgtaaggntnaggagatggcgatggtgagtttagtcagtaagcantgcgaacngcntcggaattcccgggtcgacccacgcgtccgataaaatccaaatttctcccagcgaaggcacacagccgccgccatttcttcatcctcccgtctcctgatctccatctgcctcgcagcgccggcgatccatcttccgctgcctcccttcctcgcgctcgggctctcagtgacggcatcagcggtttcccctgccgcctatcgccagtcgcatcacgccctcgcctccggtccaccgcacaccggccggtcaccctgcattacttgctaatctttcctgagggcagatggccggtgcttttgcaaatgtcaacgctgaggcagggctgaaaaagcttgatgagtaccttctcactcgcagctacatcactggctaccaagctttcaaggatgacctggctgtctactcttcatttttggttgatccctcattcaagtatatcaatgtagcaaggggggttaatcacattgatgcactcctgagggtgagtggaggtcc

SEQ ID NO: 98871 - DNA, 507 bp, Zea mays
  unsure (1)..(507): unsure at all n locations
tggtaggtgctgccctcgcatgatagatggatctctcaccggtccggaattcccgggtcgacccacgcgtccggtggtgttgggattgatgattggtgtttgaatgagcagttctgggtcattggaggtgtggcctcgcacctcttcgctgtgtttcagggacttctcaaggtcatagctggtgttgatacaagcttcaccgtgacatcaaagggtggagatgatgacgaattctcagagctgtacacatttaaatggactaccttattgatacctnctaccactttgctcctattgaacttcattggtgtggtcgctggtgtttccaatgcaatcaataatggatacgagtcatggggccccctcttcgggaagctcttctttgcattttgggtgattgtccatctgtatcccttcctcaaaggtttggttgggaagcaaaacaagacaccgacaatngtcatcgtctggtccatcctgctggcttcaatcttctcactcctttgg

SEQ ID NO: 98872 - DNA, 620 bp, Zea mays
  unsure (1)..(620): unsure at all n locations
attattatttttgatagattattgnnataattttgtatagatatttatagattattatntnnntaattttatttcttnggaatatatgcggtgactgagctcagtttaatgatgtacttacgaacngcntcggaattcccgggtcgacccacgcgtccggagaacattgagaaggatattgagagggaaaggcggagaaaggacaaccctgaggcgatggangaagatgaagtggatgagatcgccgagatcagggcccctcacttcgaggagtcgatgaagtatgctcggcgtagtgtcagtgatgctgatatccgcaagtaccaggcgtttgcccagactttgcagcagtcccgggggtttggcagtgagttccgcttctcggatcagacggcgacagctggtgctgctgctgcagccgatccgtttgcttctgcgggtgctgcggctgatgacgaccatctatacagctagttgggttgctcaatatcagtcccgtcactcatctgtttaaaactgatcattcttaacacgcatgttatgcaatgatatttattttccgtacaatttggacgtccttgaataaagccctcttgggcctttgttacctttcattccat

SEQ ID NO: 98873 - DNA, 515 bp, Zea mays
  unsure (1)..(515): unsure at all n locations
tggttagtgttctgtcatgtaggagatggaagagagtgctgctaccggtccggaattcccgggtcgacccacgcgtccgcagccgccgtcatgtcgaagcgaggtaggggaggttcggctgggaacaagttccgcatgtgactgggtctaccggtggcggccacggtgaactgcgcggacaacacgggcgccaagaacctctacatcatctccgtcaagggcatcaagggccgnctcaaccgccttccgtccgcctgtgtcggcgacatggtcatggccaccgtaaagaagggaaagcccgacctcangaagaaagtgatgcccgccgtcatcgtccgccagcgcaagccgtggcgtcgcaaggacggtgtctacatgtacttcgaagataatgctggagtgattgtgaatcccaagggtgagatgaaaggttctgcaatcactggacctatncgcaaggagtgtgctgacctttggcctangatcngcagtgcagcaaatgccattcgttgaaa

SEQ ID NO: 98874 - DNA, 511 bp, Zea mays
  unsure (1)..(511): unsure at all n locations
aatggtgtctgtatgtggaagaggaaagagagtcatgtaccggtccggaattcccgggtcgacccacgcgtccgctagttctagatcgcgagcggccgtccttttttttttttttttttttttaaatgtagcagcaatcagtcaagctacctcacctcatggtaatataacatcttgaacaaccataatacaaaatgaaatgcagttctgtcacgacaacatcgcattcataagcaataccacccatctagtacctagcaagcatcaccacacgaaccttaaactgacgagtactaacagcgatacaaggaatatcatatctgtaccaagcactgcggagaatgacttangtctcttnctcttctttcttctnnctctcgtactcctcatnctcggcagtggcgtcctggtactgctgatacttcggcaccaggtcgttcatggtactcntctgctcgtgaactccatctattcataccctcgctgtgtaccagtgcaagaaagctttctt

SEQ ID NO: 98875 - DNA, 514 bp, Zea mays
tcgataaatgactagtctatgggcggagggacaggagtcctgcaccggtccggaattcccgggtcgacccacgcgtccgcggacgcgtgggcacgcactgctagttagcgagcttagctactgatcgtcgacaagcacggtctaactcgatctctggaagcggctagctgctaacagccaattaatggcgaagccttcgcaggtgctggtgtcggcgctcgccgcctgggcggtggtcctgctgctgctgtgcgccgacgagccagggggcgccgacgcggccacggcgtgcgacgccgcgcagctgaccccgtgcgctgacgccatcatcgggagcttcgccgccaccgcggcgtgctgcagcatgctcagggagcagcagccgtgcctgtgcacgtacgcgcgcgaccccaagctgcagcgctacgtcagctcgaccaacggcaagaacgccatgggcgcgtgcaatgtgcccgtgccgtagtgctaaattaaacttctgttagcgccgccc

SEQ ID NO: 98876 - DNA, 514 bp, Zea mays
  unsure (1)..(514): unsure at all n locations
agatactagccccctcccgacacagtattgatatctgtacttgtccggaattcccgggtcgacccacgcgtccgagaggggaagagagagagagagacttttgggggagatgagccggagcctgnggagccgggtgaagttgctccatgaggcagcgggtcacgtggtgacggtggagctcaagaccggcgaagtgtaccgggggtccatggtcgagtgcgaggataactggaattgccagctcgagaacattaccttcaccgccaaggatgggaaggtttcgcagctggagcacgtcttcatcagaggaagcagagtgagatttatgattatacctgatatgctcaagaacgctcccatgttcaagcgcttggaagcgagaattaggggcaaaggatcagctattggagttgggcgtggacgtgcagttgcaatgcgtgctcgggctgcttctggtcgtggtggtggtcctgttgggcgaggcagcgcgccttctgtgaggaagtagatttat

SEQ ID NO: 98877 - DNA, 588 bp, Zea mays
  unsure (1)..(588): unsure at all n locations
tagaatttnannnnnntnnnatgtgatattgnnnaggtataggccgggtcgcttgtatttactgattattgactgtcatttctgaacngccntcggaattcccgggtcgacccacgcgtccgcaagaaaactagaaaaggctcctcccgaccgcaacgcccctcatctccctcgaccccgggatccccgacccgatggcgcccaaggcggagaagaagccagcggagaagaagccggcggccgaggagaaggcggagaagacgaccgcagggaagaagcccaaggccgagaagcggctgcccgcgtccaagtcctccggcaaggagggcggcgagaagaaggggaagaagaaggccaagaagagcgtggagacctacaagatctacatcttcaaggtgctgaagcaggtgcaccccgacatcggcatatcctccaaggccatgtccatcatgaactccttcatcaacgacatctttgagaagctggccggcgaggccggcaagctggcgcggtacaaccagaagcccaacattacgttccgcgagaatccgaaccttctgcgcctaatgcttcccggggaagttgtcc

SEQ ID NO: 98878 - DNA, 581 bp, Zea mays
  unsure (1)..(581): unsure at all n locations
atggctnnnntntaatggttataatnnnnggtcagatagagggggccgtnttcttcttataaaagaactttactgtactgnctgtaccggntcggaattcccgggtcgacccacgcgtccgtccaattcagtatactctaatgaaagatcctgtgacactgccatcgtcaaaggtcacaggggaccggcccgtaattatcaggcatctgctgagtgattctacagatccatttaaccgctcccacctcactcaagacatgctgataccaaacacggagctcaagttgcagatcgaggagtttgtccggtcccagcagtcgagaaagcgaactgctgcggcgttgctggagattggcgaagcggagggtactgatgatatggccgaatgaattgtgccaggagcaagggatggacacattttttttgtggggaaagagtgatggttaattcacatgaagtgtatcggtccatctgtccgtataaagttggttttccggcttgagtccctgtcgccttgattctttggaaatattgcaagtgcacacctgatacaaatgtacttatagagggaacctgtcact

SEQ ID NO: 98879 - DNA, 481 bp, Zea mays
  unsure (1)..(481): unsure at all n locations
atattcttctacttgtccggaattcccgggtcgacccacgcgtccgatgacgtctcgcccaatgaaggggatgctgactggcccagtcacaatcctcaactggtccgtcgtccggaatgaccagccgaggtttgagacttgctaccagatcgctcttgcgatcaagaaggaagtcgaggatcttgaggctggtggtattcaggttatccaaatcgacgaggctgcactgagagaagggctgccgctccgcaaggctgagcatgcattctacttggactggggctgtccactcttcagaattaccaactgcgagatccaggacaccacccagatccacacccacatgtgctactccaacttcaacgacatcatccactcgatcatcgacatggacgccgacgtgatcaccattgagaactcgcggtccgacgagaagctgctcttcgtgttccgcgagggcgtcaagtacggcgcgggcatn

SEQ ID NO: 98880 - DNA, 517 bp, Zea mays
  unsure (1)..(517): unsure at all n locations
ngggagagctgtttcttggttacaaggaaagaggctggcacttgtccggaattcccgggtcgacccacgcgtccggctttagcgatggtcctgttcatggctggcgccgcgctgctcgccggggctgccggcggcggcgcgcagcaaggcgggtggagcatcatcacccggcccatgttccagagcatgctgagccaccgcggcgacagcgggtgccagggcgccttctacacctacgacgccttcatcgaggccgccagcaagttccccggcttcggcaccaccggcgacgagcagacgcgcaggcgggagctcgccgncttcttcggccagacgtcccacgaaaccaccggtggatgggcgactgctccggatggaccgtttgcctggggatactgccgggtgaaggaacagaaacagacggacccaccctactatggacgaggacccatacagctaactcataagtacaactacagggctcgccggcaagcgcttgaccctgacctggtggcac

SEQ ID NO: 98881 - DNA, 520 bp, Zea mays
  unsure (1)..(520): unsure at all n locations
nggtagtgctgtctagtcgcacaggagatgtattcctccacttgactggaattcccgggtcgacccacgcgtccggttatgagcgaaataatccataatgtatcctacatgctttattactttgaaggaactcggggttccagatgcttttatctcatcagtgactgctggggtaataccatcttgtaaagcccttatctgtgttcctaatggcctgggtgcaatatgcctcaataatcaaggacttgaggctgtcagggaaacttcagcactgcgatttcttgtagataccttcactagcatgaaatacttgataccaatgaatgagggtgtggtccttctagctaatgcagtggaagagcttcttcgtcatgtgcaatccctgagaagtattgatgttgacatcattattgaaataatcaatagactaagttcgtctcaggaatataataacaatgaaacagccaccttgcaagaaaaaacagatatggaaactgatgttgaaggtcgtgaattggta

SEQ ID NO: 98882 - DNA, 520 bp, Zea mays
  unsure (1)..(520): unsure at all n locations
tatgtttactccatgcggaggagggacgtatctctctaccggtccggaattcccgggtcgacccacgcgtccgcccacgcgtccgcccacgcgtccgttcacgcgtccgagacgggcctgggcgtcggcgtcggcatctcgctcttcaaggtcctgctgcaggtcacccgccccaacgtcgtggtggagggcctcgtcccggggacgcagagctaccgcagcgtggcgcagtaccgcgaggccgtccgcgtgccgggcttcctcgtcgtcggcgtcgagtccgccgtctacttcgccaactccatgtacctggtggagcgggtcatgcgctacctccgcgacgaggaggagcgcgcgctcaagtccaaccacccctccatccgatgcgtcgtcctcgacatgggcgccgtcgcggcgatcgacacgagcggtctagacgcgctgtccgagctcaagaaagtcctggacaaaagaaacatcgagctggtgcttgccaaccccgtggggtcggggccganaa

SEQ ID NO: 98883 - DNA, 448 bp, Zea mays
  unsure (1)..(448): unsure at all n locations
gtagggggnttanaactgaatgaatgcatggagntgcgtaccggaactcggcaggttccgacccacgcgtccgctcttggatatgtactcatgtacttcctgaggggcagccttccttggcaaggtcttaaagcaggaacaaagaagcaaaagtatgagaaaattagcgagaagaaagttgcaacatcaattgaggctctatgccgtgggtatcctactgagtttgcatcatatttccattattgccgttcactgcgatttgatgacaagcctgactattcctatctcaagcgattattccgtgacctttttatccgcgaaggttttcagtttgattatgtctttgactggacaatattgaaggtcccacaaagctcaaattgccactgtttcacctcgtgcgggccatggcgctgggccttctgggtttggcacctgcatttacaaa

SEQ ID NO: 98884 - DNA, 467 bp, Zea mays
  unsure (1)..(467): unsure at all n locations
ggttttttagtggntnnctaactgtcagtcnctccatcgtacctgcctgtaccggtccggaattcccgggtcgacccacgcgtccgcccacgcgtccggtgtcatccgcatattggatgatggggaaattaaagtcctccccaatcgggaggggagcttgagcatgtcaatgttttttccttgttaatgatggattgcaaaaggtacatagcaaggacaaaaagcaatggggacagtgggtcaccttgtctaactcctctttggcagcggagacctttccgggcaccccattaagaagcacttgagatgttcccgagtccatgatcatatttatccactaatgccattttggtccaaatcctttgtgtgtaaaaatgctcctgattaccggatgctccatcttgtcaaaagatttctcgaaatctagtttgaagataaccgacccttttttactgcttacagaggan

SEQ ID NO: 98885 - DNA, 524 bp, Zea mays
  unsure (1)..(524): unsure at all n locations
taactggttgntgtcgtcagcctgtacttgcactgnagtgnctgtactcgtaccggaattcctcgacccacgcgtctcgcacagcatttccttgagaacgatctatgcgaatgatattgagacacatttgaaaaagggagatatgctcctttgctatggccctttgcattccaggcacccaagaacatncccgtgcaagccctaattaaagggtcacagttcccaagcaaatgccttagctcagcaaactctgattgcacattggcagagcattgtgaaaatattgacaaattacttgaatgttttaaaagcaaattatgtcccttcagtcttaatcagcaaagtgttcactcaaatcttttcatttattaatgttcagttatttaatagtcttcttcttcgacgggagtgctgttcatttagcaacggagaatatgtgaaagctggattggcagaattagagcagtggcgcatttatgcaacagaagagtatgcaagttcttcctgggaagaattaaaacata

SEQ ID NO: 98886 - DNA, 453 bp, Zea mays
  unsure (1)..(453): unsure at all n locations
cggggagatgtggctgtgtctcgacacgcantgtactgcatcgtactggtccggaattcccgggtcgacccacgcgtccggggtttttgattttagccgccgccgctgctcatctcacatccctcgagaagacgcctggtcctggccgatcgatacgatggccgtcttctccgacctccacaccgccgacggcctcaagtccctcgaggctcacctcgccggcaaaacctatgtgtctggtgactccattactaaggatgacattaaggtcttcgccgcggtgccgtcgaagcctggcgctgagtttcctaatgccgcccgctggtacgagaccgtctctgcggctgtagcctcaagattccctggtaaggctgttggtgtaaatctgcctgcgggatcagctcctgcggcagctgctcctgcggatgaagctgaagatgatgatgacctttt

SEQ ID NO: 98887 - DNA, 451 bp, Zea mays
  unsure (1)..(451): unsure at all n locations
agtaagcgggntntcaatgaaccgacactgcatgcactctgctgtaccggtccggaattcccgggtcgacccacgcgtccgcccacgcgtccgcccacgcgtccgcggactcgtgggcggcgcacatgctcgctggggggctcatcggcttcgtctggatccagtccggctggatgggccacgactcgggccaccaccgcatcacgggccatccgctcctggaccgcgtcgtgcaggtgctctccggaaactgcctcactggcctcagcatcgcctggtggaaatgcaaccacaacacgcaccacatcgactgcaacagcctggaccatgacccggaccttcagcacatgccgctcttcgctgtctcccccaagctgttcggcaacatatggtcctacttctaccagcggaccctggccttcgacgccgccttgaaattcctcatcaggcc

SEQ ID NO: 98888 - DNA, 461 bp, Zea mays
  unsure (1)..(461): unsure at all n locations
ggtttagcggtactgactgcagccaactacgcactgccgctaccggtccggaattcccgggtcgacccacgcgtccgattgccgtctcccttttgcgtgagcaaagaaagagagcgagaagagcagtcgccatgtgtggcatcatccacaagatcgaggagaagctccacatggggggcgaccacaagaaggaggatgagcaccacaagaaggccgaggagcaccacaagaaggaggagggggagcaccacaagaaggacggcggggagcataaggaaggcatcgtggagaagatcaaggacaagatcaccggcgagcacggcgacaagtccggcgaccacaaggaaaagaaggacaagaaaaagaagaaggagaagaagaagcacggccagggccacgaccacgaccacgacggctgccacagtagcagcagcagcgacagcgactgaaatctggggggn

SEQ ID NO: 98889 - DNA, 505 bp, Zea mays
  unsure (1)..(505): unsure at all n locations
tgaggtngtcgctgtctgatggacatcgtatggatctgcctggccggaattcccgggtcgacccacgcgtccggtcgcaccgcgcaagctacgtcgcgcgactccattgggcagggccgttggcccgatagagcagccaggttcatgctggatctgctgaagaatgctgagagtcacgctgatgtgaaaggcttggatgttgacaacctctatgtttcacacatccatgtgaatcaggcccagaagcagatgcgccgcacctaccgtgctcacgggcgcatcaatgcctacatgtcctcagcttgccacattgagctgatcttgtgagagaaagaagatcctgcgaagaaagaagctgacaacattgtcggatgaaggaagcagtgaagtatatcaacatgctgatcgaggccattttgacgaagcattatagccgtagctcttttatgatacctttgaggcagacttgcctattcagacatgtgcggcaccgatgttttaaaac

SEQ ID NO: 98890 - DNA, 503 bp, Zea mays
  unsure (1)..(503): unsure at all n locations
gcacggctggctgatggaaattttacctagntcggacgtacnggtctcggaattcccgggtcgacccacgcgtccggatggtgttggtggttgggcagatctcggtgtttatgctggactatatgctaaggagcggatgagaaattcaatgagcgctatcaaagatgagccagaagggaccattgatccaaccagagttttggaaaaggcttatattagtacgaaagcaagggggtcatctaccgcgtgtatcatcactcttaaagatcagggtatccatgctgtaaatcttggggatagtggtttcgtagtagtccgagatggccgcactgttctcaagtcacccttacagcagcatgatttcaattttacttatcagctcgagagtggaagtggcagtgatctttctagtttcgcacaagtatttcacttttcggtttgccccgggtgatgttatcgttgcttgcacgggtggactatttgacaatttatacaacaatgag

SEQ ID NO: 98891 - DNA, 451 bp, Zea mays
  unsure (1)..(451): unsure at all n locations
cgctagcgtgctgatgnaacctgnacncgnatagnctgtaccggttcggaattcccgggtcgacccacgcgtccggccacctacaccgaaattcggctggaagttagtgtccgagatgggctatgatccactcggcgtgccttcgcgtggtgaaatctgcatccgggggaaatccctcttcgctgggtactacaaaagtccagaactcacaaacgaagccatcgttgatggatggtttcatacaggtgacattggagagatgaccccagacgggatcttgaaggtgattgacagaaaaaagaacatatttaagctgtcacaaggggagtatgttgcggttgagtacctggagaaagtgtatggcttccctccactcgttgaagatatctgggtatacggggacagtttcagatcaagtttagttgcagtagtcaatccacaccaagaaaaa

SEQ ID NO: 98892 - DNA, 458 bp, Zea mays
gttttagagctgtccacagccagtatagtatgcatcttccggtccggaattcccgggtcgacccacgcgtccggtagaagattctgtggatagtgatgatggaggcaagtcactaatcagagagatgccgcgatatgaagctgaaaatgcaattgctaatctggtgaaagtgtggataaaagaaagagtagacagactaaagggatgggttgaccggaatttgaagcacgagacctggaatccaggtgccaacagggataattctgctgcctcttacgtggagatgcttcgagttattggtgaaacgttggatgcatttttgcaattgcctataccaatgcatccgggtcttcttcctgatctgacagttgggctcgacagaagcctacagctttatgctgcttaagcaaaaatttgctggggagcacgaaattgttttattgcccaactaccccccc

SEQ ID NO: 98893 - DNA, 449 bp, Zea mays
  unsure (1)..(449): unsure at all n locations
ntatagtgtnntnnaactgatcgacatgcatcgtactgctgtactggttcggaattcccgggtcgacccacgcgtccgaagaaacctatgctatcggaatacatgtttagagcagaatctagtcttcctagcataacagtgtaagaaggggcctcagaccagaatgcgccgatactgttgaaattagagataccatatttcaccgtatcatgtattcaggtcctgtatgtgaagataattgaaatgagtggttatcaggcactgctctgggttagatatatcacagtggctggtgaatatgagctgagactgatatgagttctctcttctctggctgtcggacgacttttgaagctgcaggacactaaagatacatatttgctatcgacacagcgaacagttttcattcggatgttggcctggaagtcttctgccgaccataccaccct

SEQ ID NO: 98894 - DNA, 455 bp, Zea mays
  unsure (1)..(455): unsure at all n locations
tgagtggnctgctgccacgccctcattgcactgctgtaccggttcggaattcccgggtcgacccacgcgtccgcccacgcgtccgtcttgatccagccaagccagggatcgccatgtcggactcggaggaggaccacttcgaatcgaaggccgacgccggagcgtccaagacctacccgcagcaggctggcaccgtccgtaagaacggcttcatcgtcatcaagaaccgcccctgcaaggttgtggaggtttctacctcaaagactggtaagcatggccatgccaaatgccactttgttgccatagacatattcaacgggaaaaagctcgaagatattgttccttcgtcacacaactgtgatattccgcatgtgaaccgtactgagtaccagctgattgatatatcagaggatggatttgtgagcctttctacttcagatggcaacactaagggg

SEQ ID NO: 98895 - DNA, 449 bp, Zea mays
  unsure (1)..(449): unsure at all n locations
ggtttagtggactgattcagtcaganatgcatcgacgtactggtccggaattcccgggtcgacccacgcgtccgcccacgcgtccgaattgtacatggaggtgttggctatcatatggtaaactgcggtttgatactgttgaagatgttatctgaatatgttgacatcagtaaatgtttaccatcactatctttggaggtggtccaacgtgttgtggaaatattgaagcttttcaacactaggacttgccaacttgttctcggtgcacgggccatgcacgtgtctggacttaaatcaattacatctaagcatttagctctggcgagtcaaatcattagttttatacattctttaattccagatatcagacgagtgctcttcctgaaaatacctgtagcacgcaaacagttgctaatgtctgagctggatatagtggctcacgactttac

SEQ ID NO: 98896 - DNA, 449 bp, Zea mays
gtttaggtctgttacgacgtgacgattgctcgtccggctcggaattcccgggtcgacctacgcgtccgcccacgcgtccgcctgctcctcacgccgccgccgccgccgccgccgccgtcgccgccagcacatccgtagcgcccagccgccggagaagaggagggagccagcaccagccaccatgggtcgcgtgcgcaccaagaccgtgaagaagaccttcaggcaggtgatcgagaagtactacttccgcatgacccttgacttccacaccaacaagaaggtgctggaagaggtctcgatccttccctcgaagcgccttcgtaacaaggttgccggcttcaccacccacctgatgcgccgcattcagcggggcccagtccgtggcattttgctcaagctgcacgaagaggagcgcggagcgcccgatggacttcgtcccggagaagaaa

SEQ ID NO: 98897 - DNA, 459 bp, Zea mays
  unsure (1)..(459): unsure at all n locations
cggttaagaggtatgtactacgacagtgtactgatcggccagcgccggaattgccgggtcgacccacgcgtccggccgcagcccgcagtcgcttgcgcgcagcagcacttcgcaccgncgccccatcccatcgccggcagtgtctgctcgatccgatggctcccacgaagaagtcgaagaagagcacagagagcatcaacaacaagctgcagctggtgatgaagagcggcaagtacaccctgggctacaagaccgtcctcaagacgctgcgcaactccaagggaaagctgatcatcatcgcaaacaactgcccttcacttaggaagtctgagattgagtactacgccatgctggccaaagttagcgtgcaccatttccacggaaacaatgttgatcttggcactgcctggggcaagtactacaaggtgtgctggcttaagatcatcgacccagtggaaa

SEQ ID NO: 98898 - DNA, 456 bp, Zea mays
  unsure (1)..(456): unsure at all n locations
cgcttcagcggctcgtactgttacgtnccgtacgcacttgctgtaccggtctcggaattcccgggtcgacccacgcgtccgatccggagcagccgcagtcccaccgacctcgccgccggtcgccctccatctcctggccgctgcctctcgtttctcttttcaataatcaagatgagccgtggtggtagtgccggtggtggtcaaagttctctgggttatctctttggaagcggtgagccccccaaaccagcagtggcaccagctgcaagtgctccacctgttgagaaaccatctgctgcaaagactgatgcggccaagcaggttgctgctggggttaccagccaaaccaataactaccacagggctgatggtcagaacactggcaacttccttacggaccgtacttcaaccaaggtccacgctgctcctggcggtggctcttccctgggctacccc

SEQ ID NO: 98899 - DNA, 460 bp, Zea mays
  unsure (1)..(460): unsure at all n locations
cgtntaagaggtnctcctgaacgacactcattgcactgctcgtaccggtccggaattcccgggtcgacccacgcgtccgcggacgcgtgggctgctgaattggaagattggcttggcgatcttaacccacactcgaaagaggtgataaaggatgcttatgctgtaccatcacttgccactgcggttctgggtgacaagttccagtttgagcggcttggttacttcgccgtggatactgactccacacctgagaaactcgtgttcaacagaactgttaccctccgtgattcgttcgggaaagctggacccaagtgactgttcagtgtaatttagggagggcgctggttttgatcggttgcagaagcgcacctgaactatacaagttgtgaagaaaatggtcgtctaatacagaacagtttaaagggccttactctttataaaatttagggttttttaaaaa

SEQ ID NO: 98900 - DNA, 462 bp, Zea mays
  unsure (1)..(462): unsure at all n locations
agtttntagtggntgnctaatgacaagcaatatattgcatctgctcgtaccggtccggaattcccgggtcgacccacgcgtccgcacggagaagcgaaaccgacctttccccctcccccgcattccacctcgcggagatccaggccagccctagggtttcgccagcggcgagccaaactccacgagcgggggaagaggggaaagcagggacgacgagggggcagccatggggcaacagtcgctgatctacgcgttcgtggcccgtggcacggtcatactggccgagtacacggagttcaccggcaacttcaacaccatcggcttccagtggctcatgaagcttcccggcagcaacaacaagttcacctacaactgcgacggtcacacttttcaataccctcgtggaaaacggattcacatactgggttgttgctggtggaatcggtggggcaacaaattttt

SEQ ID NO: 98901 - DNA, 457 bp, Zea mays
  unsure (1)..(457): unsure at all n locations
cgtannagtgggctgtcgacagactctgactgaccgtcatacctctcctgaattcccgggtcgtcccacgcgttcgagctgcagcaggagcactaactgatccaacttctgagttcccttctggaagaaggccagctgatttagcttcagtaaatggacacaaggggattgctggttttctcgcagaatctgctttgacaagccatctgtcagcacttactattagggaatcaaatgatagcactgtagaagcgtgtgggctaccatttgctgaagatctcactggcattgattctgtccatctcgctggagagggtcctgatgctgaatcacttgaaggttctttaagtgccgtgcggaaatccactcaagctgcagctcgtatatttcaagccttcagggtggagtcattccacagaaagaaagtcgtggaatacggagatgacacctgtgggga

SEQ ID NO: 98902 - DNA, 452 bp, Zea mays
  unsure (1)..(452): unsure at all n locations
gttttaggtctgtgctattcgatacgntctgccgtaccggtctcggaattcccgggtcgacccacgcgtccgcggacgcgtgggcggacgcgtgggcggacgcgtgggcggacgcgtgggtgcgcgtcgaaccccaatgtctcgtctgtgatcactggagccaccaaagaaagccagattgtggagaacatgaaggccctagatgtcatcccactgctgacgccggaggtcgtcgacaggatcgaggcggtggtccaaagcaagcccaaacgcaacgtcgagtcatacaggtgaaaattcggtgttcatccgacggagttcaggcctcctccacgaaacttcatccatgatccgtgtgtattctgggcgtggtgctgtgttcacaaacaccagtctgtcagtcctgtgttgtgtattctgctttccgatacagattttggaccaatcaaaaa

SEQ ID NO: 98903 - DNA, 461 bp, Zea mays
  unsure (1)..(461): unsure at all n locations
ggttttagagttactcatgacggantatatagcatcgctcgtaccggtctcggaattcccgggtcgacccacgcgtccggccatgtggaggagggctttagcgatggtcctgttcatggctggcgccgcgctgctcgccggggctgccggcgccggcgcgcagcagggcgtgtggagcatcatcacccggcccatgttccagagcatgctgagccaccgcggcgacagcgggtgccagggcgccttctacacctacgacgccttcatcgaggccgccagcaagttccccggcttcggcaccaccggcgacgagcagacgcgcaggcgggagctcgccgncttcttcggccagacgtcccacgaaaccaccggtggatgggcgactgctccggatggaccgtttgcctggggatacttgccggtgaaggaacagaaacagacgggcccaccctactatgggn

SEQ ID NO: 98904 - DNA, 456 bp, Zea mays
tggtatagactggtgtaatgaccgcagcgtactgatctgccgtaccggtccggaattcccgggtcgacccacgcgtccgggtacttctggaccatgatccatcccttgggaaaacgtttggccaatcgaatgtgactcctctcataactgcggcgattagaggccacactgaggtggtgaacctactgctggagcgagtttctgggttggttgagttatcaaaagcgaatggaaagaatgccttgcactttgctgcccggcaggggcatgtggaaatcgtgaaggctttgctagatgctgatacccagcttgctcggaggactgataagaaaggccagactgctctacacatggcagtaaaaggtactaacccggaagttgatcaagcgcttgtgaatgccgatccggcaatagtcatgctacctgacagaaatggcaacttagctctgcatggtt

SEQ ID NO: 98905 - DNA, 511 bp, Zea mays
  unsure (1)..(511): unsure at all n locations
ggtagtaagtcgtgnctgtacccgagattattgatctgctctaccggtccggaattcccgggtcgacccacgcgtccggcgatacccggttgaaattcattatacaaaagctccagaggctgattacatagatgcagcaattgtcactgttttacagatacatgttacccaatcccctggcgatatcctggtgtttctcacaggtcaggaggaaattgaaacagttgatgaaatccttaaacacagaacaaggggcttaggcaccaaaatctcagaattaattatatgtcctatttatgcaaatctgcctaccgagcttcaagctaagatatttgagccaacccctgagggtgcccgtaaggtggttctggccactaatatagcagagacttcattaaccatngatggtataaaaatatgtattgatcctggcttttgtaagatcanatcatacaaatccccggacaggaaatggaatctctacttaataatcccaatctaaaaagcttcg

SEQ ID NO: 98906 - DNA, 500 bp, Zea mays
  unsure (1)..(500): unsure at all n locations
tgcgtnctgtaaccgacactacgtattgctcgtaccggtccggaattcccgggtcgacccacgcgtccgcccacgcgtncgcggacgcgtgggtataaactctgataaagctgttatcgtatctgcatgtccccagtcaagagcatcactagctgcattctttggtctttctcagtcacaggttctcagaaaactgacttctttgttcaagtcgattggtgtaaaggctgtttttgacacaagctcgagtcgagatctatctcttattgaagcatgcaatgaatttgtttcacggtatcagagaagccaaccatctagaggccaagaagctggagccaatcttccactgatgtcatctgcatgtccgggttggatatgctatgctgaaaagactcttggttcatacatattaccttacatctcatctgtaagagcccacatcaggcaattggtgcagccattaagcaccatgtgggtgatagacttgggctaaagcccga

SEQ ID NO: 98907 - DNA, 465 bp, Zea mays
  unsure (1)..(465): unsure at all n locations
ngtntaagactggtngtttatacgacaatacgtactgctcgtcccggtccggaattcccgggtcgacccacgcgtccgcctggttgaatgggcacgcccttatctgggagaaagacgcagattctataagcttgtagaccctcgtttggatgggaacttctccataaaaggcgcccagaagacggctcagctggcccatgcctgcctcagccgtgaccccaaggctaggcctctgatgagccaggtggtggaggtgctgaagcctctccagaacctcaaggacatggccagctcttcctactacttccagtccatgcaacatgagcggcgcacagcacttgccaacccatatggcagtcaaagcatgaaagcgcagagcacctttgcgccggacgggcagcagcccatgaggagcctctcgtatggccctcatgcttccccgtattggcagtcgccaaaggcttt

SEQ ID NO: 98908 - DNA, 454 bp, Zea mays
  unsure (1)..(454): unsure at all n locations
ngatttaaggctgttacgacgtatattgatcgctctaccggtccggaattcccgggtcgacccacgcgtccggtaaaatgctcagaagatcagtcacaagtttttgaattgagggtaccggctgctggtcttatcggagtaatttctccaaacactcttggcaagctttattctcttcaagtactgagcctgcggtctaatcgattgaccggaagtcttccagctgatgtggcctcccttccgtctttacgttccatatacctacagcacaatgaactttcaggagggttgccttcttccttcagtcctaacctcagtgtaatagatttctcctacaattccttcacaggagaagtacctgcaagtttacaaaacctcactcaggtaaccgttcttaatttgcaagataactctttctctggatccatccctgacctcaagcttcacaagtnct

SEQ ID NO: 98909 - DNA, 460 bp, Zea mays
  unsure (1)..(460): unsure at all n locations
ggtcttgagcggntgctgctgccacgcacatgattgtactgctcgtaccggtccggaattcccgggtcgacccacgcgtccgcttacggtcttctcttctccactaccacccgcccgcccgccttctcctccaccactgcgccgtcgtggaataggggcaagttcaggcatctcgcttctgtcctggtcgaggggatcggagaagaatgggctcggaagcggactgcgacaggatcaggggcccgtggagccccgaggaggacgacgcgctgcggcggctcgtggagcggcacggcgcgcgcaactggacggcgatcgggcgcgagatcccggagcggtcgggcaagtcgtgccgcctgcggtggtgcaaccagctgtcgccgcaagtggagcgccggcccttcacggcggaagaggacgcggccatcgtccgcgcccacgcgcgccttggcaaccgggc

SEQ ID NO: 98910 - DNA, 460 bp, Zea mays
gtttagagcgtgttatacagacatacgtactgactgctcgtctggtctcggaattcccgggtcgacccacgcgtccgcccacgcgtccgcggacgcgtgggccagattaggaagatgaagggtttgaagcagaagaaggctcacctgatggagattcaggtcaatggtggtaccattgctgacaaggtggactacggctataaattttttgagaaagaggtccctgttgatgctgtcttccagaaggatgagatgattgacatcattggtgtgaccaaaggtaaaggttatgagggtgtggtcactcgttggggtgtcacccgcctttcccgcaaaacccacaggggtctccgcaaggttgcttggatcggtgcatggcatccggctagggtctcgtatacggttgcccgtgctggtcaaaatgggtaccaccaccgtactgagatgaacaagaaggggg

SEQ ID NO: 98911 - DNA, 505 bp, Zea mays
  unsure (1)..(505): unsure at all n locations
gacgtgactgtccacgacgtatactgtattgctcgtaccggtccggaattcccgggtcgacccacgcgtccgcccacgcgtccgagactgaacagcagtccgagacgccatgaacgtggaggaggaggtcgggaggctcaaggaggagatccataggctcggccagcagcagcccgatggctcttacaaggtcaagtttggcgtcctcttcaacgacgaccggtgtgcaaatatctttgaagcactagttggcaccttgagggccgccaagaagaggaagatcttgacctacgaaggcgagctgcttctgcaaggtgtccatgacaacgtggagataaccctgttgcccccacctgcagttgctgccgcttgaaacgaagagcaccaccaagttctcgattccatacaactcggatgcttgtattctgccgtgcctatattagattctctcgaaccatttgggtgtccttgaaaactgctatcgggtgatatatgaaaatggggn

SEQ ID NO: 98912 - DNA, 452 bp, Zea mays
  unsure (1)..(452): unsure at all n locations
ngttttagtggtgtctagaaattatgtatgctcgtccggtcttgaattcccgggtcgacccacgcgtccgagaaactcgccatattcacagcccttgcattttctcagaagctatcagggcttcctcctgagactgtgttccagccattgctcaaggataatcttgttgccaaagggatagtactttcattcattactgagtttttcaaggagtaccttgaggaaaacagcttggatgatttgattgcacttttgaagaaaggcaaaatggaggacaatctgttggacttcttcccatcagctaagagatcttctgaggctttatctgagcatttcaccaaagaaggtctgactagccttgttgagtacaacgaanagaagatgtttgaggttaaacttaaggagataaagtcaacactgactgctatgataaatgatgaggctgcaattta

SEQ ID NO: 98913 - DNA, 461 bp, Zea mays
  unsure (1)..(461): unsure at all n locations
gtnaagactggtgtcatgacagcnatgtattgatcgtactggtctggaattcccgggtcgacccacgcgtccggcgccatcgaccgcgaggccgtgttcacgtacgcggaggacgcggccagcgccagcctgccggtgatgcagaagctgcgcgccgtgctggtggaccacgccctcagcagcggcgacgcggagcgggagccctccgtgttctccaagatcaccaggttcgaggaggagcttcgcgcggtgctgccccaggaggtggaggccgcccgcgtggcggtcgccgagggcaccgnccccgtggcgaaccggatcgcggacagccggtcgttcccgctgtaccgcttcgtgcgccaggagctcggctgcgtgttcctgaccggcgagaggctcaagtcccccggggaggagtgccacagggtgttcgtcnggattagcccaggccaggcttgtgt

SEQ ID NO: 98914 - DNA, 542 bp, Zea mays
cgttcgtggtgctgatttcagcgtctcgtccgcatctgacgtaccggtctcggaattcccgggtcgacccacgcgtccggttgccacgatatggtcttgaagttggtctgaccaactatgcagctgcctactgcactggccttctgttggctcgccgtgtgctcaagacccgtggtttagataaggaatatgagggcaatgttgaggccactggtgaggatttctctgttgagccagctgatgagaggaggcctttccgtgctctcttggatgttggccttattaggactacaactgggaaccgtgtctttggtgccctcaagggagctttggatggtggcctggatattcctcacagcgagaagaggtttgctggtttcaagaaggatgacaagcagctggatgctgatatccatcgcaagtacatctatggtggccatgttgctgactacatgaggaacctcgctgaagaggagccagagaagtaccagtctcacttcagtgagtacattaagaaggggaatgaagctgatgacatggaa

SEQ ID NO: 98915 - DNA, 499 bp, Zea mays
ggttgatagagctgggtgctatgatagatgatgactgcactgccgtaccggtccggaattcccgggtcgacccacgcgtccgggcttttgaggcatatgctagtgctgcaatgcagattgatgagctctctgcattctattcatggtgtaaagatactggagttgcaaggtcatctgagtacccaaaggtgcaagcggtcactgataagctgctggagacgctagaagagttcatgagggaccgggcaaagaggcctaagaacccaccacgggagcctgaacctgagcctggtaaagaagaacctgagccggatattaaccagctcaaagcgcttacaggaccagaagattataaggagcctgaacctgtttaagtcgaagaagaggtgaagcccgaaccaaccccacagtcacaaggggacttggtggatcttagagaagatactgttagtgcacattaaccaggtgaaaagctttgctatatgacttttttaaaggg

SEQ ID NO: 98916 - DNA, 535 bp, Zea mays
  unsure (1)..(535): unsure at all n locations
gcggncttgtncctgtcagctactcgtngcgactgtcggtaccggtccggaattcccgggtcgacccacgcgtccgcccacgcgtccgcccacgcgtccgtccacgcgtccgcggacgcgtgggcaacaattatggtcactaaggtggatgaaccatcaaaatacggtgttgtggttatggaggaggcaactggcagggtggaaaggtttgttgagaagccaaaaatatttgtgggtaacaagatcaatgctgggatttacttactgaacccatctgtccttgaccgcattgagctgaagccaacatcaattgagaaagaggtcttccctcaaattgcagctgatcaacagctctatgcaatggtccttccaggtttttggatggatgttggtcagcctagggactacattactggcttgcgtctttatctagactcgattaggaagaaatcagctgccaagctagctactggagcacatgttgttgggcatgtgctggtgcatgagagcgccaaaattggagaaggtgtctgat

SEQ ID NO: 98917 - DNA, 537 bp, Zea mays
  unsure (1)..(537): unsure at all n locations
cgtnatgcgttggntaattccagctctcatcggatctgacgtaccggtctcggaattcccgggtcgacccacgcgtccgtttggacatttgttattcaattcttatcgttctgacttgcacgtttacatctgtaggctatgcttttgtctactttgaggatgaacgtgatggcaatgatgccatacgggctcttgatggttatccatttggccctggcagacgcaggctttcagtagagtggtcacggggtgatcaagctggtagacgtgatggcaacaaaccagaagcaaatactaagccaacaaggacactgtttgtcattaactttgatccaatgaacacaagagtcagtgacatcgaaaggcacttcacaccatttgggaacatatcaagtgctcggataaggaagactttgcttttgttcaagttggaactatggaagaagccggaaggctctttgaacttactatgctancaacccttttgacaaggtggattctggtgagtaccccttagggagaatagtaaatgagtga

SEQ ID NO: 98918 - DNA, 540 bp, Zea mays
  unsure (1)..(540): unsure at all n locations
ggtacgctggtgctctgtcatgctgcgatacgacctgacgtaccggtctcggaattcccgggtcgacccacgcgtccgcccacgcgtccgcccacgcgtccgcccactcgttcgaccacgcgtacgcccacgcgtgcgctcttattcacctcactaacaccagctagcaactctttctctactgcaataatggccgctcgctcctcctactcccagccgcagctggtcgcggcggcggcggtcctggcagcggcgctgctgctgctggcggcggcggccgggacggcgtcggcggcggtgagctgccgcgaggtgacgtcgtcggtggcgccgtgcctcgggtacgcgatgggcagcgcggcgtcgccctccgcggcgtgctgcagcgaggtgcgctcgctcaacagacgcgcgtcgtcagcggccgaccggcaagccacctggaactgtctcaagagcatgacggggcggctcggnggcgggctaggaatgcccaacgcctcaaaaatccccgcaaagggcgcattttcataagcgtcc

SEQ ID NO: 98919 - DNA, 540 bp, Zea mays
  unsure (1)..(540): unsure at all n locations
cttaatgggtcgctgacttttcggtaagtanagtactgatgtaccggttcggaattcccggctcgacccacgcgtccgccgacgcgtccgtcttgatccagttctgtcagggatcgccatgtcggactcggaggaggaccacttcgaatcgaaggccgactccggagcgtccaagacctacccgcagcaggctggcaccgtccgtaagaacggcttcatcgtcatcaagaaccggccctgcaaggttgtggaggtttctacctcaaagactggtaagcatggccatgccaaatgccactttgttgccatagacatattcaacgggaaaaagctcgaagatattgttccttcgtcacacaactgtgatattccgcatgtgaaccgtactgagtaccagctgattgatatatcagaggatggatttgtgagccttcttacttcagatggcaacactaaggatgatcttagactcccaactgatgagactcttgtggcccagatcaaggaagggttcgaaagcggcaaggatcttgttgtgcn

SEQ ID NO: 98920 - DNA, 539 bp, Zea mays
  unsure (1)..(539): unsure at all n locations
gtntagctggntggctcctgcccagcactcatcgacctgtctgtaccggtctcggaattcccgggtcgacccacgcgtccgcccacgcgtgcgctcacgagcgattgctttagccgaagtaagacgcgatggggcactacaacgtgtggaactcgtacccgaagaactacgggcccggatcccgcgtctgccgggtctgtgcgaaccctaatggactgatcatgaagtactggctgatgtgctgcaggcagtgcttccgcagcatcgcctaggacattggcttcatcaagtaccggtgaagtcagctgggctggctatctgaatgccatctcttggacagtgtaccacaggcgatgccacagttataattactgtcatttagatgctcccttcagaactctgctattgaagtccgtcatgttcgtgatggataactgaagctctgattgttatactgatgatgagttacctgtgctttggctaaaaaaaaaaaaagnncatataaaagaaaggttttgaaaaataaagaaaaggggcga

SEQ ID NO: 98921 - DNA, 498 bp, Zea mays
  unsure (1)..(498): unsure at all n locations
agtgggnntgttacgacgagatggatggcctgacgtaccggtccggaattcccgggtcgacccacgcgtccgcgccgacctcttacacgcgcacttctacttgtcctgcccctacctgaagttcgcccacttcaccgcgaaccaggccatcctcgaggccttcgccggctgccgccgcgtccacgtcgtcgacttcggcatcaaacaggggatgcagtggccggctattctccaggccctcgcccttcgccctggcggccccccgtcgttccggctcaccggcgtcgggccgccgcagtccgaccagaccgacgccttgcagcaggtgggctggaaacttgcccagatcgcgcacaccattcgcgtggactttcagtaccgtggtctcgtcgcgggcacgctcggcgacctggagccgttcatgcttgcaccggacggcgatgacaccgatgactagcccgaggtgatcgcccggaacttcgggtttgagctgcaccg

SEQ ID NO: 98922 - DNA, 516 bp, Zea mays
  unsure (1)..(516): unsure at all n locations
cagcgtgnttgtgttaagctatctatagtactgctctaccggtccggaattcccgggtcgacccacgccatgcgtgcaggaagatccgtgaggccaggggtgattgttactcggggtttacctgtgcctgctagcagccggtaccttgtgcgtatgcacttatgtgacattgctagcaaggctctgtatgagctctacttcaatatctacgtcaatggtgatcttgcagtctaggatttcgatctctccagtgcaactggattcttggcctatccttattacattgactttatcgtcgatgtgaaggatgaggggatactgaaattggcgattggtggcttaaaagaagagtcgatctgatgaactaaagtggtatgcttaaatggcactggagataatgaggattaaccaagaccaatngaagtattgaattgagactttccaatttgatctacacattggaatatgttggtcagtaaaggggaatgggaaaattgggccggttccctgctcttg

SEQ ID NO: 98923 - DNA, 507 bp, Zea mays
  unsure (1)..(507): unsure at all n locations
ggtaggtgagcgggntntngctgccgatcctcgtagcgactgcacgtaccggtccggaattcccgggtcgacccacgcgtccgcccacgcgtccgcccacgcgtccgctttttctccactccgattttgcttggttccatcgggccggagagggagaagctagctagctagcagcagctctgttggtgtgtgtgtgtgtgtgtgtgtggagggtagctgaagctggtgctcgctggaatggtcaggagccatggtgaggggccgggtggagctgatgcggttcgagaacaacatctaccgccaggttaccttacacaagcgccagaacgggctgctcatgaaggcgtacgagctctccgtgctatgcgacgccgcagtcgcgctcatcgacttgtacaaccgcggctagctatacgacatctgtagcggaccgtgcatcacgagaacacttgttaggtacgatagaacagttattgcatgctccggtactgcttgacagaacataga

SEQ ID NO: 98924 - DNA, 540 bp, Zea mays
  unsure (1)..(540): unsure at all n locations
tggattggtgctcatgcagcgactcatcgattgacgtaccggtctcggaattcccgggtcgacccacgcgttcgacgaagcctaaggaagctgagaaaccatcagattatagaggaggctccaaagcctaagccaaagaatccccttgatttgcttcctccgagcaagttgattcttgacgattggaagaggctgtattctaacacgaaaaccaacttccgtgaggttgctattaaaggtttctgggacatgtatgacccatagggctactccctgtggttctgtgactacaagtacaatgacgagaacacagtgtcgtttgtgactatgaacaaggttggtggcttcctgcagcggatggatctgtgccgcaaatacgcctttggcaagatgcttgcggttggctctgagccccctttcaaggtcaaggggctctggctcttccgtggccccgaaatccccaagtttgtcatggatgaggtctatgacatggagctctatgagtggaccaaggtcgacctatctgatgaggcccaaaan

SEQ ID NO: 98925 - DNA, 528 bp, Zea mays
  unsure (1)..(528): unsure at all n locations
cggctgggtatgtcagctgtcatccgatctgacgtaccggttcggaattcccgggtcgacccacgcgttcgcccacgcgttcgcccacgcgtccgggcttctcctccccctccggttcgggttcgggttcgtgaggttctccggggttcggtttcgtgggtgagcggatcgagatggcggcgtcagatgttgagtaccgctgcttcgtcggcggcctcgcctgggccacggacgaccactccctacacaacgccttcagcacctacggcgaggtcctcgagtccaagatcatcctcgatcgggagacgcagaggtcccgcggcttcggcttcgtcaccttctccacggaggaggcgatgcggaacgccatcgagggcatgaacggcaaggagctggacggccgcaacatcaccgtcaacgaggcccaatcccgcngcggccgttgaagctgctgcngcagccggtaccgtggttggccgtgaagctgcggtaaccgcggtggaggccccctgatgcnggcgcagctac

SEQ ID NO: 98926 - DNA, 536 bp, Zea mays
  unsure (1)..(536): unsure at all n locations
gctgggtcgctaactgctagccnctcgatcgtactgcctgtaccggtctcggaattcccgggtcgacccacgcgtccggttcacttctccaggttaggaaagggtttgtactcatggcgccgacgcagccaaagtcgggcctcttcgttggcatcaacaagggtcatgtcgtcaccaagcgcgagctgcctccccgcccgtgccaccgcaaggggaaatcaacgaagagggtgtctatggtcaggggcctgatcagagaggttgctgggtttgctccttatgagaagcgtatcactgagcttctgaaggttggcaaggacaagcgtgccctgaagcttgctcagagaaagcttggaactcacaagagggcatagaagaagagagaggagatggcggacgtcctaagaagatgaagtcgactgttacgcacactggcacgtagaaatagagagcatttcaagttcatggagcctggcagagattatgttccaatgtctggattttcatacatgtagaaccttatttacatgtaaaag

SEQ ID NO: 98927 - DNA, 544 bp, Zea mays
  unsure (1)..(544): unsure at all n locations
tgtgcggnntngctaactgtcaagccgtctcgatcggacctgccggtaccggtctcggaattcccgggtcgacccacgcgtccgggggactacaaactagatgccacagtgactatagcttcaggggatgatatttatctgggtgacctcgtgtatgagccgtcaagagactggccgacgatgtgggagattggagtacctgatcgatctgctgctgagttttatgttccggatcctaaccccaactacgtcaatagattgtacgtcaaccaccctgcagatagatttagacagtatgggctctgggaacgatacgcggaactataccctgacagtgacctggtatacacagttggccaaagtgactatagcacggattggttctatgctcaagttaacaggaaaattgatgacaacacttaccagtcaacaacatggtaaatcaagttcgatcttgacagtgtcagcccaagcagcacctacaagttcatggtggctctggcgtcttctgcgctcgctgagttgcagatttccgtcaacgacc

SEQ ID NO: 98928 - DNA, 533 bp, Zea mays
  unsure (1)..(533): unsure at all n locations
cgtgggncnncacctgtcagctagcagtagcaccgccgtaccggtctcggaattcccgggtcgacccacgcgtccgcccacgcgtccggttggcttctcctccctctccggttcgggttcgggttcgtgaggttctccggggttcggtttcgtgggtgagcggatcgagatggcggcgtcggatgttgagtaccgctgcttcgtcggcggcctcgcctgggccacggacgaccactccctccacaacgccttcagcacctacggcgaggtcctcgagtccaagatcatcctcgatcgggagacgcagaggtcccgcggcttcggcttcgtcaccttctccacggaggaggcgatgcggaacgccatcgaaggcatgaacggcaaggagctggacggtcgcaacatcaccgtcaacgaggcccagtcccgcggcggccgtggaagctgcggcngccgccggtacggtggtggccgtggaggctgcggctaccgccgtggctggcgccgtgatggctgcngcggctacggcngtg

SEQ ID NO: 98929 - DNA, 532 bp, Zea mays
cggtgggctctgcagctgtcatcgatctgacgtaccggtctcggaattcccgggtcgacccacgcgttcgcccatgcgtacgtttatccatatccctgctgtttcagatcctcatggatccagtcaagccagggatcgatcatgatgactcggacgagcaccgcttcgaatctaaggcctacgccagagctgttaagagctatccgtagcagggctgtcacacgggcagaagaacagctgcatcgtcatcaagaaccgcccctgcaaaggtgtgcaggtttatacctgaaatactggatagcatggccatgccaaatgccactttgatgcatagacatgttcaacaggaaaaagctagcagatatcggtacttggtcacacaactgcgatatttcgcatgtgaaccgaactgagttccagctgattgatatatcacaggatggatttgggagacgtttttactcaaatggcaacactaatgatgatcttagactcccaactgatgagactctcgtggcccacatcaatgatg

SEQ ID NO: 98930 - DNA, 539 bp, Zea mays
  unsure (1)..(539): unsure at all n locations
tgtgcgntcgccctgtcagcgatcnatagtacctgtctgtaccggtctcggaattcccgggtcgacccacgcgtccgcccacgcgtccgggaggagttcgcggagtgttgacaagaaggtgaaggagcggatcgacgcccgcaaccagctggagacgtacgtgtacaacatgaagaacacggtgggcgacaaggacaagctcgcggacaagctggaagcggaggagaaggagaaggtggaggacgccctcaaggacgcgctggagtggatggactacaactagtcgggccataaagaggacttctaggagaagctcaaggaagtggacgtcatgttcaaccccatcttgtacggcgtgtaccaaaatgtccgtccgctgccctgtcggtgacccttaccgttgtggttcagacgaccaccacgagctgtagattgttgtagattgacgattgccgtggagaccatgaataacggcagactagacttgttttgtaaccatggtttacggagggcaatcttattcccaatatgggtgtgtg

SEQ ID NO: 98931 - DNA, 622 bp, Zea mays
  unsure (1)..(622): unsure at all n locations
cgtggtnttngtcctgccagccnctcgatcgnacctgccggtactcggtctcggaattctccgggntcgactccacgtctgtctcgtatcatttcatgactccaactccagtcaagttgtttcgtaccatcgactatgtctatgcgaagggatggacgagtatggttcgtacgctggagaattgactctgcaagccgattgatcaagtgcagtctacatgcgtttgggcgactcctgatctagctcgcggacatgcagatcggcaaagtggcttcaggtccccagataatggcgctggcanagtgacaagtcgccgtcaaatgtcgtctggtggcaaaggtcaaagcaggaaggtcttctctgagggcttgcagaaccgtggaaatcgggnggagggtggaacctggaagctggaagtaggatacccactcaagtcagtagaagtttaaaatccaacctgtagggctaatatgtgattgcatgttatcatggtgttgcgacacaaagtccctgatgcctcttgatcatctttcaagtttgtcaagggttgccttgcagtgtttgtaagactaatcttttgcggnntgtaagcatccagtgtcaggatcccccggtcacccgg

SEQ ID NO: 98932 - DNA, 501 bp, Zea mays
  unsure (1)..(501): unsure at all n locations
gtggtgttgtngctgaggacctcgtacgaccgccgtaccggtccggaattcccgggtcgacccacgcgtccgcccacgcgtccgcccacgcgtccgcccacgcgtccgcccacgcgtccggaatccttctgtgaagatcgtcgccgtcaagaagatggagctgccgacttgcaagcaggccgacggcgagcgcgagttccgggtggagatcgacatcctgagcaggctagaccaccccaacctggtcacgctcatcggctactgcgccgacggcaagcaccggttcgtggtgtacgagtacatgcccaggggcaacctccaggacatcctcaacggcattggggaggtgaggatggactggccgctgcgcctgcggatcgcgctgggagcggcgcgggcgctggcctacctgcactccagcacggccgtcggcgtccccgtcgtccacagggacttcaagtccagcaacatccttctcaccgaccactacgaggcaaagan

SEQ ID NO: 98933 - DNA, 509 bp, Zea mays
  unsure (1)..(509): unsure at all n locations
gggtgtgaggctgtgctgtgtcagccgtactcgntacacctgccgtaccggtccggaattcccgggtcgacccacgcgtccggacaatctgtctatgtgtatggatgcaaggattctgtccttcaagtaaacggcaaggttaacaatatcactgttgacaaatgcactaagtttggaattgtattcaaggatgttgtagcagcttttgagattgtcaactgcaatggcgttgaagtccaatgtcagggtacgtcaccgacaatatcaatcgacaacacatctggatgtcaattatacttaagcaaagattcgctgggagcttcaattacttctgccaaatctagcgaaatcaatgtgatgggtccaagtggtggcgctgatggtgattgggtggagcatgcattgcctcaacagtacatncatagtttcaaggatggggcagtcaccacttcaccagtttcacacttangagcgtgaatacaattgttactgctgttgtttttgaggtt

SEQ ID NO: 98934 - DNA, 535 bp, Zea mays
  unsure (1)..(535): unsure at all n locations
gtagcggnntnnctcctgtacgacactcatcgcacctgccgtaccggtctcggaattcccgggtcgacccacgcgtccgcacaaaaggatcaaggatgaaattgagcttggcaatggcctgccagatatcagaagcactcggcaatgtctccaggcagtaaaagacgccgggtttgaggttgtttgggataaggatcttgctgaagattctcccttgccttggtacttgcccttggatccaagccgattctccctgagtagcttccgtttgacctctgtgggacgcatgattacccgcacaatggtcaaggccctggagtacgttggtcttgctccgcagggcagtgagagggtctctaatttcctggagaaggctgcagaagggctggtagagggcggaaagaaggagatcttcacgccaatgtacttctttcttgttcggaagcctcttctggaatgagctcttggatcaccttttcagagagagaaggcaagtggtcatttcgaagaagccgaagagagggaacctggaatc

SEQ ID NO: 98935 - DNA, 536 bp, Zea mays
ggtaagggtgctcttcagctctctatgtacctgccgtaccggtccggaattcccgggtcgacccacgcgtccgcccacgcgtccgatcgtcctcgcgctcagtggcatttgcagttcccggcagcagccatggcgtctgtgcagctgtctgggccgcgggtggtggcggctgcgaaaccggctgcgttgggcgggctcctactgacgccgtcccttgcggtgccaaaggggcggagaaccagggggctcgtggtgagggccgtcacggtcgtgtcacctaagtatacatccataaaaccattgggagacagagtacttgtgaagatcaagacctctgaagctaaatctgatggagggattttacttccagtatcaattcagacaagaccacaaggaggggaaattgttgcggttggagaagggagaagttttggaagtaaccgcattgagatcaaggtttcgggttggtgcacaagttgtctactcggaatatgcatgcacatgaattgaaattcaatgacgccgaccatctcatt

SEQ ID NO: 98936 - DNA, 540 bp, Zea mays
  unsure (1)..(540): unsure at all n locations
cgtttagtactgtgctgttcagtctgatgatcgactcgacgtaccggtctcggaattcccgggtcgacccacgcgtccgaagttactgggagagctagagccaacatttactgtgttgctgcaatgatcgagtttagatttcgtttgggaactggccctgataagggaggaggcatcattcctggagtcgcggatggcaaggctctactgttgaactacaacgacctgtccgggcaacttcctgcagatcttggcttctccaaactgagcttactcgccctggccaacaacaggctaacaggcccaatcccgtcatcagtagcgcaactgaaagactcccttctcgaggttctcctactgaacaaccagctctccggctgtctcgcccccgagctcggcatgctcgccaaggcggcggtcattgacgccggcatgaaccagctcaccggcccgatcccgtcgtccttctcctgcctcatcagcgtcgagcagctgaacctgtgccgaaaccgtctctacngccacgtacccgacgcgctc

SEQ ID NO: 98937 - DNA, 536 bp, Zea mays
ggggagccgggtcattacgactgtcatacgactgacgtaccggtccggaattcccgggtcgacccacgcgtccgcccacgcgtccggactgcggcagcggagtgcatagagcggacgcaacgcaacaccgtccactctctgtcactgacgatcgaagtgaggagcgcactgaagccagccgccgatgagtcgcctcctctcgcggcagcaccttgccgccgtccgtcgatctgcaccctttgcgtgcgtgtccaggtggctgcacacgccgtcattcgcgacggtttctccgcaagaggtttcaggttccagcccagcggaagtgcagaattttgtgcagggcagctggacagcatctgctaactggaactggatagtcgatcccctgaacggtgataaattcatcaaagttgctgaggttcagggaacagaaataaagccattcgtggagagtttatctaaatgcccaaagcatggacttcacaacccacttaaagctccagagaggtacctcatgtatggagatatatctgcca

SEQ ID NO: 98938 - DNA, 538 bp, Zea mays
  unsure (1)..(538): unsure at all n locations
gaatagttgtnctnaaatcgcacgagactcatcgtactgatgtaccggtctcggaattcccgggtcgacccacgcgtccgcccacgcgttcgggcgcagagaatccccttgcaaacaaacagggtagagggagaggagaggagaggagaggagaggttgggtctgggacaccatggctccgatgaagctgtacggtgcggtgatgtcgtggaacgtgactaggtgcgcaacggcgctggaggaggctggctccgactacgagatcgtgcccatcaacttcgccaccgtcgagcacaagagccccgagcacctcgttcgcaacccgtttggtcaggttccagctctgcaagatggtgacttgtacctcttcgaatcacgagcaatctgcaagtacgctgctcgcaaaaacaagccagagctgttgaaggaaggaaacctcgaggaggcagcaatggtggatgtttggatcgaggtggaggctaaccagtacaccgctgcactgaatcccatcctcttccaagtcctcaataatcctata

SEQ ID NO: 98939 - DNA, 542 bp, Zea mays
  unsure (1)..(542): unsure at all n locations
gagagtggtnctgatgcctgaatgtnatcgatngtacgttctgtaccggttcggaattcccggctcgacccactcgtccgcccacgcgtccgggctctcagaatccgctttcaaacaaacagggtagagggagaggagaggagaggagaggagaggttgggtctgggacaccatggctccgatgaagctgttcggggcggtgatgtcgtggaacgtgactaggtgcgcatcggcgctggaggaggctggctccgactacgagatcgtgcccatcaacttcgccaccgtcgatcacaagagccccgagcacctagttcgcaacccgtttggtcaggttccagctctgcaggatggtgacttgtacctcttcgaatcacgagcgatctgcaagtacgctgctcgcaaaaacaagccagagctgctgatggaaggaaacctcgaggaagcagcaatggtagattgctggatcgacgtgtaggctaaccagttcaccgttgcactgaaatccatccttttgcaggtccttattagctctatgcttg

SEQ ID NO: 98940 - DNA, 504 bp, Zea mays
  unsure (1)..(504): unsure at all n locations
gcgtngtgtctacgagatcatgatngcccctacgtaccggtccggaattcccgggtcgacccacgcgtccgagcaagctcagctgcacgcactgcacctaccgggccagccgccagccgccggccagcatggaggcggtggtagagtgcgccaagtgcgagtgctgcggcctggtggaggactgcacccgggactacatcctgggcgtgcgcgcggccttcggcgggcggtggctctgcggcctctgctccgaggcggtgcgggacgaggcggtcaggggcacgacggcgagaggccccgccgacgacgccgcggggctggaggacgcgctccgggaccacatggccttctgcggcaagtgcaggctgagccccgcgttccgggtcgccgacggcatgcgccagatgctgcgcacgtgcttcaagtgactgctggcgccggccgcgttagcgtccgcgtctgcgttgcacgggcaaaaatcggcagtgcgacccacccgcgtcg

SEQ ID NO: 98941 - DNA, 539 bp, Zea mays
  unsure (1)..(539): unsure at all n locations
gcggtctcgctgctgcccagcnctcgatcgaccgccgtaccggtctcggaattcccgggtcgacccacgcgtccgcccacgcgtccgcaaggactcgcgacggtttgagcaacggaggaagcaactacgcggcagccatggtgaacgtttcgaagaccaagaagacctactgtgagaacaaggaatgcacgaagcacacattgtacaaggatacccagtacaagaaaggtgaggatagcctttcagctcaagggaagcgacgttatgaccggacacagcttggatatggtggtcagacatagactgttgtctacactactgctgagacttccatgaagattgtgctgaagctgcactgccagagctgcttgcactactcgtaacgccagatcaagaagcgcaagcactatgagatcggtggctacatgataggcgtgggatacgtgttgcaataactgcatcatcaacttgctgaggaacttacgtctctgaaataactgacctttacagacacgctttgcttagcttcagaatatgct

SEQ ID NO: 98942 - DNA, 515 bp, Zea mays
  unsure (1)..(515): unsure at all n locations
tgcggnnnntgatgaaacgaccatatcgtacagaccgctcnnnnctggntcggaattcccgggtcgacccacgcgtccgaaaccgagaagagaccaggccgaaggaatacaatcctgaaaccaagccatgggtgagcaggaggaatttgaggagcatgctgagaaggcaaagaccttgcctgagagcacgagcaatgagaacaagctgatcctctacgggctctacaagcaagccacggttggagatgtgaataccgatcgtgcgggcatattctaccaaatggacagggccaagtgggatgcctggaaggctgttgaaggcaaatcgtacgatgaggcgatgaatgactacatcaccaaggtgaagcagctccaggaggaggctgccgnctcttaaaaggatcttaatagcgttgccgaacagctatttgtcagatgagctttgtgccatttactcattagaagtatatcattcgatccattggggatcctgtaaccatggacctgtttatgta

SEQ ID NO: 98943 - DNA, 516 bp, Zea mays
  unsure (1)..(516): unsure at all n locations
gtggggnnnnnncactgatccccttggatgntcncnncnnnnttgnctggaattcccgggtcgacccacgcgtccggcgccatgaacatcgacggcgacaacggtttcgcctgcctcaccaagatctccggcgcctgctccgcgtccacggtctcgccgctgccccacatgttcgtcgtcaaggacctggctggtggacatgaccaacttctacagccagtacaagagcgtcgagccatggctcaagcgcaaggaccagcccccgcagcaaggcaaggagatcccgcagaccaaggccgaccgggccaagctcgacngcatgtacgagtgcatcctctgcgcctgctgctccacctnctgcccgtcctactggtggaaccccggaggagtaccttgggccggccgngctggttcacgccaacaggtgggatacaggacagccgtgaccaggtcaccaaggagcgcctgggacgccattaacgacgagttcaagctgtacctgttgcacaccattag

SEQ ID NO: 98944 - DNA, 531 bp, Zea mays
  unsure (1)..(531): unsure at all n locations
gaagatggnntagtcctgccggctaagcattgacgtaccggtccggaattcccgggtcgacccacgcgtccggatctagatgctgtaaatttcaagaaattctgccttgttttgaagaaccaatacctatgtctaggtcaaaatgccgaaccacgcgcgaggaacgctatggcgctcctgcttaacagtgagggtatatctgggccacttcccacggccttgggcgccttctccaacttgagttacctcgccctcgccaacaacaagctcaccgggccaatcccaccatcagtcgggcacctgcaccactccctccgcgagattgtcctcctcaacaaccagctcttcggctgcctccccggcgagctagggatgctcagcaaggcggtcgtcatcgacgccggcatgaatcagctcaccggcccaatccctccgctcttttcctgcctcagcagagtcgagcagctcaacctggccgggaaccgcctctatggccatgttcccgacgctctctgcaagctcgcggggccg

SEQ ID NO: 98945 - DNA, 538 bp, Zea mays
  unsure (1)..(538): unsure at all n locations
cgagcgtgctgacctagtncagattcgcattcgaccgccgtaccggtccggaattcccgggtcgacccacgcgtccggggaggactatgtgtacccagctacaagatcccagaatttaatagttgtatcatgtgaaccagtaacaactattaaattctgggatcttgtagctgggaggactatgtgtacccttactcaccataaaaagtctgtccgagctatggcgcttcatccaaaggagaaagcatttgcatcagcatcagcagacaacgtaaagaagtttaaccttcccaaaggcgaatttctgcacaacatgctgtcgcagcagaaaacaataatcaattcaatggctgtaaatgaggatggtgttttggcaactggaggggataatggaagcctgtggttntgggactggaagagtggtcataactttcaacaagatcagactatagtccagcctggatcactggaaagtgaggcatgcatatatgccctctcatatgacgtgaagcgatcaaggcttgtgagctgtgaggcn

SEQ ID NO: 98946 - DNA, 531 bp, Zea mays
  unsure (1)..(531): unsure at all n locations
ggtagtgtgtgnctgtcctgagggtatgcatcggactgccgtaccggtccggaattcccgggtcgacccacgcgtccgcggacgcgtggggccgtgacaccatccttcacatacaagacaagcctgctctgttcagaagcttcttcaaatggctaaagcccggtggcaaagtcctaatcagcgactactgtaagaatcctggaaaaccatcagaagaatttgctgcgtacattaagcagagaggctatgaccttcacgacgtgaaggcttatggacagatgctgaaggatgctggttttcataatgtcatcgcggaagatcgcactgagcagttcttgaatgttctacagagggagctaggtgaagttgaaaagaacaaagacgctttcctggcagacttcacccaggaggactatgacgacattgtgaatggctggaacgcgaagctgaaacggagctctgccggcgagcagaggtgggggttgttcattgccaccaagtgatttggcctggcagcaagagggctcttcg

SEQ ID NO: 98947 - DNA, 534 bp, Zea mays
  unsure (1)..(534): unsure at all n locations
gggagggatgntatccacgagtaaggaggtcatgtaacggcgccggaattcccgggtcgacccacgcgtccgcttcttgttacatgacaactacacttgaggcggggaacggcaagtgttccgtctgcttgagagcaggaagagggacgagctgagccaggagttgctagacaaggcacgagctcgtaaccgcggcggagcgtacagtttcttctgtgaccctgacgctctgggagagaacctgtacacgattataaagttcggccttgttcaatacatgattctcaagacactatgcgctctcttggcgttggtcttggagccttttggagcctatggagatggcgaattcaagtggaattacgggtatccttacattgccgctgtcataaacttcagccagacatgggcgttgtattgccttgtgaagttttacaacgcgacgcatgaaaagctacaggcgataaagccactagccaagttcataagctttaaggccatcgtgtttgccacttggtggcanggagtcggcan

SEQ ID NO: 98948 - DNA, 531 bp, Zea mays
  unsure (1)..(531): unsure at all n locations
gaagtggttaccatgtagaattgatcgctcgtaccggtccggaattcccgggtcgacccacgcgtccgcggacgcgtgggcaatggcagcaacggcgagcacatctccacccgcccgccgccgaccccgtcgcccctccgcttctccaagttcttccaggctaacctgcggatcctggtcactggtggggcgggcttcatcggctcgcacctcgtggacaggctcatggagaacgagaagcacgaggtcattgttgctgataactttttcaccggttcaaaagataacctgaagaagtggatcggacacccaagatttgagctcatccgccatgatgtcactgagccacttcttgtggaggttgaccagatctatcaccttgcttgccctgcttcaccaatcttctacaagcacaatcctgttaagaccatcaagacaaatgttattggtaccctgaacatgctgggacttgcaaagagagttggagctaggatttntgtgacatcaacatctgaagtttatggtgatcca

SEQ ID NO: 98949 - DNA, 537 bp, Zea mays
  unsure (1)..(537): unsure at all n locations
tgggggcgtgctgngcctacnctgaaaagtancgtcntgccgtaccggtccggaattcccgggtcgacccacgcgtccgcccacgcgtccgcggacgcgtgggctgatgatgatgggatcacaaaagcttgcagctgtcctttgcttccactgaaaactcatatcaagggcccggcaccagcctctgaccctgataaagcggacattgttgatgaagccataactttctttcgagccaatgttttcttcaaaaatttccatgtgaaaagctcagcagacaagttattgatctatctgacgttttatatcaatattgccttaaaaagactagacggttgccggacactagctgttgggactaaagcaatcattaatctgggattggagaaagttcctgtacctggggaaccagggtttcctttccctggacttttcactcttccccagtcccaggaggaagcagaattgttgaggaattatttgaagcagataacggaggaaacaagtggaagattgctcaactgtgcatacagagct

SEQ ID NO: 98950 - DNA, 530 bp, Zea mays
  unsure (1)..(530): unsure at all n locations
gtgagcggtgccatgacaganaagtacgtactgccgtaccggtccggaattcccgggtcgacccacgcgtccgcccacgcgtccgaccaagcagaccacaacaagaagaagcgtagtcgtcgccggaaggaaaggcgcggagcaagatgtcgtggcaggcgtacgtcgacgagcacctgatgtgcgagatcgaaggacagcatctcagcgccgccgccatcgtcggtcacgacggcagcgtttgggcgcagtccgagagcttccccgagttaaagcctgaggaggttgctggtatcataaaggactttgatgaacctggtactcttgcaccaactggtcttttcgttggaggtacaaagtacatggtgatccaaggtgaacctggagttgtcatccgaggaaagaagggcactgggggcattactatcaagaaaaccggcatgtccttgattattggtgtctacgacgagccaatgactccagggcaatgcaacatggtggtggaaaggctcggcgattacctgatcgaa

SEQ ID NO: 98951 - DNA, 528 bp, Zea mays
  unsure (1)..(528): unsure at all n locations
agcgggtactccatcagaacgagtacggnactgctcgtaccggtccggaattcccgggtcgacccacgcgtccggccagctactgcacggtgtacaaggcgaagctggcgagcggcggcagcagcatcgagctgcgcctgctgcgggaaggcagctgcaaggacgccgcgtcgtgcgcgcccgttgtgcggcgcatcggccgcgcgcgccacgagaacctggtcccgcttagggccttctaccaggggaggcgcggcgagaagctgctggtgtacgactacttcccgcgcagccggacgctgcaggagctgctgcacggtggcagcgagcccgcggcggggcggccggcgctcacctgggggcggcggcacaagatcgcgctgggcgcggcgcgcgcgctggcgtatctgcacgcgggccagggcgaggcgcacgggaacgtgcgctcgtccatcgtggtggtggacgacctcttcgtgccgcgcctggcagagtacgcggtggaccggctgctggtgcccgcggcgg

SEQ ID NO: 98952 - DNA, 525 bp, Zea mays
  unsure (1)..(525): unsure at all n locations
ggatcggagactgccctagcctcgacgcatctctctaccgctccggaattcccgggtcgacccacgcgtccgcccacgcgtccgcccacgcgtccgcccacgcgtccgcccacgcgtccgcccacgcgtccgcccacgcgtccgcccacgcgtccgcggacgcgtgggatcgtcttcctcccctcacatcctctggcctctggtcctccaccgtcctgctagccagagctgctcttgtacgcgcagctggcctctgtgcatatcaccagcacaccgcgcaggggaaggaaattaacaagagaaaaggcaaggagagcaggcaggcaaggaagctgcagaagccaaggaaggagaaggaggatcatcaatgagcatctcggtgaacgggcagtcgtgcgtgccgccggggttccgcttccaccccacggaggaggagctgctcaactactacctncgcaagaaggtggcctcccaggagatcgacctcgacgtcatccgcgacgtcgacctcaacaagctcgagcc

SEQ ID NO: 98953 - DNA, 536 bp, Zea mays
cgagaggcgtctgtcatcaagaacatagtattgatctaccggtctcggaattcccgggtcgacccacgcgtccgctgacgcgtccggcagtcaccactcccaagccagttccgagtcctacgagcagtcgcacgcacgtgtcaagagacgagacggtcgacatggctcgcacgcaatctggcgtagcggtcgccgtggtggccgcggtgctgctgctggcagctggggcgacaaccgttgatgcctgcatcacctgcgggcaggcgagctgcgacatcgcgccctgcctctgctacacccgctgaacggagtccggccgcttcgggtactgctgtagcggcgtcaggaacctctagagcgccgccagctccgacaccgacaggcgcgccgcctgcaactgccttaagaacgccgccagaggcgtctgaagcctgaacggcagcaacgaacacagcattcactcaagagcgtgggtagcatacactacacgatcatgaccttcaccgactgatgcagtgtgaactaaaatctacacc

SEQ ID NO: 98954 - DNA, 536 bp, Zea mays
gggtaagacggcgtgtataagtagaggtagtattgatctaccggtccggaattcccgggtcgacccacgcgtccggaaaatctcggtgaagttcttcgtggagatcgcattgaaaactctccctatacgtttgaaatgagggagcctcagatgtgtcaagtagtctgcaagatatctgttggggagaaagaagcaaagcttctcaaggagaagattgaagatgaataccgtgttaacatgattcttgacaacctacctttagtcgttcctattcaaagagtggatcaagaaggtgcatatttctatcaacatggattccatgttggggccaaaggaaaatattcagggagcaaagatgaaaaatacttcatccacaaccatctatcttttacggtgaaatatcacagggatgagcaaagggatgtttccaggattgtggcctttgaagtgaaaccatacagcgttaagcatgaatatgaagggcaatggaatgataagaagacccggctgacaacgtgtgaccctcatgctcaacg

SEQ ID NO: 98955 - DNA, 528 bp, Zea mays
tggatggctgtaatagatgactatagttatgctctaccggtccggaattcccgggtcgacccacgcgtccgcccacgcgtccgtgttgtttctcaatatggacagcagatcctagatcttttgctagctgagacacaaccagcgaagatctgttctcaggttggtctgtgcacttttgatggcacccatggtgtcagcgctggaattcggagcgtagtggatgatgaagctgggaaatcaaatggtggtctcaagagtgatccaatgtgcaatgcttgtgagatggctgtggtatggatgcagaaccaacttgcccagaacaagacacaggagctcatcctgaactacattaatcagctttgcgagcgtcttccgagtccgatgggagaatcagccgtggactgtggcagtcttgcgtccatgcctgacattgcgttcaccattggaggcaagaagttcaagctgaaaccagagcagtacattctgaaggttggtgaaggacaggctgcccagtgcatcagcggattc

SEQ ID NO: 98956 - DNA, 535 bp, Zea mays
  unsure (1)..(535): unsure at all n locations
agaatagatgttnntcatgaaagcaatgtattgcactgctcgtaccggtccggaattcccgggtcgacccacgcgtccgcccacgcgtccggtctgcacggatgggccttcaccctcactaactttgcaaagatgtatgcatctaagtttggagttgatgaaactaagatgatggagaggctatggggtgagaacttctttgaccctgccacaaagaagtggaccaccaagaacacaggttctcctacctgcaagagaggatttgttcagttctgctatgagccaatcaagcaaatcatcaagacctgcatgaatgaccagaaggagaaattatggcccatgctgcaaaagctcaatgttaccatgaaggctgatgagaaggagttgattggcaaagctttgatgaagcgtgttatgcaaacgtggcttccagctagcactgctctgcttgagatgatgatattccaccttccttccccagcaaaggctcaaaagtatcgtgtggagaacttgtacgagggaccccttgatgatg

SEQ ID NO: 98957 - DNA, 528 bp, Zea mays
  unsure (1)..(528): unsure at all n locations
agggattgagtgctagtcctcgtactntatagtatcgctctaccggtccggaattcccgggtcgacccacgcgtccgccaacccagctcgctcgtcccagctgatcaggtcgagcacctagtagcgacctgctcgatcatcagtgtagagtgtcggtaggtgtctgtctctcttggtggctggttgcaacggtcatggcgacgtcgtctcgtcgggtgcccttgctgctgctgtgcctgggcgtgctggtgtcctgctccttcgcggcgggcagcttggaccaggagctggacatcacgtggggcgacgggcggggcaaggtccttgacaacgggcggctgctgacgctgtcgctggaccgcacgtncggcttcgggttccagtcccggcacgagtacctgttcggcaagatcgacatgcacctgcggctggtgcccggcaacttcgncggcaccgtgaccgnctactacctgtcgtcgcaaggcggcgcgcacgacgagatcgacttcgagttcctgggcaacgtgn

SEQ ID NO: 98958 - DNA, 524 bp, Zea mays
  unsure (1)..(524): unsure at all n locations
cgtcccgtgtagtgtgnaaggggttcgacngcactgcataccgcttcggaattcccgggtcgacccacgcgtccgcccacgcgtccgcccacgcgtccgcccacgcgtccgcccacgcgtccgcggacgcgtgggttcacacttgatggacatcaaaagggtgtcaattgtgttgactacttcactggtggtgacaggccctatttgattactggttctgatgactccactgcaaaggtctgggattaccagacgaaaagctgtgttcagacacttgaagggcatacacataacatttctgctgtttgtttccatcctgagctccctataatcattactggatccgaagatggtacagttcgtatatggcattcaacaacttacagacttgagaacacactaaactatggccttgagagagtctgggctgttggatacatgaagggatcaagaaagatggtgattggttatgacgagggggccattatgataaaaatgggccgtgaagtacctatagcaagtat

SEQ ID NO: 98959 - DNA, 531 bp, Zea mays
  unsure (1)..(531): unsure at all n locations
gcntagtgtgctgaccatagataaatagtatgctctaccggtccggaattcccgggtcgacccacgcgtccggagatcctgaggaagaaggggcactcctactctgagatcatcaacgagagcgtgattgagtcggtggactcgctgaacccgttcatgcacgcccgtggggtcgccttcatggtggacaactgctccacaacggctcgcctgggatccaggaagtgggcgcctcgcttcgactacatcctgacgcagcaggcctttgtggcggtggacaaggacgccccgatcaaccaggacctcatcagcaacttcttgtcggaccctgtccatggtgccattgaagtctgcgccgagctgaagcccaccgtcgacatctctgtgcctgccaacgccgactttgtgcgcccggagctccggcagtcttcctagattgaagcaatgagcggagagggagagggagagagaaagagaggatttcgtgtcccgagttagaacagagtgctgtatgttttgtgcgactgtttt

SEQ ID NO: 98960 - DNA, 534 bp, Zea mays
  unsure (1)..(534): unsure at all n locations
tgtatagcggttnctccattagcacatatgatgcactgctcgtaccggtccggaattcccgggtcgacccacgcgtccgcccacgcgtccgcgtttgcaaacattaggatcgtgaacaagtttttgaacggagaagttggacccaagaccattcatgttcctactggggagaagctttctgtttttgatgcggccatgagatacaaatctgagggccatgctactataatcctcgctggtgctgagtatggaagcggcagttctcgtgattgggctgctaagggtccgatgctcctgggagttaaagctgtaattgccaagagctttgagcgtatccacagaagcaacttggtggggatgggaatcattcctctgtgcttcaaagctggtgaggatgctgattcgcttggcctcactggacatgagcggtacagcatcgatctccctaccaacctcagtgagatccgtcccggccaggatgtgactgttactaccgacaatgggaaatctttcacttgcatcgttcgctttgan

SEQ ID NO: 98961 - DNA, 530 bp, Zea mays
  unsure (1)..(530): unsure at all n locations
tggggnagggtgctgacattagaaatgggaagtatctctctaccgctccggaattcccgggtcgacccacgcgtccgcccacgcgtccgggccccctcctcggcgagacgtctactttctcgaggcgtacagtgaccgctcacctctcgggcgtgcctagctcgtcatcggtctccaatgccacgttcgtgctactactccaatcgttgctgacccgtgtgatctccactgacttccgcaaggagtgcgggcaccttcggtcccatccgatgttaaggcttacctcgcttatggtgttccacagagtgacatgaaactgtaatcacttatgcaaaagttgctagaccagcggcagagcatgaacatatggcgctttgtacatacaatgaatactgttgggaccatgcttcgtcgccgaaggtcctgcaaaaagaaacagcttcggctgaaggtgcttgaacatgctgccgaagacacagttcacgaagcttcggaactacaacatatccaaagacgaagggttgaaccga

SEQ ID NO: 98962 - DNA, 536 bp, Zea mays
aggttagcggttgctcgtgatgtgggaaggaggagagagtgcataccgcgtccggaattcccgggtcgacccacgcgtccgcattattgccgtctcccttttgcgtgagcaaagaaagagagcgagaagagcagtcgccatgtctggcatcatccacatgatcgaggagaagctccacatggggggcgaccacaagaaggaggatgagcaccacaagaaggccgaggagcaccacaagaaggaggagggggagcaccacaagaaggacggcggggagcataaggaaggcatcgtggagaagatcaaggacaagatcaccggcgagcacggcgacaagtccggcgaccacaaggaaaagaaggacaaaaaaaaaaaaaaagggcggccgctctagaggatccaagcttacgtacgcgtgcatgcgacgtcatagctcttctatagtgtcacctaaattcaattcactggccgtcgttttacaacgtcgtgactgggaaaaccctggcgttacccaacttaatcgccttgcagcacat

SEQ ID NO: 98963 - DNA, 535 bp, Zea mays
  unsure (1)..(535): unsure at all n locations
ngagatgtnctagtcatatccgaacatagtattgcatctaccggtccggaattcccgggtcgacccacgcgtccgcggacgcgtgggagcctccaaaacctcgcaacaaccccgtgacacccacacccatccgcgctgcccctcctcgcgctccccaccaaccccgacgagcggcgatgaccggcacggtgtccaagctggcggcgccccggcctgcggcgccaccgctccggccggcgtccctccgcgccgccgcaatcgccttcgccccctccccgcgccgggtccgcgtctccgtcgccgggcgggccaggatcccctccgtcattgcgatggcttctgccaaggaaggaaatggtgcaccgaccaagaaaacctcgcttcacgatctctacgagctccagggcctctccccgtggtatgacaacctctgccgacctgtcaccgacttgcttgcccttatcggcagcggtgttcgtggagtcaccagcaaccctacaattttccagaaggccatctcatcctccagcgcata

SEQ ID NO: 98964 - DNA, 530 bp, Zea mays
  unsure (1)..(530): unsure at all n locations
agtggctgtcactacgaatatagtattgctctaccggtctcggaattcccgggtcgacccacgcgtccgctctcatcggcacacccgagctcgcgccctccttccacgtcgaggtccgagtcctgctgtgatggcgaccgacgtgactgagactcccgcgccgttggtggatgcggccccagaggcgcccgccgacgccccggcggcgcctgctgccgacgcgaagccggccaaggccaagaaggccaccgcgccgaagaagcgcgccagcccgacccacccgccgtacgccgagatggtctcggaggcgatcacgtcgctcaaggagaggacggggtccagcagctacgcgattgccaagttcgtggaggacaagcacaaggccaagctcccgcccaacttccgcaagcttctgaacgttcagctcaagaagctcgtcgccggcggcaagctgaccaaggtgaagaactcgtacaagctgtcgtccgncaccaagccgaatcccaagcccaagggccgcccgaagaagn

SEQ ID NO: 98965 - DNA, 528 bp, Zea mays
  unsure (1)..(528): unsure at all n locations
tggagtggtgctccctcactncggtaagatcgcctgtctcggtctggaattcccgggtcgacccacgcgtccggacatgaccgtcggcggcgccccggcgggccggatcgtgatggagctgtacgccaacgaggtgcccaagaccgcggagaactttcgcgcgctgtgcacgggcgagaagggcgtgggcaagtccgggaagccgctccactacaagggctccaccttccaccgcgtcatccccgagttcatgtgccagggctgcgacttcacccgcggcaacggcaccggcggcgagtccatctacggcgagaagttccccgacgagaagttcgtgcgcaagcacaccgcccccggtgtgctctccatggccaacgccgggcccaacaccaacggctcccagttcttcatctgcaccgtcgcgaccccttggctcgacggcaagcacgtcgtcttcggccaggtcgtcgaaggcatggacgtcgtcaaggccaatcaatagggtggcacccgcaacgggttcatctt

SEQ ID NO: 98966 - DNA, 528 bp, Zea mays
  unsure (1)..(528): unsure at all n locations
tggtcacggtactgcgaatgtataagacagtacttctctaccgctccggaattcccgggtcgacccacgcgtccgcccacgcgtccgcaagcttgtcgtatcaacttcctgctcgctcatgcacaccgctgtggatcttgtgaacgagactaagcttgacagcgagattaagtcttggcttgcttttgctgcccagaaggttgttgaggttgatgctcttgctaaggcattggctggtcaaaaggatgaggcttacttcgcagcaaatgctgctgctcaggcctcgaggaaatcctcaccccgtgtgaccaatgaagaagtccagaaggctgctgctgctctcaagggctctgaccaccgccgtgggaccaacgttagtgctagattggatgcccagcagaagaagcttaacctccccatccttcccaccactacaatcggnntcgnnnnnnnnnnnnnnnnnnnntnnnnnngnnnnnnnnnnnnnncnnnnnnnnnnnnnnnnnnncnnnnnnnnnnnnnnnnnnn

SEQ ID NO: 98967 - DNA, 528 bp, Zea mays
  unsure (1)..(528): unsure at all n locations
cgtttagggtgctgtccctagctangattgtactgctctaccgcgtccggaattcccgggtcgacccacgcgtccggaggaggaggagggcagacgccggcgccgcggcggtggcgcctggcggacgagcggtgtgacctgcgcgccatggagacggactacgtgcggcggtttcaccggcacgagccccgcgaacaccagtgctcctccgccgtcgccaagcacatcaaggcgcccgtccacctcgtctggtctctagtgaggcggtttgatcaaccacagcttttcaagccctttgtgagccggtgtgaaatgaagggcaacattgagattggcagtgtcagggaggttaatgtaaagtctgggctgccagccacaagaagcacggagaggctggaactgttagatgacaatgagcacatactcagcgtcagatttgttggaagtgatcacaggctgcagaactactcatccatcctcaccgtccaccccgaggtcatcgacggccgaccggngacgctcgtgatc

SEQ ID NO: 98968 - DNA, 530 bp, Zea mays
cgttagatggctgtatagtagggatagattgcatctaccggtccggaattcccgggtcgacccacgcgtccggcagaatggcgcagagcaactgggaagcggataagatgctcgacgtgtatatctatgactacctgctgaagaggaacctgcagacgacggccaaggctttcatgaccgagggaaaggttgctgctgatccagttgcaattgatgctcctggagggtttctctttgagtggtggtctgtcttttgggatatattcatcgcaaggacaaatgaaaagcattctgaagttgcagcggcatatctagaggcacagcaaataaaagcaagagagcaccagcagcagatgcagatgcagcaattgcaacttatgcatcaaagacatgctcaacttcagcgaactaacgcgaatcatccttcacttaatggtccaataaatgctttaaattctgagggcattttggggccatcaacagctagtgtcttagctgccaagatgtatgaagagcgattgaagcaccca

SEQ ID NO: 98969 - DNA, 531 bp, Zea mays
  unsure (1)..(531): unsure at all n locations
tgttnagcgtnctgtccatgaattataagtatgctcgtaccggtccggaattcccgggtcgacccacgcgtccggtgatatggttcttgcttctgcctactcgcatgagttgccacgatatggtcttgaagttggtctgaccaactatgcagctgcctactgcactggccttctgttggctcgccgtgtgctcaagatccgtggtttggatcaggagtacgagggcaatgttgaggccactggtgaggacttctctgttgagccagctgatgagaggaggcctttccgtgctctcttggatgttggccttatcaggactacaacagggaaccgtgtctttggtgccctcaagggagcattggatggaggcctggatattcctcacagcgagaagaggtttgctggattcaagaaggacgacaagcagttggatgctgatacccaccgcaggtacatctatggtggccatgttgctgactacatgaagaaccttgctgaaaagggacccagaaagtaccagagccacttaan

SEQ ID NO: 98970 - DNA, 532 bp, Zea mays
  unsure (1)..(532): unsure at all n locations
cgtttagtgtcttgtcctgaaagctgnagttagnactgccgtaccggtctcggaattcccgggtcgacccacgcgtccgggctatcatatggtaaactgtggtttgatactgttgaagatgttatccgaatacgttgacatcagtaaatgtttaccatcactatctttggaggtggtccaacgtgttgtggaaatattaaagcttttcaacactaggacttgccaacttgttctcggtgcaggagccatgcatgtgtctggacttaaatcaattacgtgcaagcatttagctttggcgagtcaaatcattagttttatgcattctttaattccagatatcaggcgagtacttttcctgaaaatacctgaagcgcgcaaacatctgttaatgtctgagctggatagagtagctcatgactacaagatccatcgagatgaaattcacaacaaacttgttcagataatgatagagaggttgcttgcaaatcttataaaattaccccaaattgtggaaggctggaatggtccatac

SEQ ID NO: 98971 - DNA, 531 bp, Zea mays
  unsure (1)..(531): unsure at all n locations
aggggttgggtggtgagcctagccagtatctgactgctcgtaccggtccggaattcccgggtcgacccacgcgtccgcggacgcgtgggcggacgcgtgggcggacgcgtgggcggacgcgtgggcggacgcgtgggcttggctccccaagcctcgacgcccggctagggttttgcctccttcccgccgccgctgtttcagcgagcgagaccgaggggtagagaaagagcggtgcttagccacccatgtcgctgcgtccgagcgagcgggtcgaggtacggcggaaccgctacaaggtggcggttgacgcggaggaggggcggcggcggcgcgaggacaatatggtggagatccgcaagagccgccgtgaggagagcctnctcaagaggcgccgtgaggggctccaggcccaggtccctgcccctccctccggngttgagaagaagcttgaaagcctcccagctatggttagtggggtttattcggatgataataaccttcagcttgaggccaccacacagttccggaaat

SEQ ID NO: 98972 - DNA, 528 bp, Zea mays
  unsure (1)..(528): unsure at all n locations
aggggcccgggtactgacctagtacagtacgcacntctctaccgctccggaattcccgggtcgacccacgcgtccgaaggaatctttcagctcacacctccctatccctccttcccttctcctcctactgctactgctcgccaggtcccctcgctcgctcgctcgtcgtcttcaacctcacacaattatttgtgctcccgctccttccgtccgtccttcctccccccttcccctctccctcttccaaccgccgctcctgctgccttgcctctcagcccagggacgccaaggtctctgccaggatggtgtaggccgtgcctctcgcgcattatgaggtgtggtggtgagggatgggcgatggcctttgcagatgaaggagcgacagcgctggcggcctgaggaagacgccgtcctgcgcgcctacgtccggcagtacggcccccgcgagtggcacctggtgtcgcagcgcatgaacgtggccctcgaccgcgacgccaagtcgtgcctggagcgcttgaagaactacct

SEQ ID NO: 98973 - DNA, 530 bp, Zea mays
  unsure (1)..(530): unsure at all n locations
cgtatagcgtnctgtcatgatagtatatgtatgctctaccggtctcggaattcccgggtcgacccacgcgtccgcccacgcgtccgacaagctcaagctcggcgagatcgtcacaaccatccccaccatcgggttcaatgttgaaactgttgagtacaagaacattagcttcacggtctgggatgtcgggggtcaggacaagatcagacctctctggaggcattacttccagaacacacagggtcttatctttgttgtggatagcaatgaccgtgaccgtgttgttgaagccagagatgagctgcacaggatgctgaacgaggatgagctacgtgatgctgtgctgcttgttttcgccaacaagcaagatcttcctaatgccatgaatgctgctgagatcactgacaagcttggattacactccctgcggcagcgacactggtacatccagagcacttgtgccacaactggcgagggtctgtacgagggcctggactggctgtccagcaacattgcgagcaaggcttgan

SEQ ID NO: 98974 - DNA, 526 bp, Zea mays
  unsure (1)..(526): unsure at all n locations
gtntagtgtctgtcatgaaagcaaatgattgatcgctctaccggtccggaattcccgggtcgacccacgcgtccgaggccttgaagaattcaagaatgaggtcatacttattgcaaagttgcagcaccgcaatcttgtaagactactagggtgctgcatacagagggaagagaagatcctggtgtatgagtacatgcctaacaaaagtctagatgcattcctctttaatcctgaaaagcaacggcttctagactggaagaaacggtttgatataatcgaaggcattggtagaaggctgctatatcttcaccgggattcgaagctgcgaagtgttcaccgtgatctcaaagccagcaacattcttctggacgcggacatgaaaaccaagatatcaaaatttggaatggccaagatgtttggaggggacccaaacccatttaaccagaaatgggtccgtcgtacaattggctacatgtcttctgaatactccatggaaggcaatttttcaagtcaagctgacgtcttt

SEQ ID NO: 98975 - DNA, 537 bp, Zea mays
  unsure (1)..(537): unsure at all n locations
agaggctggctgtcccacncagtaaagtancgcactgccgtaccggtctcggaattcccgggtcgacccacgcgtccgcccacgcgtccgcccacgcgtccgcccacgcgtccgtttttttttcatgaatcggtcaaaaggccgttctgacgagggtgaacacgatcaccggcgtggcatacaaggacgacccgacgatcatggcgtgggagctgatgaacgagccgcgttgccagtccgacgtgtcgggccacgccatccagtcgtggatcacggagatggcggcgcacgtgaagtccatcgacgggaaccacctgctggaggccggcctggagggcttctacggcgcgtcgtcggcccgcaggtccgcgaacccgtcggggtaccaggtgggcaccgacttcatcgcctggctcgacgcccacatcgccgacgcgcgggcggtgctgcgcaagccgctgctggtggccgagttcggcgagtcgcgccacgacccgggctacagcggcggccaacgcgacgcggtgttcggcacgn

SEQ ID NO: 98976 - DNA, 530 bp, Zea mays
  unsure (1)..(530): unsure at all n locations
gatcagggcgtgtgccagcttacgacgtatcgtgctaccgctccggaattcccgggtcgacccacgcgtccggcaccaaacaccaccaccaaagaaggcgagaacgtactccgtccctcccctcccctccggtcccctgcccctcgaggctccaggaccgtctcctcgcctgctcatccgccgctgctccccttctctgggctcggagaaccggagagaagcgcgcgcggccatggcgtccagcgcctctcggttcatcaagtgcgtcacggtcggcgacggtgccgtgggcaagacatgtatgctcatctgctacaccagcaacaagttccccactgactacatacctacggtgttcgacaatttcagtgcaaatgtagttgtggatggcaccactgtgaatttgggcctttgggataccgntgggcaggaaaataccaaccgcttgaggcctttaacttaccgaggtgcaaatgtttccgggctggcatcctcactggggagccgagctagctatgagaatatcatga

SEQ ID NO: 98977 - DNA, 536 bp, Zea mays
  unsure (1)..(536): unsure at all n locations
ggtntaggagtnntatcgactgagtcacgcctacatcgcaaccgctctcggaattcccgggtcgacccacgcgtccgctcgacgcgcctctgaaagttcggagccgccggcccgtccgcctccctctccgcctcccgtccccaaggccaatagttttcaagtggcaatggcggaccaggctaaccaacccactgtccttcataagctcggtggccagttccacctgcgctcgatcatctctgaaggtgtacgggcccgtaacatatgcccatctgtctcatcttatgaaaggagatttgccacaaggaactacatgacccagagcctttggggcccttcaatgtctgttagcggtggcatcaatgtcccagtgatgcagaccccgctctgtgctaatgctcctgctgagaaaggaggcaagaacttcatgattgatttcatgatgggcggtgtttcagctgctgtttcaaagactgctgctgctcccatcgagcgtgtgaagctgcttattcagaaccaagatgagatgattaagt

SEQ ID NO: 98978 - DNA, 539 bp, Zea mays
  unsure (1)..(539): unsure at all n locations
cgagatgcgnctanccatgacaagcanatcattgctctaccggtctcggaattcccgggtcgacccacgcgtccggcaagcactccacactgctgtgcagaacgagagccacaccatcagtagttagagcgaccaatagatgagttcctccccgtcctttggtctcctggctgtagcagcattactcctagcactgagcttagcacaacatggctccctcgccgcaaccgtcggccccagggtcatcgtcgtcggcgccggcatgtctgggatctcggcggcgaagaggctgtcggaggccgggataaccgacctgctgattctggaagcgacggaccacatcggcgggcggatgcacaagacgaacttcgccggcatcaacgtcgagttaggcgccaactgggtggaaggcgtgaacggcggcaagatgaaccccatctggcccatcgtcaactccacccttaagctccgcaacttccgctccgacttcgactacctcgctcagaacgtctacaaggaggacggtggcgtgtacgatg

SEQ ID NO: 98979 - DNA, 533 bp, Zea mays
agtctagcgtgctgtccagcctacgacgcactgccgtaccggtctcggaattcccgggtcgacccacgcgtccgcggacgcgtgggcggacgcgtggggaaccgcagaagtgcagcagaacgatcggatctagcagaattctctcaacctcatcggcggcggcgaagagcgtgcggatcggagatggcgacaagcgggtggaggaggagagcggcggcgcgggcctcctggagccacaccacggtgtacctgtggctcgcgctcgccgcagcagcactgacgctcgcccaggctaagaaggacctaacggaggttacccacaaggtctacttcgatgtcgagattgacggcaagcccgcaggtcggattgtcatggggctttttgggaagactgttcctaagacagcagagaacttccgagctctttgcacaggagagaaaggaattggcaagagtggcaaagctctccactacaagggaagtacattccacagaatcattcccagcttcatgctccaaggaggtgacttcac

SEQ ID NO: 98980 - DNA, 541 bp, Zea mays
  unsure (1)..(541): unsure at all n locations
ngagcggggnnnnnaattggccagcnaagtanagcatctgcctgtccggaattcccgggtcgacccacgcgtccgcccacgcgtccgcccacgcgtccgcccacgcgtccgcccacgcgtccgcccgcacaacggcacgattctcctcctccgtccgcgtagctctcggtttcggcgatgtcggggcgcggcaagggcggcaaggggctgggcaagggcggcgccaagcgccaccgcaaggtgctgcgcgacaacatccagggcatcacgaagccggcgatccgtaggctggccaggaggggcggcgtcaagcgcatttctgggctcatctacgaggagacccgcggcgtgctcaagatcttcctcgagaacgtcatccgcgacgccgtcacctacaccgagcacgcccgccgcaagaccgtcaccgccatggatgtcgtctacgcgctcaagcgccaaggccgcacgctctacggcttcggcggctaagccgnctncccttctgatgctttgatgtgacggccgtggtcggttgtgtgtc

SEQ ID NO: 98981 - DNA, 538 bp, Zea mays
  unsure (1)..(538): unsure at all n locations
cgcgcgtgctgagcctagctagagntgcatcgtaccgccgtaccggtccggaattcccgggtcgacccacgcgtccggactagttctagatcgcttcagctcggcgtcttcacaaacgccggcgcaaactctcgcccgagcccgacagatcttcaattccccattccgcccaccgatcgaccttcacgccagtctcggtctcttccgaaggcgtcgcgcgcggttgtttgagaggagaggaggaagatgagggagtgcatctccgtccacatcgggcaggccggcatccaagtcggcaacgcgtgctgggaactttactgcctcgagcacggcatccagcctgatggccaagtgcctggagataagaccgcgggacatcacgatgatgccttcagcaccttcttcagccagactggtgctgggaagcacgttccccgtgcaatcttcgttgatctagaacccactgtgatcgatgaggtgcgcactggcacgtaccgncagctctttcaccctgagcagctcatcagtggcaaggagn

SEQ ID NO: 98982 - DNA, 531 bp, Zea mays
  unsure (1)..(531): unsure at all n locations
tggggaaggagtgctgatcactgctcantaaagtacttctctaccggtccggaattcccgggtcgacccacgcgtccggccgccgccgcagcaatcacagcagcccggagaaagcccaggtccgacaagatgcagatcttcgtgaagacgctgacagggaagaccatcaccctcgaggtcgagagcagcgacaccatcgacaatgtcaaggccaagatccaggacaaggaagggatcccgccggaccagcagcggctgatctttgccgggaagcagctggaggatggccgcacccttgcggactataacatccaaaaggagtctacgcttcacctcgtgcttaggctccgcggtggcatcattgagccctcgctgcaggcgctcgctcgcaagtacaaccaggacaagatgatctgccgcaaatgctatgcacgactgcaccctagggctgtcaactgccgcaagaagaagtgtggtcacagcaaccagctgaaggccaagaagaagatcaagaactgaagtgctgctccn

SEQ ID NO: 98983 - DNA, 537 bp, Zea mays
agttgaggtgcttgccgctaaggacgactgctcctactataccgctctcggaattcccgggtcgacccacgcgtccggttgtcagagagcatgacccttctggaagagatgttgaacttttccgtaggcaccattattctgggggaaagggtccaacagtgaaaggtctgaaaggagcggagctggctgatgggcttgttatcaaagaaggggagtacaagttggtgaagactagatttagtgctttcttcgcaacacatcttgattctgtcctgaaaactgcaggaataaagaacttggttattgttggagttcagacaccaaattgcattcggcagactgtgttcgatgctatagcactggactatgagaaagttacggttctaattgatgcaacagctgctgcaagaccagaaatccatttgtccaatatcagggatatgaagaacatcggagtggacacgccaaccctggaagaatggccccgctagggttactctgtctcttggcagcaccagcaaacggagatgacctgtt

SEQ ID NO: 98984 - DNA, 543 bp, Zea mays
  unsure (1)..(543): unsure at all n locations
gacgggntnttgctagtgatgcatcgcactgctgtaccggtccggaattcccgggtcgacccacgcgttcgcacggcctcaaggacggctggtacgacggcgtcagcatcttcctcgccgtcttcctcgtcgccgccgtgtccgcggtcagcaaccacggccaggccaggcgcttcgacaggctcgccaccgagtccgacaacatcgccgtcgccgtcgtccggggcggcaggaggcaggagctctccatcttcgaagtcgtcgtgggcgacgtcgtggtgctcaacatcggcgacgccgtgcccgcggacggcgtcttcatgcagggccacgcgctgcaggtggacgagtccagcatgaccggcgagccgcaccctgtcgacatcgacgccgagaagagcccattcctcggcttcggcgtcaaggtcatcgacggatgcgggcacatgctcgtcaccgncgtcggcacggacaaccgctggggcgagatgatgggcagcattacccagggagaggaccgaacccacgccggttcaggagcgc

SEQ ID NO: 98985 - DNA, 542 bp, Zea mays
  unsure (1)..(542): unsure at all n locations
cggcggctagacctagtatgactctcatagcactgccgtaccggtccggaattcccgggtcgacccacgcgtccgaaaagtacaccctcgactcgtcctccgcattccccgtttgccttgtttaccattcctccccaaaacacatcctgcgatcctcgaagcctccgccgagcatcgatcatgtcggcctactgcggcaagtacgcggatgagctcatcaagaatgctgcctacatcggcacccctggcaagggtatccttgctgctgatgagtcaactggcaccattggcaagcgcctttccagcatcaatgtcgagaacgtggaggagaaccggcgggctctccgtgagctcctgttctgctgccctggtgccctccagtacatcagcggtgtgatcctcttcgaggagaccctctaccagaagaccaaggatggcaagccttttgtcgatgtcctcaaagagggaggcgtnctccctggcatcaaagtcgacaagggcaccattgaggttgntgggcaccgacaaggagaccaccaccc

SEQ ID NO: 98986 - DNA, 535 bp, Zea mays
  unsure (1)..(535): unsure at all n locations
gttcgggtactacttagggataagactgctcatacgcacgacgtaccggtccggaattcccgggtcgacccacgcgtccgcggacgcgtgggcggacgcgtgggcccggcctgtgccgccgtcgccaccgctcgctcgcccgcctgcctgcctgggcccgcagcaccgactctgacagcgcccgtcctgcttcctgtaccggcaggcgagggagtggactcagggagtgtgatggcggcaatgccggcgccgcttctgcctctgcttctgctggtggtggccgcggcgatgacgctctcccccgccaccgnccgcattcccggcgtgtatgtcggcggcggcggcggcggctggcagagcgcgcacgccacgttctacggcggcagcgacgcttcgggcaccatgggcggcgcctgcgggtacgggaacctgtacaggcaggggtacggcgtgaacaacgcggcgctgagcacggggctggtcgacaagggctccgctgcngcgcgtgcttcgagatcangtgccaggagcaccc

SEQ ID NO: 98987 - DNA, 540 bp, Zea mays
  unsure (1)..(540): unsure at all n locations
ggggtnctgatcatgatagaanatgatcgctcgtaccggtccggaattcccgggtcgacccacgcgtccgggtttgcatgacgcagggcccgacgttcggcgccatgatgatctccggccagaaggcggcgcacctggcgctgaaggcactgggcaggcccaacgccgtggacgggaccatcccagaggtgtcgccggcgctgcgcgaggagttcgtgattgcgtccaaggacgacgaggtcgtggacgcctgagcgagcatccacgcgccagcatgcaagcagcgtcttatctgggccggcgccatcacggggtttcttcttttaatctgggactttgttgctgttggacgaatgaattcccttcgatcggttagctttaatctgtctcggtagtgtgtcgtgttcgtgtagcaccatgccacacaccagccgtgtgctctgtcacgtgggggccactcgtggggtctnctgctgctgtcagaaccgaataagagaggatggaantgtgatggaacaataaaaatgcatgggtttaaaa

SEQ ID NO: 98988 - DNA, 533 bp, Zea mays
tgtgggtggaatgcgatggctaggctctcatcgcactgctgtaccggtccggaattcccgggtcgacccacgcgtccggcgaaatcgggaacgcgcaccaactgttcgtcgttgtgttcgacaccgacaggctcaagggctccacgctcgtcaccaatggcgtgataacggccgggtctgacgagtgggcgatctacggcggtaccggggtgtttgccatggcgaggggcgtcataaggagaaggtatctcgccgacagggccggcgggaacactgatgagctcaacatggatgtcttctgccggccgtttggctcacagtcacagctgcaagataagatgcaggtgcaggggcaggggcagggctctagcgtcaccaagattggactatggggtggaccgggagggtcggcacaggacatcacgggagagcggccaccgcagcgtcttcacagcgtcaccgttcgtgctggcgttgccggcgacttcatcgagttcacctatactgacagcgctgggcagaaggcgcgccgt

SEQ ID NO: 98989 - DNA, 536 bp, Zea mays
  unsure (1)..(536): unsure at all n locations
ngacggctgtcaagatagaattgatcgctcgtaccggtccggaattcccgggtcgacccacgcgtccggagctcgggaagcttccatcgctggagatttcgcttaacctcagctgtaaccgtctctccggggaaattccagcgcagttcggcgagctggataagcttggcagcctcgacatctcgtacaaccagctctctggcagccttgcgcccctcgcgaggctcgagaacctcgtcatgctcaacatctcgtacaacacgttctctggtgacctcccagacacgcccttcttccagaagcttccgctcagcgacatcgcgggcaaccacctgctcgtcgtgggcgccggcggcgacgaagcctcccggcacgcggccgtttcggcgctgaagctggccatgacgatccttgtcgtggtgagcgctctnctnctnctgacgggcacctacgtgctcgcgcgctcgcgggcgcggaacggcgccatncaacggcacggcgccnacgagaccgtggaggtgaccctgtaccagagn

SEQ ID NO: 98990 - DNA, 528 bp, Zea mays
  unsure (1)..(528): unsure at all n locations
cggtagtggctgttccctgcctagatccattgacgtaccggtccggaattcccgggtcgacccacgcgtccgggactcaatacccaggacatcatccagcaagagccgacgcataccggcctgctgatcaaccttccaagggttcccaacctgtgaaaatgcaaccgattgcagtccctgccattccttgggatgagcttaaggaggtgactaaaggttttggtgatgaaaccttgattggtgaaggctcctttggtagagtatacttaggtgttctaagaaatggcaggagtgccgcggtcaaaaaagtggattctaataagcaggcagaccaagaattcttggcgcaggtgtctatggtgtcaaagcttgaacacgaaaatgttgttgagttgcttggttactgtgctgatggaacacttcgcgtncttgcctacgagtttgctactatggggttccttcatgatatgcttcattgaaggaaaggtgttaatgggggctcaccccggccgggcttatcatggttgc

SEQ ID NO: 98991 - DNA, 535 bp, Zea mays
tgattatggttagtatcggcatcgcccagccagatacagcactgtctgtaccggtccggaattcccgggtcgacccacgcgtccgcccacgcgtccgcccacgcgtccgcccacgcgtccgcccacgcgtccgcccacgcgtccgctctccggcccggtgagggatctcagtaagctgcctaagtgtaactacgatgattgcaacactggctatgacctcggcgagtacagatagtttatcttgtacatacaggccatctttaatgacccatttaggatgttcaacaacatgcttgagatgtgcgattgctacacgcgatccaacgagcctgaccacagtaacaatatgtacaacgccgttaaaatctatagcagctttgaagttcacgactaggaactgtgctatgttattgagcattagtacaaacttctacataaggacactaaactgtccacttgaatggtcacataattagtaatttacgttcataagggtccttactactgtataatctttgtagaaaagtttgaaatc

SEQ ID NO: 98992 - DNA, 539 bp, Zea mays
  unsure (1)..(539): unsure at all n locations
nggagtggctgagatagaaagagaatgattgctcgtccggtccggaattcccgggtcgacccaagccttcgggctttacacttcttggcatcacataaaaccagtgcaagcagaagcagcgcaatggcgagcagcaccatggccctctcctccacagccttcgccggcaaggcagtgaacgtgccgtcgtctctcttcggcgaggcccgcgtgacgatgcgcaagacggcggcgaaggcaaagccggcggcgagctccggcagcccgtggtacggccccgaccgcgtgctctacctgggcccgctgtccggcgcgcccccgagctacctgacgggcgagttcccgggcgactacggctgggacaccgcggggctgtcggcggacccggagacgttcgccaagaaccgggagctggaggtcatccactcccgcttggccatgctgggcgcgttgggctgcgtgttcccggagcttgttggccgcaacggcgtcaagttcggcgaggccgtgtgggtcagggcccggtcgcagatctttaa

SEQ ID NO: 98993 - DNA, 530 bp, Zea mays
agtacagggctgaaaatgatagagtgtcatcgcactgctgtaccggtccggaattcccgggtcgacccacgcgtccgcggacgcgtgggtcctccccgagcgccgcgtcgtcgcctcctctgatccgtcgcctccccgagatctgctctcgtccttccgggggcttgcggcggaggtctggacgtacatccgggtcgtcgagcgctccgggctcgagggctcggatgagtcggagtactcctcggatgaggatgactcggacggcggcagcaaggacgaggacgacgacgacgaaagcggtggcggcggtgacggtgacggcagcggcaggggcggcagcggcggcagcaaggatggtgacggcggctgcagcaggggcggcaacggcggtggtggcagcagcagaggtagcaccaggggcggcagccgcggccggagtaacagggccagtggctagatgccactgggcctttaaatattaggataggataggtaggaataatgtagtagtgaatactagtgggggagta

SEQ ID NO: 98994 - DNA, 523 bp, Zea mays
  unsure (1)..(523): unsure at all n locations
tggcgggctgtcatgaaagtatgtagtgagtgctgtccgaattgccgggtccgaccacgcgtacgcccacgcgtccgctcaaggctgaccccaagaagtaccgcaagatgaaggagaggcttgtcggcgtctctgaggagaccaccacgggtgtcaagaggctctaccagatgcaggagaccggcgccctcctcttccctgccattaacgtcaacgattccgtcaccaagagcaagtttgacaacctgtatggttgccgccactcgctccctgatggtctgatgagggccactgacgttatgatcgccggtaaggttgctgtggtctgcggatacggtgatgtcggcaagggttgtgctgctggccttaagcaggctggtgcccgtgtcattgtgaccgagatcgaccccatctgtgccctncaggctctgatggagggtcttcaggggtcttccttggaggacgttgtctctggagctgacatcttcgtgacccacacttggcacaaggatattatcatggg

SEQ ID NO: 98995 - DNA, 534 bp, Zea mays
atggttacgtgggtatcgactgagtcacgctcacatcgcactgcctgtccggttcggaattcccgggtcgacccacgcgtccggctccagatcgaccctcgagcctgtcgaacgatcctttaattccaaccgatcgaaaagttgcagcggcagtgttgaggccaaggccaccgacccacctctctcatagcactagcagcaatggaggtggagatcctcgagtcctgcatggtgaaacccagcgacgacatagggacgccgccgccgcccatgcacgtggtctggctctccaacctcgatctactcgtggccaggagccacacgcccaccgtatacgtgtaccggcccagccctgacccggacttcttctcgccgggcgtcctcagtgctgccctgtccaaggcgctcgtccgcttctaccccctcgccggccggctcgcgcaggacggcgccggccgcccgcagatccactgcaccggagaaggcgcgctcctcgtcaccgcgcgcgccgacgctacccttcaggacatcccc

SEQ ID NO: 98996 - DNA, 531 bp, Zea mays
  unsure (1)..(531): unsure at all n locations
agggagaggtgggtntngcatgattaagagtctcattgcactgctgtaccggtccggaattcccgggtcgacccacgcgtccgcggacgcgtgggataagtttgatagtggtgatggcacttcatgcaagcgttgtagttgtaagaagtccaaatgcctgaaactttactgtgagtgttttgctgctggagtctattgttctgagccttgttcgtgtatcggctgtatgaacaaccagagtcatacggaaactgttctatctacgcggcaacagattgaatctcgcaatccattagcatttgctcctaaagtaattcatacatctgagcctggtctggaactaagggacttctccaataaaactcctgcttcagctcgtcacaaaaggggatgcaattgcaagaagtcgtcatgtctaaaaaaatactgtgaatgttttcagggtggtgtgggatgctccataagttgcagatgcgagggctgtaagaatgcttttggaaaacgggaaggggctgccgtgttaagcataga

SEQ ID NO: 98997 - DNA, 524 bp, Zea mays
  unsure (1)..(524): unsure at all n locations
ngttaggtgcgtntgccatggtaaagctgtcatcgcacctgccgtaccggtccggaattcccgggtcgacccacgcgtccgcccacgcgtccgtgccttcagatgagctccgtaaacggtttgagcaagaaggaatatcacttgatcagcctcttgttacctcttgtggcactggtgtgacagcatgtgtattagccttgggccttcatcgacttggcaaaaccgatgtcgcaatttatgacggatcgtggaccgaatggggcgcccatcctgacactccagttgcaactgctgtttagtctcttcataataggacgcccgtgctcttcatagaggacctcttgattgtatttgccccgtgctgtgattctatggaggttggttggatgcttggatgtaaggctggggaagcgaagccttttggccttcactgtaaaagctgcaacagaaaaactgtcacatgcactgaattataagataactccccttgatctctaaaaaaaaaaaaaaagggcggccgctct

SEQ ID NO: 98998 - DNA, 541 bp, Zea mays
  unsure (1)..(541): unsure at all n locations
ngggagtggctagtcctagctggagntgcatcgctcgtaccggtccggaattcccgggtcgacccacgcgtccggctgctgttcttgtttccccgctctccaagatgtcgtccccgagcaagcgccgcgagatggaccttatgaagctgatgatgagcgactacaaggtggagatggtgaacgatgggatgcaggaattcttcgtcgaattcaaggggccggccgaaagtatctaccaaggcggtgtctggaaggttagggtagaactgcctgatgcatatccttacaaatccccgtccatcggcttcatcaacaagatttatcaccctaatgttgatgagatgtctggctctgtatgtttagatgtcataaaccaaacatggagcccaatgtttgatctagtaaatgtttttgaagtattcctttcacagctgttactatatccaaatccttctgatccattaaatggggaggctgcancacttatgatgcgtgatcggcctgtttatgaacagaaagtgaaagaatattgtggaaaagg

SEQ ID NO: 98999 - DNA, 542 bp, Zea mays
  unsure (1)..(542): unsure at all n locations
ngaaagtgtctnataactgctcagtctttcatagaactgncggtaccggtctcggaattcccgggtcgacccacgcgtccggctgtgctcgcggatgacatattgaaaaatgtggaatatgatgctctaagggttattttcaacaagttccattctgtcatatcgtttaagcccacaatggtaacgatactgtcccctgaggttgcagaaaaagaagcagaagctggtgggaagatgggtgacctagattcttatgagattgaaggcggtgagacaaaagcagagatattgcaaaacctagctgagttccagttttcttgtgtcatgtacaatggtgccctagagaatgcatgcagtgagcttggagcccgtatgtctgccatggacagctctagcagaaatgctggcgatatgcttgatcgtctcacgcttacttacaacaggacacgccaagcattcatcaccacagagcttactgaggatatatctggtgcattagccttggaggataggtgaagagactattgtgacttttccttttt

SEQ ID NO: 99000 - DNA, 539 bp, Zea mays
  unsure (1)..(539): unsure at all n locations
gttgtcgggntaacaactgctacgcactgcatcgcactgctgtaccggtctcggaattcccgggtcgacccacgcgtccgctgttgtattgcaggagagtgtgtatgcacttttgaggaaggtgggcaaagcgaggatggaatgcataatggacggggagcagccgacgaacgaggtggtggcaaggcgtgctggcatcacgattgaaaagctggcgaaactgagagcgaaaacaaggaaagtacggtccatgcaggatcgagtctggtcagacgacggtgtgacataccaggagatcaccgaggaccccaacattgaaggtcctgaggtgagcgtggacaggctgatgatgcggcagcaggtgcgcagcttcctggcggggatcctgagcccccgggagaaggagatcatcgagcaccggttcggcatccacgacggccagcccaagaccctgcatgtcatcggcgacatgtacggtctgtccaaagagaggatccggcaggtgcagaacaagggccttgacaagctcagaaacagca

SEQ ID NO: 99001 - DNA, 530 bp, Zea mays
  unsure (1)..(530): unsure at all n locations
aggggnagtgcntatcaatgagtaagaaggttatgcgacctgctcgtaccggtccggaattcccgggtcgacccacgcgtccgcggggctcgccgtccgcggcgagggccgcgtggtggggtgccgcagcgcctgcgccgcctacggcgcgccgcagtattgctgcacggggcagttcgggagcccccagcagtgcaagcccacggcctactcgcgcctcttcaagtcggcgtgccccaaggcttactcctacgcctacgacgacccgacgtccatcctcacctgctccgccggcgcctcctacgtcgtcaccttctgcccgcaccgccgctgaacttttatttttttaaggtcttcggccgcgtgttgttagttatcctctgcctgcgtttgcgttttgatgttctggcgtgcgttcgtttcacttgcctccgtcacgcgtcttcggaatctccaaaaaaaaaaaaaaaaaaaaaaaaaaaaaaaaaagggcggccgctctagaggatccaagcttacgtacgcgtgca

SEQ ID NO: 99002 - DNA, 540 bp, Zea mays
  unsure (1)..(540): unsure at all n locations
gggaagcggctgagctcgatagagantgcatcgctcgtaccggtccggaattcccgggtcgacccacgcgtccgggccaatcccgagcagtggtgcgaaacctcgagcgctcgcgccggtgaccataacaaagaggaagccgcggtagcactggtagcggcagcagtaagggggagatgtcgtcggcgttcagcggcgatgagaccgcccctttcttcggcttccttggcgcctccgctgcgctcgtcttctcatgcatgggggcggcgtacgggacagccaagagtggcgtcggcgtggcgtccatgggtgtcatgcgcccagagctcgtcatgaagtccatcgtgcccgtggtcatggctggtgtgctcggtatctacggcctcatcatcgccgtcatcatcagcactgggatcaaccccaaggccaagccatactacctctntgacggctatgcccacctgtcgtctggcctttgctggagtcttgctggggcttgctgcaaggcatggcattggcatcggtggtgatgcttgtgtc

SEQ ID NO: 99003 - DNA, 537 bp, Zea mays
  unsure (1)..(537): unsure at all n locations
gagaaaggntntnaatcgtcagtctttcatcgaaccgctgtaccggtccggaattcccgggtcgacccacgcgtccgatcatggttgaccacatgaggaagatgaagaacaatgccattgtctgcaacattggccactttgacaatgaaattgatatgctcggccttgagacctaccctggcgtcaagcgcatcaccatcaagccccagactgaccgctgggtgttccccgagaccaacactggcatcattgtccttgctgagggtcgcctgatgaaccttgggtgtgctactggccatcctagctttgtcatgtcctgctcattcactaaccaggtcattgcccaacttgaactgtggaaggagaagagctctggcaagtatgagaagaaggtgtatgtgctccccaagcaccttgatgagaaggttgctgctctccacttgggcaagcttggtgccaagctgaccaaagctacccagtcttaggccgactacatcagcgtgccgatcgagggtccctacaagcctgcccacttac

SEQ ID NO: 99004 - DNA, 534 bp, Zea mays
  unsure (1)..(534): unsure at all n locations
gggaaggntntaatcgatagagtctcatcgcactgctgtaccggtccggaattcccgggtcgacccacgcgtccgcacgacttccgtccgagtctgagctcatctccacgcgccgccgccgccgctcgacgcccaccgcgcagccatggcggaacagactgagaaggctttcctcaagcagcctaaggtgttcctcagctcaaagaaatctggcaagggtaagaagccaggcaagggtggcaatcgattttggaagagcattggccttggtttcaagactcccagggaagcaattgaagggacctacattgacaagaaatgtccattcactggaaccgtttctatcagaggcagaattattgctggaacatgccacagtgctaagatgaacagaaccatcattgttcgcaggaactatctccactttgttaagaaataccagaggtatgaaaagaggcactccaacattccagctcacatcntcccatgcttncgtgtgaaggaggcgaccatgtcatcattggccagtgcagg

SEQ ID NO: 99005 - DNA, 542 bp, Zea mays
  unsure (1)..(542): unsure at all n locations
agggtcgggtgagaactgaatcgatncaactgcactgccgtaccggtccggaattcccgggtcgacccacgcgtccgcggacgcgtgggtccgcgaccagcgaggagtgcactgtcgcttggggtgtctgggatcatgcttttcacttccactgcatcagcaggtggcttaagactcgccaagtgtgcccattagataacagggagtgggagttccagaaatatggccactagttcctgggcaccgtcatgtggtgttgggactttgctgccactcaagtgtttttgtctgccaaacagctccatctcttactgctttcgatgcttgcatctatcacccgtcaattataactagctagcagtacgtacacctgggactgtatttggactatccattgagaggatagtaggcccattttatcaatgggatgtggatcttcataagtgagcttgtattgtgctgtggtacccattttttgaaaatagntatttntgataaaaggggcggcccgttctagaggatcccaaggctaccgtccccgt

SEQ ID NO: 99006 - DNA, 526 bp, Zea mays
ggggtagtgcgtatggatgattcacgcagatgatgcactgccgtaccggtccggaattcccgggtcgacccacgcgtccggttggcttctcctccccctccggttcgggttcgggttcgtgaggttctccggggttcggtttcgtgggtgagcggatcgagatggcggcgtcggatgttgagtaccgctgcttcgtcggcggcctcgcctgggccacggacgaccactccctccacaacgccttcagcacctacggcgaggtcctcgagtccaagatcatcctcgatcgggagacgcagaggtcccgcggcttcggcttcgtcaccttctccacggaggaggcgatgcggaacgccatcgagggcatgaacggcaaggagctggacggccgcaacatcaccgtcaacgaggcccagtcccgcggcggccgtggaggcggcggcggcggcgggtacggtggtggccgtggaggcggcggctacggcggtggcgggcgccgtgatggcggcggcggctacggcggtgg

SEQ ID NO: 99007 - DNA, 532 bp, Zea mays
  unsure (1)..(532): unsure at all n locations
aganttcgagtactgacgcatgattacgactgtcatcgcactgccgtaccggtccggaattcccgggtcgacccacgcgtccgcacgctcgttcttctataaaaggctacggaggaggatcgcagaagatgttcttgcaaaagaaataaggcagatagtcggtgataaatttacgcaccaattagcaatggagctcatcaaggaatggtaccttgcttctcaggccacaacaggaagcactggatgggatgacgatgatgcttttgttgcctggaaggacagtcctgaaaactacaaggggcatatccaaaagcttagggctcaaaaagtgtctcattcgctctctgatcttgctgactccagttcagatctgcaagcattctcgcagggtctttctacgctattagataagatggatccctctcagagagcgaagtttgttcaggaagtcaagaaagtccttgattgatgataccaacacatccaacacaatgtgtgcatgtcacatctttttggtctagtacatacatag

SEQ ID NO: 99008 - DNA, 541 bp, Zea mays
  unsure (1)..(541): unsure at all n locations
tgagacgcgtgctagacctgcaacgtnctgcatcgcagtaccggtccggaattcccgggtcgacccacgcgtccgcccacgcgtccgctccgctgggccaccagctttgaccgccgcctcccttcccctccgcgactgctcctcctcaccccactcccccgcaggagcggcggcggcggcggcgaggtcgtaccccacatcggcgagcggcggcggcaccgccggaggcaaaggcaagatgttcgggcgcgcgccgaagaagagcgacaacaccaagtactacgagatcctcggggtgcccaagtcggcgtcccaggacgatctcaagaaggcctaccgcaaggctgctatcaagaaccaccccgacaagggcggtgaccccgagaagttcaaggagctcgcacaagcctatgaggttttgagtgatccagagaaacgtgagatttatgatcagtatggtgaagatgcccttanggaaggaatgtgcgngtggaggatcccatggtggacccattgacatcttctcatcatttttgggccc

SEQ ID NO: 99009 - DNA, 539 bp, Zea mays
  unsure (1)..(539): unsure at all n locations
aggaattgtgcttgtgcctggaatgtgactgcattgctcgtaccggtccggaattcccgggtcgacccacgcgtccgcccacgcgtccgcgaaaaactctccgtcagaggataaagaagaatcagaaaagcatatggaggaactatgctccaaaatcaaggtgggtgatagatgtgaagttgagcctggtgccaagaggggcactgtaaaatttgttggtagagctgaagcccttggacgtggattctgggttggagtgcaatatgatgagccacttgggaagcatgacggcatggtgaaaggcattcgcttctttgagtgccctcaaagtcatggggcaattgtgaagccagagaaaagtaaagttggcgactttccggagagagacccatttgaagacgaggacgatgacgagatttgagtgcgtgtgcgtttggaaaagcaaggggaatgtnnnctgttgaattgcatcgaaacgtgtgtaaaatgattcggagatttgagtgtgcgcgcttgctgcatcttcttgggcaatataa

SEQ ID NO: 99010 - DNA, 531 bp, Zea mays
  unsure (1)..(531): unsure at all n locations
tgtnnaatgagcagatgcaatgagacggagatgatgactgcactgctctaccggtccggaattcccgggtcgacccacgcgtccgtgatccagcacatgcagataaagtgaaaaataccttcatattcaacacatttgttctctgccaggtgttcaacgaattcaattcgcgtaaaccagatgagctgaatatattcaagggcatttcagggaaccatctgtttattggcatcatagctataacagttgtactccaggcgcttatagttgagttccttggcaagtttgcctcaacggtaaggctaagttggcagctgtggttggtatctataggtcttgctttcttcggctggccgctggcattcgtggggaagcttattcctgttcctaaacgtccattgggagaattctttgcatgctgctgtatctgcaaagggagcaaacaagcccctgacgacgcaacctctaatgataaaggagacaacaagcccgaaccttgagatgtcagcaagaatgattggttgccacaat

SEQ ID NO: 99011 - DNA, 529 bp, Zea mays
agatattatggtgtgcctgcagaagtagcatagcagtgctcgtccggaattcccgggtcgacccacgcgtacgcgagactcgcagctagctgacacggccgagaagcagcttgcattgcaggcgtattacggacccagcagcagctagcactagcagtccatcggagcgacgatggtgagaaggactgtgctggcggcgctgctggtggccgccgaactcgtcggcggcgcgcgggcgcagctcaaggaggggttctacgactacttctggccacatgcggagaagatcgtcaaggactacgtgaaagcgcacatgccccacgcgcccgacgtcgccttcaacctgctccggacccactttcacgactgcttcgtcaggggctgcgacgcgttagtgctgcttaacgcgacaggcagcatctaggcttagaaaggactcgggcccaagctgacccttgcggcttcgggtgaatggaccgcttaaggggccttttcgggacgacggtttaaggggtgcaacctttccttc

SEQ ID NO: 99012 - DNA, 542 bp, Zea mays
  unsure (1)..(542): unsure at all n locations
ttgagaggntngatcccacnncgataangcatgctcgtaccggttcggaattcccgggtcgacccacgcgtccgacggcccaaagatcttcccacagaaaaaggctgggttgctgacgccgctgaggaacctgctgggcctggtgcggggccccaagtacgacggcgtgttcctgcacgacaagatcaagagcctgacgcacgacgtcagggtggcggacacggtgaccaacgtcatcgtgccggcgttcgacgtcaagtacctgcagcccatcatcttctcgacgtacgaggccaagaccgacgccctcaagaacgcgcacctctccgacatctgcatcagcacgtcggcggcgcccacctacttcccggcgcacttcttcaagaccgaagccaccgacggccggcccccccgcgagtaccacctcgtggacggcggcgtcgcgggcaaacaccccaccatggtcgccatgtccatgctcacaagtgatgtgcaccggcgaaccccaacttaaacgcccgcagccccaccgagtacaacac

SEQ ID NO: 99013 - DNA, 543 bp, Zea mays
  unsure (1)..(543): unsure at all n locations
ngaagaggntngtcatagtatggtatagtattgcactgctcgtaccggtctcggaattcccgggtcgacccacgcgtccgctagttgatgttgttgagggaaaagtaatggaagtattcaaggaggatcaagctgtggaggttatcaagttcaatccaagcaaccccgatctcttcctatctggtgggtccaagggttcccttaaactctgggatattcgatgtggtctggtaacaaaagaatttcagagaagccttggaaccatccttgacattgacttcagtgctgatggaagacaatttatctcttcaactgacacaaccagaagcaatattagtgagaacactataattgtttgggatgtcctgcgacaagttcctttatctaaccaggtttataccgaagcattcacatgcccgtgtgtaaggtaccacccacgtgaagcatcatttgttgcacagtccaatgggaactacattgctatgttttcagcaaggccaccctttaagctgaacaagtacacgcngttttggaagacaagga

SEQ ID NO: 99014 - DNA, 530 bp, Zea mays
  unsure (1)..(530): unsure at all n locations
agatggggtggntgtaaatgcctcagccctgcatagcaccgctgtaccggtccggaattcccgggtcgacccacgcgtccgatccaggctagccacgtcgaggtcggcatccgcggcaacccgccatacctcaaccatgacctgacacacccagtgaagactgactcgtcgttctggacaatagaagacggtgagatgcatataacactgcaaaaaaagagagaaggggaaaacatggtcatctccaatacaagggcaagggattttggatccatatgctgcagatcaagagcaaaagcggcttatgctccaaaggtttcaggaagagaaccctgggttcgacttttcacaggctcagttcagtggaacctggcctgacccaagaaccttcatgggagggatacgctccgagtgaagcaccctacctgcctatgtacgtttctactatatcctcggcatcttgatagatgcagcaggcgtgcttattatggctgaaaatcggttgtgtctgttatggaaataattgggat

SEQ ID NO: 99015 - DNA, 543 bp, Zea mays
  unsure (1)..(543): unsure at all n locations
ngacgactggtatcctagctagcatatcattgctgtgctgtaccggtccggaatttccgggtagacccacgcgtacgcaggttcttctacctgcaagagaggatttgttcagttctgctacgagccaatcaagcggatcatcaaaacctgcatgaatgaccaaaaggagaaattgtggtccatgttgcaaaagcttaatgttaccatgaaggctgatgagaaggagttgattggcaaagctttgatgaagcgtgttatgcaaacgtggctaccagccagcactgcacttcttgagatgatgatattccaccttacttacnccgcaaaggctcaaaagtatcgtgtggagaacttgtatgagggaccccttgatgatggttatgcaactgctatcagaaactgtgatccnganggcccctctatgctggatgtttcaaagatgaattcagcatctgacaagggcangntcttttggctttgggcgtggtttcttaaagaaaaggttgctacctgtatgaaaagttcggatcatgggtcccaact

SEQ ID NO: 99016 - DNA, 535 bp, Zea mays
  unsure (1)..(535): unsure at all n locations
aggggnnagtatgcgnatggcatgagtaaacgcacacgttagcatctgctgtaccggtccggaattcccgggtcgacccacgcgtccgctggatctgctgcgacttatgcgagacatggttccacggcaagtgtgtcaagatcaccccaaataaagcggagcacattaagcagtataagtgcccctcgtgcacaggaagcaagaagggccaaggctggatccaatcaatcaacaagttagatttgaatggcggccaatgttccaggaacggaggagcctttaacaaagagtggagaatgaattttccgggtggggacattatataattggatacacttcgtggagacacggccggaattggacctagatatgccataaaatatagtgtaggctcggacaaatgtgaaagtggtagattgtggggggcccatacgcatatgagctctagactacactgtgcagtggtagatactgcctatattccatttgggataaatactcgtaatagtgttaaaaaccggaaaaaaataataaa

SEQ ID NO: 99017 - DNA, 536 bp, Zea mays
  unsure (1)..(536): unsure at all n locations
agggtcggtgcgtgcgtatgattacgagtctcataggacctgctcgtaccggtccggaattcccgggtcgacccacgcgtccgccaacgaaaagtgcacgcacacgcgcatcccggcagtcagtagcgcagctgcctctcctctctttggcccccggagccggagcaagagcgccgccaacagcccgctaccggcgccgtgtcatggcggggccaggagacaaggtggactacgtcttcaaggtggtgctgatcggcgactcggcggttggcaagtcgcagatcctcgcgcgcttcgcccgcaacgagttcagcctcgactccaaggccaccatcggcgtcgagttccagacccgcaccctcgtcatcgaccacaggagcgtcaaggcccagatctgggacaccgncggccaggagaggtacagagctgtgacaagtgcttattacaaaggtgcactgggagctttgctggtctatgacattaccagacgccagagcttcgatcatataccccgctggctagatgaactccgagcc

SEQ ID NO: 99018 - DNA, 527 bp, Zea mays
  unsure (1)..(527): unsure at all n locations
gggtgagtggcgtatgcaatgatccagcctactacgnactgacgtaccggtccggaattcccgggtcgacccacgcgtccgcaaaaccatcagatctagcagaactctctcgacctcatcggcgttggcggagcgcgtgttgaccggagatggcgccgagcgggtggaggaggagcgcggcggcgcgggtcgcctggcgcccggccacggtttgcctgtggctcgcgctggccgccgccgaactgacgctggcccagttgctcgtcaacctcgctaagaaggacctgacggaggttacccacaaggtctacttcgacatcgagatcgacggcaagcccgcaggccggattgtcatggggctttttgggaagactgttcctaagacggcagagaacttccgagctctttgcacaggagagaaaggggttggcaagagtggcaaagcccttcactacaagggaagtaagttccacagaatcatccccagcttcatgctccaaggaggtgacttcactcttggggacggg

SEQ ID NO: 99019 - DNA, 524 bp, Zea mays
  unsure (1)..(524): unsure at all n locations
ngtttatatgntgnaatgataagaaagctaacgacctgctctaccggtccggaattcccgggtcgacccacgcgtncggttntgcttgatggcacctggagcaattctgctgcactgtacagaaggttgaaggagagatggactgcagtatggggagatgaagctctaccttgtattgcactatctacacttagtgcctcagtgatgcataaactacgaccgcagcctgcctgggatcgtacctgcactgcagcagctgcagctggcctcctctgggagttgagctcgcggcctgagctcatctcatttgggttggaaaagcaagccgaagcggtggaatgctcgttagacaacttgctggatgctctcactgccaggcggcttcgtctgggccgatcgataactcggaaacagagacataataagaactgcatatagggaaagaagaaactcacagtaacagaggagcatggtgtgccaatcagtggaaagctgatttcattcttttttgtagactcaggagc

SEQ ID NO: 99020 - DNA, 537 bp, Zea mays
  unsure (1)..(537): unsure at all n locations
gtggtggatgatctggctagtctctcatngcagtaccggttcggaattcccgggtcgacccacgcgtccgcccaacaacgtcaagtccagtgtttgtgatatccctccgcgtggcctctccatggcctccaccttcattggcaactccacgtccatccaggagatgttccgccgtgtgagcgagcagttcactgctatgttcaggaggaaggctttcttgcattggtacactggtgagggcatggatgagatggagttcaccgaagctgagagcaacatgaacgatctggtgtccgagtaccagcagtaccaggatgccactgctgatgaggaggcggaatacgaggacgaggaggccatccaagacgagtaagggtggtttgggccctgccacatttgtacccttggttcctttcattccggggcttgcctatggtttgcctggtgtatttgctcaagttatgccgtatgtagtagtacttttcgtgcttaacatgctggttgctaccacaaagacttggtcacctgcactggttg

SEQ ID NO: 99021 - DNA, 544 bp, Zea mays
  unsure (1)..(544): unsure at all n locations
gggggtggggananaatcggctaggttgtactggcagtaccggttcggaattcccgggtcgacccacgcgtccgcccacgcgtccgcccacgcgtccgcgttgcgtcttgaaaggggagagagagagagagaagagagagagaagagagagagagagagaggagtgggagacccgcgagaggctgccgtgtagggaccgtagactcagcgactgcgaaggagggataaggggatggccgggatcggaccgatcaggcaggactgggagccggtcgttgtgcggaagaaggcacccaccgtcgccgccaagaaggatgagaaggccgtcaacgccgcgcgccgcgccggtgcggagatcgataccatgaagaagtacaacgctggtacgaacaaggcggcattcagcggtacattcctcaacaccaagcgcctcgacgacgacaccgaaaaccttggccatgaacgagttccaagtgatctgaagaagaatctcatggcagcaatgcttggttagaaactggcacaggcacaatttgttaaaatn

SEQ ID NO: 99022 - DNA, 532 bp, Zea mays
  unsure (1)..(532): unsure at all n locations
tgantttggagtagtgcccctgagtccagccgcatacagcactgcacgtaccggtccggaattcccgggtcgacccacgcgtccgcccacgcgtccgcaccgctctgcctcgcctcgcctcacctcacctcacctcgccgactagggttttgtaccgccgtggatctcgccgtccccgccatggacgtctcgcacgcgggatcctccgtcgccggcgaggctccgacgaccggggagcaccggatggggactaccatcgtcggggtctgctacgagggcggcgtcgtcctgggcgccgattccaggaccagcactggagtgtatgtagccaaccgtgcttcatacaagattactcagctgacagacaatgtgtatgtctgtcgctctggatctgctgctgatacacaagtcatttcggattatgtacgctatttactgcaccaatcacgcttccaactgggacaaccagcatccggttaagtttcagccctcttggataggttgctagcttatcagaaccagaacatttttg

SEQ ID NO: 99023 - DNA, 511 bp, Zea mays
  unsure (1)..(511): unsure at all n locations
tggagtgtcnctatctatgatctcatccgactgacgtaccggtctcggaattcccgggtcgacccacgcgtccgcacacaactagggcgaccgccgccgacctacggccagctgtgcccatgtcttcgtcgggcccctttgctggcgacgggaacccaccacaccggccgccaacctgaggttttgtgggctcagcgctccgagaagattttcttgactatctcattgccagatgcgaaagatgttgtgttaaagaccgatcctaagggcctctttaacttctctgctgttgtccatggggaaccttttagcttcactttggagctttttgattcaatactgtcagagggaagtaaaacgaagacaaagatgggcctgcgaaacataatctgctcaatccagaaagaaaagaaaggttggtggaagcgcttgcttaagtcagaggaaaagcatncatacatcaaagttgactggaacanatggtgcgatgaggattgagagtctgagttct

SEQ ID NO: 99024 - DNA, 510 bp, Zea mays
  unsure (1)..(510): unsure at all n locations
tgggttgtaacattgatggagatgcgtccgccgtaccggtccggaattcccgggtcgacccacgcgtccgtttctccagaaaatgttaaatatgctgccatgcttggtctgtcagcagcagcaatgaagtctaagctctttgccgatcaagaagaacgcgaagtgcaaagactaactgctactgtaataaatcatcagttgaagagattggagttgaagctgaagcagtttgcggaagttgagaccttgctcttgaaggaatgtgagcaagtagaaagggttagacacaggatttcagctgaacgcgtcaggatgaggtcagccctattaggtcccaccggaagcggtctaccagggggcagttgtagcactatgccatcaaatccagcaggcatgagccccagaccagtcggtgtgccaggctacatgccacagaccagcatgccagccacatatgccaacaacctgcaggggcatgggaatnctcagatgccgttcttacatcagcgg

SEQ ID NO: 99025 - DNA, 511 bp, Zea mays
tgtatgtgttgctgatcccagtccgagatcgatcgacgtaccggttcggaattcccgggtcgacccacgcgtccgcacagttctatgaccattcgtgccccaaggcgattgagattgtgcagtccattgtggcacaggctgtggccaaggagaccaggatggcggcatctttagtcagactgcatttccatgactgctttgtcaagggctgcgatgcttcggtgctgttggacaacagcagcagcatagttagtgagaaagggtccaacccgaacaggaactccctcagggggtttgaggtgatcgaccagattaaggctgctcttgaggctgcctgcccaggcacagtctcctgtgccgacattgttgcccttgctgctcgtgattccaccgccctggttggtggaccatactgggacgtgccacttggccggagagactcggtcggtgcatgcattcaggggctccaacaatgacctcctagcataacccaaccttttgtcataaaaaa

SEQ ID NO: 99026 - DNA, 421 bp, Zea mays
  unsure (1)..(421): unsure at all n locations
gttcggggnnnnnnntttgaatctcataggactgacgtaccggtccggaattcccgggtcgacccacgcgtccggctgggagaggctttacccttgaggagcttaaggctgctggcatcccaaagaagcttgctccaaccattggtatttctgttgatcaccgccgcaagaacaaatcccttgagggactgcaggccaatgtccagaggcttaagacatacaaggccaagctggttatcttcccaaggcgtgcgcgcaaggtgaaggctggtgactctactccagaggagcttgccaccgctacccaggtccagggtgactacatgccatttactcgtggtgagaaacgttcagttgaggttgtgaaggtcacagatgagatgaagtcatttgctgcctatggcaagctccgcccttggaa

SEQ ID NO: 99027 - DNA, 426 bp, Zea mays
  unsure (1)..(426): unsure at all n locations
tgatgtggtngntnnaatatagagnctgaatcgtaatgcccgtactggtccggaattcccgggtcgacccacgcgtacgcccacgcgtccgcccacgcgtccgcccactcgttcgcccacgcgtccgggctgttgtggctgaggtcccggtgaccgaggtgccagcggaggtcccggcggcccaggtggccgaggcgcccaaggcgaagaaggcgcccaaggagaagaaggcgcctaaggagaagaagctttccgcggcgaagaagccggcggcgcaccctccctacgctgagatgattgtagaggcgatcgctgccctcaaggagaggaaggggtcgagctcggtggccatcagcaagtacgtcgaggggaagcatggcggcaagctccccaccaacttccgcaagcagctcactgtgncaagcc

SEQ ID NO: 99028 - DNA, 502 bp, Zea mays
  unsure (1)..(502): unsure at all n locations
nggagtggggtgatatgatagagatcgatcgccgtaccggtccggaattcccgggtcgacccacgcgtccgcccacgcgtccgcccacgcgtccgcccactcgttcgcggacgcgtgggctgacctcgttggcctcacctacctaccaatggttatcaaggaggttcttcggctgcatcctccaaaccctctgttggtcccgcgtgagtcgagagaggattgccaagtcatgggctaccacattcccaaaggcaccaaggtgctcgtgaacgcatttgcgatctccagggattcaaggtactggaacaaccctgaagattttagcccagagaggtttcagaataacaatgtcgactacaaagggaccgattntgagttcacccncttcggtgctggtcgtcgacgctgccctgcaatcatgtttgccacttttactctagagatggcattggcaaaccctctttaccacttcgactgggctcttcccggatggagtgagccc

SEQ ID NO: 99029 - DNA, 504 bp, Zea mays
  unsure (1)..(504): unsure at all n locations
agtagctgtngtgtcccagtccgagatgcatngacgtaccggttcggaattcccgggtcgacccacgcgtccgggagaaatgagcagttttgggttattggttgcacttctgcccatctcttcgcggtgttccagggtctgctgaaagtgttggctgggattgataccaacttcacagttacctcaaaggcatctgatgaggatggcgactttgctgagctatatgtgttcaagtggaccagtttgctcatccctccgaccactgttcttgtcattaacctggtcggaatggtggcaggaatttcgtatgccattaacagcggctaccaatcctggggtccgctctttggaaagctgttcttctcgatctgggtgatcctccatctttaccccttcctcaagggtctcatgggcaggcagaaccggacgccaacaatcgtcatcgtttggtccatcctccttgcgtctatcttcttcttgctgtgggtgaagatcgatcctttc

SEQ ID NO: 99030 - DNA, 509 bp, Zea mays
  unsure (1)..(509): unsure at all n locations
gacggtngtnncctagctgacatgcgatggactgccgtaccggtccggaattcccgggtcgacccacgcgtgcgcccacgcgtccgtccacgcgtccgtgttatggtgggcaatgatttaatgagttttgtgagtacctggccactaagttcatggaaggaaactcttgctctgctttgcacatttgcacagaaagaggagtggcatattttgtgtgacacacttgcgtctaggcttctgaatgtcggtgatacactagctgcgaccctctgttatatttgtgctggaaatattgacaaagctgttgaaatatggtcccgcaccttgaaatctgaagatggtgggaagacttatgttgatcttctccaggatttgatggagaaaaccattacgcttgcccttgctacgggccagaagagatttagcgcgtcactgtctaggcttattgagaactacgctgaattgctggctagtcaaggtcttcttaaaactgcaatggagtatttaaa

SEQ ID NO: 99031 - DNA, 506 bp, Zea mays
  unsure (1)..(506): unsure at all n locations
agggagtgtnntnncaatgatgtgaatctcatagcactgccgtaccggtccggaattcccgggtcgacccacgcgtccgcccacgcgtccgctctttacaggagcgctttttcactgaaagtggaacgtgttgcaagttcttttagtacactatttactatcactttgttgatttgctaggtgataacaaagttctgctctgaaagaattgccaagtatgcttttgagtatgcataccttaacaatcgaaagaaagtgacagcagtgcataaagccaacatcatgaagcttgctgatggtttgttcttggagtcttgccgtgaggttgcaaagaagtaccctggaattcaatataatgaaatcattgtggacaactgttgcatgcagcttgttgcaaagcctgaacaatttgatgttatggtcaccccaaatctttatggcaatctggtggctaatgtanctgcaagtattgctggaggcactggtgtcatgcctggaggtaatgt

SEQ ID NO: 99032 - DNA, 423 bp, Zea mays
  unsure (1)..(423): unsure at all n locations
ngagtatgttcntgtggctgaactgagctngantgtctgtaccggttcggaattcccgggtcgacccacgcgtccggagacattaaatgcgcatatattctggtgcatgcttatggatctgtgaagcttgcacattttggactcgctaaggagattaccaaattcaatgaacttaaatcatgcaaaggaactgtttattggatggcaccggatgttgttgatccgcagcagacatatgtacctgcagatgatatattgagtcttggatgcactgtcctggagatgttgacacgccagatacgctatcctgaccttgaatgggcacaagcttatatacaggactgggaaggattgaatcccctgctatttcaaacacatcttgtaagggatgccagcgattatgtgagccgctgtgcaataaaa

SEQ ID NO: 99033 - DNA, 513 bp, Zea mays
  unsure (1)..(513): unsure at all n locations
tgtggtnctactccctcgcgatcatgcgtctgcctgtaccggtctcggaattcccgggtcgacccacgcgtccgggagaagaggataagaggaagcgagtggtgtctgtgagtgagttggaaggaggggggtggcaatggcgttgcggaatggtggtggtggtggtggagcctgtcccgcggcggttgtgctggtggctgcggccgtcgcggcgctgctgggcgccggggtggcggcggcgaccaagttcgacgacgtggtgcagcccagctgggccaacgaccacgtggtgtacgacggcgacctcctcaagctccgcctcgactccagctccggcggagggttcgtgtcaaggaccaagttcctgtacggcaaggccagcgccgacctcaagctcgtgccgggggactccgncggcgtcgtcacggctttctatctgtcgtcgggccgggacaagcacaacgagttcgacttcgagttcctggggcacgtgaccggcgaggcgtacctggt

SEQ ID NO: 99034 - DNA, 508 bp, Zea mays
  unsure (1)..(508): unsure at all n locations
aggagtggggctgtatgctagtcatcatagcactgccggtaccggtccggaattcccgggtcgacccacgcgtccgcggacgcgtggggtctcccaccggtgacgtctacgtcggtggaaccactgggcttctgatctgggccgtcaccctcgctgggatcctcggcggcggcgccctcctcgtctacaacaccagcgccctctccggctaaggatatccaatgcatgcgcttcttgcgattcgtcatgtaaaatcagggtgtctgtctataatctagcctccatggatgctcaaccttcgtcatgtaacaataatcagtgctactcttcattacataattttgatgctatatatatataccccatccctccctaaaaaaaaaaaaaaagggcggccgctctagaggatccaagcttacgtacgcgtgcatgcgacgtcatagctcttctatagtgtcacctnaaattcaattcactggccgtcgttttacaacgtcgtgactgggaa

SEQ ID NO: 99035 - DNA, 414 bp, Zea mays
  unsure (1)..(414): unsure at all n locations
tggtctgtgtggcatgtatgagattgtatgctctaccggtccggaattcccgggtcgacccacgcgtccgcccacgcgtccgcttagtcagattcaagttattaaagaggcagttgagcttcccttgactttccctgagctatattaatacattggtattaggccttccaagggagtcatattataaggagaacctggaacaggaaaacctcttcttgccaagaacaaattttgagggtgagcatgatacagtcactgagaaggacctagaacatctnctgcaacttttagataataaggaaagcggggatacagcttggcagaatttgatggagcgtagaacctncaacatgacatacaatgcctggcggcgtgagcctgangagggacctataatgtactgcagcccgnccn

SEQ ID NO: 99036 - DNA, 421 bp, Zea mays
  unsure (1)..(421): unsure at all n locations
ggagctggtgctcgtccctggcacgataagtactgctctaccggtccggaattcccgggtcgacccacgcgtccgcctaaatccagcaaacgcaaaccccatcatgccgtcgccgcgatgtctcgccgctatgacagccgcacgacgatcttctcgccggaggggcgtctctaccaggtggagtacgcgatggaggcgatcggcaacgccgggtcagccctcgggatcctagcggccgacggcgtggtcctcgtcggcgagaagaaggtgacctccaagctccttcagacctcgcgctccgccgagaagatgtacaagatcgactcccacctggcgtgcgccgtggccgggatcatgtgcgacgccaacatcctcatcaacagccgccggctgcacgcccaacgctacgcgctctcncttt

SEQ ID NO: 99037 - DNA, 507 bp, Zea mays
  unsure (1)..(507): unsure at all n locations
tgtgggtnttcatgatagatcatgcatggccgtctcggttcggaattcccgggtcgacccacgcgtccgcgctagggtttatctgctcgaggaatggtttcggtgcaggtctccggcgcgggggtcggtaccgcggccttctctgtgaaggggaaggcctccaccggtgcgctccggcttcgctctacgttgaccttcggcgaggtctgcccggcgcggcgggcgttccgcggcctcgtcgtcagggccgctaccgtcgtcgcccccaagtatacaacacttaagcccttggctgatagagtgcttgtaaagattaactcttccgaggagaagacaactggtggaatcttgctccctacgactgctcagtccagacctcaaggtggcgaggtagttgctgttggagaaggaaggataattggggataagaaagttgatgtcagcattcaggttggagctcaggttgtgtattctaagtacgctgggaccgaggtcgcggttgacgat

SEQ ID NO: 99038 - DNA, 509 bp, Zea mays
  unsure (1)..(509): unsure at all n locations
tgcggttgttgccacgctacgaccgatggcctgtccggttcggaattcccgggtcgacccacgcgtccgccgggaaagagcttacgctgctggggtgttgggcgagcccgttcgtgctccgggcgcgcatcgcgctcagtctcaaaggcctcacctacgcttactgcgaggagaaccttgacgacaagagcgagcttctcctcagcttcaaccccgtgctcaagaaggtgcccgtgctcatccaccacggcaagcccgtctgcgagtcccagatcatcgtgcagtacgtcgacgaggctattcccggcgacgcacctaatttccttccatccgaccactacgaccgcgccattgctcgcttctgggcctgctacgtcgacgacaagttctacagcgcgtggatacccgtgttcaggggcatgacggcngaagagatggcggaggctgccaggcaggccgtcgcggcgctggagacactggagcaggcgttcagggagtgctacaagggn

SEQ ID NO: 99039 - DNA, 675 bp, Zea mays
  unsure (1)..(675): unsure at all n locations
gatgagtgttgctcactgccaggtnacgtacaggatctgccggtactcggtctcggagattcccgggctcgactccacgtcgtctcgtcccacgtccgtccgtcccacgcccgtccggttcgttctcagagagnngcctgcgagggagggggctcatcttgggggagtcaacannaccttgaggggatgannggtttgtggccnnngtgggttctcaagggcngccagcntttggtcgaccccttgnngtgaagctnnntggttgggtctgcngtagcctgctctggaattctgggccgcnccattggttnnntcggttggcanatnnnttctttcctttcaaggggttgttgggacttccaangnaatggtnncgtccangnnagaggcntcgcgaaggtgagggngtccccagtggatagaccacgatgagcgaattggcggaagtggcttttggnnntggtgaatgannaaccgnngcatcattgggtcttcaacttgcaangataacccgatcannagtgngatgggtaantttaggcncttggnaaccaatcttgtttgaacttgaagggaacctgcaaaagtatcgaccatgtttcaaagggttttcgatgccggntttgcagtttggaccaaagtgggggaatttggtggaaaagcttggctgtaaag

SEQ ID NO: 99040 - DNA, 421 bp, Zea mays
  unsure (1)..(421): unsure at all n locations
tgagtggntgtgatcccagcctgagaacgcactgctctaccggtccggaattcccgggtcgacccacgcgtccgcccacgcgtccgccccggccgccgcggtgtcaacccagctctccggagcgcccgcgacccctgctcccgtcgtcagggtggcggcgccgcgcggagtcgcctcgccgtccgctggcgccgcgtgcagggccagcgggcaaggggaaggaggtgctcagcggtgtcgtgttccaacccttcgaggacatcaagggggagctcgccctcgtgccccagtactcagacaagtcgctcgcgcgccacaagttcgtggatgactgcgaggccgccctcaacgagcagatcaacgtggagtacaacgcctcgtatgcataccactcgctcttcgactatttcgacgcgcggac

SEQ ID NO: 99041 - DNA, 417 bp, Zea mays
tggagggtgctatatagagatggatgtactgcccgtaccggtccggaattcccgggtcgacccacgcgtccgccaccacaagcgccgccgcagccggtgcctgctccttcccgatccccgaggcaaagctgcgactccgcaaccgccgccatggcgttcgagaagatcaaggtctccaacccaatcgtcgagatggacggtgatgagatgaccagggtattctggcagtctatcaaggacaagcttatcctcccatttctggacctggacatcaagtactatgatttggggatactgcaccgtgaagcaactgatgacaaggtcacagtggaggctgcagaggctactctcaagtacaacgtggctattaagtgtgcgaccattactccagatgaaactcgggttaaaggaggtttt

SEQ ID NO: 99042 - DNA, 511 bp, Zea mays
  unsure (1)..(511): unsure at all n locations
tgagatgttgctcctcccgactatgnatgcatcgcttcggactggatttcccggctcgacccacgcgtccggcggcgaagaagccggtggccaagaagctcgcttaggatgagcccgcgacagagaaggcggtgaacgctccggcggggaagaagcccaaggccgagaagcgcctaccggcgggcaagtccaaggagggcggctagggctagaaggggaaaacgaatgcgaagaagtccgtggagacctacaagatctacatcttcaaggtgctgaatcaggtgcaccccgacatcggcatctcgtccaagggcatgtccatcatgaactgcttcatcaacgacatcttcgagaagctcgctggcgagtcctncaagctgggacgctacaacaagaagcccaccatcaccgttcgcagagattccgaccttcgtgcgctctagtacgcctctgagagcctgcctagcgcggctgtatgaggggactttaactgtgctcctacatccacagc

SEQ ID NO: 99043 - DNA, 516 bp, Zea mays
  unsure (1)..(516): unsure at all n locations
ggaagatggntgctcatgacagacaaagtgaatgatcggctcggactcggaattcccgggtcgacccacgcgtccggccgccgccgccaccaccagcactgccactctcttcaccaccgtcccgaagccccctcccagcgccatcgacttcatctcggattgaagcaatgtcgtcggacgatgaggtcagggaggagaaggagctcgacctctcctccaacgacgttgtcaccaagtacaaggctgccgccgaaatcctcaacaacgctctgaagattgttgtgtctcagtgcaagccaaaagtcaagattgttgacctttgcgagaagggcgactctttcataagagagcaaactgggaatgtttacaagaacgcaaagaggaggattgaaaggggtattgctttcccaacctgtgtatncgtcaatgacacagtttgccacttctcaccgcttgcaaccgatgatgccgttctggaagaaaatgacatggttaaaattgatatgggctgtcata

SEQ ID NO: 99044 - DNA, 508 bp, Zea mays
  unsure (1)..(508): unsure at all n locations
gactggtgtcctcntgaatanagtattgaactgctcgtaccggttcggaattcccggctcgacccacgcgtccgcccacgcgtccgcagaagatcaattgctttccaaatccacgctgacaccaactcgacgagctgcgcgccaagcaccaaagctccgatgggccgcactaaacagactgctcgcaagtcgacgggcggcaggcgccccacaagcagttcgcgaccaaggcggcgcgcaagtctgcgcacgccagcagctgcgtgaagaagccgcaccgctttcgtcccaggaccgttgcgctccgggagatccgcatgtaccagatgagcacggagctgctgatncgcacgttgcccttccagggcctcgtccgtgagatcgcgcaagactttaagaccgatctgcgattccagtcctccgacgtcgacgcgctgcatgaggccgtcgaggcctacctngtgtggctctacgaggacactaacctctgcgccttccacgccaagct

SEQ ID NO: 99045 - DNA, 415 bp, Zea mays
tggaatgtgctataaagaatgaacagcatgctcgtaccggtccggaattcccgggtcgacccacgcgtccgcatggtaccaccttatgggactccaccattaccttatgtgatgtatccacctggagcagtatatgcccatccctctacacctcctactatgcatccgtttagtcattaccctatgccaacaaatggacatgctgaaactcctggaaccgcgccaagtgctccagaaatgaatgggaaaagtgagcctggcagaacatctgctccatctgccaatgggattacctcgcacagtgagagtggaagtgagagtgagagtgaaggaagtgatgccaattatgaaaatgattcacattcaaaggacaatgatggaaaggaagatggcaattctcagaatagcataattt

SEQ ID NO: 99046 - DNA, 419 bp, Zea mays
  unsure (1)..(419): unsure at all n locations
agagttgttngctggcccatccagagtcggactgctctaccggtctcggaattcccgggtcgacccacgcgtccggctcaaggtgtccaaggcggagttcatcgttctgtcgcgcaagtccggcaagttcgacgaggacagcctggcgttccagtcgcgtctgctggccaagtccggcatcggcgacgagtcgtacatgccgcgctgcgtgttcgagcccaacgccagctgcgccaccatgaaggagggccgcgccgaggcgtccacggccatgttcgcggcgctggacgagctgttcgacaagtgccgcgtccggcccaaggacgtgggcgtgctggtggtcaactgcagcctcttcaacccgacgcccttcctgtccgccatgatcgtcaaccactacaagatgcgcgggcaacaaa

SEQ ID NO: 99047 - DNA, 511 bp, Zea mays
  unsure (1)..(511): unsure at all n locations
tgagtgtnatctccactacgatcatcgtagtgccgtcccggttcggaattcccgggtcgacccacgcgtccgagaaaactgatgtatttggctatggaatttcacttttagagcttattacaggacagcgggccttcgatctagcttgccttgctaatgatgatgatgtcatgcttcttgattgggtcaagggattgctcaaggagaagaaactggagagtctggtcgaccaagatctagaacacaactacgtcgacgttgaggtggaatctctggtacaggtcgcactcctctgcactcagagcaaccccatggaacgccctaagatgtcagaggttgtgaggatgctcgaaagcgatggtctcgccgagagatgggaagagtggcagaaagcggaagtagtacggcaagaggtcgagctaggccctcatcgaacttcngaattgatcctcgacttgaccgacaaccttcacgcttgacagctgtcanggcccangtgaaggcagctttt

SEQ ID NO: 99048 - DNA, 514 bp, Zea mays
  unsure (1)..(514): unsure at all n locations
ggtagtgtntnatcatgatagataatgatggatcgtgctcggctcggaattcccgggtcgacccacgcgtccgcggacgcgtgggcggacgcgtgggcggtctaagaagaccgacgactcactcacaaccaattagctcaagatcgagctatagagagaaaagctaagatcgaaacatataccaatgggcaacagccttaggtgctgcctggcctgcgtcctcccctgcggcgcgctggacctgatcaggatcgtccacctcaacggccgcatcgaggagtacggccggccggtggccgccggcgagatcctggccgtcaacccgaaccacgtnctcagcaagccgtgctcccagggcgtcgccgtgcggaggatcctcatcgtgtcgccggactccgagctagagcgcggcgagatatacttnctcatcccggnctcgtcggtgccgccggagaagaagccgnagncgcagcgacagcagaagagcgtcgtcctggccggctcgcacggcaac

SEQ ID NO: 99049 - DNA, 513 bp, Zea mays
  unsure (1)..(513): unsure at all n locations
gagagggggtgncccgtacgcncttgatctgactgctgtaccggttcggaattcccgggtcgacccacgcgtccgcaccggggcagagcgcttcagtgacacatgccgctgctccaagaaaccaccgccgagcccaaccgcacaagcgcgcgaggcaggagagagagagaggcggtgagcaaaacaatggaggggaaagaggaggacgtgcgcctgggcgccaacaagttctcggagcgccagcccatctggacggcggtgcagggcgccgttgacgacaaggactacaaggagcccccgccggcgccgctgttcgagcccggggagctcaagtcctggtccttctaccgcgcgggcatcgccgagttcgtcgncaccttcctgttcctctacatcaccatcctgaccgtcatgggcgtctccaagtccacctccaagtgcgccaccgtcggcatccagggcatcgcctggtccttcggaggaatgatcttcgcgctcgtctactgcaccgcc

SEQ ID NO: 99050 - DNA, 517 bp, Zea mays
  unsure (1)..(517): unsure at all n locations
ggtaagactgtgtgatcatgatagatatgcatcgactngccgtactggttcggaattcccgggtcgacccacgcgtccgcccacgcgtccgcccacgcgtccgtccactcgtccgcccacgcgttcgcccacgcgtccgcggacgcgtgggaggagatcttcattggactgaccctgggtctgatcgcgggaggcatgtggaagatgcaccactggaacgagcagaggaagactaggtccttctatgacatgcttgacaagggccagatcagcgttgtcgtcgaggaggtaagagttcttcccaggtattttcaaagaactctctcgagagcatgacaaagtgattgctggctgtggaaatttgtcctggaaataagcccaaccatttgggaccaccaaattttgccgaattttcctttcctttggatgaatatttgagcccgtccatgtaaataccaaacatttggcctttacttcatctcttttttccttaaaaaaaaaattaaaaattaaaaaa

SEQ ID NO: 99051 - DNA, 512 bp, Zea mays
  unsure (1)..(512): unsure at all n locations
tggaggtgggttgtaatgatggggaaatgattgtgactgctcgtaccggtccggaattcccgggtcgacccacgcgtcacgccacgcgtccgctagttctagatcgctctctatctagaactagtgctcctgatgaagaaggaataccactcaaaaaggttatggatgcatgctcttcttgctttgagcaaagaacaatatttacccagcaagttctggcaaaagcactaaatcaactggttgaacagatacctctatctttgctattcatgaggactgtcatgcaagcaataagtgtttttactgcattggtggattttgcgatggagatcatgtcacgccttgtgagcaagcagatttggaaatattccaagttattggtaggacttctgaagtgtgctatcttgacaaaaactnagtcatatggcagtgtgctgcaaataccagctactaaacttgagaatgccttgagtaagaacccggcacttcatacccccttggctgagcatgcc

SEQ ID NO: 99052 - DNA, 422 bp, Zea mays
  unsure (1)..(422): unsure at all n locations
tggagtgtngctaatatgtgatttagatggattgcctcgtaccggtccggaattcccgggtcgacccacgcgtccgcccacgcgtccggtttctaattcaggcgttctccatcagatcctgacaatttcccttttgttctgttgggtaacaaagttgatgtagatggtgggaacagccgtgtggtgtcggagaaaaaggcaaaggcatggtgcgcctctaaagggaacatcccgtactttgagacgtctgctaaggatggaacgaacgtggaagatgccttccagtgtattgtaaagaatgctctgaagaatgaaccggaggaagaattgtatgtgccagataccgtggatgtggtaggtggcaaccgggctcagagatcatctggctgctgttaagacatgaggcatccacgaggccgttt

SEQ ID NO: 99053 - DNA, 421 bp, Zea mays
  unsure (1)..(421): unsure at all n locations
tagtgtcgnctctnccatgtacccgtgcacgcactgctgtaccggtccggaattcccgggtcgacccacgcgtccgcggacgcgtgcggcttctaattcatgcgtttccatcagatcctgacaatttcccttttgttctgttgggtaacaaagttgatgtatatggtgggaacagccttgtggtgtcggagaaaaaggccaaggcatggtgcgcctataaagggaacatcccgtactttgagacgtctgttaaagatggaacgaacgtggaagatgccttccagtgtattgtcaagaatgctctgaagaatgaaccggacgaagaattgtatgtgccatataccgtggatgtggtatgtggcaaccacgctcagagatcatctggctgctgttaagacatgaggcatgcactagggcggtt

SEQ ID NO: 99054 - DNA, 519 bp, Zea mays
  unsure (1)..(519): unsure at all n locations
ggaagtgggntngnnattgataaganctgcatcgnacgtaccggttcggaattcccgggtcgacccacgcgtccgcccacgcgtccgcggacgcgtgggtgactttgcatgccatgcccatgacacccctcgggtgcgagtgcgacatggcccctgcagcttctcgccagtcgtggcctctccctcgctgcggcctgctggtcttggcccttgcactggcgacgaccgccgcggtgggcagcgcgcagctgtcgtccgagagctactacgacgcgtgctgccccgcctgccttctcaccatcaggaccgacgtctcgacggccgtgctgctggagccccgcatgggggcctgccttctgcgacttcacttccacgactgtttcgtgcacggttgcgacgcgtcggtgctgctagacgacacggcgagcttcaccggcgagaagggggcggcgccgaacgcggcgtcgctcccgggcttcgacgtgatcgacgacatcaagatgctgctggagctgctgn

SEQ ID NO: 99055 - DNA, 418 bp, Zea mays
cggagtgggggtctgatgagctgcatgcactgacgtaccggtccggaattcccgggtcgacccacgcgtccgcaggagaatgttttggctgagtcaaggattatggtcccagactgccacaaacgacttgaaactgcactggctgacttgaaagcaacactggctgaactgaaggagtcaaatgagcaaggtgccgagattggagaagctgagagtacaatcgcagaagttgaagcagttgtcaagccagcagaagattaaactaaaaaaactcttggtttgctgaactgttagcgcacatcctattttcgcatattgagcccttgtgagcctattacgagatgtttgaggcgtgaaatcctgtaccattatcatcacttctatcttgaaatttgagtttctgttcccaaagttcaaa

SEQ ID NO: 99056 - DNA, 422 bp, Zea mays
  unsure (1)..(422): unsure at all n locations
tgggattgtgtgctctgcatgattatgagtctactgcacgtaccggtccggaattcccgggtcgacccacgcgtccggaactttctagtgctgatggattcttgcttagaaggtcatgtatccaactcggacggaacagacttgatgcgattagcatcccgttgcctgcaatatgaagcacgtgaccgtccaaatctgaaaactgtggtatctggtctcacaagtctccagaaagatgcttatactccttcgcacactttgcttgggattcaacatgataagaacaactcaggtcaagtttccttatctgctattgggaaagcttttgccagagcagacctgaatgaagtgcatgaaatattgctgcatgatggatataatgaggacgacnaggctaatgctgagctatctcttcaggtnnc

SEQ ID NO: 99057 - DNA, 534 bp, Zea mays
  unsure (1)..(534): unsure at all n locations
ggggggnnnannnatgacctgagtaccataggacctgcggtactcggttcggaattcccgggtcgacccacgcgtccgcggacgcgtgggctgtcggtgagatcgcttgtggcgacgacggcgcctgtggccacgccggggtccagcacggcggccaaggatgggaagaagaccgtgcggcagggcgtggtggtgatcacgggcgcgtcgtcggggttgggcctggcggcggccaaggcgctggcggagaccggcaagtggcacgtggtgatggcctgccgcgacttcctcaaggcggccaaggcggccaagggcgccggcatggcggacggcagctacaccatcatgcacctggacctggccttcctcgacagcgtgcggcagttcgtggacagcttccggcgcgccggcatgccgctcgactcgctcgtcttgcacgccgncatctaccggcccacggcagggacgccgacgttcacggcggacggatacgagatgagcgtcnggcgtaaccacctgggccactttcttctg

SEQ ID NO: 99058 - DNA, 529 bp, Zea mays
  unsure (1)..(529): unsure at all n locations
nggtggggtnaagatgaatctaatctatngtanngccgtaccggttcggaattcccgggtcgacccacgcgtccggtccctcacacactcactatacactgctctgctgcagcaagaaggaagaagctagcgcctccctagctctcgttgtcagcaatggccaccaccgctgcgtccagcctcctcaagtcctccttcgcgggctcccggctcccttcggccacgcgcaccaccaccccgtcgtccgtggccgtggccaccccgcgcgccggcggcggccccatccgcgcgtccattctctcccccaacccgccctacgacctgacgtccttccggttcagccccatcaaggagtccatcgtgtcccgcgagatgaccccgcgctacatgacggacatgatcacccacgccgacaccgacgtggtgatcgtggggcgccgggtccgcgggcctgtcctgcgcgtacgagctgtccaaggacccnaccgtgagcgtggccatcgtggagcaagtcctgtcccccggcggc

SEQ ID NO: 99059 - DNA, 419 bp, Zea mays
  unsure (1)..(419): unsure at all n locations
ggagtggtnntnaaccctcgtctcatgcactggcatacccgtatggaattggaattcccgggtagacccacgcgtacgcggacgcgtggggttccagcggtctattggttttgagtgggaactcataacttacacagatgatacttcatctttagcagaaactgatttggatgttctgtccagaaccaagcctaaagaagcaaacgagcttatttctaagcaggaatcgcaggataagttggaaaaggctcctgatacctctgtgccaactaatgggaatagctaccaagaaaagcttattggcagcccagatatacgaccaaagaaattggccttaaaattagcatttactttaccaacatcatgctacgctacaatggctatccgggagcttctgaagacttccacctcagtttggg

SEQ ID NO: 99060 - DNA, 529 bp, Zea mays
  unsure (1)..(529): unsure at all n locations
tggtgcnnnnnnaatcgatagcatctcatcgctgtaccggtctcggaattcccgggtcgacccacgcgtccggaggctgcagtggaggacatgggccgcctgcttcatccaagctgcctggcaccggtactgcaggaagaagatcgaggattctttgcgtgagaaggagaagaggctgcagttcgcgattgccaacgacagctccacttcgctcagcttcatggcagcgctgtatgcttcgcggttcgctgggaatatgatacggatcctgaggagaaacgccacgcgcaaggccaggctgcaggaaagagtgcccgcgagactgctgcagaaaccggctgaacccaacttttccgcagaagagcagtagtatttcgcttctctgacttctcgttttgcagatacagatatgggaaaattgttgcgtgacttgcaagcccgangatggcatgcccagattaaaaagaagaagaagaaaaggggaatgaaatctcgatagaatgaccactgagtgatagttatgtagtga

SEQ ID NO: 99061 - DNA, 530 bp, Zea mays
  unsure (1)..(530): unsure at all n locations
aggcgtgggtgctaaaatagattctcatcggaccgccgtaccggttcggaattcccgggtcgacccacgcgtccggttctatgcagcatattgttatcaattgtatatcttgatttgattcctattggatttggattagttcgatttcaataggggttcttcctgtatttcgtcttttattatgttagatgaaggggaaaaaatgggaactcaaagatatcgaagagtaaaaaaaaggatggaataaaagagtgattggttgaaaagaaagagaaatagaataatgagaatcatatggatttacacaaacctctaatgattagaaactaaaaacgagatctcgaagtaattcgaacgatttcgattatcatttatttgtacttattagttacttctacccgatagagcttaaaaagttgaaagtaataaatntctttggctgatggtatccttaaccatttctntttttttgacacgagggactcatcatgaatccactaatngctgctgctttcgtattgctgctggat

SEQ ID NO: 99062 - DNA, 526 bp, Zea mays
  unsure (1)..(526): unsure at all n locations
agttggggntangatgatagaaactcatcgccgtaccggttcggaattcccgggtcgacccacgcgtccggcctccgccgctggaatcaggcgatgggttacgcggacgcctacgcgaagcgggtgctactcaccgcagctggcgacaccgtctcgcgggggatcgcctctaccctcaccaagcacggctgcagattggtcttgttgggcgacgagggcgcgctggccgcgacggaggaggaggcgcggcgctgcggggtagggggcggatgcgtcgaattggtcgggctggacttcaaggcgtgcggtgaggctgctgccgacgcggcggtggatcgggcctggcgctgcttcgccggactggatgccttcgtcaactgctactcctacgagggggaggtgcaagattgcctcagtataagtgaagacgagtacaggaagaccatcaaaagtaatgtgataacaccttggnttctaatgaaggcgatcgcnaaagcggttccaggatacaaaatctggtggatct

SEQ ID NO: 99063 - DNA, 526 bp, Zea mays
  unsure (1)..(526): unsure at all n locations
tgagtgcnnnctatcacgagtgtcatcgcatcgacgtaccggtccggaattcccgggtcgacccacgcgtccgctcgcgtctctttcctattcgcgccgccttcgctgccgctgctgcaagcgccagctcgccgtcgtccgaatagtacactctaacgccgccatggggcgtatgcacagccgcgggaagggtatctcgtcgtcggcgctgccgtacaagaggacgcctcctacctggctcaagaccgccgcctccgacgtggaggagatgatcacaaaggcagcgaagaagggacagatgccgtcgcagatcggcgtcctgctccgtgaccagcacggtatcccccttgtcaagagtgtcaccggcagcaaaatcctccgcatcctcaaagcccatgggctggcacccgaaatcccggaggacctgtacttnctcatcaagaaggcngtggcgataagggagcaccttgagaggaacagggaagacannagactctaaatcaggctcattcttgtcgagagcagg

SEQ ID NO: 99064 - DNA, 418 bp, Zea mays
  unsure (1)..(418): unsure at all n locations
tggttgtnttaaaatgtatacggattttcattgcactgccgtaccggtccggaattcccgggtcgacccacgcgtccggcttgccactggggatgtgctattcgatccacatagtgggcgataattttgacagagatgaggatcacctcgcactgatgatggagctgctaggaatgatgcctcgaaagattgcgttgggtggtcggtattcacgtgatttcttcaatcggtatggggatttgcggcacatccgacgcttgcggttctggcctctcaacaaggtgctgatggagaagtacgagttcactgaaataaatgctaatgggatggcagattttcttgttccaatacttgattttgttcctgagaagcgccctacagctgctcaattgcttcagcatccatggcttggattggn

SEQ ID NO: 99065 - DNA, 526 bp, Zea mays
  unsure (1)..(526): unsure at all n locations
tggatggggctatgtagtatggatatggatcgctctaccggtctcggaattcccgggtcgacccacgcgtccgcccacgcgtccgcccacgcgtccggctgtcccgtctcgtcctcttcgccagcgaaaaccctagtctaggggacgggagcgcaatccacgcacggcaacatggacgccatccgcaagcagctcgaccagctcatgggggccaaccgcaacggcgatgtacgggaggtcagccgcaagtactatgatcgcgacgtctgccgcctctacctcgccggcctctgcccccacgacctcttccagcttaccaagatggacatgggcccgtgcccgaagctgcactcgctgcaactgcgcaaagagtatccttccaagtgaacagntactntatcttgtgtatntgnttgtgggggttagtttttgagtcaggcttaatgtgtaaaagccaattcaacgattcataacattacatttgatttttttgtctgcttaatggttcgggaggaagtcacggtgg

SEQ ID NO: 99066 - DNA, 525 bp, Zea mays
  unsure (1)..(525): unsure at all n locations
tggttgttcgctgtgactagtatgttactgatcgctctaccggttcggaattcccgggtcgacccacgcgtccgcccacgcgtccgcccacgcgtccgcttacttcctgcggaactactacaacctgctgcaacaaacccccgatgtcgtccaccagttctacagcgaagccagcaccatggtccgcgtcgacgacctcaccggcacgaccgcggctgccaacaacatgatggacatacactcactcatcatgtctttgaacttcacccaaattgagatcaagactgccaattttgtgaactcatggggcgatggggtgctagttatggtctctggtctagtgcagaccaaggagtacagccaccaaaggaaatttatccagatgttcttccttgcccctcaagagaagggttactttgtcctcaacgattactttcacttcgttgaccaagaacatgtgcagcctgcgccagtgattgctcaggaagactacgagaagcatttggcacccaacacagtntgtga

SEQ ID NO: 99067 - DNA, 522 bp, Zea mays
  unsure (1)..(522): unsure at all n locations
tagactgggtgtcatgatagatgatgcataggantgnctgtactcggttcggaattcccgggtcgacccacgcgtccgcggacgcgtgggtagccatagtaatgaattagtgccaggaggagcagcttatgggtcacttgggtgttgtgctgtatgagtacttacgagaggagtatcctgaggtgcttggttcaattcttggagccttgaaggctatcctcaatgtcattggtatgactaaaatgactgcaccaatcaaggatcttcttcctcgtctgaccgccattcttaagaacaggcatgagaaggtncaagagaactgcattgatcttgttggtaggattgctgatcgtggagcacaatttgtgcccagcaggggaatggatgacgatttgttttgaactgctcgaaatgttgactgctcatangagggtattaggagagccactgtgaacacatttggatatatcgcaaaggctatangggcacatgatgtgtaggcacccttgtgaataacttgaa

SEQ ID NO: 99068 - DNA, 526 bp, Zea mays
  unsure (1)..(526): unsure at all n locations
agttgttctanccatgattggagatgcatagactcgccgtaccggttcggaattcccgggtcgacccacgcgtccgcggacgcgtgggtggcggggctctacgataagccgtcggagacgtacgccaagaagcgtccgcagtaccccaaggagtggttctccatgctggccggcctcaccgcggggcaccagcgcgcctgggacgccgggtgcggcaccggccaggccgccatcggaatggcggagcactacgagagcgtggtggcgacggacgtgagcgagggccagatccagcacgccatcgcgcacccgaaggtgcggtacctccagaccccggagcacctgtcggaggacgaggtggtgtccctggtcggcggcgagggctcccttgacctggtcgtggtggccacctncatccactggttcgacgtcccgctcttctacgccgtggtgaagcgcgccctgaggaagcccggcngcgtgctcgccgtgtggggctacaactacgagatccaaccggtcgagg

SEQ ID NO: 99069 - DNA, 419 bp, Zea mays
tgagttgggctggcaatgctcagtcatgcatcgcactgccgtaccggttcggaattcccggctcgacccacgcgtccgcccacgcgtccgcccacgcgtccgtttgtttccttcatgtcagagagggatggtatcctttcatcgttggctcggcgtgcaaaggctttggaagaagcattcaacagtttagaaggaattacatgcaacaaagccgaaggtgcaatgtatctgttcccacgccttcatttaccccagaaggcaattggagctgcccaagcagtcggcactgcgccagatgcatactacgcaaaacgcctactggaagccactggaatcgtcgtcgtccccggttctgggtttggacaggtccctggaacgtggcacttcaggtgcacgatactgccgcaggaggacaataa

SEQ ID NO: 99070 - DNA, 418 bp, Zea mays
  unsure (1)..(418): unsure at all n locations
tggagttgtnctaccatggatcggaattgcatagcactgctgtaccggttcggaattcccgggtcgacccacgcgtccgggaggatcgtggccagtgcttctgtggctgctgactgcagcctgcatcaaaactggacggccgcagattgcaagaagagcaatcgacctagcagagaggaggctgttgaaggatggctggccggagtactatgatgggaagcttggtcggtatgttggcaagcaggcgaggaaattccagacttggtccatcacggggtatttggtcgccaagatgctgttggaagatccttcacatcttggcatgatcgccctggaagaggacaaggcgatgttgaagcctgttttgaagcggtccgcgtcatggacaaattgagatggtgacgaaaattttttaggg

SEQ ID NO: 99071 - DNA, 533 bp, Zea mays
  unsure (1)..(533): unsure at all n locations
cgactgtgctgtcatgattgacatccgatngctcgtaccggtctcggaattcccgggtcgacccacgcgtccgcccacgcgtccgagcagacggggagagattcagatccactcgtcacacatccgcgttaccccctctcccttggtttcctctcccaccaccaacccccatcccggttatctccgccgccgcccgctttgggaaggcgcgacgaaggcaggcgagaggctccagccggacgaggaggaaagaggagcagcagggccggaggagagatgttcctgtgggactggttctacggggtgctggcctccctcggcctgtggcagaaggaggcgaagatcctcttcctcggcctcgacaacgccggcaagaccacgctgctccacatgctcaaggacgagccgnttggtgcagcaccagccgacgcagcaccccgacgtcngaggagctcaacaatggccaggatccaagttcaaggccttcgaacctcggcggcaacagaatcgtgcgcccgcgtctggaagggatt

SEQ ID NO: 99072 - DNA, 529 bp, Zea mays
  unsure (1)..(529): unsure at all n locations
cgggtggggnnnnaatgtacgtanctgcatcggactgctgtaccggtctcggaattcccgggtcgacccacgcgtccgcccacgcgtccgctccgctcggccaccatttttgaccgccttccctcccctcgtctcctgtgttcctacataccccactccacccgcaggagcggcgcggcggcggcaaaggcaaaggcaaaggcaagatgttcgggcgcgcgccgaagaagagcgacaacaccaagtactatgagatcctcggggtgcccaagtcggcgtcccaggacgacctcaagaaggcctaccgcaaggccgctatcaagaaccaccccgacaagggcggtgaccccgagaagttcaaggagctcgcacaagcctatgaggttttgagtgatccagagaaacgttgagattatgatcagtatggtgaagatgccccttaaagaaagaatgggtngacgtggaatccatgctgaaacatttgacattgtctcatcaatctttggaacccttttttgaagaggtgggg

SEQ ID NO: 99073 - DNA, 419 bp, Zea mays
  unsure (1)..(419): unsure at all n locations
gtagatggnntngccctgacatgatactcatcggactgccgtaccggttcggaattcccgggtcgacccacgcgtccgcccacgcgtccgcaaagatgctgtcttattagcagcaaaaaaggcaaaagaggctggaagcacccgtttttgcatgggagctgcatggagagaaaccattggaaggaaaacaaacttcaaccagattcttgaatatgtcaaggaaataaggtattcattggaatcttttgtttatatggcaaaagtatggtatatgacgcttgacctgcataaccatgcacaattgtctgtcacctatgatgtacaggtcattgacttaacagccttaattacatggaatatgaagatatatccagccagcaaaagttttatgcatgattcttatattntatttcaacccc

SEQ ID NO: 99074 - DNA, 416 bp, Zea mays
  unsure (1)..(416): unsure at all n locations
tgggagttggcttgncatgaatgaggattcatgcactgccgtaccggtccggaattcccgggtcgacccacgcgtccgtatgtttgtgtctgcatcctgtcagcaattaggatgtgacaggacatggcctccctccaatgcaaaaatcccaaaagctccttgcaggcacacttatttgcattctttgcgctgacatgcagttaggatgcgatagggcctccctccaatgcaaaatcacattaaccatgtcaccgctgtcaattgtttttttgagtttgttcccaaaacctcttaattattattgcccacggatagtcatgttatctacataatccgtttttgccactcttcagggttctgcattgtgaatagaggttcatctttgtgattagattgccaccgncgctgcttttcct

SEQ ID NO: 99075 - DNA, 521 bp, Zea mays
  unsure (1)..(521): unsure at all n locations
ggagtnctatatgtgagattatgattgctgtaccggttcggaattcccgggtcgacccacgcgtccggcattggagggtactaatggaagccattttatgtacagggtgatctctgttgagtatgcacttcgtgatgacgatgaaaaaggtgaaagagggaacgggtacagcccagacaggagaggtcgtgaaagatccccaggtagaaggcgttctcctagtccctacggtagaggacgggagagaggtagcccagattacgggagaagcaaggagagggggagcccagactatggcaggggaggacgcagccctgataatggcaggggagtaagcccagctggtggtggcagaggcgatcatgccaggggtggagggcgcagtcctgactatgatcgccagcgccgggaagctagtccttcaggttatgacaggtnccccaaggcgtcacctgnganggaggcccanagagtngaagcagcggttcattccatgccttgggtcaagcatcagatgaatg

SEQ ID NO: 99076 - DNA, 525 bp, Zea mays
  unsure (1)..(525): unsure at all n locations
gtgatgttngtcgtccatgacgactattgatcgctgtaccggtctcggaattcccgggtcgacccacgcgtccgcccacgcgtccgccaccttggccgctgttttccttaccgctcgtgctctctctctctcggcgccgactcggctaccgccgccgccctacggaagcttcccaggtcttcgtcaggcttttctccggcaacgagcaccctgcacagatcgtgaacctncacacctcaacgatagatggcggggttcagaagccttgcacccaagaccaggaacctggtggtggccgggggactgtctgccttcgtgctcggggtctactactacaccatgagagcggtgggaggcacggacgagctacaggtggcgatcgacaagtttgaggagacgaaaagcaggatgctggtagaaacttcagcttcaacgcaagaggatcataattcatgaacacgccgacacgccctggatctgcttcaggcttaaaggcttacaatgtaccacgaccggcaagtcgtt

SEQ ID NO: 99077 - DNA, 524 bp, Zea mays
  unsure (1)..(524): unsure at all n locations
cggatgggntgntgatgctggagatgcatcgacctgctgtaccggttcggaattcccgggtcgacccacgcgtccgcggacgcgtgggggcctccaacgtgttcatcaacaagcacgagcacggctgcgtctcggaccacggcctggcgtcgctgatgaacccggtcacggcgaggtcccgttctcttgggtactgcgcgccggaggtcgctgacacgaggaaggcgtcccagtcctcggacgtctacagcttcggcgtcttcgtgctggagctcctcacggggaagtcgcccgtccagataaccggcggcggtggcggcgacgtggtccacctggtgagatgggtgcagtcggttgtgcgggaggagtggaccgccgaggtgttcgacggcgagcttctgcggtaccccaacatcgangaggagatggtagagatgctgcagatcgccatgggctgcgtgtccaggacccccgagccgcgttccangattgcggacgttgtgaagaccatcgangaggtgctg

SEQ ID NO: 99078 - DNA, 527 bp, Zea mays
  unsure (1)..(527): unsure at all n locations
cgagatggggtngcgacgtttacgttatcnatagtagtgctgtactcggattggaatacccggcccgacccacgcgtcacgcgtcgcgtgggggcttccaacgtttcgttcaacacgcacgagcacagctgcttgtcggaccacggactggcgtcgctgataaacccggtcacggcgaggcacacggctcttggatactgcgcgccggaggtcgctgacacgaggaaggcaggcgagtccttggacgtgtacagcttgtgcgtgttcgtgctggagctcgtcacggcgaactcgcccgtgcagataaccggcggcggtggcggcgacgtggtccacctggtgagatgggtgcagtcggttgtgcgggaggagtggaccgccgaagtgttcgacggcgagcttttgcggtaccccaacatcgaagaggaaatggtagagatgctgcagatcgccatggcgtgcgtgttcaggaccccccgagcggcgttccatgatggccgacggtgtgaggaccattcaagatgtgg

SEQ ID NO: 99079 - DNA, 520 bp, Zea mays
  unsure (1)..(520): unsure at all n locations
agatgggctgntcatgattggaatgcatagcactgctgtaccggttcggaattcccgggtcgacccacgcgtccgcccacgcgtccgcccacgcgtccgtacatttgcttaaaatgtgaatttatgctcatggatggacaaagtgcaaatcaagagtaaaggtatgtttctaagccttagtacattggttttatgtactaatatacttgtctaagtgttagaaacagaaagaagaagaaaagaaaagagatgaaaaaaggcttggctgggtacagccaagactcagctcggtctggcacaccggactgtccggtggtgcaccggacagtgtccggtgcgccaggctgactcggcgcgaagtggccgctctcgggaattcgtcgacagcgtacgactaanattcaccggactgtccggtgtacaccggactgtccggtgagccaacggtcgtgaaaagaaatgtgcccttgggccatttctaagtattttgtgattgagtgccaacacaagtgcttaaatg

SEQ ID NO: 99080 - DNA, 419 bp, Zea mays
  unsure (1)..(419): unsure at all n locations
tgtaagttgtgcnttccatgacttgtagtccatcgcactgccgtaccggttcggaattcccgggtcgacccacgcgtccggctcgtcgccacctactagttgcttccttttccgttggagactcgctgactggtgaagatggttgtccaggagttcacagttgatctcaacaagccccttgttttccaggttggccatcttgaggaacggtaccaggaatgggttcaccaaccgatcgtcagcaaggagggtccacgctttttcggaaatgatgtcctggagttcttgactcgcacgaagtggtgggctgtgccaactatatggctgcctgttgtctgctgcctgctcgtgaaatctattctgatgggtcatactgttcaggacgtagctatgatggctctgtttgggatatattaatt

SEQ ID NO: 99081 - DNA, 416 bp, Zea mays
  unsure (1)..(416): unsure at all n locations
gagatctgctangatgaatagagtctcatcgcactgccgtaccggttcggaattcccgggtcgacccacgcgtccgaaaagacagaaacaaatccactattggttttacgtcaagcaatacgtagagtaactcccaatataggagtaaaaacaagacgtaataaaaaaggatcgacgcggaaagttccgattgaaataggatctaaacaaggaagagcacttgccattcgttggttattagaagcatcccaaaagcgtccgggtcgaaatatggctttcaaattaagttccgaattagtagatgctgccaaagggagtgggggtgccatacgcaaaaaggaagcgactcatagaatggcagaggcaaatagagctcttgcacattttcgttaatccatgaacagaatctaggttta

SEQ ID NO: 99082 - DNA, 518 bp, Zea mays
  unsure (1)..(518): unsure at all n locations
agcgtgntgtatgtgaggatactgattgctctaccggttcggaattcccgggtcgacccacgcgtccggagagatgggatgtgctgcttccaggttttaagatgaggaggctgtcaagatgtgccgggacagaagggacttgatcaagcaggcactggagcagcgcaaccgatttgcatcttcccacattgcttacattgagtccctgaagcgtgtttcggtggctctccaacggtttgttgccggagatgatcaccatgagctaatcttcgatacattcatctcccctatcaagcaacagaagccagagatgcttggtctgccttatggttcatatgagaagagaactattcatgtttcaagatacctgaggtcagggcctaacccatcagtgtccattgaggagcacccacgtncggtggaaacagtccgtgtcgagtcaaattaccctatggacaacgacagtggcatggtggatagattcctaccaacaccctcttcaccagtgagatcggttn

SEQ ID NO: 99083 - DNA, 525 bp, Zea mays
  unsure (1)..(525): unsure at all n locations
gagatggntnggtgctgacaaganctctatgcacctgctcgtaccggttcggaattcccgggtcgacccacgcgtccgcgccgtcctcatcgagaccctcaccgcgctcggcgccgaggtccgctggtgctcctgcaacatcttctccacgcaggaccacgccgccgccgccatcgcgcgcgactcggccgccgtgttcgcctggaagggggagacccttgaggagtactggtggtgcaccgagcgctgcctcgactggggcgaggcgggcggccccgacctcatcgtcgacgacggcggcgacgccacgctgctcatccacgagggtgtcaaggccgaggaggactacgagaagaccggcaagatccccgatccggagtccaccgacaacgctgagttcaagatcgtgctcaccatcatccgcgacgggctcaaggctgaccccaaagagtaccgcaagatgaaggaaaggcttgtccgcgtctctgaggagaccacccacggtgtcaagaggctctaccaaac

SEQ ID NO: 99084 - DNA, 530 bp, Zea mays
  unsure (1)..(530): unsure at all n locations
tgagtactgtggctagtccactaagacgtangatcgcatgtacnggtctggaattcccgggtcgacccacgcgtccgcggacgcgtgggcctggattatgcgaggtcaatgttggccaatgatgccaaggctgccaagggaggaggcgatagacaattcaatggtcttgtggatgtctaccgcaagacactcaaatctgatggaatgctntggcctatacagttgatggaacatattttgtattggcattactgattatcgtggactctatatcagactttacggactgttgatgctccaatgtctaactgtcagcgctcaaggcaaatggtattgacacttagctctatactgacgcaccccatacacagctgtatatgctgagtacacacaacgatagtatgcttgtcactgttatgctcaaatcttcaaaaacgttcttatatggcaaatattcctaatgacgaacgttgtttcgtccatgtaattggccatttaatgctaacatgaagggttgtaccatatgcctt

SEQ ID NO: 99085 - DNA, 521 bp, Zea mays
gaggctgtgtgcgcatgatgaatactgatcgctctgatggttcggaattcccgggtcgacccacgcgtccgcactgggttcccgaggacaggatcctcattacctacctgtggtctgctgagctctccaagctcgctgccaacgcgttcctggcacagaggatctcctctgtgaacgccatctccgccctctgcgaggccaccggcgcgaatgtgactgaggtggcttacgccgtgggcaaggacacgaggattggccccaagttcctgaacgccagtgttgggttcggtgggtcttgcttccagaaggacatcctgaacctggtgtacatctgcgagtgcaatggcctgcccgaggtggccaactactggaagcaggtgatcaagatcaacgactaccagaagagccggttcgtgaaccgcgtcgtgtcgtccatgttcaacaccgttgccggcaagaagatcgccgtcctcggcttcgccttcaaagaaggacaccgcgacaccagggagacccccgcc

SEQ ID NO: 99086 - DNA, 521 bp, Zea mays
  unsure (1)..(521): unsure at all n locations
tagatggctatatgtagattatgatcgctctaccggtctcggaattcccgggtcgacccacgcgtccgcccacgcgtccgatttgtatcgcatgaattaactcagagcatctcaatgttaaaactgtaaaggggcagacctggtgccagaggctcccacatgagtgggttctagggaagggataatccgaagcaagccttccccctgcaaatgcagagatgcggctttgaacccgtgacctggtgactaagtgagacacctctcaccactgcaacaggcctgtccttcctcatcgntaaaactgagcatattaattcttcttcttaagcaatatgggagctaattgctgcattgctgcaaaggagaggacacagncgtgcattactcctatagaagtatcggcatacaggaatgtgaggcgctcgccatcatggaacattcgatgggacaatcgcacacatatngaagacataatggaatattctactnntgtctncaaccatagtagtggaaggcatcat

SEQ ID NO: 99087 - DNA, 517 bp, Zea mays
  unsure (1)..(517): unsure at all n locations
gagatggntgcgcctcactgttatgatcgacgtacctgtctcgattcccggtcgacccacgcgtccgcccacgcgtccgcggacgcgtgggcggatgcgtttgaaagacatgacatggcgacctgatctatgtagtgatagcatggcggctagtggaatagaaactggtacaaaattgtacatttcaaacttggactatggggtctctaatgaggatataaaggagctgttttcggaagttggtcatttgaaacgctttgctgttcactacgatggttatggccgcccaaatggcactgcagaggtggtgtttacacggaggagcgatgcaattgctgcactgaagcgttataataatgttctacttgatggaaaagctatgaagatagaagtcatcggaaatgacttangattgcctatgacacctcgtataaatggttgtggggcttctaatggcagagctaccagaacagttggtatgacgcctgagtttagtcaacgtggcaaaggttcaacn

SEQ ID NO: 99088 - DNA, 525 bp, Zea mays
  unsure (1)..(525): unsure at all n locations
tgtgctgtgttccgatgaactgagnctgcatagcactgctcgtaccggttcggaattcccgggtcgacccacgcgtccgcctcaaaagacatactcaagaagctagatactatggatgaagaaaatatcattggagcaggaggcttcggaactgtttataaacttgcaatggatgatggcaatgtctttgctttgaaaagaatagtgaaaacaaatgaagggctagatcggttctttgatagagaacttgagatattgggaagtgttaaacatcgttacttggtcaatcttcgtggttattgcaactctccttcatcaaaacttttgatatatgattatcttcaaggtggaagcctggatgaagtgctgcatgaaaagtctgaacagttggattgggatgcacgtattaacatcatacttggagctgcaaaaggcttgtcttacttgcatcacgattgttcgcctcgaataatacatcgtgatatcaagtcgagcaacatcttgcttgacggcaagtttgaggcc

SEQ ID NO: 99089 - DNA, 422 bp, Zea mays
  unsure (1)..(422): unsure at all n locations
cggagtgttgctgagcccgcactgccacgcataggcgctgccgtatctcggttcggaattcccgggtcgacccacgcgtccgcggacgcgtgggcaaatttcttctttaacttgcttctcagctcaacctgcgcgttaatcagtttgagattgtaaatttttatgttgttggagcttctgggctaaatatcacaatggatatagctccctatactggaattagctttgctgctgatcaagtcaaggcaatgaattattcacttactctgcatacagttcggattgatcctgtgttggtcggggactataatcttcttaatttaacttggttcaggtcattggctccagctccagctccagcattcacaatggcacctagggcctctccatctacagcatctacctttccaagacangagntt

SEQ ID NO: 99090 - DNA, 421 bp, Zea mays
  unsure (1)..(421): unsure at all n locations
tggagtggtgctcatgatcgataggagtctcatcgcactgccgtaccggtccggaattcccgggtcgacccacgcgtccgcggacgcgtgggcggacgcgtgggtagactcggatcggcgagcatgaggggcggcggcggcggcgggatgatggacgatgaagagagggtgggccatgcggagatcccgaccagtttcggtcccgagctgcgcgcctgcctccgatgccgcctcgtcaagacctacgaccagttcagggagaacggctgcgaaaactgcccgtttctagagatggacagagagcacgacaacgtcgtcaactgcaccacccccaacttcactggaattatctctctgatggaccccagtaggagctgggcagcccgttggttgagaattggcaggttcattcctggggggn

SEQ ID NO: 99091 - DNA, 527 bp, Zea mays
  unsure (1)..(527): unsure at all n locations
ggctggggtgatcatgagngtcgatccgattgcccgtaccggtctcggaattcccgggtcgacccacgcgtccgcgaggacagtggtgatcacggggatgctttcgatcggctgtgagccgcagcagctggcccagttcgcaggcggcccggccggcgactacgaccctaccaccggctgcatcacgcggttcaaccagctcgccgagcaccacaaccacatgctgaggatgatgctgagggagctgcggaccaagtaccgcaggcgcaggcccctcaccctccactacgccgacatctaccgccccgtgatcgaggccgtcgcgtcccccgcctcgtacggcttcggcgacacgccgctggcagcgtgctgcgggggccgtggcggccccaacaactttcacttcatcgccttctgcggcacgccggcgtcgaccacgtgcaccgacccgtccaagttcgtctnctgggacgggatccacttcaccgaggctaccaacaggcttctcgctcgtaaatgcttcagga

SEQ ID NO: 99092 - DNA, 526 bp, Zea mays
agagtgcggtaacactgtcagcggtgcatcgacgtaccggttcggaattcccgggtcgacccacgcgtccgattcgctggtttccacaaaataagattgtcaatatctactacgtacttatgctattctgcatgtgatgtacgagtgtgcatcttcaagaatctttaagttgaatggtcccataataatattgataacaatgtaaaaaaaaaaaaaaaaaaaaaaaaaaaaaaaaaaaaaaaaaaaaaaaaaagggcggccgctctagaggatccaagcttacgtacgcgtgcatgcgacgtcatagctcttctatagtgtcacctaaattcaattcactggccgtcgttttacaacgtcgtgactgggaaaaccctggcgttacccaacttaatcgccttgcagcacatccccctttcgccagctggcgtaatagcgaagaagcccgcaccgatcgcccttcccaacaattgcgcagcctgaatggcgaatgggacgcgccctgtaacggcgcattaaacgcggg

SEQ ID NO: 99093 - DNA, 531 bp, Zea mays
  unsure (1)..(531): unsure at all n locations
agactgtggatgtgcgagggaggaggagattgctccggtctcggaattcccgggtcgacccacgcgttcggccaagggcaaccttgtcacctacaaggttcctaccatggtcgcctgcacgctcaacgcggtggccattctcctcaaggaggggctccaatgggactggttcatcaatctcagtgcgtcagattatccgctcatgacacaagatgacatacttcatgtcttctcttctttgccaagaaatcttaattatatagagcactttcngttatctggatggaaaggtaatataagggcaaaaccaattgttctggacccagggctctatctgtccaagaaatttgatcttactatgactactgagcggagagaattgccaacatctttcaaattatatactgggtctgcttggataatgcttacgaagtcctttcttgagtactgtatatggggctgggataaatcttcacggaaccctttgaaggtctatgtcaaccttaatttcttaccaaaaaggctactttc

SEQ ID NO: 99094 - DNA, 531 bp, Zea mays
  unsure (1)..(531): unsure at all n locations
gcgactaggtactcgtaatagtgacgtagcantcgtaccggttcggaattcccggctcgacccacgcgtccggactttggaggaggaatcggccacgtacattggtggaggctatggaaagggaggtgggcgtggcagacgcatcggccatggcatgggccgtggctaccgcaaacgtggagggattgaccatggcatcagcggtggctatggaaaacgcagaggccttggtggtggatatggcaaaggtggcggactccgaggcgacattggccatggcatgggtggacgccatggcaaaagtggtcgaattgggcatgacatgggtggaagattcggcagaggccgcagtcgtctatgcagccgatgaagctactgtgctggaggccgctatgcctcggtggtcgaagtagacatggcatgggtgccagactcggcaaggtggcgatattgaccgttgccattgccttgcctagagaaatggcatcgcatatgttccctattcaagaaagctgggagcactggccactt

SEQ ID NO: 99095 - DNA, 511 bp, Zea mays
  unsure (1)..(511): unsure at all n locations
agaggnnagctgtagggggataaggatgcttcctttttactgaccaccgtcctcttcacgcgtccgtatggttgttacctttggtcctagtggccttactactgaggtgaagtctgttgaaatgcaccatgaggctctccaggaggcccttcctggtgacaatgttggcttcaatgttaagaatgttgctgtgaaggatctgaagcgtgggtatgtggcctccaactccaaggatgaccctgccaaggaggctgctagcttcacgtcccaggtcatcatcatgaaccaccctgggcagattggcaacggctatgccccagtgctggactgccacacctcgcacattgctgtcaagtttgcggagctcattaccaagattgataggcggtctggcaaagagcttgagaaggagcccaaattcctcaagaatggtgatgctggtatggtgaagatggttcccactaagcccatggtagtggagaccttttctgaatantcctcctcttnggtg

SEQ ID NO: 99096 - DNA, 514 bp, Zea mays
  unsure (1)..(514): unsure at all n locations
agggatggggnnagtgataaagagcttacagaatgtcaanggacagtctcgaattcctactgggaaccatcctccgcggacgcgtgggctgacgcgtgggccgggtttgaggttgtttgggataaggatcttgctgaagattctcccttgccttggtacttgcccttggatccaagccgattctccctgagtagcttccgtttgacctctgtgggacgcatgattacccgcacaatggtcaaggccctggagtacgttggtcttgctccgcagggcagtgagagggtctctaatttcctggagaaggctgcagaagggctggtagagggcggaaagaaggagatcttcacgccaatgtacttctttcttgttcggaagcctcttctggaatgagctcttggatcaccttttcagagagagaaggcaagtggtcatttcgaagaagccgaggagagggaacctggaatcaagaaaaccttcagctctcctgtgtaggaggaaagtttaaccgaac

SEQ ID NO: 99097 - DNA, 531 bp, Zea mays
  unsure (1)..(531): unsure at all n locations
agagtgctgacgagcggagacgaggggagtgctccggtccggaattcccgggtcgacccacgcgtccgcccacgcgtccggttgcaggctgggctccccgagggtgttctgaacgtggtgtccggcttcggcccgacggccggcgcagcgctctccagccacatgggtgtcgacaagcttgcgttcacgggatcgacgggcacggggcagatcgtgctcgagctggcggcgaggagcaaccttaagccggtgacgctggagctcggtggcaagtcccctttcatcgtcatggacgacgccgacgtcgaccaggccgtcgagctcgcgcaccaggcggtcttcttcaaccagggccaatgctgctgcgccgggtcgcggacgttcgtgcacgagcgcgtgtacgacgagttcgtggagaagtccaggcgcgcgccctgaagcgcgtcgtctgcgaccccttcagggactgtgtcgaacaggggcctcagatcgacggcgagcanttaacaagatctttgcggtacgtcagtc

SEQ ID NO: 99098 - DNA, 526 bp, Zea mays
  unsure (1)..(526): unsure at all n locations
gagtgtatagggggggaggggagtgttgctccggtccggaattcccgggtcgacccacgcgtccgcccttatcgccctcgttatttacatcgctgccaccctcctctccgccgtcgccgccgccgtcggggatggggggagcgcaattncccggcgacaacgacgtcgcggaagtagacgcggaccgcgacggataggtggaccgccgtgacgtgggcaagatgaagcacgggtgcgagcattaccggcggaggtgcaagatcgtggcaccgtgctgcaaccaggtgttcccctgccgtcactgtcacaacgaggctacggcttccggagatcggcatacaatatgtcgtcaggatgttgaaaaagtagtttgcctactctgtgaaacaaaacagccagtgtcacaagtgtgcataagctgtggagtcaatatgggagagtacttttgtgatatatgcaaaatttatgatgatgatacagaccaaggggccntcccttgcattaatggggcatattgcagggtggg

SEQ ID NO: 99099 - DNA, 529 bp, Zea mays
  unsure (1)..(529): unsure at all n locations
aaggntgttaccgcattatacagtatcgctcgtaccggtctcggaattcccgggtcgacccacgcgtccggaagcagaatcctgcttacaaaggcaagtggcatgcacctatgattgacaaccccaactgcaagggaatctggaagcctcaggagatacccaaccctgagtactttgagcttgacaggcctgattttgatccaatcgctgctattgggattgagatctggacaatgcatgatggcatcctgttcgacaatatcttgattactgatgatgagaaagttgccaccttcattctcgagaagacctgaaagcccaagtatgatgttgagaaggaaaaggagaacgctgaagaggctgctgctggtgcagatggtctctctgacttgcagaagaagatttttgacgtgctgtacaagattgctagatattcgttcttggcaccctacaagaccaagattattgatgttatcgagaatggagagaaaacagccaacatcactattggcaatttggtcgtcggtgc

SEQ ID NO: 99100 - DNA, 529 bp, Zea mays
  unsure (1)..(529): unsure at all n locations
ttggggnncctaccgcatantatcgtatcgctcgtaccggtctcggaattcccgggtcgacccacgcgtccgccagcctccagcgccttcaccctgctcgtcgcctcactccctctgaggtcgcagatacggccggttagacgaagccgcccgcacgcatggcctccggtgagctcgcctgcacctacgccgtcctgatgctcagcgacgacggcatgggcatgaccgccgagaagatcgtcaccatcgtgaaggcgggcaacatcaagctcgagtactactggccggcactcttcgataagctcctggagaagcgcagcgtcgaggatctaatcctctccgatggatctggtggtggcgctgctgcagctgctgcttccggcccagctgagggtgctgcagctgcatgtgccgctgctgcanaggagaggaaggaagagctccaggaggagtctgatgacgacatgagcctcagcctgttcaactgatagtctgagaccctggctactcaggcactgcagaatcggtt

SEQ ID NO: 99101 - DNA, 515 bp, Zea mays
  unsure (1)..(515): unsure at all n locations
agagggnnntagtgattaaagcaantatcagactttaaaagcataggtttcccctagtagtcactctctcacggagaccccctcacttcattccctatgttcgccgccactccctgacatcgagaccggctgcgccgaccccggtccggcgatccctctgcacccctttctttgcgctgccagccccaatctctcgcatacctgtcaaccatggcggcgtcagcaggcggaggcgcggtgcgcgcgctgtcccagaaggagcaggacatacagatgatgctcgcggccaacgtccacctcggcaccaagaactgcgatttccacatggaccggaatgtctttaagcgtggcaccaacggcatctacatcatcaacctgggcaggacatgggataagctccagctcgcggcaagggttatggttgccattgagaccccactggatatcatcgtacatttggccgccctatagggccagcgctctgcccaaaatttcgcacattacatgtgggcgcc

SEQ ID NO: 99102 - DNA, 534 bp, Zea mays
  unsure (1)..(534): unsure at all n locations
ggagcgtgtagttcacgatagtactgagtactctcncggtctcggaattcccgggtcgacccacgcgtccgcccacgcgtccgaatataatggatcttactttggagattcatggctgggtagagtccttgcaagatgctttgacacagttcactgctcctgaagatttagatggtgataatatgtataaatgtggaaggtgttctgcctatgttaaagctaggaagcaactgatcgtgcatgaggtgccaaacattttaacagttgttcttaaaagatttcagtcacgaaaatatggctagatcaacaaatgtgttactttccctgatatgttggacatggttgccttcgtgactgggtctggtgacaatcccactctctatttctagtacgccgtggttgtacatgtcgatacagacaatgcatcattctctgggcactatatatcatacgtcatagatatgcacggtacatggttgagaattgatgattcacatgtncaggttgtatcagtgaatcatgttatgtcagaag

SEQ ID NO: 99103 - DNA, 535 bp, Zea mays
  unsure (1)..(535): unsure at all n locations
ngatagtgtttaacgaggaactatattgcatctgctcgtaccggtctcggaattcccgggtcgacccacgcgtccggggatgcacatggccgaaagatgtcaaaatcacttggtaacgttgttgaccctcttgaggtgataaatggcatgtcactggatggtcttctgaaacgtttggaagaaggcaatctggatccaaatgaattaaacattgcaagagatgggaagacgaaggattttcctgatggcatagcagaatgtggtaccgatgcgctccgcttcgcactgatatcgtacacctcccagtctgacaggataaatcttgatatcaagagggtggttggatatagacaatggtgcaacaaattatggaatgccattcgttttgcgatgggcaaactgggtgatgattacattccgtcggcaactgttgatgtgtctcttatgccaccaatatgcaagtggatactctcagtgcttaacaagggctgtnganaaactgttactttcttagaagcatacaatatgtctgatn

SEQ ID NO: 99104 - DNA, 516 bp, Zea mays
  unsure (1)..(516): unsure at all n locations
cgtgtnnntnttaggccgtaaagcaatttatagagggaatatgtatcttccgaattcccgggtcgacccacgcgtccgggttcccccttcacgtttgctactactttggaacaggagtacaagagtgatatctttggagagcgaggcatcttgctgggtgctgtccatggtatcgtggaggctctgtttaggaggtacacagaacaaggaatggatgaagagtcggcctacaaaaacactgtcgagggcataactgggatcatctcgaaaaccatctcaaagaaagggatgcttgaagtgtacaactctttgagcgaggaaggcaaaaaggagttcaacaaggcttatagcgcatcgttttacccatgcatggatatactctacgaatgctatgaagatgtggcctctggaagtgaaatccggagcgtggtgttggctgggcggaggttttatgagaaagagggccttccagcttttccgatgggcaacatcgaccaaactcgcantgtggaaggn

SEQ ID NO: 99105 - DNA, 532 bp, Zea mays
  unsure (1)..(532): unsure at all n locations
gagagggtttgacacgacagtaatgaactactcgtcccggtccggaattcccgggtcgacccacgcgttcgcggacgcgtggggtggcaaatgcagtttcagccagtttttccgttcatagcagcacagtgagaggattgagatggcttggcaactcacgtcttgtttcattcacatataatcaggttaatgantaaactggtggatacaataataaacttgttattacatgcttaagaagtgggctaaatcgctcattccgtgtgctccaaaagcctgaacgtgcaccgattagagcattgagggcttcttcatctggacggtaccttctaattctgtttcgcgatgctcctgttgaagtgtgggctatgacaaagaaccccatgatggtccttggcgctttcttttacagtattagaatggacactgtcagctgcaccttcgccaggtcaaaatgcatcatctaaacagtcttcaacctccaaggagcgatcagcaaaggcttctggtgcagaaagttctgatgaaacat

SEQ ID NO: 99106 - DNA, 531 bp, Zea mays
  unsure (1)..(531): unsure at all n locations
gtaactggtgtatgaagggaggaagatagtgattcgctcggtccggaattcccgggtcgacccacgcgtccgactggttcctgactatgcaatgtcattcatcaagggcaaatcactcaagccgtttgggcggcctgtggtgggacgagacagttcctacagttgtaaccagagcagagcctcacaaccaggttataattcatccgactcaagcaagggtcctcactatccgggagaacgcaaggttacagggcttccccgattactaccgattgtttggcccgatcaaggagaagtacattcaagttgggaacgcagtggctgtccctgttgcccgagcactgggctactgtctggggcaagcctacctgggtgaatctgaggggagtgaccctctgtaccagctgcctccaagtttcacctctgttggaggacgcactgcggngcangcgagggcctctnctgttggcacccctgcaggggaggtagttgagcaagtaaaggatgacagacctgagctgagctgggcaa

SEQ ID NO: 99107 - DNA, 531 bp, Zea mays
  unsure (1)..(531): unsure at all n locations
gagactggtggaaacgacagtacagtagtgctcgtcccggtccggaattcccgggtcgacccacgcgtccggtcgaacctccactgagcacaatgttccctggtatcgctgatcggatgagcaaggagatgacttcccttgcaccaagcagcatgaagatcaaggtcgtcgcgccacctgagcggaagtacagtgtctggataggagggtcgatcctagcctcgctcagcactttccaacagatgtggatatcaaaggaggagtacgatgagtctggcccggcaattgttcacaggaagtgcttctaggtttctgccaagttcgtcaagtgcttttagggtttgccatgttcatcatcgctacctagtcttaagttatgcccccttcatttgctgagatatgtgtggcagatttgcatcgttttggtatttcgtggctccatgtgtgagcatgctgtgtcctataacctggtttatgagatgagttngtaaactngctnggcttgattggtttacctgtnagagctgatat

SEQ ID NO: 99108 - DNA, 527 bp, Zea mays
  unsure (1)..(527): unsure at all n locations
actgcttaatagcggaggaaggagtaatcgctccggtccggaattcccgggtcgacccacgcgtccgcccacgcgtccgcccacgcgtccgacacattccaccggcaccaacccagcgcggcgccaccggcgacccgtacccccttccccggagagcgatggcgacggagctgacggcggcgcagctgcgcgcgtacgacggcaccgacccgtccaagcccatctacgtctccgtccggggcaaggtctacgacgtcaccttcggccgcggcttctacggccccggcggcgcctacgccgtcttcgcgggccgcgaggccagccgcgccctcggcaagatgtccaaggacgaggccgacgtcttcggggacctctccgggctcaccgacaaggagctcggcgtcctcgccgactgggagaccaagttccaggccaagtaccccgtcgtcgnccgactcgncgtccacgcctgaactcggcagtctcggtggtaatttactctgtcctgcctcttgcggggttcaagc

SEQ ID NO: 99109 - DNA, 528 bp, Zea mays
  unsure (1)..(528): unsure at all n locations
agaagggctgatatcgcagatgagagatcgctcgtaccggtctcggaattcccgggtcgacccacgcgtccgctccgctgggccaccagctttgaccgccgtctcccttcccctccgctactgctcctgcggaccccactcccccgcaggagcggcggcggcggcggcgaggtcgtaccccacatcggcgagcggcggcggcaccgccggaggcaaaggcaagatgttcgggcgcgcgccgaagaagagcgacaacaccaagtactacgagatcctcggggtgcccaagtcggcgtcccaagacgatctcaagaaggcctaccgcaaggctgctatcaagaaccaccccgacaagggcggtgaccccgagaagttcaaggagctcgcacaagcctatgaggttttgagtgatccagagaaacgtgagatttatgatcagtatggtgaagatgcccttaaggagggatgggcggtggaggatcccatgttgatccatttgacatnctctcatcattttttggaccctct

SEQ ID NO: 99110 - DNA, 534 bp, Zea mays
  unsure (1)..(534): unsure at all n locations
agtagcgtnctagtaagacgggatatagtatctgctctcccggtccggaattcccgggtcgacccacgcgtccgcggacgcgtgggcggacgcgtgggcggacgcgtgggcggacgcgtgggtggacttctggttgcaggcgtgctggcggacgggttcatggcgcgtgacctgacgatcgcgaacacggcgggccccgacgcgcaccatgccgtggcgttccggtccacgggcgaccgcacggtgctggacggcgtggagctgctggggcaccaggacacgctgtacgcgcacgccatgcgccagttctacacccggtgccgcgtggcgggcaccgtcgacttcgtcttcggcaactccgccgcggtgctccacgacaccgtcctcgtcgtgctgccgcggcagctgcggccggagaagggcgagaacgacgccgtcacggcgcatggccgcaccgacccggcccagcccacggggatcgtgctcagccgctgctccgtcaacggcagccaagagtacatggcgctgtaccgc

SEQ ID NO: 99111 - DNA, 525 bp, Zea mays
  unsure (1)..(525): unsure at all n locations
taaggtntgacagggaatactaacgatcgctcgtaccggtccggaattcccgggtcgacccacgcgtccgcagatcctttggtcgatggaactaggtataaactgcaagaaatacatggcatagggaactccatggaaggtgatgctaatgcaaatgatccatagaaagaatgtgttatttgcctctcggaaccaagggggatattattgtcctcccatgtaggtatatgtatgtgcagtgagtgcgccaaggtcctaaggtaccaaaccacttagtgcccctgcagccccatctacaggcagcctgttgagagtcgcctcgagatcaaagtgaacaacaaatctgaagattagtagctgacgccctaatcaccaccgctcccagagctgcggtgtagtcgtgatcaaattcaggtctgatgtattatatggctctaatttgcgagacttcaggccttccctcaaggttngntctctcatttgagcaacgtggaatgtaactgatancttttccttagcatatgt

SEQ ID NO: 99112 - DNA, 528 bp, Zea mays
  unsure (1)..(528): unsure at all n locations
ngtaacgtgctccaagcgggagtatacggatcgctcgtaccggtccggaattcccgggtcgacccacgcgtccggaggcgactccaggttcgtgggcgatgctgcgcgcgggaggtaggcagctccttgccccggggctccggcggctcggtctgggcaccggcgccgtcggtgaggtgggcccggccgtcgcggcggcggggatgaaggcgtaccacgagcgggtggtggaccactacaacaacccgcggaacgtcggttccttcgacaaggaggaccccaacgtcggtactgggctggtcggcgcgccggcctgcggcgacgtcatgaagttgcagatccgcgtcgacgaagacttcggtaaaatcgtcgacgccttgttcaaagacttttgcttgcggcttcgncatagcggtcctgtccggcggtactgaatgggtgaagggaaaaccaatggatgaagtcttgacaatcaagaatactgagattgaaagcacttgtccttttcacagtaaagctcattgcagc

SEQ ID NO: 99113 - DNA, 511 bp, Zea mays
  unsure (1)..(511): unsure at all n locations
agtagcnnnnnncaggggtagctctacagcatatcagtgtaggtccggaattcccgggtcgacccacgcgtccgcccacgcgttcgaacccattggatgatgtggaccgtttgctggaagatggctcattggatgataatggggaatcttttctatcacaggatgacatgtatcctagggacaacttggggcgatgcatggatgctagtaaaggttttggtttttctgaggttgccaaagcacgtgcaggtgcagccaaagttgtctgttgccacttctcatctgatggtaagctgcttgctactggtggtcatgataaaaaggttactttgtggtgtacagattctctgaagcctaaatccttcctggaagagcactcgtatcttatcactgatgttagatttagcccaagcatgtcgcgccttgcaacatactacttcgacaaaactgtgcgggtttgggatgcagataacactgactattcactccgaactttcacgggnccattcaa

SEQ ID NO: 99114 - DNA, 533 bp, Zea mays
  unsure (1)..(533): unsure at all n locations
gaatggggnnttctgtagagtcatgattgcatcgctcgtaccggtctcggaattcccgggtcgacccacgcgtccgcggacgcgtgggcgtcggttcacttctccaggaaagggttcgtactcatggcgccgtcgcagccaaagtcgggcctcttcgttggcatcaacaagggtcatgtcgtcaccaagcgcgagctgcctccccgcccgtgccaccgcaaggggaaatcaacgaagagggtgtctatggtcaagggcctgatcagagaggttgctgggtttgctccttatgagaagcgtatcactgagcttctgaaagttggcaaggacaagcgtgccctgaagcttgctaagagaaagcttggaactcacaagagggcaaagaagaagagagaggagatggcgggcgtcctcaggaagatgaggtcggctggtacgcacactgacatgaagaaatagagagcatttcaagttcatggagcctgccagagattatgttccagtgtctgattttccatacatgtagaacctaa

SEQ ID NO: 99115 - DNA, 535 bp, Zea mays
  unsure (1)..(535): unsure at all n locations
cgttgatgtgttttatcagaattatatagtactgctcgtaccggtctcggaattcccgggtcgacccacgcgtccggctgctcccacctctagcccgacaggtgaagccgccgccgctgcagtgtccatagccaccgtacgagactgagatggggggttttgtcaagacccacaagagcaatgcgtacttcaagcgtttccaggtgaagttcaagagaaggcgcgctggcaagacagactacagggccaggataaggctgattaaccaagacaaatacaagtacaatacacccaaatacagatttgttgtgcgatttaccaacaaggacatcacagcacaaatcatctctgctagtatagcaggtgatatggttcttgcttctgcttactcgcatgagttgccacgatatggtcttgaagttggtctgaccaactatgcagctgnctactgcactggccttctgttggctcgncgtgtgctcaagacccgtggtttagatanggaatatgagggcattgcttaggccactggtan

SEQ ID NO: 99116 - DNA, 509 bp, Zea mays
  unsure (1)..(509): unsure at all n locations
cgaggcnnnnnnaggggtcagtcctgaaggataaaaagtagcccggcattcccgggtcgacccacgcgtccgggctgatgcatgcccaatcagggcaatgaagttctctgtctcccctgttgtgcgtgttgctgttcagtgcaaggttgcttccgaccttcccaagctagtagaaggtttgaagcgtctggcgaagtccgatcctatggttctgtgtacaatggaagaatctggtgagcatatcattgctggagctggtgagcttcatcttgagatttgcctgaaggatctgcaagaggacttcatgggaagtgctgaaattattgtttctcctcctgttgtgtccttccgtgaaaccgttcttgagaagtcctgccgcactgtcatgagcaagtcacctaacaagcacaaccgtctgtacatggaagcgcgccccctggaggagggtcttgctgaagcaattgatgatggccgcattggcccacgtgatgatcctaanggttgcgctc

SEQ ID NO: 99117 - DNA, 512 bp, Zea mays
  unsure (1)..(512): unsure at all n locations
agtagcnnnnttnaggggtcagtctctcacgagctgnccaggtccggaattcccgggtcgacccacgcgtccgcgcattggtcgtagtggtcgtttcggtaggaagggtgttgccatcaactgtgtgacccgcgacgactagcggatgctgttcgacattcagaaagtctacatcgtgttgattgaggagctgcctgccaacgtctctgaccttatgtgatcattttgaagaaaaacagaactaaatgaacggtggtggtgatgatctggttaggcttggttttgccgaaatattgttggggaggagtgataaggtcggtggggctgctatgttaaagtcgctgtctatggcaatatgcgatttttctttatgccatgtcatgggaaattatgtagctgcctacgccttgtgctgtcgtggtggttcattagcatgaatactaaagctctgctggctatggaaggactattgcctttcgctagtatattagtataaaactatgctatggacc

SEQ ID NO: 99118 - DNA, 511 bp, Zea mays
  unsure (1)..(511): unsure at all n locations
gaatgaanttctagtgttcagtctccagctcttacgtacggatcgaattccctggtcgaaccacgcgtccgcccacgcgtccgccgacccccaaccatggatgaggcgctttttgtggagtcaaaggatgggaccatctgggttgcttctgcatttgctggttatcaggaagctgtgcaagacagggatcacaaattcttgacaaaagcagtggaagaagcatatcgaggagtcgattgcggtgacggaggtccatttggagcacatgtcgtctgtaatgacgaagtagtagtcagctgccataacatggttctgaagcacactgaccctactgcgcatgctgaagtaactgcaattagagaggcttgcaaaaagcttgggaaaattgagctctcatactgcgaaatttacgcgtcctgcgagccatgcccaatgtgctctggtgcagttcatctctcccgaatcaagaggctggtttatggggccaaggcaaaggctgccattcgctcan

SEQ ID NO: 99119 - DNA, 537 bp, Zea mays
  unsure (1)..(537): unsure at all n locations
ngatagcgtgtctgtcctaatcgctacgtactgacgtaccggtctcggaattcccgggtcgacccacgcgtccgccgcagaccgggagtagtcgacgcgccgtcactgaatcctcagatcacggctagccgtagtcacgccactctgctgactcccggcgagcagtgtaacattttccttcagccatgggcaaggagaagactcacatcaacattgtggtcattggacatgtcgactctggcaagtcgaccaccactggccacctgatctacaagctcggcggtattgacaagcgtgtgattgagaggttcgagaaagaggccgcggagatgaacaagcggtcattcaagtatgcctgggtgcttgacaagctcaaggccgagcgtgagagaggtatcacaattgatattgctttgtggaagttcgagaccaccaagtactactgcactgtcattgatgcccctggacaccgtgacttcatcaagaatatgattactggcactttccaagctgactgcgctgntcttaatcatgacn

SEQ ID NO: 99120 - DNA, 531 bp, Zea mays
  unsure (1)..(531): unsure at all n locations
agactggtcgtgtcagtcccantgactcgacgtcgcggtctcggaattcccggctcgacccacgcgtccggcacatgatgtcagcgctggacgcgcattataatgctcgctgagcacacactaggcctggtgcgagacgacacggtgactaccgcggagcagagtagcatcttgcttcagccatgggcaaggagaagactcacatcaacattgtggtcattggacatgtcgactctggcaagtcgaccaccactggccacctgatctacaagctcggcggtattgacaagcgtgtgattgagaggttcgagaaagaggccgcggagatgaacaagcggtcattcaagtatgcctgggtgcttgacaagctcaaggccgagcgtgagagaggtatcacaattgatattgctttgtggaagttcgagaccaccaagtactactgcactgtcattgatgcccctgtacaccgtgacttcatcaggaatatgattactggcactttccaagctgaatgcgcttgtcctataattg

SEQ ID NO: 99121 - DNA, 525 bp, Zea mays
  unsure (1)..(525): unsure at all n locations
agttgcgggttttacgtgggtatgtagtatcgctctaccggtctcggaattcccgggtcgacccacgcgtccgcctacccctacggttcgggttcgggttcgtgaggttctccggggttcggtttcgtgggtgagcggatcgagatggcggcgtcggatgttgagtaccgctgcttcgtcggcggcctcgcctgggccacggacgaccacttccttcacaacgccttcagcacctacggcgaggtcctcgagtccaagatcattctcgatcgggagacgcacaagttccgcgggttccgcttcgtcaacttcttcacagaggaaagccattccgaacgccattcaaggcattaaccggaaggaacttgcccggcgaacaataaccgtaaccaaggccaattccgtcgcgggccgtgaagctgcngccgccggcggtaccgtngttggccttgaagcgcgcggtacccgcggtggcgtgcgcgtaatggcgnggnggttaccgcgttgccgccgctaacggggtgc

SEQ ID NO: 99122 - DNA, 523 bp, Zea mays
  unsure (1)..(523): unsure at all n locations
ggnaatgagatgcantnatttagttgttcgttctctcagcccatcatgcacgttctgaattcccttgtggaaccactcgtccggccggaaaagagattgcaggagcaccttttatgcgcgtattcaagccaaggaaatggcgcgctaccacggcgtgtccgcggacactgaccaagacctcgaggctggcttctccggccactcctcctcccctctgaagcccgcggcctcgccgaggcggcccggccgcatgttctgcgacccctgcgacgacggcgacgagctccacggccgccaccactacctcgacatctgcttccgctgccgtaaactcctgtccggcaacagagacatcttcatgtacagaggtgacctgccgttctgcagcgaggagtgccggcaggagcagatcgagatcgacgaggcgcgagagcagcggctgaagcagacggtgcgggccgagcagcagcggcagcggcagcagaagcagagcccccagaggatccccatctggggcggtggt

SEQ ID NO: 99123 - DNA, 514 bp, Zea mays
  unsure (1)..(514): unsure at all n locations
ggtgccnnnnttagtggatgcgtactaggggaggtgggggaagtattcaattcctctggcgaaccacgcgtccgcccacgcgtccgcccacgcgtccgcccacgcgtccgcccacgcgtccgcccacgcgtccggcattcctgccatctcccaagacctcctcagacccgagaagcgcagctgcggccatggacgccaccggcactggagctggagggaaggcgaagaagggagcggccggtcgcaaggccggcgggccgaggaagaagtcggtgacgaggtccgtgaaggccgggctccagttccccgtcggccgcatcgggcgctacctcaagaagggccgctacgcgcagcgcgtcggcagcggtgcccccgtctacctcgcggccgtcctggagtacctcgccgctgaggtcctggagctcgccggcaacgctgccaaggacaacaagaagacgcgcatcgtcccgcgccacgtgctgctggcgatccgcaacgacgaggaagctcgggn

SEQ ID NO: 99124 - DNA, 527 bp, Zea mays
agtgatgtgtttatagaactgactatggctgtctcggtccggaattcccgggtcgacccacgcgttcgggatgagctacaggcttcgcaggattgttgacaccttcaaggaccttgtggaagaaatgagcacctttggattcaacaagcttgagcccgaggcaacaacgacatggaaggagtggcgtgagacggattctattatcgttgatcctgaaaatattgttgccaggtctagacatgatgagaggaagaaaattgttaacttattggtcaatggtcatgttaccgatggtgatcttatggtcgttcccattgttggaatgggaggactaggcaagaccacactcgctcagctcatctacaacgaccctcaggtcaaggagcactttcatctactaaagtgggtatgtgtgtcagatgatttcaatctccgtaatctttccacaagatatgcaatgtgtcagagacaatccctgaagatgccctatagaagcttcaggaacatcttaaggggaagaggtacct

SEQ ID NO: 99125 - DNA, 531 bp, Zea mays
  unsure (1)..(531): unsure at all n locations
ctcggnnnnnncctgactgacnatcgatcgtactgnctgtaccggtccggaatggctcgacccacgcgtccgcccacgcgtacgggtgggttggcttctcctgcccctccggttcgggttcgggttcgtgaggttgttcggggttcggtttcgtgggtgagcggatcgagatggcggcgtcggatgttgagtaccgctgcttcgtcggcggcctcgcctgggccacggacgaccactccctccacaacgccttcagcacctacggcgaggtcctcgagtccaagatcatcctcgatcgggagacgcagaggtcccgcggcttcggcttcgtcaccttctccacggaggaggcgatgcggaacgccatcgagggcatgaacggcaaggagctggacggccgcaacatcaccgtcaacgaggcccagtcccgcggcggccgtggaggcgggcggcgctgcgggtaccggtggtgcccgtgaggcagcggctacagcgtggcgggcgccgtgattggcgcgcggctacggcgtg

SEQ ID NO: 99126 - DNA, 534 bp, Zea mays
  unsure (1)..(534): unsure at all n locations
ntgtggctgtgatactgcacaagagactgactcgtcncggnctcggtggaattcccgggtcgacccacgcgtccggcaggatcttctatatcctatggtccccatcctccgccaaggtgaagagcaagatgcttgatgcaagctcaaaccaaaaattcaagagtgggctcaatggcattcaggtggaactgcaggctactgatgcaagtgaaatcagccttgatgagatcaaggatcgggctcgctaggcatcatgatcatgcatcatggactcggcctactactgtggatttgtatgccattatagacttggtgctgtgaaagactgcttgatgatttgcgggtttgttgctgtgtaaaaaaaggtcccatggctcccagaagaccatgaaggttcggatctatcatgtaattccttggtatctgccaattatgtatggactatggacatgtgttgcgctgntcaacttactactacaaataagtaatcgatatgttccctttcccaaanaaaaaaaaaaaggggcggccgct

SEQ ID NO: 99127 - DNA, 513 bp, Zea mays
  unsure (1)..(513): unsure at all n locations
agttggggnnnagggttaaagatctacggggacgtaatgcaggtccggaattcccgggtcgacccacgcgtccggttccccaggaagttctggcctgaagggaaaggaagggagttcttcctctacgccagcagcaggagaggttactacggagtgtggcaggagttcgagaagcagtaccctgacgccaatgtcctcctggtcaccgtgaccgacgaggagtcgaggcgcatcgagcagcagtcggacgagcagaccaaggcggagatcatgcaagtgctgcggaagatgttccccggcaaggacgtcccggacgccaccgacatccttgtcccgagatggtggtccgacaggttctacaagggcaccttcttcaactggccagttggcgtcaaccgctacgaatacgaccagcttagggcaccggttgggagggtatacttcaccggtgagcacaccagcgagcactacaatggctatgtccatggagcctatctttcagggtatcggact

SEQ ID NO: 99128 - DNA, 509 bp, Zea mays
  unsure (1)..(509): unsure at all n locations
agttggggagtggtgtcagtgactgcactnagcttcgcaatccgcgaattaccgggtcgacccacgcgtccggttacgcatgaagttatgggctgaagggataggacgggagtccttgctgtacgccatcgggaggagaggctactacggagagtggcaggagttcgagaagcagtaccctgacgccaatgtcctgctggtcaccgtgaccgacgaggagtctaggcgcatcgaacaacagtcggacgagcataccatggcgtagatcatgcaggtgctgcggaagatgttacccggcaaggacgtcccggacgccaccgacatccttgtcccgagatggtggtccgacaggttctacaagggcaccttctacaactggccagttggcgtctaccgctacgaatacgaccagcttagggcaccggttgtgagggtatacttgaccggtgagcacactagcgagcactacaatggctatgtccatggagcctatcttgtagggtatcgan

SEQ ID NO: 99129 - DNA, 548 bp, Zea mays
  unsure (1)..(548): unsure at all n locations
cggtggntggctctccctgattactgttgaanccactgtccggtccggaattcccgggtcgacccacgcgtccgatcgccgtcctcggcttcgccttcaagatcttcgactactagaagagccggttcgtgaaccgcgtcgtgtgcgtccatgttcaacaccgttgccggcaagaagatcgccgtcctcggcttcgccttcaagaaggacaccggcgacaccagggagaccccgggcatcgatgtctgcaagggcctgctgggtgacagggcccagatcagcatctacgaccccaggtgacggatgaccagattcagcgggacctagccatgaacaagttcgactgggaccacccgatgcaccctgcaggcgccaagccgaccggcgtgaaacaagggaactgcctgtgggacgcgttccaaggcaccaaaggcgcccaccggcttggcattctgacccagtgggaccagttcaaaaacctgggacttccgaagaacttttcaacatggccaaacccgcctttggctttgacaggcgcaacattgtta

SEQ ID NO: 99130 - DNA, 533 bp, Zea mays
  unsure (1)..(533): unsure at all n locations
ggtggttgtatcactgagaccctgagaccnataggactgccgtaccggtccggaattcccgggtcgacccacgcgtccggtgacacaaggagcatacgactcacggaatatcttccagtcactagatcttgcatggacattgcttcggatcttccctcgcgaacttctccaccgtatcccggcgaagaccttggaccagtactatagcagagatgcctcccactgaatcactgatcgttgatcagtgttccaatagtttggcaagtgttgaatcaattgaacagattggcttcatggccttttccctgtatttatgtgtagtcaggtccaattcttttctggtgatgagcgcaaggttatcgtagatgactcgcggtcacggcaatatttgtgatattgaggcatctgtggactatgggttaatttcagttatttggtttctttcacctttcagaactgttagcaagaacattctgggccaggatgctcgaacacaactggctgtatgtacatttgtgaatggtgaataaaga

SEQ ID NO: 99131 - DNA, 545 bp, Zea mays
  unsure (1)..(545): unsure at all n locations
ggcgtcgtncttgacnccactgaaacctgtaggactgacgtaccggtccggaattcccgggtcgacccacgcgtccgattcgacggagccaaccaacctcaccaagttataccaaggccatgggccgtgacctacgtgttcacttcaagaacacccgtgagacagcttttgcccttaggaagttgtcactcaccaaggccaaaaggtaccttgaggatgtgattgcccacaagcaggccatcccgttccgcaggtattgtggcggtgttggacgtaccgctcaggctaagtctcgtcactcaaatgggcagggacgctggcctgtcaaatctgctagattcattctagaccttctcaagaatgctgagagcaatgctgaggtaaaaggtcttgatgtcgataccctctatgtgtcacacattcaagtgaaccaggctcagaagcagcggcgcaggacctaccgcgctcatgggcgcatcaacccttacatgtcctncccgtgccacatcgaactcatcttgtcagagaaggaagagcccgtgaag

SEQ ID NO: 99132 - DNA, 536 bp, Zea mays
  unsure (1)..(536): unsure at all n locations
tgctgtgntgagatagagatcattgcacgtctctaccggtctggaattcccgggtcgacccacgcgtccgccccgatctcgtcgagaggaagcccaatttcgaaaccgtcgccgtattccaatggcgcccaaggccgagaagaagcccgccgccaagaagcctgcggaggaggagccggcggcggagaaggccacggcggggaagaagcccaaggccgagaagcggctccccgcgggcaagtccgcaggcaaggagggtggcgagaagaaggggaagaagaaggcaaagaagtcggtggagacgtacaagatctacatctttaaggtgctgaagcaggtgcacccggacattggcatctcgtccaaggccatgtccatcatgaactccttcatcaacgacatcttcgagaagctggcggcngaggcggccaagctggcgcggtacaacaggaagcctaccattacgtnccgcgagatccagacctncgtncgnctcgtncttcccggcgagctcgncaagcacgccgtcttcgagg

SEQ ID NO: 99133 - DNA, 535 bp, Zea mays
  unsure (1)..(535): unsure at all n locations
ggtcatgtgtgtatgctcgtataagattgtaattctatactcgtcttgaattcccgggtcgacccacgcgtccgattacagctagctgcaaaaatcgttcatgtattataagcatcaggcagacttaaaaacatggtagtcttagaacattgttctatatccttgcagagcaactagaaaaaactctcaacacagcacattcagaggatttatgcgttggcagcagcctgggcagcggcatcccgcttcctttgctcttctatgatgctcagcttgattcccttgcccttgggcaggctcacccacggcttattacccttgccgatggtgaacacgttgcccatacgggtggcgaactggtngccccaggagtcctncacgtgaatggtctcaaaagctgccttgtgctttttccctgttcttgataacaaccacacggcagtggtcctttccgcaagtaacattgacaacgttgccaccataaacctggttgagttcacaaattttgttggcttcaaatcaaccttgatggggc

SEQ ID NO: 99134 - DNA, 539 bp, Zea mays
  unsure (1)..(539): unsure at all n locations
tgatggtgctcacgatagcgtaagagatgtagtatgtaatcgccgccggaattcccgggtcgacccacgcgtccgcacgctgccgtcggaggtcacccgcgcggtgatgctggtgcgcatcaacaccctcctccagggctactccggcatccgcttcgagatcctcgaggccatcacgaagctgctcaacaccggtgtcagcccctgcctgccgctccggggcaccatcaccgcgtcgggcgacctggtcccgctctcctacatcgccggcctcatcacgggccgncccaacgcgcaggccgtcaccgtcgacggaaggaaggtggacgccgccgaggcgttcaagatcgccggcatcgagggcggcttcttcaagctcaaccccaaggagggcctcgccatcgtcaacggcacgtccgtgggctccgcgctcgcggccaccgtgatgtacgacgcccacgtnctggccgtnctgtcnganggtcctgtccgcgtcttctgcgaggtcatgaacggcaaggccgagtacacggaccacc

SEQ ID NO: 99135 - DNA, 535 bp, Zea mays
tgtttctgggtgtttgacagagcatgatgcgactacctaccgctccggaattcccgggtcgacccacgcgtccggccatgtacttgttgatggcaaggtcaggactgacaagacctaccctgctgggttcatggatgtcatttccatccctaagacaatggagaactacaggctgctttatgacaccaagggccgcttccgtcttcacccaatcagggatgaggatgccaagttcaagctctgcaaggtgaggtccgttcagtttggccagaagggcatcccctacctgaacacctacgacggccgtaccatccgctaccccgacccgctcatcaaggccaacgacaccatcaagatcgatctggagaccaacaagatcaatggactcaatcaagttgacgtcgggaacgtggtcaatgggacccggcggaggaacaccgggcctgtaagtgtgaacaagacaaggaggaagcacagggcggctttcataccaatcacgtcgaggacttcatgggcccacaattcggcaaccgga

SEQ ID NO: 99136 - DNA, 545 bp, Zea mays
  unsure (1)..(545): unsure at all n locations
gttggatggtattgctacgactcatcgattgcgtngccggtcctgaattcccgggtcgacccacgcgtccgctccaacaatactgtgcaaggtccagcgcgttctatgattgctgatctgtgcggtcatcatgggcctagtgcagccaactcaatcttctgttcttggatggcgctgggaaacatcctaggctattcctctggttccacaaacaactggcacaagtggtttccgttccttatgacaaacgcgtgctgtgaagcctgcgcaaacctgaaaggcgcgtttctggtggctgtggtgttcctagtcatgtgcttgactataaccctgttcttcgccaaggaagtgccctacagaggaaaccagaacctcccaacgaaggcaaacggcgaggtcgagactgaaccttccggcccactcgctgtgctcaagggcttcaagaacttgcccacggngatgccgtccgtgctcctcgtaactggactcacctggctctcgtggttcccgttcatcctctacgacaccgactggatgggccgtga

SEQ ID NO: 99137 - DNA, 543 bp, Zea mays
agaatggtgctatggctactattcattgagcgacgtaccggtctggaatacccgggtcgacccacgcgtccgcccacgcgtgcgggactttccggaccccttgtcgtggctcgaagagatgatcgagacatacgtgcagactatcgccaagggcgtccgtagttatgaggaggccaagaagaggatgtatgctactagtgcgaccacttacgttggatgtcaggctgtaatgaccgaggaatatgtcacagaaattactctggtgaagcactggagtagtattcattctgcctagattcatatacatatgcagaaacaaacgagtacggaagacacatatatgactattgtgtcatcagtccatgaccaccagctgttcattataacagaccatatagaactgtcaggaaccgtgtctacccagggaactaccattatggtcctccacaacatggagattaccagaacaaccgttttacaacacaatgtgggatcccaaactactatgctgatcaaactaacttccatacatcccgcttgagg

SEQ ID NO: 99138 - DNA, 535 bp, Zea mays
ctatgtgtatcactagatcatgaaactgtaggaccgacgtaccggtctcggaattcccgggtcgacccacgcgtccgcccacgcgttcgggacttccttgaccgcattccgtcgcgcgaagagatgatggagacatagctgcagactctcggcaaggtcgtcgggagttatgaggaggccaagaagaggatgtatgcttttagtacgacgacttatgttggttttcaggctgtaatgaccgaggaaatgtcagaaaaatttcgcggtttgcctggagtagtggtcattgtgcctgattcatatctatatccagaaacaaaggagtacggaggagacaaatatgacaatggtggcatcactccaagagcaccatctgatcattatagcagaccatctagaactgacaggaaccgtaactactgaggaaactaccaggatggccattcacagtaaggaaattaccagaacaaccggtcttcaccagaacgtggttacccagaacaaccccgacgtattaagggaactaccagacgtt

SEQ ID NO: 99139 - DNA, 542 bp, Zea mays
agtatgggtgctcttcactgagactcgatcggatcgacgtaccggtctggaattcccgggtcgacccacgcgtccgcgcttcgccgacctcaccaacgacgagtactgcgccacctacctcggcgccaggaccaggccgcagagggagaggaagctcggcgccaggtaccacgccgccgacaacgaggacctgccggagtccgtcgactggagggccaagggcgccgtcgccgaggtcaaggaccagggcagctgcgggagctgttgggctttctcaacaatagcagctgtggaaggcatcaaccagattgttacaggcgacttgatctccttatctgagcaagagcttgtcgactgtgatacttcgtacaatcaggggtgcaatggaggtctgatggactatgcgtttgagttcatcatcaacaatggcggaatcgacaccgagaaggattacccttacaagggcacggacggacggtgtgatgtcaacaggaaaaacgcgaaggtgtcactattgacagctacgaagatataccagcgaa

SEQ ID NO: 99140 - DNA, 548 bp, Zea mays
  unsure (1)..(548): unsure at all n locations
cgagtgctggtgttcctaccgctactgtancgatgtaccggtctggaattcccgggtcgacccacgcgtccgtagaagggctgatggtgcaccctccatggctgcacttgtatgcagctcttgtggtacatagtgttgttaacagtgacctggatgcttaaccggttgtcaagtgaagaaggctcaaactaccggaagaatgattgagatggttgaacacagaatcttaccctctcagttggatagactgtcttgctgcatccaacaaaattctctcttgtgcccagcaagggcgcttgaaaactttatagcattctggccaaataatatgcaatcatgataggcataatctagtgccagttggtcataaaggacaaaccttgaatggggtcaactgatatggtgatataaaacttgttaaaaacctttccagcacttgactaataatattcctaatgattttaaaagtttttttttggggaattgttaaaaaaataatgttttttgttttcattttattttatattatacttttttttatggctgag

SEQ ID NO: 99141 - DNA, 540 bp, Zea mays
  unsure (1)..(540): unsure at all n locations
agtaggttggtattgctgggacctaggtancgactgtaccggtctggaattcccgggtcgacccacgcgtccgaaactaagcttcctggagcacccaagttttttttgtgtgttctagcggaaagaaagaattctgatatttatgggccttggaagaagaaatgccttgctgaatttgggatcgttacacagtgtgtggcaccaactagagtcaatgatcagtatcttacaaatgtcttgttaaagattaacgcaaagttgggtggcttgaattcgttgctccaaattgaaacatccccagcaattcctctcgtatccaaggtcccaactataatcttgggtatggacgtatcacacggatctcctggacattctgatataccgtctgttgctgctgttgttagttctcgtgaatggcctcttatctcgaaatacagagcatctgtccgcacccaatcaccaaaaatggaaatgattgactcgttgtttaaaccacgggaaactgatgacgatggtctggttcgggaatgtctgattgac

SEQ ID NO: 99142 - DNA, 547 bp, Zea mays
tgtatgggtggctatcaactgagacttcgagaaccgctaggactgtccgtaccggtctcggaattcccgggtcgacccacgcgtccgcccacgcgtccgcagtgtactgtccaccctctccctcctcgagcacactgatgtggctatactgctggacaatgaggccatctacgacatctgccgccgatcccttgacattgagcgcccaacctacaccaacctcaacaggcttgtgtcccaggtcatctcatcccttactgcctccctgaggttcgatggtgctctgaacgtggatgttaacgagttccagaccaacctggtaccctacccgaggatccacttcatgctttcttcgtacgctccagtcatctctgctgagaaggcctaccacgagcagctctctgtggctgagatcaccaacagtgccttcgagccatcttccatgatggccaagtgcgacccacgccatggcaagtacatggcctgctgcctcatgtaccgtggtgatgtggtccccaaggatgtgaatgctgctgtggccaccatc

SEQ ID NO: 99143 - DNA, 545 bp, Zea mays
  unsure (1)..(545): unsure at all n locations
gagcggggcgancctgagtccctgctactgtacgactgccgtaccggtctggaattcccgggtcgacccacgcgtccgcggacgcgtgggcggacgcgtgggcgacgcttgccgccccgacgacgaccccgcctggttgtgcctacgagtcggttgcgaccagagccatgagcaggtcgaccctgaggccctggacaggagcttctttatgcgggtcatggcggcgagaagccccaacgtgaggctacagaaggctatcagcaagaagaaccagagctcgatgctgaaatgcccgcactctgcgccgccgaagcaaccgagagctcggttcgcgaggctgagcgcagagactgagactgcggggaaggcaccggcggagcccaagccaagggtcgagcggatctgcgccatgcaagcgtccccaattcgcaccaagacagccagggtcgaatgtcccagcgagaggaagaaggcactgaccacgccgcggagcaaggccgtccggccgaggcaggagctgtttcacagtgtgaagcaccagaggg

SEQ ID NO: 99144 - DNA, 538 bp, Zea mays
  unsure (1)..(538): unsure at all n locations
tggtagtgcgtattgatagtaatagaatgtactctctaccgcgtccggaattcccgggtcgacccacgcgtccggcacaagcgcactctagcaatggcttctgttgttgtccgccctagcgacgccgagctactaaaggcacaagccgacatatggcggctcagcctctcctacctcacgcccctgtcactgaggtgcgccgtggagcttggcatccccacggcgatctaccgccatggcggggctgcctcagccgctgagctggtcacggcgctgtctctcccctccactaagctgccgttcctccgccgnctgctgcggctcctcgccgcgtcgggcgtgttcaccgtcgacaagcagagcacggaagaggagcggtaccgcatcagccccgtgtcctacctnctggtggacggcatccctcacgaggaccacatgaaccacaccgntcttgtgctcacctgcacctcgacgcgctacatcgaggccgggatagggcttgccgaatggntcaagaaggacctggtcacgtcaccgt

SEQ ID NO: 99145 - DNA, 543 bp, Zea mays
  unsure (1)..(543): unsure at all n locations
gagtagagcgtatcgcctacttcaagactggtcatgctcatacccgtccggaattcccgggtcgacccacgcgtccgcagacacatgggccgacacaaaaggaaacttgaagacaaggtcttcggccccgatgccttcgctgctcacctcacccgcctgcctacccttcgccgtacactctgctcgactnctgcatcggagctctccaccgtcgcggacccttcctgcaccaccgcgacgccgactcggtgcacttcctcgcgccgcgcaagaagacccgaccgcccctcgcgatgagctggcttgagaagctgggtctgagcgggcttggaggtagcccgcgcgcgtccgacgcgtcggcagcgctggcgcacgggcccgacgaggaccaggccgcgccggggaacgagatcacgcaattacgcgccggctgcttctggggcgtcgagctcgtgatccagcgcgtgccgggagtcactgcgcacggatgtcgggtacagccagggcaacattcacgatccgacctacgaggacgtctgcacc

SEQ ID NO: 99146 - DNA, 537 bp, Zea mays
  unsure (1)..(537): unsure at all n locations
ngacngagatgtgtctccactgagatgactgctactnacgtaccgcgtccggaattcccgggtcgacccacgcgtccgcccacgcgtccggggtatatccttggttatgtaacgtcgcatcaggaccgcaacgcggtgtccttggtctgccgggcatggtacgacattgagcgtcatggccgccattcggtgcttgtaagaaactgttatgcggtgtgcccagagcgtgtacatatgcggtttcccaacatgcgcgcactgagcttgaagggcaaaccgcactttgctgaattcaaccttgtcccggcgggttggggtgccactgcaaatccatgggtggatgcgtgcgcccgtgcatgcccaggtcttgaggagctccggctgaagtttatggttgtgactgatgaatgcctcaagttgctttctctatcctttaccaactttaaatcacttgtccttgtttgttgtgagggggttagtactaccgggcttgctaatattgccaccaatngcagggttcttaaggacttgacttac

SEQ ID NO: 99147 - DNA, 544 bp, Zea mays
  unsure (1)..(544): unsure at all n locations
ggatctgatgctcttgctacgaccgttgtancgacgtaccggtctctgaattcccgggtcgacccacgcgtccgctcacctgtgctcaacactgacgacgcctattccagtcatagaagttaacgggcctgacgggaagcccattggtcctcctatgggaaatccatggatctacatgtaccctgagggcttgaaggatctccttatgatcatgaagaacaaatacggaaacccacctatctacatcacggagaacggaatcggggatgttgataccaaggagacacctctacccatggaggatgccttaaatgactacaaaaggctagattacatccagcgccacatcgctactcttaaggaatcaatagacttgggatcaaatgtgcaaggctacttcgcttggtctctgctggacaactttgaatggttcgccggctttaccgaacgttatggcattgtctacgtcgaccgcaacaataactgcacgcgctacatgaaggagtcttgccaatggttgaaacagttcaacgccgcgaagaaa

SEQ ID NO: 99148 - DNA, 543 bp, Zea mays
cgatgcggtggtcttactgagactgctgatatcgactgtccggtctggaattcccgggtcgacccacgcgtccggtgctgatgaacagggcccctgttatgccttgagttattatgattcggaaagggagcgtatgtttgaccatgacctaaggcgagtgaaagggttggaaatcagaaagatggccgaagatgggaactgtctattcagagctgttgctgatcaagtttatggagacgcagaagcttatgacatggctaggcagatgtgtgttgattatatggaaagggaacgggatcatttctctcaggtcataactgaaattgaaaggtttacattatactgtaagaggaaaaggagagataaggtttatggcaacaatgttgagatccaggcatttgcagagatgtacaatcggcccattcacatatattcctacagtacagagcccattaatatttttcaaggaagctatctcacagacgttcctgcaattagattaagttaccatcatggtaatcattacaattcagtggttgatcc

SEQ ID NO: 99149 - DNA, 550 bp, Zea mays
  unsure (1)..(550): unsure at all n locations
tgtgagatccttccatgagtncctgagtaccgatagtactgacgtaccggtctggaattcccgggtcgacccacgcgtccgccgctccggtcacccgtcacttcacgcaattatgtcgaggaggaagaccagggagccaaaggaggagaacgtcacccttggacccactgtccgtgaaggagagtatgtctttggtgttgctcacatctttgcatccttcaatgacactttcattcatatcaccgatttgtctgggagggaaactctggttcggatcaccggtggcatgaaggtgaaggctgaccgtgacgagtcgtcaccttacgctgctatgcttgctgctcaagacgtcgcacagcgctgcaaggagcttggcattactgcactgcacattaagcttcgtgccaccggaggcaacaagaccaagacccccggacctggtgcccagtctgccctcagggcgcttgctcgttctgggatgaaaatcggacgcattgaagatgttaccccggtccccacggacagcactcgcagaaagggcggtaggagn

SEQ ID NO: 99150 - DNA, 545 bp, Zea mays
  unsure (1)..(545): unsure at all n locations
gtgtagtatgcgcncgtgacntccctacgactcatcggacctgacgtaccggtccggaattcccgggtcgacccacgcgtccgcccacgcgtccgcgctggaccgccagtgcttgcgccttgccagtgtcatggccagcaacatcccgaccagtgacatcggtgtgatcactagcgcggaggggaggaagagcatgctgaagctggccgagaggatggtgatgagcttctgcggcggcgtgacggcctctgcggggcaccagtggactacgctgtccggcagcggcgctgaagacgtccgcgtcatgaccaggaagagcgtcgacgaccctggcagggccgccggcatagtcctcaacgctgccacctcgttctggcttcccgtcccggccaagcgtgtcttcgacttcctccgtgacgaaagctctcgcagcgagtgggacatcctctncaatggcggcgttgttcaagagatggctcacatcgtcaacggccgcgaccattgaaactgcgtctcgcttcttcgtgtcaatagcacgaactcga

SEQ ID NO: 99151 - DNA, 545 bp, Zea mays
gtttttttttgatgagtgtgctgtgcatgatatgattgtactgctgtaccgcgtctggaattcccgggtcgacccacgcgtccggtgacccccttgaccctccagaggaagcgttctagaattgctgacaagaagaagaggatcgctaagaagaagtctgaggctgctgagtaccagaagcttcttgcccagaggctgaaagaacagagggaccgccgcagtgagagcttggccaagaggaggtctaagctttctgccgccgccaaggcttctgctgccacctctgcctaagaatgatcagtgctttgagatgttttcaaggcctattttgttacagcttataagtaccttatgctgccctggctgtgttgcatcagtcgaccctccctacttagacttatgagtaattggtgcaattttgtatggacatggtacttgcttgtccggattttttgagtaccaaaggttggatatgtggtttaatctgggaaaaaaaaaaaaaaaaagggcggccgttctaaaggatccaacttaactacccggcc

SEQ ID NO: 99152 - DNA, 537 bp, Zea mays
  unsure (1)..(537): unsure at all n locations
gaattagtgtgctgtgccagcnactgattgtactgcctaccgctccggaattcccgggtcgacccacgcgtccgcggacgcgtgggcggacgcgtgggcggactcgtgggcagtcgcagcgcacgccatcagctagcaggtagcgcgctcctcgagcccagcagagaaaggccggcctacccactctctctctctctccagtctccaccggcagcgccaatagtaatagccatgggctccaccgccggcgacgtggccgcggtggtggacgaggaggcgtgcatgtacgcgatgcagctggcgtcgtcgtccatcctgcccatgacgctgaagaacgccatcgagctgggcctgctggaggtgctgcagaaggaggccggcggcggcaaggcggcgctggcgcccgaggaggtggtggcgcggatgcccgcggcgcccggcgaccccgtcgncgcggcggccatggtggaccgcatgctncgnctgctcgcctnctacgacgtcgtccggtgccaggatgganggaccgggactggc

SEQ ID NO: 99153 - DNA, 539 bp, Zea mays
  unsure (1)..(539): unsure at all n locations
ngagatgagtgtgctatgccagcncatgattgtactcacataccgcgtccggaattcccgggtcgacccacgcgtccggtggtccctgtctctctccttcggccgtgttctccaggcgagcaccctcaaggcctgagctggcaaggtggagaacttggagaaggctagagctgccttcctcgccaggtgcaaggccaactctgaggctaccctcggcacctacaagggtgatgctgccgccgacaccgagagcctccacgtcaaggactacaagtactgagttgcttctctttgcatgcccgttttggaactcctgcctacgagctaagttgcggagtgtggtttgctcgttagagcttattttcggacatccaaaaaacatgcttcctatgtgggatgatggctatctttatatttgtatgttagttagtctctttgctgttaaatttcgtgtcagttggtcctgccgatggagaatcgagcagtcctctttatttggtctatcaactatgctgtaatgctggctatgtatcggaaaa

SEQ ID NO: 99154 - DNA, 545 bp, Zea mays
  unsure (1)..(545): unsure at all n locations
cgagtcgatggtgttcatgagagcctcagtancgacgtaccggtctggaattcccgggtcgacccacgcgtccgcccaccgcctccgccgccgacaacagcgttttgtagtgtatttccggagagggttggggagagtagtagtgatccgcaatgtcgacggaggaggctgttgtggctgaggtcccggtgaccgaggtgccagcggaggtcccggcggcccaggtggccgaggcgcccaaggcgaagaaggcgcccaaggagaagaaggcgcctaaggagaagaagctttccgcggcgaagaagccggcggcgcaccctccctacgctgagatgattgtagaggcgatcgctgccctcaaggagaggaaggggtcgagctcggtggccatcagcaagtacgtcgaggggaagcatggcggcaagctccccaccaacttccgcaagcagctcactgtgcagctgaagaagctcgctgccgccggcaagctgacgagggtgaagaactccttcaagctgccggccaccgacgccaagcccaaggcc

SEQ ID NO: 99155 - DNA, 543 bp, Zea mays
  unsure (1)..(543): unsure at all n locations
tgatgcgatcgtctctccaccgaccgatacgancgacgtaccggtcttgaattcccgggtcgacccacgcgtccgacagcattctgtttattgtctttatcatctttcttatcgtcactgcattcatcacagttgcactgacatacttccagcttgctgctgaggaccatgagtggtggtggaggtcattcctatgcggaggatcaactggatttttcgtatacggctactgcctgtactactactatgcgcgatcggatatgtctggcttcatgcagacatctttcttctttggctacatggcctgcatctgctatgcattcttcttgatgcttgggatggtgggcttccgtgcctccttgttctttgtccgccacatatacaaatctatcaagtgtgagtgagctgttgttggaagatcaagagcagcagagctgtacccgtttttggtgccaccgagaagtcccaaatatagaaaaaaaaatggtttgctctcgcgtgcaacaggagcagctagtgattgccatgtttcagattatgccc

SEQ ID NO: 99156 - DNA, 546 bp, Zea mays
  unsure (1)..(546): unsure at all n locations
cgagcagatgctgttactgagaccactagtancnacgtgccggtccggaattcccgggtcgacccacgcgtccgcgctttcgcgtctgcgtgcgtgcgtgtgcttgcaggcatgcggctggcctccgtccgcgcatcctcttctggcgaggagctcccccacgcagccgctgctctctccacgtcctctgttccttcccctccccgatctcccccaatccgaccaaaccggcagagccggggggcggcgatggcgctgcgacgggcgctcctcagatcggcagagatctctttcgaacgcaaggctgcaattgagtacattcattctttatcaagggcacagcctgctcgttctctcaatggtgctggcctttgtcctgctagtagatcacttagcacccaggccgncactacgtcaagcacaccacagcctncgncttccccaccccctccagagaagactcactttggtggcctcaaagacgaggatcgcattttcaccaacctctatggtctgcatgacccttttctgaaaggcgcgatgaat

SEQ ID NO: 99157 - DNA, 540 bp, Zea mays
  unsure (1)..(540): unsure at all n locations
gagttggtggtcttatgatacatcngtancgatgtgccggtccggaattcccgggtcgacccacgcgtccggtaagacttgctctttgtggtggtgcacctttatcaggttacacacaaagattcatgaatatatgtctaggtgtcccagcgggtcaaggctatggtttgactgaaacctgtgctggagcagctttcactgaatgggatgacacaagtgtgggtcatgttggtccaccacttccttgctgctatgtgaagcttgtttcatgggaagaatgtggttacaagatttctgattatccgatgccgagaggagacgtcgtggatggcggacacagtataacaaaaggctatttcagcaatgaagcatagacgaatgaagtctacaaggttgacgagaggggtatacgctggttctacactggtgatattggccagttccatcctgacgggtgccttgagattattgacaggaaaaaagatatctaaagcttcagcacggagaatatgtgactcttgtcaggttgaatcgactctt

SEQ ID NO: 99158 - DNA, 546 bp, Zea mays
  unsure (1)..(546): unsure at all n locations
gtgtagtagccgtnnctttgcntccatgagactcgtaggactgacgtaccggtccggaattcccgggtcgacccacgcgtccgcggacgcgtgggcaccagacccctgtcgctctcgtgtgccggccggcgacggcgatgatggcgactggccgatcgctcgccggggtatactccgccagagccacccgccccatgcctctacgcgccggcgcacgggcgccctgcgccggtgccgccgcggccgagcctgcggccgagcacgtgcggaggctcgtggcggagttcgacccggcggtcccgctggactccgcggtcacgccgccgagcgggtggtacaccgacccggattttctccagctcgagatcgacagcgtcttcttccgcgggtggcaggctgtcggtcacatatggcaagtgaagaacccaaatgatttcttcacaggaaggtgcttacgtcttgtttcgatgcctcagtagttccagttagtagtaattttgctacgcctttcgtacatatataaataattttgctacctcaaaatgg

SEQ ID NO: 99159 - DNA, 547 bp, Zea mays
cgatggatgctatcactgatacaactgagactcgatacgactgtccgtaccggtctggaattcccgggtcgacccacgcgtccgggaaccgtgcttggatattattctgtcatggttctgccgtcaaaaactgccattgcaccggtcaacgaaacattcctacccaggtctgacgatgaacgtgaaatgtgtgcaaggactatctactgcacaaacattgacaagaaggtcactcaagcagatctaaagttattctttgagtccatatgtggtgaggtctttcggctgaggttgcttggcgactaccatcattctacccgcatcgcttttgtggaattcgtgatggcagaaagtgctactgccgctctcaactgtagcggtgtggtactgggatccttgccaataagggtgagcccgtccaagacgcccgtgcgtacccgcgcccctcgccagctgatgttgtcctaggtatacatacaggaggtgctgacgatgccactgctcatatataagtaatagagatagacatgtatgaaaagggtctttt

SEQ ID NO: 99160 - DNA, 529 bp, Zea mays
  unsure (1)..(529): unsure at all n locations
agtggttctcatgatctccgataatatagtaacctgcccgaatttccgggtcgacccacgcgtccgcagacgccctctacttctctctagttagtgttcatttcaaactcttggccgncgnctcgctctctgttcgccgcgccccgccgcagaaatggcgctgccgaatcagcaggttgtggattaccccagcttcaagctcgtcatcgnttgcgacngtggaactggtaaaaccacatttgggaagaagcgatttactggccaggttgagaagaaatatgagcccaacattggtggtgaagatcaccctctggattttagcacttactgtggcaaaattcgcttctattgctgtgaccctgttgggcaaaaaaagttcgggtggcctcaaggatggctactacacttatgggcacagtgcgcataatattgttgatggcacttttaggctgacatacacgaaaagttccacaatggacaaggacccttgcacggggggtgagaacattccaatgggttctttgggaac

SEQ ID NO: 99161 - DNA, 534 bp, Zea mays
  unsure (1)..(534): unsure at all n locations
ggtttgagtggttcaatgagtacggggggatatagtattgctcgcccaattcccgggtcgacccacgcgtccgcccacgcgtccgcccacgcgtccgctcaagttctcgcgcccacagccaaatttttctccactcaatcgcggcataagctgcactgcagccatggacgccagcggagccggtagcaaggcgaagaagggggcggctgggcgcaaggctggcggccccaggaagaagtcggtgtcgcggtccgtcaaggccgggctgcagttccccgtcggccggatcgggcgctacctcaagaaggggcggtacgcgcagcgcgtgggcaccggcgcccccgtctatctcgccgccgtgcttgagtacctcgccgacgaggtgctggagctggccgggaacgcggcgaaggacaacaagaagacgcgcatcgtcccgcgacacttggctctggcgattccgaacgacgttgagctcggcaagctgctgtctggcgtaccatcgcgcacggcggtggactnccaacataaacc

SEQ ID NO: 99162 - DNA, 548 bp, Zea mays
  unsure (1)..(548): unsure at all n locations
gttgctgntaatgatnaccatcgctactcgctcgaacggtctggaattcccgggtcgacccacgcgtccggctttctgtggtatgaatacatatacaagttagacaattttacatacaacaagtaccatccctacacctcatggatccctataactgtttatatctgcctgcgcaattgctcccagcagttgaggagtgcctctttggtccttttcgcatggcttggcaagattacactagagacttatatctctcagatccatatttggcttaggtctagcatgccaaatggacagccaaaatggcttctttgtttcataccagaatatcctatgcttaacttcatgcttactacggcgatctatcttcttctatcataccgtgtgtttgagatcacgaatgtcttgaagtcggcttttatccccagtagggataatagccgtctgtaccaaaatttcgttgctgggatcgccatctctgtgtgcctggatctctgctcacttattcttctgaagattcctgttgtatagcttatngcatctgcagg

SEQ ID NO: 99163 - DNA, 552 bp, Zea mays
  unsure (1)..(552): unsure at all n locations
tggaactggtgtcatgaacganantgtatggctcgtaccggtccggaattcccgggtcgacccacgcgtccgaagatgtggatggttcatgtatatcagaagaagaagatggtgactgggatgtagatgagccagatgaggaggacatcatttacgtaaaatagcccattgtcttctaggaacttggtcatcattcatccagaacacagcaggtgtgcttctactgatcgaaaatacatcttccaaataactatgaggacttaaccaagcaccattcaatcttcatttgcttctatagtttgggttgcgttctgcatacataatattgcctatcaaggtagatttgccagagcagacttcgatcttcttaatctacctgacagtttcttaccatcatttgattntattgatggacatgttaagcctgttctagggagaaagattaactggatgaagacagggatcgttgaaagtgatctggntctaacagttagtccacattattgtaaaggaactcacttatgggccagattaaggtgttgagttgattgt

SEQ ID NO: 99164 - DNA, 537 bp, Zea mays
  unsure (1)..(537): unsure at all n locations
ttcgttcgtgtgcatcgatncatgatgctcatagcactgccgtaccggtccggaattcccgggtcgacccacgcgtccgcccacgcgtccgcggacgcgtgttcgcggtcccatcctgctggaggactaccacctgatcgagaaggtggcgcacttcgcgcgcgagcgcatcccggagcgcgtggtgcacgcgcgcggggcctccgccaagggcttcttcgagtgcacccacgacgtgacgtcgctgacgtgcgccgacttcctgcgcgcgcccggcgtgcggacgcccgtgatcgtgcgcttctcgacggtgatccacgagcgggggtccccggagacgatccgcgacccgcgcgggttcgccgtgaagttctacacccgcgagggcaactgggacctgctgggcaacaacttccccgtcttcttcatccgcgacggcatcaagttccccgacgtgatccacgcgttcaagcccaacccgcggtcgcacgtgcaggagtactggcgggtgttcgaattcctgtcgaccttcccgag

SEQ ID NO: 99165 - DNA, 538 bp, Zea mays
  unsure (1)..(538): unsure at all n locations
tgttatgtgcgatangctgactcaggctccgtacgtactgacgtaccggtccggaattcccgggtcgacccacgcgtccgtgatattgtgatatcagctgctggtagtggccaatcttgtaaggggaagctggttaaagcaaggtgcagtggtgattgatgttgggacaaatccaatcgaggatccaaccagtgactacggttatcgcctaactggggatgtctgctttgaagaagcagtgaatgtggcctctgctataactccagttcctggcggagttggaccagtaacgattgccatgcttcttggcaacacacttgattcagcanaacgcgtttatggcctaagtgactgaactgacccccctctgaactgtaattctgtcgtgcttgtcctttgtaaactagttctcttctcttttcatccttccgtcgctctctattttagctgtaagaagaaggctgggatgtaccatattcttgctcaataagtattggattagctgtgtccattaangtaagtttttttttgtgtgtgt

SEQ ID NO: 99166 - DNA, 539 bp, Zea mays
tgagtgcggatgaactgaatacgatactcattgcactgccgtaccggtccggaattcccgggtcgacccacgcgtccgcccacgcgtccgcccacgcgtccttccacgcgtccgctcaaatctgcccttgccgccgccactgcccgatccaggtgtgcagactgctccctcctcctctccgctccgaatggcccgcacgaagcagacggcgcgcaagtcgaccggcggcaaggcgccgcggaagcagctggccaccaaggcggcgcgcaagtcggccccggccacgggcggcgtgaagaagccgcaccgcttccgccccggcaccgtcgcgctccgcgagatccgcaagtaccagaagagcacggagctgctcatccgcaagctcccctcccagcgcctcgtccgcgagatcgcgcaggacttcaagacggacctgcggttccagtcctcggccgtggcggcgctgcaggaggccgcggaggcgtacctggtggggctcttcgaggacaccaacctctgcgccatccacgccaagaggg

SEQ ID NO: 99167 - DNA, 549 bp, Zea mays
  unsure (1)..(549): unsure at all n locations
atggaatgctggttattgtaagatatgtatcgctcgtcccggtccggaattcccgggtcgacccacgcgtccggagatatcgaagtgtttcatgttagcaccgagaaccagctagccgatatcttcactaagcctctagatgagaagaccttttgcaggttgcgtagtgagctaaatgtcatagattcgcggaacctggattgaattgtagcatacatgtacttatgcttttgatcatgttcctttttgcattttgttgcttattatggtgctcaagttgtacaaacactccctggacctcacaagtccgttgcaaagtgatgcacatgtttagggggagatgtgctacaacttgaccctttgagactaaccatgtgcttgagtttgataatttagtctcgaatgatgattganaggggaaaagtggacttggaccatgnaagactttcactgcacttcgatgagagggtaacgaattccaagttcatctcatgaaatcttattgccatttgctcttaattgaagaactttgtgaggcaatggggntaa

SEQ ID NO: 99168 - DNA, 549 bp, Zea mays
  unsure (1)..(549): unsure at all n locations
ggaatggtgtgctgatcctcagtttcgatgnagtgacgtcncggtccggaattcccgggtcgacccacgcgtccgcaatcacttggagctggtgccattctagtaaacccttggaatattacagaagttgcagactcaatacggcatgctttaacgatgccatccgatgagagagagaaacgacacagacacaactacgcacatgtcacaactcacacggctcaagattgggctgaaacttttgtatttgagctaaatgacacggttgctgaagcactactgaggacaagacaagttcctcctggtcttcctagtcaaatggcaattcagcaatatttgcgctctaaaaatcgtctgctcatattgggtttcaattcgacattgactgagccagtcgaatcctctgggagaaggggtggtgaccaaatcaaggaaatggaactcaagttgcatcctgacttaaagggtcctctgagagccctctgtgaggatgagcgcactacagttattggtcttagcggcagtgacagggagtgtcttgatgaaaat

SEQ ID NO: 99169 - DNA, 548 bp, Zea mays
  unsure (1)..(548): unsure at all n locations
aggaagtggtcttcctcagcctcacatancgcactgtccggtccggaattcccgggtcgacccacgcgtccgctccgagggatccaaatccagtcgtggaagaagctgagcgagctcagcctcgcggacaatggctgcaccgggtccataccgccggagctcggtgacctgccggtgctcaactaccttgacctctccggcaacgagctcagcggcgaggtgccgatgcagctggagaacctgaagctggaccagttcaatgtgtccaacaaccagctgcgtggcccggagacgtaccgcagcagcttcttgggcaaccctgggctttgcctggatgatgcgctccatcttcatgtttgcagctgccatcctggtcgccggagtggcgtgagtctatcggcggtaccggagcttcagcanatcgaagctgcgctcggaccgctcgaaatggacattgacgtctttccacaagctcttattcagcgaggacgagatccttgattggctggacgaggacaacgtgatttgcaactgcgccgtcgggaagt

SEQ ID NO: 99170 - DNA, 545 bp, Zea mays
  unsure (1)..(545): unsure at all n locations
tggagatttngtccaccagacatgattgcatgctcgtaccggtccggaattcccgggtcgacccacgcgtccgcccacgcgtccgcccacgcgtccggtgcgcttcaacaaggagctgtacaaaggttcataagcaaggagttgcgcttggccggtccgtggacctttctaaattcaccgactacggagagctcaaagcggaacttgacaagatgtttgagttcgagggcgaattggtatctgctaaccggaactggcagatcgtttataccgacaacgagggtgatatgatgcttgtcggagatgacccgtgggaggagttttgcaacatagtgcgcacgatctacatatacacgaaggaagaggtccagaagatgaactcgaaatcatccatgccgaggaaagaagaacccccagcaacatgctaaagctgcaccgntcgcggcggacactaatangatttctgccttgacttgatcaaggagtcttaaatgactaaggcctgtggaaggaagccccgattatgcatgccggatttaaccccg

SEQ ID NO: 99171 - DNA, 543 bp, Zea mays
  unsure (1)..(543): unsure at all n locations
tggatgatgtgattcatgtagagaattattgaacgctcgtaccggtccggaattcccgggtcgacccacgcgtccgcaaaccatgggacgatgagactgatatgaagaagctggaggaggctgtccgcagtgtccagatggagggtctgacttggggagcatcaaagcttgtgcctgttggatacggcatcaagaagatgactatcatgttgacaattgtcgacgatcttgtgtccatcgacactctaattgaggaccaccttacgcaagagcccatcaatgagtacgtccagagttgcgacattgtggctttcaacaagatctagagttcagtttctgagattgggcaacggcagcggctcagctcgtcaagtttgtgctgggatgccaggttatcccttctaggctattacagaaaatagtgtccgagcttagtctattattaaccatttggnctgaggttattgtgaatggtggcagtttttttcatatacatttattttaaaaacaaagggactgaaggttttttggcttaaaaaaaaa

SEQ ID NO: 99172 - DNA, 550 bp, Zea mays
  unsure (1)..(550): unsure at all n locations
tagggtgtggttnttaactcgcctcattacagtactgccgtaccggtccggaattcccgggtcgacccacgcgtccgcccacgcgtccgaggcggcgcagcagcatcgccaccaccgtccaaagatggtgaagttcgtcaagcccggcaaggccgttatcctcctccagggccggttcgccggccggaaggccgtgatcgtgcgcgttttcgaggagggcacccgtgatcgtccctacgggcactgcctcgtcgcgggcctcgccaagtaccccaagaaggtgatccgcaaggactccgccaagaagacggccaagaagtcccgcgtcaagtgcttcatcaagctcgtcaacttcacgcacctcatgcccacccgctacaccctcgacgtcgactttaaggacgtcgcatcgggcgggcccgacgcgctcttcacccgggacaagaaggtcgaagcctgcaaggccgncaaagcgcgcctcgaggagaggttcaagaccggcaaggacaggtgtttccntaccaaactccgcttctagacgtcgggcgtc

SEQ ID NO: 99173 - DNA, 537 bp, Zea mays
  unsure (1)..(537): unsure at all n locations
tgtntcgatgcgnntgcttgataagaagtgatgatggactgctctaccggtccggaattcccgggtcgacccacgcgtccgcttgtcagttccaaaagcgaccagtgtgaaggctatagccgaaatatttgctgacgctgggttttcagatgttacaaagaatttcttggctgtcctggcggacaatggcaggctgaaatatattgaacgcattgcggagagatttgttgatttgactatggaacataagggggagatgaaggttgtggtcaggacagttatttcactcaccaaggaggaggagaaagaactcaaggaaaccttgcaggatatccttggggaaaacaaaactattttggttgaacagaagattgactacagcatcatgggaggattagtgattgaattcgggcagaaggtgcttgatatctcaatcaggaacagggcgaagcaaatggaggcgttcttgaaggcaccacttgacttctaacaacctttttgataaaagcatcatcggaatgccaaggctgttcttgt

SEQ ID NO: 99174 - DNA, 544 bp, Zea mays
  unsure (1)..(544): unsure at all n locations
gtggtgtgggtttcatagatactaagtactgctctcccggtccggaattcccgggtcgacccacgcgtccgaacgctctctaccgtccgagaccccaagcaccagcgcggcggcggtggcggtggcggcggcgaccatggctgtcggaaagaacaagaggatctccaagggaaagaaaggtggcaagaaaaagaccgtcgaccctttctctaagaaagattggtatgacatcaaagcaccgtcggtgttcagtgtgcgcaacatcgggaagactctcgtattcaggacacaaggtaccaggaatgcttctgagggtctgaagcacagagtctttgaggtttgcctagctgatcttcaaggcgacgaggatcaagcttacaggaaaatcaagcttcgtgctgaagatgtgcaaggcaagaatgtgctcacaaacttttggggcatgaattttaccactgattaactcagatccctagtgaaagagtggcagacattaatcgaaacccatgttgatgtcaagacaaccngacactacatngtgcgt

SEQ ID NO: 99175 - DNA, 549 bp, Zea mays
gtgatgaggttattactgcagccgactacgtactgactgtaccggtccggaattcccgggtcgacccacgcgtccgcgtgagtgttttaggcacctaatggctaatttcaggaaaaaaatcaagggtgatgtgctgaagtatatgtggccttgtgcatgggcatgtacagatcatatgtatgatacactaatggagaaaattgcagcatctagtcctaaagcaattcactttctaaacaataaccacaagctaaaatggagtagatctaaattctccaaagaatgcaaggttgattatgtgaacaataacatctcagaatgcttcaacaattggattaaagattacaaagatctcccagtcgctgatctaatggataagattagggagaaaattatggagaagatttatacaaggcaagagatagccaatcgaatggaagggcgtatcctacaaagtgtgatacatgaagtgaacatgaagagcagaagattgcactatgaaatcgtgaagagtggactggtgtcagctgagatatcaggaataacaaa

SEQ ID NO: 99176 - DNA, 541 bp, Zea mays
  unsure (1)..(541): unsure at all n locations
agtnnttatgggggtcaatgagactgcctgtcatcgcgactgacgtaccggtccggaattcccgggtcgacccacgcgtccggcgccacgcaccgacaccaatacgtcatgggttccatcatggagcaacgctgcaacaacgatccgcaggcgctgctcgacgctcagctcgagctctggcacagcacgttcgcgttcatcaagtccatggcgttcaagtcggcgctggagctcggcatcgccgacgccatccactgccacggcggcaccgccacgctcacccagatagccaccaaggccgcgctccacccgtccaagacaccgtgcctgcgcaggctcatgcgcgcgctcacagtcgccggcatcttcagcgtcgccaagaactcgtccgacgatgacagcgatcagcacgtctacggcctcactccggcctcccgacttcttgtcggctcgtcacagaacttggctccaacactgagcctcatccttaacaacgtcttcgtgggccccgtcctttgacctgggacctgggtcgagagcc

SEQ ID NO: 99177 - DNA, 551 bp, Zea mays
  unsure (1)..(551): unsure at all n locations
ttcgtagtggcgtgtccctcccgagtanacgtctgactgtaccggtccggaattcccgggtcgacccacgcgtccgggctctgaagaattgtctgctgagctctctgtttccctgcaaagatgcttgttgggtggtaaaagtggtgctggtgctgcaattgatctgtcatccctaattgttgttgatggaaaggtctgctgggatctgtacattgatgggcttgtggtcagttctgatggtaatttgctagatgcgctagctgttgcgataaaggttgctttgagtgatacaggtataccaaaagttaatgtttctgttagtgctgcatctgatgaggaacctgaagttgatgtaagtgatgaggaatttctgcagtttgacacattcggtgtgcctattattattacattaaccaaggtgggtcggcactacatcgttgatgccaccttagaggaagaatcccagatgagttctgcaatgtcggtgtcagtcaacaggcatgggcagatatgcgggcttacccaagaggggaagggcagggcttgattcn

SEQ ID NO: 99178 - DNA, 552 bp, Zea mays
  unsure (1)..(552): unsure at all n locations
gtgatgagatgtggctngccacgtcagtanagtactgactgtcccggtccggaattcccgggtcgacccacgcgtccgatcgaacctatccgcaacttattcgctgctcttttccttgccagcattgggatgctaattaatgtccatttcttgtggaaccatgtggatatactccttgcagcggtaattttggtgatcaccgtaaagacatttattgttgctattgtcgtaaaagggtttgggtatagcaacaaaacatctcttcttgtcggcatgtctcttgcacaaataggagagtttgcttttgttctcctaagccgtgcttcaagtatccatctcatcgagggcaagctatacctgcttcttcttggaaccactgcactcagtttggtgacaacccctctgctattcaaaatgatcccagcagtggtccacctcggggttcttttgagatggttttctgtcgataccaatcagctgggcctaaaaaatgatgtccttcgcattgatagcggcaagcgcataaatctgatagtccaaagctcacatgan

SEQ ID NO: 99179 - DNA, 551 bp, Zea mays
  unsure (1)..(551): unsure at all n locations
gtgaagagatggntcttgctcagacagtaagtacgtgctctcccggtccggaattcccgggtcgacccacgcgtccggatcgtcaagtaccttcacgaccaccccaagctcctcgaggccgtccgggcggagcaggcggcggtccgcgaggccaccggcggcgggaggcagccgctggcgtgggcgcacacgaagagcatggcgctaacgcatagggtgattttggagagcttaaggatggcgagcatcatctcgttcacgttcagggaggccgtggccgacgtggagtacaaagggttccttatccccaaggggtggaaggtgatgcctctcttcaggaacatccaccacagccctgactacttccaggatccacacaagttcgacccttctagattccaggtggcgccgcgtccgagcacgtttctgccgtttgggcacggcgtgcacgcgtgccccgggaacgaagctgccaagctcgagatgctcggtctcatcaccacctggtcacccgctacaggtggcaaatcgttggatccagtgacnaggtc

SEQ ID NO: 99180 - DNA, 552 bp, Zea mays
  unsure (1)..(552): unsure at all n locations
gggatgcgagggntngattgaggaattactgtagctgctcgcccggtccggaattcccgggtcgacccacgcgtccgcccacgcgtccgcccacgcgtccgcccacgcgtccgcttccttcgacgtcaagctccgggccactccatggattcgatctgggaggcgaggagctgaggccaggacagggggaggagctgctggggggcagggacaggatagcgcggctaagcggcaacggcggcagccatgagctggagacgaggcggaagcggaggcgatggcggngtctcgaggaggtgggccgtcctgctctgcgtcggcagcttctgcctcggcctgctcttcaccaacagaatgtggacgctgcctgaggcaagtgagattgctaggccgaatgcgaatgtggaggaaggcaccgtgccgattgccgcggagtgtggttctaaaaaggtccaagaaaagcaggattacagagatattntacaggttcaagatagccatcatgatgtacanacactggataagacgatagcaagcctagagacagagctc

SEQ ID NO: 99181 - DNA, 547 bp, Zea mays
  unsure (1)..(547): unsure at all n locations
gtagttgtgggtgtgactgcagccgattanacgactgccgtaccggtccggaattcccgggtcgacccacgcgtccgcccacgcgtccgcccacgcgtccggacaagtgaagtggtcgatttcttgagagggatattcaacatgtttgacattgataacgatggagctttactacctgctgagctggaggacctattctcaacagcacctgaaaacccatggtcttgcgatccatataaagactgtgctgaaaagaatgtgttgggtggtctgtcacttgaagggtttctctcaaagtgggctcttatgacactgctagacccgacaaatagttatgccaaccttgtatacgttggctatcctggcgagttcagttctgcatttactgtcacaaggaaaagacgtgtggatcggaaaagcaacagacacagagaaacattttccagtgttttgtttcggtgccagaggctctggaaagacatcggtgctacaatcaatcatcggaaggcaaccttttgatgccctgccatctaacagcgaacgcttn

SEQ ID NO: 99182 - DNA, 550 bp, Zea mays
  unsure (1)..(550): unsure at all n locations
gtttgagctggtgtgnnccgggttcanncgacgactgtcgcctcctcggttgaccggctggacggacgcgttcgttcgatctcgaccgtagctcaccggtaagttactctacgacgaagcatggcgtacgtcggcgggggcgccccggtcgcggtcctgcgcccgtcggcgtctctcaagtcgtcgtcgacgtcggcggcggccttccttggccactctagccgcctcggtcgcactgctaccgcgtcgccgactaggcgcagtctaaaggcggttgccaagggcgagtggctcccgggccttccctgccgcgcctaccgtgacggcagcctgccgggcgacaatggcttcgacccgttgggcctggctgatgacccggagaacctgaggtggttcgtgcatgccgagctggtgatcgggctgttggcgatgctggacgtggtcggaatgcttatccctgacgtggctgccaaggtcgtgctgatcaacgcgccgtagttgttctgcgccggcaaggcggggtactttggggtgtccctgcgctggttct

SEQ ID NO: 99183 - DNA, 550 bp, Zea mays
gtatgagatgttggcccacgtattatagtagcactccctgtaccggtccggaattcccgggtcgacccacgcgtccgcccacgcgtccgcccacgcgtccgcccacgcgtccgcacgcccacgcctcatcaagcgaggcaatggcgtcgcggctcctgccgttggtcgcggcgctgctcctcctcctcctcctgacggcggcgtcgtccgaggcgacgctgcacccggtggactacctggcgctgcaggcggtgcggcgggcgctgtcggacctgccgggctcccgcttcttcgcgtcgtgggacttcacgggcgacccctgctcgttcgcgggcgtgtcgtgcacggccgacggcgcccgcgtggagacgctggcgctgggggacccgcgcgcgggcgcgccgggcctcgggggcgcgttcccgtccgcgggcgtcggcaggcttgccgcgcttacgtcgctgtccctcgtgccggggcgcgtcacgggcggacttctcggcggcgtggccgtgcttccggcgcttcgctttcttgcgctcgccgggaa

SEQ ID NO: 99184 - DNA, 540 bp, Zea mays
  unsure (1)..(540): unsure at all n locations
cgtnctgggtnnnnccatgacncctgcnactcatcgtactgccgtaccggtccggaattcccgggtcgacccacgcgtccgcggacgcgtgggtgttcaacaacattgatacagacaggagcggcacgatcacggtcgagggactcaaggacgggctggcgaagctcgcgtccaagattagcgaagcggaggttcagaagcttatggaagcagttgacgtggacaagagtggcagcattgactacaccgagttcctcactgccatgatgaacaggcgtaaactggacaaggaggaggatttgttccttgcttgtcaacacttagacaaagactatagcgggtacataacaagagacgaactggaacaagccatggcggagtatggggtgggtgatgaagcaagcattaaggaagtgctggacgaagttgataaagacaaggatgggagaatcgactacgaagagtttgtagaaatgatgaggaagggaagttatacctgaggaaaccttggtctcatggtgggaaaggttgtgtatatat

SEQ ID NO: 99185 - DNA, 567 bp, Zea mays
  unsure (1)..(567): unsure at all n locations
ggatanntatagtattgttgagatctgtataactctttctccggaaagaagttccgcctggaattcccgggtcgacccacgcgtccgcacacacacaaccagatctcccccaaatccacccgtcggcacctccgcttcaagatgcagatctttgtgaaaaccctgaccggcaagactatcaccctcgaggtggagtcgtctgacaccattgacaacgttaaggccaagatccaggacaaggagggcattcccccagaccagcagcggctcatcttcgctggcaaacagcttgaggaccggcgcacgcttgctgactacaacattcagaaggagagcacccttcaccttgtgctccgnctcaagggaggcatgcagatctttgtgaaaaccctgaccggcaagactatcaacctcgaggtggagtcctctgacaccattgaccacgttcaggcccaagattcaggacaaggangggcatccntncagaccaacaacggctcatctttgctgggaagcanctttgaggacggccgcacgcttgccgactacaccaatcagaagggaagc

SEQ ID NO: 99186 - DNA, 556 bp, Zea mays
  unsure (1)..(556): unsure at all n locations
tgtttattggattgatggatttattatggtgagttctgcaggagtgctctaccggtccggaattcccgggtcgacccacgcgtccgtgatgcattgctgggctcttttttgtgctcaatgatggctataactggttttatttttccaatcatcatcaataaccacaaaatccttttaatcccaaaccaggtgggggtaggctgaattggaacccaaccggagccacaaaataaatggtatgcatgtggatggctggtttttcattggctctattaaagcctaatctttggacatattctatcctttcatgtcttcttttattatcttttcccatgttaactntggtctttctctgcctctcttcctattactatcacattttaggatcccattatgcactggtgcctctggaggtctccattgacatgtncaaaccatctcaatctgtgttggacaaacttctttttttaatcatgtataagttaaagaaatatgctatgacaaacagacaaatgcactggcatactaatattcatgggttagatgtttgacctgg

SEQ ID NO: 99187 - DNA, 570 bp, Zea mays
  unsure (1)..(570): unsure at all n locations
aggatttataatttgtagtaagaagaggtnttgccctcgatctgntgatgtagtcgctttacccctcnttggaaaacccgggccgacccacgcgtccggtacacggtggcggtgcggcggatggcgttcgcggtgctggagctgatggcggaggggctgggcatcgccggcggcgccggggacgcggtgctggcgcggctggtggcgcgcgcggacagcgactgcatgctgcgggtgaaccactacccgccgcggccggcgctcaaccccagcctcacggggttcggcgagcacaccgacccgcagatcatctcggtgctccgcgccaacggcacctccggcctggagatcgcgctgcgggacggcgcctgggcctccgtcccgcccgacggggacgccttcttcgtcaacgtcagcgacaccctgcaggtgttgacaaacgggaggttcatgagcgtgaggcacagggtggtggggaacagcgagaagttccaggtgttcatggtcttcttcggcaggccgactcccgactagaggcttggcccgttttcggaggtcctgggcgacaga

SEQ ID NO: 99188 - DNA, 547 bp, Zea mays
  unsure (1)..(547): unsure at all n locations
tttatggattaatctgttgggaggacgaaataagtcatgctcccggtttggaattcccggctcgacccacgcgtccgagtacttctagctctggagtatctacacatgttgggagtggtctatagagatctgaagcctgaaaatgttcttgtgcgcgatgatgggcacataatgctttcagactttgacctctcgctgagatgtgcagtctcacctacactcatcagaacatcagctttcgattctgatcccagaagagcaggtggttctttctgtgtacagcctgcttgcatagaacctacttcagcttgtatccagcctgcgtgctttctccccaaattcttcggacagaagagcaagaagaagactcgaaaggcaaggtctgagttgggacataacgccggcacccttgccgagcttgttgccgagccaacatcagctcggtcgatgtcatttgtcgggggnannnnnnnnggngnnnnnnnngngnnngnggggggggggngggggggggggggnggggggggggggggggggggggnggggt

SEQ ID NO: 99189 - DNA, 537 bp, Zea mays
  unsure (1)..(537): unsure at all n locations
ggttttagatgttgtatattgttcgggaaaagaaaaatgatctaccggtctcggaattcccgggtcgacccacgcgtccgcccacgcgtccgcccacgcgtccgattgctttgatatggaatgtatatcgtctgataaggatgttgaaggcaaacaaaaggtgaatcatgtgactgtttttgagcgccctggtttgcatgagttcttgcggaaaactagtgaatttgcagatcttatcctttttacagcaggtttagaaggttatgctagacctttagttgaccgaatagatcttcacaatagattcagacttcgtctctatcgcccatcaactgttaccacggaatatagagaacatgtgaaagatcttactcgcgtgtcaaaagattttggcaggattgtcattgtcgacaacaatccgttcagtttcattcttcagcctttgaatggaataccttgtgttccattttcagctggacaacattctgatgatcagctcatgacggntatatntncactcctgaagcattctttcct

SEQ ID NO: 99190 - DNA, 543 bp, Zea mays
  unsure (1)..(543): unsure at all n locations
tgtnnnttagatgnttntttgtgattgggggggatatgataatgcttccaccggtctggaattcccgggtcgacccacgcgtccgcccacgcgtccgcttctcctaaatttctcatcttaataccgagcatgcaaaatcctgagcatttgtgagcactgaacatggcttattgctccagttacttgtacatcgtctaaagtttacgttatcttctttcacagatggacggcaaaacaataaaggctcagatctgggacacagctgggcaggaaaggtaccgtgcaattacaagtgcttactaccgtggagccgtgggagcactgcttgtgtacgacatcacaaagaggcagagcttcgacaatgttcacaggtggcttcgtgaactccgcgaccatgctgactccagtattgtgatcatgatggtcggtaacaaatctgacctaatccacctgagagctatctctgaggatgaaggcaaagcgttggctgagaaaggaggggttgtctttctcgagacatcaactatggaggctattaacgtg

SEQ ID NO: 99191 - DNA, 554 bp, Zea mays
  unsure (1)..(554): unsure at all n locations
ggtaggagtgtgtngccaagctantacatgagtactcgctccggtctcggaattcccgggtcgacccacgcgtccggacagcggctacaacagcaagtccggcactgatgactacggccgtggcgaaggtggctacaacaagtcgggcggcgatgacgactacggccgcagcggcggcgatgggtacggcaggtccggcggcgacgactacggccgtggcaccggcggcggtggctacaacaagtccggcggcggagacgactacggccgcagcggcggcgacgactacggccgtggcaccggcggcggcgggtacaacaagttcggagacgacggctacgacagcgggtacaacagatcgggcaccaccaacgacgacgaatacggtcgtggcaccgggggctggtaccgcagcaagccccttggggacgacgcgtaagccggcggcngctgtggctggttccggaagcaatccggtggaggcccggacaacgacggagagtacgggttcttcaggacgactcggagaagttcaggaaggaggaggagggacc

SEQ ID NO: 99192 - DNA, 565 bp, Zea mays
  unsure (1)..(565): unsure at all n locations
agtggttgattagaatgaatgtagtgtntnaacgctaggccgtcatacgactgccgtaccggtccggaattcccgggtcgacccacgcgtccgtccacgcgttcgcccacgcgtccgcccacgcgtccgcccacgcgtccgcaatgtttgatgactttgtttttgacgctggtgaagatgttcgagaggagcaagatggtgacaatcgccacggggctggacctactcagctactcgatctgcatcttcttgtcgtcggcctctctctacatcctgcataacctncacaagggcgacgaccatgaggagtgatgagagtgtgcaatataatgccgaatctgtaactctatgacagaagagataatgtgtaggcttgggttcagctgccatgtaccttactggacccacgtttcaatgagcatgggtgtcacctgacctgacatgccctttaaagcctggtcctgaacttagaccaccatgtgctttactatatggtctgtatagtatgggttatatttcgtagcgattgaagatgacttcaattttctttcccctcttgttttaa

SEQ ID NO: 99193 - DNA, 547 bp, Zea mays
  unsure (1)..(547): unsure at all n locations
gtgtgtagtgatcctcagcccatcgcgtacgactgtccggtccggaattcccgggtcgacccacgcgtccggtgggttggcttctccttcccctccggttcgggttcgggttcgtgaggttctccggggtgcggtttcgtgggtgagcggatcgagatggcggcgtcggatgttgagtaccgctgcttcgtcggcggcctcgcctgggccacggacgaccactccctccacaacgccttcagcacctacggcgaggtcctcgagtccaagatcatcctcgatcgggagacgcagaggtcccgcggcttcggcttcgtcaccttcttcacggaggaggcgatgcggaacgccatcgagggcatgaacggcaaggagctggactgccgcaacatcaccgtcaacgaggcccagtcccggggaggccgtggaggcggccgcggctgctggtacagttgtggcccgtgaagccgcggctaccgcggttgacgggcccgtgattgctgcagctggttacggcgggtgccgccgctaccgtgggtgcngccgt

SEQ ID NO: 99194 - DNA, 548 bp, Zea mays
aggatggtggggataacgtcagtcgactaacgaccgacgtaccggtccggaattcccgggtcgacccacgcgtccgtccacgcgtccgcccacgcgtccggacgaccacaggatggccatggccttctcccttgcgggctgtgccgaggtccccgtcaccatccgggaccctgggtgcacccggaagacctttcccgactacttcgatgtgctgagcactttcgtcaagaattaataaagcgtgcgatactaccacgcagcttgattgaagtgataggcttgcgctgaggaaatacatttcttttgttctggttttctctttcacgggattaaattttgagtctgtaacgttagttgcttgtagcaagtttctatttcggatcttaagtttgtgcactgtgagccaaatttcatttcaagagtggttcggtgggataatcagaataataaattacgtttcagaatacaaaaggggagttttgatggggttgctggaatgactgatggccttggattttagaaaaaccttgagtaattgggacatggca

SEQ ID NO: 99195 - DNA, 535 bp, Zea mays
  unsure (1)..(535): unsure at all n locations
aggaatgcgtggnntctctaggcctgggacctgnattgatcntgcccatcggggacgacggacgcgtcacgcgaccccctgtacttctctctagttagtgtacagtttaaactctaggccgccgcctcgcgctctggtcgccttgccccggcgcagagatggcgctgccgaatcagcaggttgtggattaccccagcttcaagctcgtcatcgttggcgacggtggaactggtaaaaccacatttgtgaagaggcatcttactggcgagtttgagaagaaatatgagcccaccattggtgttgaagttcaccctctggattttaacactaactgtggcaaaatttcgcttctattgctgggacactgctgggcaagaaaagttctttggccctagggatcgctactacatgcatggtcagtgtgccctcattatggtttgatgtcactttgaggctgacatacaagaatgttccaacattggacagggacctttgcatggtgtcctagaacatccccatcgttctttttcggaac

SEQ ID NO: 99196 - DNA, 531 bp, Zea mays
gagggctccatgattacagcatatactgattgctcgcccggtccggaattcccgggtcgacccacgcgtccgggcacatctatgcttcagctgatgctgcagtgccatctagcgatgagatgcagaataactatcaagaatatgtgaagctgaaagcacgagttgaggttttacaacactcgcaaaggaatcttcttggtgaagaactggctccacttagcccaagtgaacttgaccagcttgagagtcaagtagacaagaccttgaagcaaataagatcaagaaagactcaggtgttacttgatgaactttgcgacttaaagagaaaggaacaaatgctgcaagacgctaacagggttctgaaaaggaagctgcacgagtttgaggcagaggctgcttctcccccacaattggcgtggcaaggcggaggcggcatgttgtcccatgacccttcacagccagaacacttcttcgtggctctggagagcaacgcgcctctgcaacctacataccatactatggacatgaacc

SEQ ID NO: 99197 - DNA, 551 bp, Zea mays
  unsure (1)..(551): unsure at all n locations
acgatggtgggnantgactcagctcatcatcgaaacgccgtaccggtccggaattcccgggtcgacccacgcgtccgctgaactctatttctactgaagcagagcctgtgttgtatgtgtgttgggagaatgtgatatgtgatgtcaagctcaaacttcttctcatcctttcatgtctttaatatatatatatatatattttttaaaaaaaaaaaaaaaaagggcggccgctctagaggatccaagcttacgtacgcgtgcatgcgacgtcatagctcttctatagtgtcacctaaattcaattcactggccgtcgttttacaacgtcgtgactgggaaaaccctggcgttacccaacttaatcgccttgcagcacatccccctttcgccagctggcgtaataacgaaaaggcccgcaccgatcgccctttccaacagttgcgcagcctgaatggcgaatgggacgcgccctgtagcggcgcattaagcgcggccggtgtggttgttacgcgcaacgtgaccgntacactttgccagcgccctaccgcccc

SEQ ID NO: 99198 - DNA, 546 bp, Zea mays
  unsure (1)..(546): unsure at all n locations
tagggctggnnnnnnatgaactaaagcccttgacancccctcnngntcgaattcccgggtcgacccacgcgtccgcattcccttacccctggctcacctccacactctccctcgcctgcggctctgctatgatgcttttctcatgggccaccggtcttgttgaggcccctaagaccgacctggacttctggaaagttcttttcccggttgctgtggcgcatacaattggccatgttgctgctacagtgagcatgtctaaggtggcagtgtcattcacacacataattaaaagcgcagaacctgcattcagtgttttggtgtcaaggttcttccttggggagacgtttccaattccagtatatctttctcttcttccaatcattggtggttgtgctctagctgctgtcacagagctgaacctttatatggttggatttatgggtgccatgatatccaaccttgcatttgtttccgcaacatcttctcaaagagggcatgaagggaagtccgtcagtggcatgaatactacgcttgcttgcattatgt

SEQ ID NO: 99199 - DNA, 541 bp, Zea mays
  unsure (1)..(541): unsure at all n locations
agggagggtggttctcagctacgttgtcattgcatgtccntccggcatgaatccccgggtcgccgacgcgttcggctctctccgtcgaagaatcggcttcggctgccgcggcggcgagcgccttccctgggcaaggtccacccggcggcagagcagagcctcgttgctgaggaggggagatggcaggcatgaccgatatgccgatgaggcccgcgcggacgggcccgccgatgcagcaccggggccctccgccgatggcgcgccttcgtcccgaaccaatcgaccgcgagaagacctgccctctgctgctcagggttctcacaagggttgctggtcaccaccaaaatgaagagttctctgtgagaaggaaagaacccaaggaagaaagttcagaattacacatggaaggatgccacttttccggagcttactggacctgtgaaagaaggtgcttttttcagcaaggaataaggaccccgaggcttttcttttgcatttgggatacccagaccagaaattgtcggtttggttgtcagacagg

SEQ ID NO: 99200 - DNA, 538 bp, Zea mays
  unsure (1)..(538): unsure at all n locations
tggaattttnttttgtaaagaatgtacactattcttcgcgtctggaattaccgggtcgacccacgcgtccgcccacgcgtccgcggacgcgtgggattgtgaatcccaagggtgagatgaaaggttccgctatcactggacctatcggcaaggagtgtgctgatctttggcctaggattgctagcgcagcaaacgccatcgtttgagagcttgttggaatatgttcagacttctatatgatcatcttattatcagttgctaagagtgctattgggcttaatgggccctttatgtttgttcactcaattttgtagtaaacagaatttggtataccaaggggatctatatatcaatgtatgccataaattgtctgactaccatttctcatgaaatgcttatattgtttaaaaaaaaaaaaannnnnnnaaanancnnttaaaaaaaaaaaaagggcggccgctctagaggatccaagcttacgtacgcgtgcatgcgacgtcatagctcttctataaggtcacctaaaatcaattcactg

SEQ ID NO: 99201 - DNA, 537 bp, Zea mays
  unsure (1)..(537): unsure at all n locations
nggaattttnncatggaatgaacggaggagtaagtatcttccctggagttagaatacccggctcgacccacgcgtccgcagacgaggagccaacccgttcgcctgtgatagcggcaggagagtatacccgacgatgacttgataaacccaactgctctccctggtttttcgtcgtcttcagctactaaggagttcagcgaagatcttccaaaggctccatgggaggaagtacaggctgccgcagcaggttccctgccaccgcctccggagaggtatggtcagagacagcagtacttcgagcaaaacgtgtattctggtgggagcaacggaggtggatatgatgaactgttgacactgactgaaaacctctccctgaaccctgagaagaatgcttcatggccgacagcatcccgccaggctaaacccgaggactcactcttcaagggacctgtcgacttcgcgaagaccaagcctttctctgcgtcgaaatcgcccacagccgcaggacctactaaacggctcgcgtggtacatgtac

SEQ ID NO: 99202 - DNA, 536 bp, Zea mays
  unsure (1)..(536): unsure at all n locations
ngtagatctgtattagattatctcttctcaagaaaagtttattatcggttcggaattcccgggtcgacccacgcgtccgggcggctgcggcggagcacggaggcgaaggaggaggagcagcagcagcaggcggcgccgaggagcggcatcccactcagtgcttgcaaccatggctaggggattgaagaagcacttgaagaggctcaatgcgcccaagcattggatgctcgacaagcttggcggagcttttgctcccaagccatcttctggacctcacaagtccagggagtgccttcctctgatcctcatcatcaggaacaggctcaagtatgctctgaactaccgtgaggtcatttctatcctgatgcaacgccatgtacttgttgatggcaaggtcaggactgacaagacctaccctgctgggttcatggatgtcatttccatccctaagacaatggagaactacaggctgctttatgacaccaaggggccgttncgtcttcacccaatcagggatgaagatgccaagttcaagc

SEQ ID NO: 99203 - DNA, 501 bp, Zea mays
  unsure (1)..(501): unsure at all n locations
gatgtgttatagttttctcttacaaaagtaattatcggtttggaattcccgggtcgacccacgcgtccggttgacttgcaagattatgattactctctggacatgtggagtctgggctgcatgtttgctggaatgatttttcgtaaggagccatttttttacggtcatgacaaccatgatcaacttgttaagatagccaaggtacttggaacagatgggctgaatgtctatttgaacaagtacagaattgagcttgaccctcagctcgaagccctttgtngaaggcatagcanngaaacctggacannagttataaatgcagacaaccaacacctagtgtctcatgaggccatagattttctcgacaagcttttgcgttatgatcatcangacaggcttactgcacgtgaagctatgacacacncatactttcaacaagtgagggctgcagagaacagcangacgcgggcatgagaagccaaagaccaaggagcaaagact

SEQ ID NO: 99204 - DNA, 538 bp, Zea mays
agtagagcgctgcacgactgagcatacctcctgggatgtcgctggtctggaattcccgggtcgacccacgcgtccgagccaccgatcggcgtgccgcgtgcgtgaggcgatcggagcatcccgtcccgaggagggagacaaccggcgacgcggggggaacatggggaagacgccggtgcggatgaaggcggtcgtgtacgcgctgtcgcccttccagcagaaggtaatgccggggctgtggaaggacatcaccaccaagatccaccacaaggtcaccgagaactggatctgcgccacgctcctgctcacccccgtcgtcggcacctaccaatacgccatgtggtacaaggagcaggagaagctttcccacagatattaaatgcgctgcccttgacagacagcactcggagttttcatgatgggtttcataatcctcccatgatgatttaacatttgtttgatcaatttcagttcaacgccttttcatcgttccatatgcatatatggtatacgtgtctggcaaacttattttgaggct

SEQ ID NO: 99205 - DNA, 528 bp, Zea mays
  unsure (1)..(528): unsure at all n locations
ngagatgactgtatgttgggagagggaaaggtatcactcgtccggaattcccgggtcgacccacgcgtccgcccacgcgtccgcggacgcgtgggtggcgtcggaggtggaggacgaggcggcgacgccgctgctcgccaacggtgcagccgacgtccgccggaggagggaccaggcgaaggcaattctgtccacgcaggccgtcaggatcgccaccaaggccgagcagcatgagcgcttcatctttaaggtcacacacttgctgggtgttcttggatttgggggattttgctatctcttgggtgccagaccacaggatgtgccatatgtgtactgcctgttctatgtcatatttgttccgctccgctggatttactaccgctacaagaaatggcattactaccttctggacttctgctactatgccaacacctttctncttgtaatgattctcttctacccagaggatgaaaaaacttttatgggttggcttctcgtttgcagaaggtccgcttgcttgngcattaa

SEQ ID NO: 99206 - DNA, 529 bp, Zea mays
  unsure (1)..(529): unsure at all n locations
agagatgttgctaagagggagatgtattgcactgctctaccggtccggaattcccgggtcgacccacgcgtccgcccacgcgtccggccagctgcagggcacctagcgcgtggtcggcgagcgcgcgggcgggcggcagggggcgccgcggcggcgagcgcgcaggcccccactcacagacgactgggccggccttcactgctacttcggccccttcgtcgccgacgagaaccaccgcgtgctggttggaatggcaagtacagcatgctttgtgattgtcagtaagaatgacatcccaatctatgaggcagaagttggatctgcacccaaaaaagaagatttgtcttatcaccatcagtttattctgcatgctgcattagatgttggtcaggatctagcatggacaacaaatgcaatgttcctgaagtcagttgatagattcaatgaccttgtggtgtctgtttatgtaactgctggtcatacccagatcatgctgcttcatgactcgcgtancgaggatggaatanaa

SEQ ID NO: 99207 - DNA, 535 bp, Zea mays
agggtaagagtactggaatgaggagtatgtgggtagtattcgatggtctggaattcccgggtcgacccacgcgtccggaggttgtcctaaaaagatgctggcttgcacgctattggggcttagcagttcaaaatggtgtgtatcccgaaattgcggtatcaaagcatgaacattggtcatcattggctcctcttcctcttgaggttgttctttccgccggtcaaaaagctaaggaggaacctcgaaaacaaggtgacaatgttcaagggagaaataaacttgcacgagaaatgagtgatgtaatgggagaaggcaatatagagagcatgctttcagttgaaatgggccttagagagctttcttcattgaaggtggaagatgctgttgtagttgcagttggccaacatcgcagacctagcatagttcgtcagttcacatcagatttcaaatcacctggtgaacctaaatacttggagggcattgatcttagcccaaaagaagctgaagatgttagctttaagcaggcatggcttat

SEQ ID NO: 99208 - DNA, 521 bp, Zea mays
  unsure (1)..(521): unsure at all n locations
gtgctgcatgtgggtagagggggagtagacttggtccggaattcccgggtcgacccacgcgtccgtctccattcgcgaaaggctcgcagcanaaccacgccatcgatcgccgtcaccagtccagcgtcctccgatcgactacgtactcccacccactccggcagcagcgaggcctctctgtctgtgcgcggcgtggctgtcgtcgatctctgcctggcgggcggccggcatggggaggtccccgtgctgcgagcaggcgcacaccaacaagggcgcgtggaccaaggaggaggaccagcgcctcgtcgcctacatcaaggcccacggcgagggctgctggagatcgctaccaaaagccgcaggtctgctgcgctgcgggaagagctgncggctgcggtggatcaactaactgtgcccggagcttaagcgcgcggaatctacacgggggaggaggatgactctatcatcaagttccacgagctcttcggcaacaagtggccgctcatcgccgggaggctgcc

SEQ ID NO: 99209 - DNA, 512 bp, Zea mays
  unsure (1)..(512): unsure at all n locations
atgagatgttttctttttctaggaaggagtaggtatcggtccggaattcccgggtcgacccacgcgtccgccctgctccattctcagccgccgccaatcccttcccgtgctccgcaaccgctgagtgagaagaagagatggccggcaagggcgatggcccggctatcggcatcgatctcggcacgacgtactcttgcgtcggcgtgtggcagcacgaccgcgtcgagatcattgccaacgaccagggtaaccgcaccacgccctcgtacgtcgccttcaccgactccgagcgcctcatcggagatgcggccaagaaccaggtcggcatgaaccccatcaacaccgtctttgatgccaagcgtctcatcggcaggaagttcaatgatgcgtcttgccaaagggatatcaagctgtggcccttcaaagtcatttctgggccttgtgaagagcccaatgattgtgtccagcacaagggtgaggaagngcaagttgcagctgaagagatcttctct

SEQ ID NO: 99210 - DNA, 510 bp, Zea mays
  unsure (1)..(510): unsure at all n locations
tgagtnaaaagggagagagggtgggagtgctgctaccggtccggaattcccgggtcgacccacgcgtccgccagggtccacttcgctcgcaaccttccccagccatggcgaccgcgacgcggaggctgctccccgcgctcctcaagaccctagctccagccggcgcgcgcggcctctccaccgagaaggctgttggtgcagccgccgtcgtcggcagccacaccgctaagtggatgcaggacacgagcaagaagtcgccaatggaactgatcaacgaggtaccttcgatcaaggttgatggtcgcattgccgtctgtgaaggggcttctgaaaggtgtggacttggccacccaattgagtacatctgccttgatctggaggcacctaatgtgtgcaagtacttgggtcttcgntatgttcaagttcaccatcacttaaattggaaagatactgtcgtctaccgcttgagaaactgagtttgaggagttatgtgcacacaacatttgttca

SEQ ID NO: 99211 - DNA, 520 bp, Zea mays
tgagatggtgctttgtttggggggggtatgggaacgctgtaccggtccggaattcccgggtcgacccacgcgtccgggcaactggatcttcgtcggaatcatagccgcgacggtagcgttccaggtggtgatcgtcgagttcctcggcacctttgcgagcaccgtcccactcggctggcagctgtggctggtgagcgtcggcctcggatccgtcagcttgctcgtcggcgccgtcctcaagtgcgttccagttgaaccggacgatggagttcgcgccagtccaaatggctacgcgccgctgcccggcggccctgacaacatataacagctgaacctgagcggccgagaaggtactgacgacgtgctgatttttttcgcgttaggggtcataacagtatatattatgtaaagagatagtgtgacgacacagggcacctttattatggggggtacttctaagaggggataagaccctcaatttacgcttcaaacttttaagatcgaaataggatccgacttc

SEQ ID NO: 99212 - DNA, 536 bp, Zea mays
  unsure (1)..(536): unsure at all n locations
cgantccacgttgtgtccatcgcatctatgagggaatgtatggcacggtccggaattcccgggtcgacccacgcgtccgatcgagtggagtttttgaggtggaaccaaagagctgcccagggttcatatacagatgtacggttttcataggccacacaactctgaatcccttggaatttcgagaattcattcagaggatggcctcagaataccatggagatacctaccacctcatttccaagaactgtaaccactttacagatgatcttagcaccagattaacaggaaaatcaattcctggttgggtcaatcgacttgcaaggctaggcgccttttgcaactgccttctaccagaaggcttgcggcttgagtcaactgaaacaaagcatcttggagactgtcgtttctcagatggttccaataccaccagcaacgataactctgacgaagatgaattggaagaaaaacacctgcttccgactacttcttgtggtgaagacacaatttgtataagaaattcacagatgaatttctgc

SEQ ID NO: 99213 - DNA, 529 bp, Zea mays
  unsure (1)..(529): unsure at all n locations
agancccgttgtgaatgtggtgaatggggggagtattgcccggtccggaattcccgggtcgacccacgcgtccggggtgcttcccgatctacctgacgctgtaccagacctccagcgccggcgactacgaccagggcggctgtctgaagcgcttcaacgcgctgtcggcgcagcacaactcgctgctgcaggccaaggtgtcgagcctgcagagcaagtaccccggcgcgcgggtcatgtacgccgacttctacagccacgtgtaccgacatggtgaagagccccggcagctacgggttcagcaccaacctcagggcctgctgcggcgccggcggcggcaagtacaactaccagaacggcgcgcggtgcggcatgcccggcgcgtacgcgtgctccgacccggcgtcgtcgctcagctgggacggcattcacctgaccgaggcggcgtacaggaagatcgccgacagctgtgtcagcggggcctactggcacccggncatctcggcctagaggctagcactgagagtcg

SEQ ID NO: 99214 - DNA, 514 bp, Zea mays
agatgtcgtaagttggaatgaaggacgagtatctactcggtccggaattcccgggtcgacccacgcgtccgcggacgcgtgggtcgggccggatgacacgccgtgggatggaggcacgttcaagctgactctgcagtttacagaagattaccccaacagacctgcaactgttcggtttgtttcgaggatgtttcatccaaacatctatgcggatggaagcatctgtttggacatcctacaaaaccagtggagccctatatatgatgttgcggcaatattgaccctctattcagtccctgctgtgtgacccagacccaaattctcctgctaactcttgagcagccaaattggtcacggagacaaacgtgaggtccaacggcaaagtcgtgagggtggggaacaaaacttgacaagcggcttaaactttattcggttcgccaggcgggtgtaaataaggcatctggcttttctacttggccggtcttgtttacccgtagaaattctcagctatcgt

SEQ ID NO: 99215 - DNA, 523 bp, Zea mays
  unsure (1)..(523): unsure at all n locations
agatatggtggccctaccgaatanagtcagtatcgctctaccggtccggaattcccgggtcgacccacgcgtccgggagaggtgggggatggcgaagccgacgccggtggcctcggcagaggaggcggcggcgatgcggcgccggctgaggcgcctggtggccgcggtggcggccgggagcgccgacgccgaggccttcgacgaggctgcagaggcgctcgccaagctcagggacgccgagcttggcccccgcaaggacaggaccggcgacggccgggagaacaagcgcagcacggaggccgccgtgccggagcacttcctttgccccatctcctcagagatcatgagggatcccgtcgtcctcgccttcggccagacgtatgatcgtcgtttcattcaagaatggttaagcgctggaaaccggacatgcncacagactcaacaagtcctttcgaaacacattatcaccccgaaccaccttgtgagaagcatgatctcacagtggtgcacagacaacgggatc

SEQ ID NO: 99216 - DNA, 509 bp, Zea mays
gatgtgatgtgggggtggatatgatcaccggtccggaattcccgggtcgacccacgcgtccggattttctttatctgaaattgaaaatgctactgacaaatttgagagaagaattgggtctggaggctttggcatagtatactatggaaagttggctgatgggagagagattgcagtcaaacttctcacgaatgactcgtatcagggaatcagagaattcttgaatgaggtgacattgctttccagaatacatcatagacacctggttacattccttggttacagtcagcaagatggcaaaaaacatactagtgtatgagttcatgcataatgggacactaaaagagcaccttcgtggagctgataatgaaaaagataactagctggcttgaaccgtttgagaatggcgaagattctgcgaaaggtatagagtatcttcacaccggatgcttcccaacaatcattcatagagacctgaagagcagtaacattcttctagacaagaacat

SEQ ID NO: 99217 - DNA, 511 bp, Zea mays
gaggggtatgagggggagggagagaattacttcggtccggaattcccgggtcgacccacgcgtccgctaggaggagctttgggtgccaaagctgcagaagatttgaagctgagaataattgaacataatatcttggttgtgtctaagtactattcgagggttaccataaagaggcttgctgatctgctctgcctgagtttgcaggaggcagagaagcatctttcagacatggtgaactcaaaatctctgactgcgaagatcgacaggccgatgggagttgtgagcttccgagtagttcaggactgcaacggcacacttaactcgtgggctacaaacctcgagcaagttcttgaacctggccaaaaaaagttgtaacaaaatccccaggggaccattattcacaagggcggattggaagcttgactgaatggcccttgctggttttgcttcctaaggtagatactggaccaatagaaggaccgggatactatttggtgctgaactcttggtg

SEQ ID NO: 99218 - DNA, 532 bp, Zea mays
tgggtttcgatggtgaactcggggatgtggggaatcatgcaccggtccggaattcccgggtcgacccacgcgtccgcggacgcgtgggctgaaacagcccgtcacctaccattcgacccgccgcgacgctccctgcgcggaacagcctgcgttgctcgcccacacgacgccacgcatgcaggaggagccagggcgtcgtcccgtgccgccgttcgcgggcgtggacctccgccgccccaagggctacccccgtggcggttgccaaggaggagaggccggcgccgggcggcgacccgtgcccgcggtgcgggtcgcgggacaccaagttctgctactacaacaactacaacacgtcgcagccgcgccacttgtgcaagtcgtgccgccgctactggaccaagggcgggtccctccgcaacgtccccgtcgggggcggcacccgcaagagcagcagcagctcctcatcatcctcggcggcggcggcggcgacgacgacgacgacgtaaacctcggccggcgccgcgcccaaggc

SEQ ID NO: 99219 - DNA, 537 bp, Zea mays
  unsure (1)..(537): unsure at all n locations
agggttatgagtagtgaaatgaagtaggggagaagttcgcaccggccggaattcccgggtcgacccacgcgtccgggagcaaccgcttgcgtcacacgcacactgtcgggaaaatgatcaactgatatctggtcatgggaaaccgtgactggaggaagttgcttccggtcgtcaccgtctgcgangagcacggcgccggatgcggcgaaggaagtggcggagaagccggaggaggggaagaagcccgacgaggagggtggcgaggggaagaaggccggccccgccgccgagaaggagaagaaggcgaggaagccgcggagcaagaagcccaagtccgacgggccgcaccacccgacctacttcgagatgatcaaggaggcgatcctgtcgcacgactgcgggaaggtcggngcgagcccgtacgcgatcgccaagcacatggcggagaagcaccgggacgtgctcccagccaattaccgcaaggtgcttgcaatgcagctgcgcggcttcgccgncaacggccgncttgtcaaggtc

SEQ ID NO: 99220 - DNA, 517 bp, Zea mays
tggaaatggctgtatgttcgcggaggaagaagcatttacccggtccggaattcccgggtcgacccacgcgtccgtggcgcttttacactacctatgctagtttgcctgatgctacatttccacgatggttaagctgactatgatagcgcgtgtcactgatggccttccattgtcggagggattagatgatagtcgggatctgaaagatgctgacttctacaagcagcaagcaaaactgttgttcaagaacttgtccagagggcagcatgaggcgtcaaggatgtcaattgagacaggaccataccttttccagtatcctaagacctttttctcatttgcaaaattctttgttccacaattaatcatttagaaatatatgtgattcttcatcatgatcctaaattagagtttttgtgaactggcaagtttaggcagcctaaccatataccgtaaacttgaccagtattgtgtatatattggattcaatattaagtagttcaagttcctttgacaagcc

SEQ ID NO: 99221 - DNA, 516 bp, Zea mays
  unsure (1)..(516): unsure at all n locations
gagagttnttaggtgggggggggtgggatcactcgtccggaattcccgggtcgacccacgcgtccgcccacgcgtccgcccacgcgtccgggcagggcaaaaggcccgatcccccctccccgccggttgccgcgctcgtgccacggtgcgctagccccgtcgacgccggcggacagcgtgcactatgggttgctcctcctccgtgccagctagaaatactggagggctgaacactatcagcaacgatagctctccagacgccagttcaaaggacttgcgtgctaagttggtattgctgggagactcaggtgttgggaaaagttgcattggtcttcgttttgttcgtggtcagtttgatcctacttncaaagtaactggtggcgcatcctttttatcacaaacattggcattggaggattcaacaatagtgaaagttgaaatttgggatactgctgggcaagaaaagtatgctgccttggcgccactttactacagaggagctgctgctgcaattgt

SEQ ID NO: 99222 - DNA, 519 bp, Zea mays
tgagatgtgttagcagggggatagtattggatcgctctaccggtccggaattcccgggtcgacccacgcgtccgcccacgcgtccgcaaccttgctttctaccaagaactttgcagggttcacaatgctgctcttactgcacaaccagctttggtgcaggatgagaggaagctgcttgagaaaatcaatattctttgtctgatggagataatctttagtcggccatctgaagatagaactattccattaagtgttattgctgagcagactaagctttcaatcagtgatgtggagtatctccttatgaagagcctctcggttcatcttattgagggaataattgatgaagtggacagtacagttcatgtttcgtgggtccagcccagagtgcttggaatcccacaagttaaagctttgcgcgaccgcctggatgcctgggttggaaaggtgcatactacattggtttcaattgaggcagaaacacctgatctttgtgctgcctaatttagcacctgttac

SEQ ID NO: 99223 - DNA, 530 bp, Zea mays
aggggttatggtggtgactgagtgatgggggagatgatgcaccggtccggaattcccgggtcgacccacgcgtccgggttctcccagcagaattgttaacgttaattcaatcatgcacagtgtaggttttgttgatgctgaagatttgaacttgagaaaacataaatatagaagttggttggcgtattcaaatagcaagttggcacaggtaaaatttagtagcatgcttcataagagaattcctgcagaagctggcatcagcataatttgtgcttctcctggaattgtcgacacgaatgttacaagagaccttcctaagattgttgtagctgcataccattttcttccctacttcatattcgatggtcaagaaggttctaggagtgcactgtttgcagcatgtgacccccaagttccagagtactgtgagatgctcaagtcggaagactggccagtctgtgcttgcattaactacgactgtaatccgatgaacgcgtctgaagaagcgcacagccttgaaacctcgcagg

SEQ ID NO: 99224 - DNA, 525 bp, Zea mays
  unsure (1)..(525): unsure at all n locations
aggggtatagtggtgaattgttatatggggaatgtactcaccggtccggaattcccgggtcgacccacgcgtccgcggacgcgtgggaagcaaactataagtttgttgtattggatactgggaattaccagattgattcaatggatcctgataagatgcttcagtgggaagatattatctgtgtaagatactatagcccttctgaggtacaatgccctatttgcttggaaagaccattgtgcccacagatcacatcatgcggacccatatattgctttccatgcattttacgttatctaatgatgggcaaagatgattatagaggtgagtgttggaagaagtgtcctctgtgtttcatgatgatatcatcaaaggatttgtatacaatacanattactcaagtccagaatgtccgtgctggtaacgttgtcacatttacacctctgagcaggtcaagaaatcgctcactctttcataaaaacttcttcagggaaggtctacacagatgaagaacttattattgtt

SEQ ID NO: 99225 - DNA, 528 bp, Zea mays
  unsure (1)..(528): unsure at all n locations
agannttaggtgctgaatgtgggagagggagagagtatcaccggtccggaattcccgggtcgacccacgcgtccgattccgtctcattctcatccctgacccccgtaccgcaccgtaaaccctaatccccggcggcgacccttggggcctccgttgtgctctacctgtgccccgcttagacgaggagctgcggcggccaagaccaatcgaccatggctacccggatccagtttgagaacaactgtgaaattggtgttatctccaagctgacaaatgcttactgtctggtagcgattggagggtcagagaacttctacagtgcctttgaggctgagcttgcagatgccatccctgtggtcaagacctctattggtggcactagaatcataggccgactttgtgttggaaacaagaatggacttctattgccacatactacaaccgaccaagagcttcagcatctgaggaattgcttgcctgatcaagtggtggttcagcgcattgatgaaaggttatctgcccttggca

SEQ ID NO: 99226 - DNA, 522 bp, Zea mays
  unsure (1)..(522): unsure at all n locations
ngagatgttgccatgaggagaggagatagtattactcgtccggaattcccgggtcgacccacgcgtccgcgcaagggaccattcttttatgggggagattttaacaccggtcaccatgtggagaaaagggacgggggacaaaaagggtgggaggctaattggaacaagtatcacattgagctggaccctcaacttgaagctcttgttggaaggcatagtagaaaaccctggtcaaagttcatgaatgctgataaccaacatctagtatcacctgaggccatagattttctcgataagctcctgcgctatgatcaccaagataggctcactgcacgtgaagctatggcacattcctacttgctccaagtcagagctgtggagaaacagtagtcgagaccacaataatcgctgtctacaacctcgaaatgaaagtggtgctaatttctggaacatcattagctaaaaaccgtcaataaacatctcggtccaagaatctgggccaagacatccgggcaaggaaaa

SEQ ID NO: 99227 - DNA, 524 bp, Zea mays
  unsure (1)..(524): unsure at all n locations
gaaattttnttagtatggtatggtaaggatatgctcgtccggaattcccgggtcgacccacgcgtccgcgcaaggaaccattcttttatggccatgacaaccatgaccaacttgtgaagattgcaaaggtccttggaacagatgggttgaatgcttatttgaacaagtatcacattgagctggaccctcaacttgaagctcttgttggaaggcatagtagaaaaccctggtcaaagttcatgaatgctgataaccaacatctagtatcacctgaggccatagattttctcgataagctcctgcgctatgatcaccaagataggctcactgcacgtgaagctatggcacatncctacttnctncaagtcagagctgtggagaacagtagaacgagacccacataatcgntgtctacaccctcgaaatgaaaagtgtgctaatttctggaacatcatangctaaaaaaccgtcaataagcatctcgcttcangaaatctggccatgactncgtggcaatgaaataa

SEQ ID NO: 99228 - DNA, 507 bp, Zea mays
  unsure (1)..(507): unsure at all n locations
ggagtggggnatgaagggttgtatggaatgctgtaccggtccggaattcccgggtcgacccacgcgtccggaagactgaagagaagggaagacatggccgtgacggcggaagcggcggcagagatggtgttggagcggcgggcgtacgcgcgggtggggctcctcggcaaccccagcgacgtgtacggcggcagggccctgtccttcgccatcgccgacttttccgtcaccgttcaccttcgcccttcgcccgagctgctcatccagccgcatccgcaccacgacctcgtcgcctttccctctctccctcaactcgtgagccgtttgcaaagtgaaggatattatggaggcgtccggctgctgatggctatctgtaaagttttctacaactattgtgttcaaaataacatcagtttaaaagctgaaaatttcaccttatcatacgatactaatattcctcggcagtctgggctgtctggttcgagcgcgattggttgtgctgctctc

SEQ ID NO: 99229 - DNA, 538 bp, Zea mays
  unsure (1)..(538): unsure at all n locations
ngatatgatgtgcatgaatgagaggcggtttagngtattnactcnatccgnnttggaattcccgggtcgacccacgcgtccggtcgcccagctgaggagagtgggcaaggggcacggggtgtggcacttcgatcagatgctgcttgaggaagaggcctaaaaagaagaacggacagatgaatgaaggaaacaagtgtgtaatgttgatcaggcggaggaataatgggtcaactgacaactctgggtcggtggatttgtagttggtttgggttttttagttgtagaacggtgttgcccccctcctagagagggatgaacacattatgcatgcgatgtgtcagttcggtcggtgctatgctcgttgggatttgattgtcggaaattaaacatgggtgatgaatgtgtaccctccctaaaaaataaagtcctaaaatgaaaatgttacctttatatagaaaaactaaaatataaaaacactcaattaatatattgattcaacgaaacatggatctgacgctctattcatggaattataaaa

SEQ ID NO: 99230 - DNA, 532 bp, Zea mays
  unsure (1)..(532): unsure at all n locations
aggggncatggtgctgaaatgtggggaaggaggagatgatgcaccggtccggaattcccgggtcgacccacgcgtccgtgtcaggccacgcgactgcttttattgcaattgaggactgtggcataaaatctagagctcagagattgttgagtagcattaccaattcacttgagacggtactgaaatgcaacgtggaagtcaagattggtccactagcagaattgatggacggagaagtaacattagaggctggtgctaatgttaggaagatacgagtctgacgtcttgagttgctcatcaaacagtgaccgactaaagggagctttagattcaaggagaagctctggtcatactgatgaagtaaagaaagaactggagacgtacaaagaagttcccatccagactacaaaagaaccaacaattgacgaccagcgactggaaagtgcatggcttcaggttactgagaagcacacaccttgtctggtggatcaggcactacacgatcaacatcagggtctggctcaattttctg

SEQ ID NO: 99231 - DNA, 528 bp, Zea mays
  unsure (1)..(528): unsure at all n locations
tgtggtacatgaactgaatgtaactgatnactcgtccggaattcccgggtcgacccacgcgtccgatttgatccgccgcgcgcggcccgatcgacgagcgagcctcattcacactccgatctagctagctagctagtttaggaaagagaaatctgaccacagggatgcggtggcggctgcagccggcgccggcgccggcgctgctcctcgtcctggccaccatcgccgccgtcgtggtggtgcgagcggagccccaggtgccgtgctacttcgtgttcggggactccctcgtggacaacggcaacaacaacgacatcgcgtcgctggcgcgggccaactacccgccctacggcatcgacttcgccgccggccccaccggccgtttcagcaatggcctcaccaccgtcgacgctatatctcggcttctgggcttcgacgattacatccccgcgtatgctggcgcgagcggcgatcaactnctcaccggcgtcaacttcgcttncgncgcagcccggatccgtgacgaga

SEQ ID NO: 99232 - DNA, 535 bp, Zea mays
  unsure (1)..(535): unsure at all n locations
aggagtgctgacatgaaagggggggggaatagtacttntccctttnggntcggaattcccgggtcgacccacgcgtccgcccacgcgtccggccagtccttgtcgccggccccaaactgcgtgtggcaaaggcaggaaaggcatttgtcgatatggtagatgccagtggctatgcctatgccgtgatgccatcggccaagggtcttgtgccagagacgcacccccacttcatcggcacctactggggcgcagtcagcaccgccttctgtgctgagattgttgagtccgcagatgcctacctctttgcaggccccattttcaatgactacagctctgttggctactcattcctcctcaagaaggaaaaggccatcatcgtccagcctgagcgtgtgatagtggggaatgggccggcattcggatgtgtgatgatgaaagagttcttgtctgaattggctaagagggttaataagaacaccactgnctatgagaattacaagaggatctttgtacctgagggccaancgctggaaaa

SEQ ID NO: 99233 - DNA, 504 bp, Zea mays
  unsure (1)..(504): unsure at all n locations
tatataaggggcaataagtaatgattcactctaccggtccggaattcccgggtcgacccacgcgtccgcccacgcgtccgcccacgcgtccgcacttcttcaatccactagctaagcgcgccatggcaaagttcgctcttggtcaccaccgcgaggcctccgacgccggctgcgtccgtgccgtcctcgccgagctcatcctcaccttcctcttcgtcttcgccggcgttggctccgccatggcaacagggaagctggccggcggcggcggggacacggtagtgggcctgacggcggtggcgctggcgcacacgctggtggtggccgtcatggtgtcagcggggctgcacgtcttcggcggccacatcaacccggccgtgacgcttggcctcgccgncacgggccgcatcacgctggtccgctccgcgctctacgtggcccgccagctgctcggctccacgctcgcctgcctnctnctcgctttcctcgcagatgccgacagcg

SEQ ID NO: 99234 - DNA, 539 bp, Zea mays
  unsure (1)..(539): unsure at all n locations
aggggcatgagatgtgtggaactagaactatagaataatgatcgactgtcgtgaattcccgggtcgacccacgcgtccggttgtgatgtgaacgtttctgttcgaccagttggacaatcagaatttggtacaaaggtggaaataaagaatatgaactcattttctgcgataaatagggcaatcgattatgagatctcccggcagattctgctccataaagaaggccaggctgatcaaattgtacaagaaacccgcctgtgggatgaatcttctcagaaaacttttacaatgcgaaaaaaggagggacttgccgactatagatattttccagaacctgatcttcctgaagtagttatcactagtgactatattaatgaaatcagcaagtcaatgccggagcttccagaagcaaagcgtaggcgttatgagaatatgggactcagcatgcaagatgttctgntccttgctaatgatgataatattggtcatttctttgattctactcttgagcatggtgctgatgcaaaagctgctgccan

SEQ ID NO: 99235 - DNA, 525 bp, Zea mays
  unsure (1)..(525): unsure at all n locations
naggagtctgtgtgccttttccncacgtttcatcatcgttcctgaattttttttcgacccacgcgtccggntgtgattctgttctcgctcacatttccagttgtacaatttataatctgggacaaaggtgggggttatggggatgaactcattttctgagataaatacggcaactcgattatgaaatctccccgcagattctgctacataaagaaagccaggctgatcaaattgtacaagaaacccgactgtgggatgaatcttctcagaaaacttttacaatgcgaaaaaatgatggacttgccgactatagatattttccagaacctgatcttcctgaagtagttatcactagtgactatattaatgaaatcagcaagtcaatgccggagcttccagaagcaaagcgtatgcgttatgagaatatgggacttagcatgcaagatgttctgttccttgctaatgatgataatattggtcatttctttgattctactcttgagcatggtgctgatgcaaaactgg

SEQ ID NO: 99236 - DNA, 549 bp, Zea mays
  unsure (1)..(549): unsure at all n locations
gagggtgaatgtgaggattctgtgtgattcatgctactacaggagntgtggtatcggtcctgtattcccgggtcgacccacgcgtccggcccaagccgaccccgccgacgtacaccctttcccccaagcctccgacacctaagccgacggcgcctacgtacactccaagccctaagccaccggctaccaagcctcccacgcccaagccgaccccgccaacgtacaccccttcgccaaagcctccgacacccaagccgaccccgccgacgtacaccccttctcccaagccttcgacgcccaagccgaccccgtcgacgtacactccaagccccaagcctaccacacacccgacgcccaagccgaccccatcgacgtacaccccttccccaaagcctacgacgcccaagccgaccccaccgacgtacacacctttcccaaagcctgcgacacccaagccgaccccaacgacgtacacttccacaacgaaacccgcgggcaccaagcggccaactacacttcgacgccgccggggtcttacacccccagccc

SEQ ID NO: 99237 - DNA, 527 bp, Zea mays
  unsure (1)..(527): unsure at all n locations
agggcctggtgtgtatgtgggtatgggggggggagggcgattttttccggtctggaattcccgggtcgacccacgcgttcgcccacgcgtccgcccacgcgttcgcccacgcgttcgcccacgcgtccgagatgaggtaggtgcagaacacggtccattcatggatttgaaagcgagattcatggactttaaacagagaaactatgtggggaatttttcaaattacccaaatcttgcttagcaacaaacgccaaaagttatggtgattgcttgggctgactccagaatctgccctaccgctgtttgggggttcagcctgccgaagcatttacgggtcgtaatgtggcgaatttggtaccaccatatgagcatgagggatcagagactagtgcagcactagagtttgctatcaatacactcgaggtagagaatgtgcttgtggtaggccacagtangtgtgggggcatcaggcactaatgagcatgaaagatgattcaacatcaggaagcttcatttaaaacttggtt

SEQ ID NO: 99238 - DNA, 546 bp, Zea mays
  unsure (1)..(546): unsure at all n locations
aggggncccgtgatgctgaaatgaggtgaatatgcgggagagatgatatacgcttgtaccggtccggaattcccgggtcgacccacgcgtccgcggacgcgtgggcccaattggaagggcagctaataaggtaaggggcgacgaaaatggctgcaacgaccgccaccaaggacgacagtggctacggcgacgagcgccggcgcgagctgcaggcgttcgacgacacgaagctgggggtgaaaggcctggtggactccggcgtcaagtccatcccgtccatcttccaccacccgccggaagccctgagcgacataatttctccggcgccgcctctgccgccgtcgtcgccctccggcgccgccatcccggtggtggacctctcggtgacgcggcgcgaggacctagtcgagcaggtgaggcacgcggccgggacggtgggcttcttctggctggtgaaccacggcgtggcggaggagctgatgggcggcatgctccgcggngtgcgccagttcaacgagggccccgtggaggcgaagcangcgctct

SEQ ID NO: 99239 - DNA, 542 bp, Zea mays
  unsure (1)..(542): unsure at all n locations
atgggccacggtatgtgaatacttgttttctcttcttgggaaaggatatgcttgcatcggtccggaattcccgggtcgacccacgcgtccggttcagtagtgtgctctgacagtgagatggcgagcgtgaaggttttcgggtcacccacctcggcggaggtcgcccgcgtgctcatgtgcctcttcgagaaggaggtggagttccagctgatccgcgtcgacgcctaccgcggcaccaagcgcatgccccagtacctcaagctgcagccgcaaggcgaggcgctcaccttcgaggacgagagcctcaccctctccgactccagggggatcctccgccacatctnccacaagtacgcgaagcanggcaacccgtacctgattggcacgggcgcgctggagcgggcgtncatcgagcagtggctgcagaccgaggcgcanagcttcgacgcgcccagcgccgagatggtctacagcctcgccttcctgccgnccaccctgcccaggcagaacgacaacggcaacggcggcgcgttcaacgccag

SEQ ID NO: 99240 - DNA, 529 bp, Zea mays
  unsure (1)..(529): unsure at all n locations
gagtntnactgggcgtnccactgacatgcgagtaatantgtattgctgtaccggtccggaattcccgggtcgacccacgcgtccggaattaggaggcgatggggcactccaacgtttggaactcgcaccccaagaactacgggcccggatcccgcgtctgccgtgtctgtgcgaaccctcatggactgatcaggaagtacgggctgatgtgctgcaagcagtgctttcgcagcaatgccaaagacattggcttcatcaagtaccgctgaaatcaggtgggaatggaccatgttgtagaagcgaagttgtagttttatttccagtaatttaagatgtttggtcaaaaagtctgctagtaaaactgctacgtttatgatggagaacttaaccatggtggtcatgttgggcataatgatcatgagttaactatgttgagcctaactatcttgtgtccaaccgcgcctggtagtatgataactgtatgtangatggttaagggcgcaactaatacttatattgcatgggtgga

SEQ ID NO: 99241 - DNA, 525 bp, Zea mays
  unsure (1)..(525): unsure at all n locations
ggggnctgaggatatggtactagggggaatatgtgatctgctgtaccggtccggaattcccgggtcgacccacgcgtccgcccacgcgtccgagatgccagatgtgcctccggtctgatcctttgctgaaggtgatggagcgactggctaatccgggggtgcggcgggtgttcatagtagaagctgggagcaaacgtgtggagggtattatatcactgagtgatattttcaagttcttgctgagcttgtgataagagaagaggagcatgacggacatttgtttgtgatcaatagtaagaaaacagcagggtatgtgaagcaagctgccatggatctcgcatttcccctgcccctccggcctttggtcaagtaaggcaagattgaaggtggcgggctttgtctttgctgataatggctgttggaattcatgggctgtaaaagtctttttttaccctttggttttcggtttaaccattttgtgccttccagtggtaccaaaaatatctggggattaatattattatt

SEQ ID NO: 99242 - DNA, 530 bp, Zea mays
  unsure (1)..(530): unsure at all n locations
aggatnacggtgctggctcgtatttgggggagtgatgcactcggcccggaattcccgggtcgacccacgcgtccgtcgacccacgcgtccgtggcttctcctccccctccggttcgggttcgggttcgtgaggttctccggggttcggtttcgtgggtgagcggatcgagatggcggcgtcggatgttgagtaccgctgcttcgtcggcggcctcgcctgggccacggacgaccactccctccacaacgccttcagcacctacggcgaggtcctcgagtccaagatcatcctcgatcgggagacgcagaagtcccgcggcttcggcttcgtcaccttctccacggacgaagcgatgcggaacgccatccagggcatgaacggcaaggagctggacggccgcaacatcaccgtcaacgaggcccagtcccgcggcggccgtggaagccgctgcagctgcaggtaccgtggttgccgtggaagccgctgctacagccgttgccggcgcgctggatggcggctgctgctacgg

SEQ ID NO: 99243 - DNA, 527 bp, Zea mays
agggttaagcttgtgtcatgctatggggggaggatgcaccgctccggaattcccgggtcgacccacgcgtccgcccacgcgtccgagcaggagctggcaagggagtgtgattatgtgctagaagcaagtaaccggaagcgttacaaagaattgctatgtgatagtgatggttataatgtcccaaaggtcattgatcaattgtctagcaggaaagtgctgacctcggagtttgtttccaggcattcctatcgataaggtggctcagttaagtcaggaaacccgcaattatgttggttgtaaactgcttgagcttacaataaaggagttgcttgtcttcagattcatgcagacggatccaaattggagtaattgtctgtatgatgatgctacaaggaaattcaatctgatagattttggagcagaccgtgattttgcataacacttctgagatgattatctacgaatggtaggtgcctgtgcaaatagagatcggaccggagtcttaaaaatgtcccggagactaggat

SEQ ID NO: 99244 - DNA, 537 bp, Zea mays
  unsure (1)..(537): unsure at all n locations
acggnttcatgattgtgtgnccgggcctctatcctgcgatcactcggtctggaattcccgggtcgacccacgcgtccgggagaactgccagaagagcaagatcttcttcatcgcctggtctcctgacacggcgcgcgtggagagcgggatgatctacgccagctccaaggagaggttcaagcgggagctggacgatattcaagtggagctacagtccacctactatcgtgtggttggacatgacacaattccaggttaaccctgcatatgatgctcagagaatatttgcctatgttcaaacactgatgtgcgtcacagacccaaattgtgctgcttactttcaagcacttcgcaatggtgaatcacaccttgcatcagtactattgcagagttgctgacgttgttgtgatgagctgaacatttaacttgcactatatacagtctaccattcgcttgctataaattataatggctcgctaattgagcctaatgtttttccgattgaagatactaattatcgtattgactttgtgattt

SEQ ID NO: 99245 - DNA, 535 bp, Zea mays
  unsure (1)..(535): unsure at all n locations
aggggntnttgctcgtgtaatgggttgtagggaggaattatgtatcggcccggaattcccgggtcgacccacgcgtccgcggacgcgtggggaaaacccctgctgcaaagaaggataatgctgagggacaagaggttgaggcagcagctgaggaaacgaaaaagagcaaccatgtcacgaggaagcttgagaagcgcaaggagggacgtacccttgacccacacattgaggagcaatttggcagtggacggttgctggcatgcatttcttcccgccctggacagtgtggccgtgctgatgggtacattcttgagggtaaagagcttgagttctacatgaagaagctacagaggaagaagggcaagagcgctgtagcttatagcattctcatggattggcttgcaccgaaatgtgtgtcctgatgagtacactttttttggttagtcgtctcaagttcagagcgttatgccatgttttcagacctgattagtacactcttttctaaaagcgattgagctctaaaaaaaaaaaanaa

SEQ ID NO: 99246 - DNA, 529 bp, Zea mays
  unsure (1)..(529): unsure at all n locations
agggtncccggtgtataaatgagttgatggaatatgtattgctctaccggtccggaattcccgggtcgacccacgcgtccgcaaacaacagtatgaggaggtttccattccaccacatttgatggtcgggacttccatgggactatttgatttcattgctgctgcattggctaaatttgtcggtactgaaggtgaagatttccaactcccagagggtagacagagagaacttggtttcactttttccttcccggtgaaccaaacatcaatatcatcaggaacactcatcaagtggacaaagggcttttccatcaatggcacggttggtgaagatgttgattctgagttgagcagggccatggagaggcaggggctagatatgaaagttacggcattagtcaatgatacagtcggcacattggctggtgggagatatatggataccgatgtagttgcagctgtaatattgggcactggtacaaatgcagcatatgtggagcatgcatatgcaattcctaaatgggactgg

SEQ ID NO: 99247 - DNA, 531 bp, Zea mays
  unsure (1)..(531): unsure at all n locations
aggggtttgagctangaatgaactacggatatcatcgactgctcgtaccggtccggaattcccgggtcgacccacgcgtccgcccacgcgtccggagtcgtcactgacagccccgtgtacgacggccgtggcgccgacgcccgcctcgtggctcgcatacagggagtcacggtcctggtcggtaacgcagacgccttgttcaccatggtgttcgaaaccgacaggctaaagggctccacgctcgtcatcaacggaatggtcacggatgggtcagacgaatgggcgatctacggcggaaccggggtgttcgccatggccaccggtgtcatgaagagaagaaaccttgccgccggtagcaacgacgggaactctgacgagcttgccctggaagttttctgcccggtgtttggcgcatcacagcaaccaattagcaagcagcaggactccatctcctccgtcaccaagatcggactatggggcggacagggagggtcggcacaggacatcacggcagagcagccaccacggcgt

SEQ ID NO: 99248 - DNA, 533 bp, Zea mays
agggtccgagtagtacctagagactacgaagtactcgttggactgctctaccggtccggaattcccgggtcgacccacgcgtccggtagctgttggtacggttttcctcctcgctcttcttctccttcttcttgctgctggttgccgggagctgagatcgatcgagagcactgctgttgttcgtgcggcgaggcggcggcggcggcgcgcggcagtgggcggagacgacgaccgatcgatcagctgaaggaatgtcgtcggcccaaatcgtgccggcggaccatgtgtgctatgtgcactgcaacttctgcaacacagttctcgcggtgagtgtcccggggaacagcatgctcagcatggtgacagttcggtgtgggcactgcacaaatctactgtcagtgaatctgagagcactcatgcactcagtcccagaacaggatcagcttcagcaggaagacatcagggtccatggcacgttgcgtgagcatcatcagtgtggcggcgggcaccatctggagctgggctcttcgtcc

SEQ ID NO: 99249 - DNA, 531 bp, Zea mays
  unsure (1)..(531): unsure at all n locations
tgggtntttggtgtgtatgtgtgatgggggagatttgtgatcggtccggaattcccgggtcgacccacgcgtccgcggacgcgtgggctctggtgcaacttctgcaaactgctgaatttgacatcaagaaagaagcagcctgggcaatttcaaatgccacttctggtggcacacatgatcagatcaagtaccttgttgcccagggttgcattaagccactctgtgatctgcttgtttgcccggatcccagaattgtaacagtttgcttggagggtcttgagaacatcctgaaagttggcgaggcagagaaaaatcttggtgcaggcgatgtcaatgtttacgcacagatgattgatgatgctgagggcctggacaagattgagaacctacagagccatgacaacactgagatatatgagaaggctgtcaagatgctcgaatcttactggctagaggaggaagatgatgccatgccctctggcgacaatccccagaatggcttcaaacttttggaaccaggccttctgtccc

SEQ ID NO: 99250 - DNA, 535 bp, Zea mays
  unsure (1)..(535): unsure at all n locations
aagtnannatggaggtgtatggggggatggggggaatgtaggtaccggcccggaattcccgggtcgacccacgcgtccgcccacgcgtccgggagacggagcggagctccaccgagtcctccggggcttccgggctcgacttcgaggacaccgcgctcacgctcaccctccgcctcccgggctccgcgccttccgccgccgccgccgccgcggcctccctgtccctctcctcctcgtcgtcctccgccttccccgaccccgaccgcaagcgcgcctnctccgacgctgaccccggccgctcctccccgctcgccgcgtcctccgacgctgcaccggcacccaaggctcgtgtggtgggctggccgccggtgaagtcgtaccgcaagaacgcgctcgccgacgccgcgggctccggcaaggccgccaagttcgtcaaggtggccgtcgacggcgcgccctacctgcggaaggtggacctncaggcgtacgccggctacgaccagctgctccgcgcgctccangacaagttcttctc

SEQ ID NO: 99251 - DNA, 523 bp, Zea mays
  unsure (1)..(523): unsure at all n locations
aggtcctgtgcttgtgccatcccacagcancgatgcacgatctgtattcctcggtcgacccacgcgtccggctaacaatttcgcccgtggccactacacatttggcaaggagatcgttgatctgagccttggccgtatgcgcaagcttgctgacaactgcacctgtctccagggcttcctggtcttcaatgccgttggtggtggcaccgcttctggccttggctctcagctcttcgagttcctgaatgtttagcacggtaacacctgcttgctggccttcaccgggtgctcatttacgtcgtctgatcctccgtcgctgaactttttctcaatgttcattcgatgttctggccgttggagttgactgaactttttaacgctctcgactaccactttttcttctgcaatgccatcaatttttttaaagtttctctggaccttactttctaccttgttaaaatactttttaatgtgtacaaaggcttcaattcggttttttgctcgcttcatgcatatatttatg

SEQ ID NO: 99252 - DNA, 529 bp, Zea mays
tggggcccggatgtatatgatcttggggttatatagactgctctaccggtccggaattcccgggtcgacccacgcgtccggcttctcaagtaccatgccagggttctttatattgacattgatgtccatcatggagatggagttgaagaagccttttatttcactgacagggtaatgactgtgagtttccacaagtatggtgacctgttctttcctggaacaggtgatattaaggatataggagaaagggaaggaaaatattatgctatcaacattccacttaaagatgggatagatgacactagctttactcggctttttaaaacaattattgccaaagttgttgagacatatctgcctggtgctattgttcttcaatgtggggctgattcattggcgagggatcgtttaggctgcttcaatctctccattgaaggccatgctgaatgtgtaaagtttgtcaagaaattcaatattccccttctggtaactggaggtggtggatacacaaaggagaatgtagcacggt

SEQ ID NO: 99253 - DNA, 523 bp, Zea mays
agtcccggttggaatggtctaggggaatatgtattgctctaccggtccggaattcccgggtcgacccacgcgtccgcggacgcgtgggtctgccttggctacttcatattccgtaatcagctttttaatgtatatgcgccaaagtatgatactggagggaaattttggcccgttgtgcacaacacaacgatattctctctgggtgttctgcatataattgctattggagtatttgggataaagaagcttccccttgcgttcagtttgctacttcccctaccaacgctgacccttctgttcaacgaattctgccggaacagatttctgcctatctttgaagcatactctaccgagtctttgctaaagaaagatagagaagaacagagcaaaccagatatggccgagttcttcagtaatcttgtaacagcttactgtgacccagctctgaaacctttccaacgcacttctaacttcgacgaacgcaccgagccgctcttggcctctctgtctagctccagataaa

SEQ ID NO: 99254 - DNA, 530 bp, Zea mays
  unsure (1)..(530): unsure at all n locations
agcttaacgtggtatgccaaaggcccagcnccctancnactgactatccggtccggaactaccgactcgacccacgcgtccgtattctcatgtcctgagccccgttccgcaatgtaaaccctagtgcccatcagggaccttggggcctacgatgcgctcatgacgggtgcgcgctcataccatgagctgcagccgacaataccaaccgaccatggctacccgcatccagtttgagaacaactgtgaaattggcgtgttctccaagctgacaaatgcttactgtctggtatcgaatggatggtcagagaacttctacagtgcctttgacgctgatctcgcatatgccaatcctgtggtcaagacctccattggtggcactagaataaactgccgactttgtgttggaaacaagaatggacttctattgccacatactacaaccgaccaagagcttcaacatctgaagaaaagcttgcctgatcaagtggtggatcagcgcatcgatgaaacgctatctgacacttggcaag

SEQ ID NO: 99255 - DNA, 525 bp, Zea mays
  unsure (1)..(525): unsure at all n locations
tggggtcgagcnctatggattaggggggatatgtgatgctgctaccggtccggaattcccgggtcgacccacgcgtccgcggacgcgtggggtgctcgccttcttcgccgcctccgacggcatcgtgctcgagaacctcgcgtcccgcttcatgtccgacgtgcaggtcgccgaggcgcgggccttctacggcttccagatcgccatcgagaacatccactcggagatgtactcgctgctgctcgagacctacatccgcgacgacgtcgagaaggaccgcctcttccgcgccatcgatacggtgcccgcggtccggcgcaaggcggactgggccatgcgctggatcgacggcggggagcgcttcgccgagcgcctcgttgccttcgcctgcgtcgagggcatcttcttctcgggctccttctgcgccatcttttggctgaagaagcgcgggctcatgccgggcctcaccttctccaacgagctcatctcccgcgacgagggcctgcactgcgatttcgcctgcct

SEQ ID NO: 99256 - DNA, 532 bp, Zea mays
  unsure (1)..(532): unsure at all n locations
agggtncccggtcgtggatgatatgatggggggatatgatatcggtccggaattcccgggtcgacccacgcgtccgagtttctacatcagttctgttgctggctccaacaatggaagttctattgtagtgatgtcaaaaggcacaccatatacacagcaatcttataaagtcagtgattcctttccatttaagtggataaacaagaaatggaaagaaggttttcatgtgactgcaatggcaacatcaggcaatcgatgggctatagtcatgtcccgcagtgctggattttctgagcaggttgtggagttggacttcttgtacccgagcgagggcatccatagacgctgggacaatggcttccgtattactgcaatggctgccacgatggatcagtctgcgctgatcctaagcaagccaaggcgtcgcccaagagacgagacacaagagactctgcggactacacagtttcccagtcaacatgtcaaggacaagtgggccaagaatctctaccttgcttggatatgctatggg

SEQ ID NO: 99257 - DNA, 531 bp, Zea mays
  unsure (1)..(531): unsure at all n locations
aggtagagatcttggccatgcactacagagaccatagcatctgctctaccggtccggaattcccgggtcgacccacgcgtccgcccacgcgtccgctcagatattatgtgggcagaagcaatggggaaacttgaatgcatggatagtgcagacagggagaggctgtggcctcagcttgtgcagggttttaaagacctttcccatcggcttaagcttcaagatgaagtccttgtttcggacactgatagattgagcatgactcactctaatgttaaaaagctgcaaaggcatttccaagctgacacgtatccttggatccagcgattgaagcaacaagagctggctattcagagacgtcttttaaggtttgttagaatagtggaggcattggagaatcggggctaccgctgtcctttaacaaaggaggaagctgacttgtatgaaagattggttgctatattaaagcggctaanaggacataacgctgatctttctaagagggtcaatacactngnttcgacgtcgcgtctt

SEQ ID NO: 99258 - DNA, 526 bp, Zea mays
  unsure (1)..(526): unsure at all n locations
agccccggtgtatgccggaccctgcnatcatcgtactgacgtaccggtccggaattcccgggtcgacccacgcgtccgctagggttttgctgctctccgaccccgagctccgaaggccgcagcatcaggcgcggcccggctcgcgtgtgaccgagatggcgctgccgaatcaggggaccgttgattaccccagcttcaagctcgtcatcgtcggcgatggtggaactggtaaaactacatttgtgaagaggcatctcactggagagtttgagaagaaatatgaaccaaccattggtgtggaagttcatccgttggatttcaccactaacttgggtaagatcaagttctactgctgggataccggaaggcaagagaagtttggtggcctcaaggatggatactatatccatggccagtgtgcgatcatcaatgttgatgtaacctcaaggcttacttacaagaatgttcctacgtggcatatggacctgtgcagggtctgtgaaaacatncccattgtcctttgcgg

SEQ ID NO: 99259 - DNA, 452 bp, Zea mays
  unsure (1)..(452): unsure at all n locations
agttggatngctatcatgagatcagtagcactgcacgtaccggtccggaattcccgggtcgacccacgcgtccgtcccaagccagccattggttggtagcaagctcaagctaatcaagttagctttagatacccgctcccgctcttcttccctccgacgaaggcagctgacgacacagcaggctagcttcggagttcggagcactcagccatggccattgccggcgctctcctcctcctgctcggactcctcgcgcgggaggccgctgccggcgggtggcagagcgcgcacgccacgttctacggcggcggggacgcgtccggcacaatgggcggcgcttgcgggtacggcaacctgtacagcacggggtacggcacgagcacggcggcgctgagcacggcgctgttcaacgacggcgcggcgtgcgggtcctgctacgagctgcggtgcga

SEQ ID NO: 99260 - DNA, 449 bp, Zea mays
agtgtcggtcgcctgaactgaatccagtaggaccgacgtaccggtctcggaattcccgggtcgacccacgcgtccgtaaaatattgccagtcccgcagtctagatggccctacgccgccagctcgccctcgccgtgctcgccctggcggcaaccacagccgcggccaactccggcttcgcggactccaacccgatccgtcccgtcaccgaccgcgcggcctccgcgctcgagtccaccatcttcgccgctgtcggccgcacccgcgacgcgcttcgcttcgcacgcttcgccatcaggtatggcaagagttacaagagcgcggcggaggtccagaagcggttcaggatcttctccgagagcctccagctcgtccgctctaccaaccggaaaggcctctactaccgcctcggcatcaaccgcttcgcggacatgagctgggaggagttcc

SEQ ID NO: 99261 - DNA, 456 bp, Zea mays
  unsure (1)..(456): unsure at all n locations
nggtggtgggtctccctgagatcaatccaatngcactgccgtaccggttcggaattcccgggtcgacccacgcgtccgcggacgcgtgggcggacgcgtggtctccttgcgccgctgccgcatctcctctacaggtgagaaggagagaaagagggcgaaatggtgaagcacaacaacgtcatccccaacgggcacttcaagaagcactggcagaactatgtcaagacatggttcaaccagcccgcccgcaagcagaggcgccgcatcgcacgtcaaaagaaggctgtgaagatattcccacgaccaactgctggccctcttcgtcccattgttcaatgccagactctcaagtacaacatgaagtcaagggctgggagaggctttacccttgaggagttgaaagctgcgggcattccaaaaaggcttgctccaaccattggcatttctgtggatcan

SEQ ID NO: 99262 - DNA, 550 bp, Zea mays
  unsure (1)..(550): unsure at all n locations
tgatggggnnnnncccctgagaattgatgctcatagcaaccgcgctggaattcccgggtcgacccacgcgtccgcccacgcgtccggactagttctagatcgctagccgcacgcttcttgttgccaaagaattccctcccctagccgccgccgccgctcgtctccctgagaggtgccgggaccgaggatttggccgagttctaggtagagaatcggttttacttgtctcagcccggggtctgctgcgtctggtggtggtgaaggggagaaattcgtgagatctgttccggatcaggcgtgcgagctcgggaatcaggggtttcacacatagcttcgtcgatttgaatttgatgtactaatggagtctaagggtggcaaaaagtctagcagtagtcgttctatgatgtatgaagctccccttggctacagcattgaggacgttcgacctgccggaggcgtgaagaagttccagtctgctgcttactccaactgcgcgaagagccatnctgatatccctttggcttcctcattctagaagttaggaatcttn

SEQ ID NO: 99263 - DNA, 452 bp, Zea mays
  unsure (1)..(452): unsure at all n locations
cggtgtcanctctcaactgaatcaatacggatgacgtaccggtctcggaattcccgggtcgacccacgcgtccgggccctgctcctctgcaggatatggcaaggcaaattgctacagccaatggccctactggctataatagggattacctgttctcaatggagaaggcattagccagcattagccacgaagatgattcgatcatagagcttgcaaacgaggtgaggaaggtgctcaacagaacaaaggagaccaagatcactggtgccaatgcttccctgaaatcacatgcccctcttgtgcacctgtccgcgcttccagaaggcaccgctgtggactcgagatagcgagagccttggacgttggacctctactcggaatttacttccagctcttgcatgtttgtggccaaaaaaaaaaaattaaatttaaaaaaataataataaaaataa

SEQ ID NO: 99264 - DNA, 449 bp, Zea mays
tggtggctgtgtcctgaatcgaatccggtagcactgacgtaccggttcggaattcccgggtcgacccacgcgtccgcggacgcgtgggttcgccgtggtcttgcttaggctgggagagcttgaagagaaggtccagatgcttcaagaaaagccttctgaaatgccttgcgagaaagaagagttgcttaacgctgctgtgcgtcgtgtggatgcattggaagctgaactaattgtaacaaagaaggctttgcacgaggctcttatcaggcaagaggaactgctcgcgaacatcgacagcaaggagattgccagggctcagagaaagaagaaaacaatgttctgctactaggacaacacctgcttccgtgaggagatgacaaacgcggcggaccccttcatttttctgacacttgtgaatcaacaggtttccgttgtaaatcaacaaaatt

SEQ ID NO: 99265 - DNA, 455 bp, Zea mays
  unsure (1)..(455): unsure at all n locations
gagagatgattatccctgagatgaatccactaggaccgccgtaccggttcggaattcccgggtcgacccacgcgtccgctgtcacacacacacacacagacaagtggtttccaaagccaagtgtgtgtactagcaaccagctagctcgggcggcagcaggcagccatcatgtcggaggagaagcaccaccacttcttcaaccaccacaagaaggacgaggagcagcccgccggcgagtacgggtactccgagaccgaggtggtcaccgccaccggcgagggcgagtacgagaggtacaagaaggaggagaaggagcacaagcacaagcagcacctcggcgaggccggcgccatcgccgncggcgccttcgcactctacgagaagcacgaggcgaagaaggaccccgagcacgcgcacaggcacaagatcacggaggaggtcgctgccgcggcggc

SEQ ID NO: 99266 - DNA, 550 bp, Zea mays
  unsure (1)..(550): unsure at all n locations
tgtatgcgtgtgtctcgctgaggttcgtggcactacgtaccgctcttgaattcccgggtcgacccacgcgtccgtcctcttctccctctcctcctcctcctccttctcgtcccccttcctcgggttggaaattggaatggaggcggcgacgatggcgtggacggcggcggtggtcggggcggggctggtgtactggttcgtgtgggtgatgggcgcggcggaggtgaagggcaagcgggcggtggatctcaagatgggatccatcacgcgggacaaggtgcaggacaagtacacccagtactggtccttcttccgccggcccaaggagacggcaaccacggcggcgtcggcggagaaggtgccggccttcgtggacaccttctacaacctggtgacggacatctacgagtggggctggggccagtcgttccacttctcgncgtcccttgccggggcgttccaccgcgacgccacgcgcgtncacgaggagcccgtgcccgacctctttcgcgcccgggcggccaacggcttcttgacgtcggctgcggcg

SEQ ID NO: 99267 - DNA, 451 bp, Zea mays
  unsure (1)..(451): unsure at all n locations
gagaggcgnctngcctgagatgaatccactgacataccggttcggaattcccgggtcgacccacgcgtccgcggacgcgtgggcacaaaccagcagcaggcagagcaacgactagctgccaggcaagccggccgggggtgctgcaagagtgcaacaaacaatggccaccgcgctctccttcaaggccttggcactggccgcgctcctctccatggtcgtcgcctctggcgctcgcgccgagcaacagttcaagcgcaacgccaccaccgcctcgcaggacagatccttgttgtcctacagcagtggctggctgccggccaaggccacctggtacggcgcccccaccggcgccggccccctcgacaacggtggtgcgtgcgggttcaagggcaccaaccagtacccgttctcgtccatgacgtcctgtggcaacgagcccatcttcaaggaa

SEQ ID NO: 99268 - DNA, 451 bp, Zea mays
  unsure (1)..(451): unsure at all n locations
cggtggtnntctccatgagtctcgtacgactgacgtaccggtctcggaattcccgggtcgacccacgcgtccgcgcatgacagtttcctgggaattgacctgtctagtgatggtcatacacttgtatcgtactcccagctctcaaactgggacaagtgctcctcatgggagggcttcaaggtgtcaccattcaccgcaggagcgaggacattcagcttcgatgcaaatccatgcgattacttccagggtggcaagattaaagcaacgaccctctccctgtcagtcttggtggccattgagatgttcaactcactgaatgccctgtcagaggacggcagccttgtgagcatgccaccatgggttaatccgtggcttcttctggccatgtcggtttctttcgggctgcatttcttgatcctctacgtgcctttcctcgctcaagtgtttggga

SEQ ID NO: 99269 - DNA, 451 bp, Zea mays
tgaggtggttcgcactgaaatcagtgctatgacgtaccggttcggaattcccgggcgcgagcggccgcccttttctctcccctcctctcctcccgtctcctaccccgaaccaaccaaacctcaccgaatcgcaacgacagcgagaacgtccaaacgagcgcgattctccggcgataaccaagagcgcgggcacgcaaagcggcgaagcgggaaggaagcagtaacgatggggcttgactattacaagatcctaggcgtcgacaagggcgccaccgatgacgacctcaagaaggcctaccgcaagctcgccatgaaatggcaccccgacaagaaccccaacaacaagaaggaggccgagaacaagttcaagcagatctcggaggcgtacgaggtgctgagcgacccgcagaagcgcgcggtgtacgaccagtacggcgaggagggtctcaag

SEQ ID NO: 99270 - DNA, 453 bp, Zea mays
ggatgggtggtgtccatgacgctcatacgactgcccgtaccggtctcggaattcccgggtcgacccacgcgtccgccaggaggccgtctgggacgctgacattgtcgtcaacggcctgccttccaccgacaccagggaggtgttcggggagatcaggaggtactggaaggagaggattactgcccccatcatcatctccctcgccaaaggaattgaggcctcgctggatccactcccacggatcataactcccacgcagatgattagcaatgcaactggagttccatcagagaatattctttatcttggcggacctaatattgcttctgaaatttacaacaaagaatatgcaaatgcacgtatttgtggagctgacaaatggagaaagccccttgcaaagtttttgaggcagcctcattttattgtgtgggataacagtgatctcatcactca

SEQ ID NO: 99271 - DNA, 453 bp, Zea mays
  unsure (1)..(453): unsure at all n locations
tgtgcganttctntccctgacctgaatgcactagtactgccgtaccggttcggaattcccgggtcgacccacgcgtccggccaaagaattccctcccctagccgccgttgccgctcgtctccctgagaggtgccgggaccgaggatttggccgagttctaggtagagaatcggttttacttgtctcagcccggggtctgctgcgtctggtggtggtgaaggggagaaattcgtgagatctgttccggatcaggcgtgcgagctcgggaatcaggggtttcacacatagcttcgtcgatttgaatttgatgtactaatggagtctaagggtggcaaaaagtctagcagtagtcgttctatgatgtatgaagctccccttggctacagcattgaggacgttcgacctgccggaggcgtgaagaagttccagtctgctgcttactccaactgcgcg

SEQ ID NO: 99272 - DNA, 451 bp, Zea mays
cgctgcaatcagcactggatgcaatccgataggactgccgtaccggttcggaattcccgggtcgacccacgcgtccgcccacgcgtccggcggggcgatcatctggtacaagccggagtggaaggtcatcgacctcatctgcacgctcgtcttctcggtggtggtgctgttcaccacgatccggatgctgcgcagcatcctcgaagtgttgatggagagcacgccccgcgagatcgacgccaccaggctggagagcgggctctgcgggatggagggcgtggtggccgtccacgagctgcacatctgggccatcacggtgggcaaggtgctgctggcgtgccatgtgaccatcgccagggatgcggacgctgatgagatccttgacaaggtgatcgggtacatcaagacggagtacaacatcagccatgtgaccatccaggtcgagcgcgaa

SEQ ID NO: 99273 - DNA, 452 bp, Zea mays
tgtgtgatcttctccatgaactgaatgcactagtactgccgtaccggttcggaattcccgggtcgacccacgcgtccgcccacgcgtccgctaaatcatggtgaactttttgagaaaaataactggttacccgaggggcctattaccattggtgttacttcaggtgcctcaactccagataaggttgttgaggatgctcttcagaaggtatttgagatcaagcgtcaggaaattttgcaggttgcataaattttaagcagagatttggtgaagagctgaatagttttggcttggcaaaggttactagaaacgttgcacaggcaaatgtttgtacagtagctaaggatgtaacgagttgggcacgaatactaccacgagtcactatccttgtgctggaatttacagtacggtggaaactaaaatggtgtaagtttctagtacacgagtcactt

SEQ ID NO: 99274 - DNA, 454 bp, Zea mays
  unsure (1)..(454): unsure at all n locations
gggtgcgngtngcctttgatatgagtctcgtagcacctgccgtaccggttcggaattcccgggtcgacccacgcgtccggcgagcaacagcagcgaggtttaccccaattccccatttcccgtagcacggcagacgcgctcccttctgatttctgaatccccgacgccatggcctccgcaccgacgccgccgcccctcctcccggtgaccaaccctgcgtccggatcgtccccggccgccgccggaggctccgatgcgccgatcgctacgccggctttccggctcttcctgagccggatctccgactcggcgcggcgctcgctgtcggatcgccggccgtggggagagctcctcgaccgttcggcgttctcgaagccagactctctctccgacgccacctcccgcctgcgtcgcaacctcgcttacttccgcgtcaactacgccgncgtggtcg

SEQ ID NO: 99275 - DNA, 452 bp, Zea mays
  unsure (1)..(452): unsure at all n locations
tggtgantgtctcaatgaatgcagtacgactgacgtaccggtctcggaattcccgggtcgacccacgcgtccgccacgcgtccggctcgctcgtcccagctgtatcaggtcgagcacctagtagcgacctgctcgatcatcagtgtagagtgtcggtaggtgtctgtctctcttggtggctggttgcaacggtcatggcgacgtcgtctcgtcgggtgcccttgctgctgctgtccctgggcgtgctggtgtcctgctccttcgcggcgggcagcttggaccaggagctggacatcacgtggggcgacgggcggggcaaggtccttgacaacgggcggctgctgacgctgtcgctggaccgcacgtccggctccgggttccagtcccggcacgagtacctgttcggcaagatcgacatgcagctgcggctggtgccgggcaactccgccggg

SEQ ID NO: 99276 - DNA, 453 bp, Zea mays
  unsure (1)..(453): unsure at all n locations
ngatgctgtngctctccctgagatcagtagcactgacgtaccggtccggaattcccgggtcgacccacgcgtccgcacgagcgattgcggcggcggaagtaagatgcgatggggcactccaacgtgtggaactcgcaccccaagaactacgggcccggatcccgcgtctgccgggtctgtgcgaaccctcatggactgatcaggaagtacgggctgatgtgctgcaggcagtgcttccgcagcaacgccaaggacattggcttcatcaagtaccgctgaagtcagctgggcgggctatctgaatgccatctcttggacagtgtagtagaggcgatgccacaattttaattactgtcatttagatgttcccttcagaactctgctatttaagtccgccatgtttgtgatggagaactgaagctttgtttgttatactgattatgagttacctgg

SEQ ID NO: 99277 - DNA, 457 bp, Zea mays
  unsure (1)..(457): unsure at all n locations
tgagtatgcntnatagcattgagctgagatccgataggacctgccgtaccggttcggaattcccgggtcgacccacgcgtccgggcttctcctcccccaccggttcgtgtttttgttctggttcgtgggcgagagggaagagatggcggcgtcggacgttgagtaccgttgcttcgttggcggcctcgcctgggccaccgacgaccactccctcaacaacgccttcagcacctacggcgaggtcctcgagtcgaagatcatcctggatcgggagacgcagaggtcccgcggcttcggcttcgtcaccttctccacggaggacgcgatgcgcagcgccatcgagggcatgaacggcaaggagctcgacggccgcaacatcaccgttaacgaggcccagtcccgcggcggccgtggaggcggcggtggcggatacggtggcgggcgccgtgatggaggc

SEQ ID NO: 99278 - DNA, 550 bp, Zea mays
  unsure (1)..(550): unsure at all n locations
tgtatggatgtgtcccatgaggcctaaggccntacgtaccgctccggaattcccgggtcgacccacgcgtccgcccacgcgtccgcggacgcgtgggcgaggtgctaccgcatcgccggcggcccgctcggcgaggtcgtcgacccgctctaccccggcggcagcttcgacccgctcggcctcgccgacgaccccgaggccttcgccgagctcaaggtcaaggagctcaagaacggccgcctcgccatgttctccatgttcggattcttcgtccaggccatcgtcaccgggaagggcccgctcgagaacctcgctgaccacattgccgaccccgtcaacaacaacgcttgggcctacgccaccaacttcgtccccggcaagtgagggaggcgccgncggtgacctttaggtgtccggatgcatgtgagcgcacgctggttttcggtttggaccatgatgtaaactatgggtcaatcgacaaggaataattgtgttcattggcaaaaaaaaaaaaanaaaaananaaaaaaaaaaannaaaaaaaaataaa

SEQ ID NO: 99279 - DNA, 553 bp, Zea mays
  unsure (1)..(553): unsure at all n locations
agtatgcggtgctacccatgatnacctacggcactacgtaccgctctggaattcccgggtcgacccacgcgtccgattcgcgggagcccagatgtgaaatgggatagcatcaaaggactggaaaatgcaaaacgccttctaaaagaggctgttgtcatgcccataaagtacccaaaatacttcactggtctcctttctccatggaaaggcatcttactttttggccccccagggacaggaaagacaatgctggcaaaagcggtcgctactgagtgcaaaaccaccttcttcaacatttcagcatcatcaattgtcagcaaatggcgtggagattcagagaagcttgtcaaagttctgtttgagcttgctaggcatcatgcaccatccacaatattccttgatgaaatagatgctatcatcagccagcgtggtgaagctcgcagtgagcatgaagctagtcgtcgcttgaagactgagctacttattcagatggatggtttgacaaagacaaacgacttgggtattggacttgcagctacaaaattttcctggg

SEQ ID NO: 99280 - DNA, 452 bp, Zea mays
tgaggtgtggctaggcctgagatgagtactactgacgtaccggtccggaattcccgggtcgacccacgcgtccggctcaagttctcgcgcccacagccaaatttttctccactcaatcgcggcataagctgcactgcagccatggacgccagcggagccggtagcaaggcgaagaagggggcggctgggcgcaaggctggcggccccaggaagaagtcggtgtcgcggtccgtcaaggccgggctgcagttccccgtcggccggatcgggcgctacctcaagaaggggcggtacgcgcagcgcgtgggcaccggcgcccccgtctatctcgccgccgtgcttgagtacctcgccgccgaggtgctggagctggccgggaacgcggcgaaggacaacaagaagacgcgcatcgtcccgcgacacttgctcctggcgattcgtaacgacgttga

SEQ ID NO: 99281 - DNA, 453 bp, Zea mays
  unsure (1)..(453): unsure at all n locations
ggagtatgcnantagacttgagatcgaatgcagtaggaccgacgtaccggttcggaattcccgggtcgacccacgcgtccgcttgatcctcctggaaatacaggacaccctgaagtcaccgccggccgagaacaagacgatgaagagggcgtcgatgatctcgatcctcgtcacgacattcttctacctctgctgcggctgcttgggctacgccgccttcggcagcgacgcgccgggcaacctccttaccggcttcggcttgtacggtccgtactggctcatcgacttcgccaacgcgtgcatcatcctccacctgctgggcgggtaccaggtgtacagccagccgatattccagttcgcggagcggctcttggcggagcggttcccggacagcgggttcgtgaacggcggctcctacaccgtccggttcgcgtgcctgcgggcgtgccgggt

SEQ ID NO: 99282 - DNA, 550 bp, Zea mays
  unsure (1)..(550): unsure at all n locations
gagtggagtcgctcccgctgaggactacagtcngtacgaaccgctcttgaattcccgggtcgacccacgcgtccggaggtgggttggcttctcctccccctccgtttcgggttcgggttcgtgaggttctccggggttcggtttcgtgggtgagcggatcgagatggcggcgtcggatgttgagtaccgctgcttcgtcggcggcctcgcctgggccacggacgaccactccctccacaacgccttcagcacctacggcgaggtcctcgagtccaagatcatcctcgatcgggagacgcagaggtcccgcggcttcggcttcgtcaccttctccacggaggaggcgatgcggaacgccatcgagggcatgaacggcaaggagctggacggccgcaacatcaccgtcaacgaggcccagtcccgcggcggtcgtggaggctgcagcngctgccggtactgtggtggccgtggaggctgcggctacggccggtgccgctgctaccgttggtgccggcgcggctaccgtggtnngtgccgacggtacgccgtt

SEQ ID NO: 99283 - DNA, 453 bp, Zea mays
gtcggtgtgtacactgaatgcagtcgatcgacgtaccggttcggaattcccgggtcgacccacgcgtccgcaaggataaggacacaaaggagaacaaggggttcgcctttgtcaccttcatggacaaggaggctgcgcagcgcgccatcgaggatgtgcaagacagggagttcaaggggaggactttgcggtgctctctgtcgcaggcaaagcacaggctgtttgttgggaatgtgcccaaggggctgagcgaggaggagcttaccaacactatcaaggggaagggtccaggtgttatcaacattgagatgtttaaggatcagcatgacccaaaccgtaaccgtggcttcctctttgttgagtattacaaccatgcctgcgcagactatgccaggcagaaactttcatctccaaacttcaaggttgatgggagccagttgactgttagttggg

SEQ ID NO: 99284 - DNA, 454 bp, Zea mays
gctgctgttgttcatgaactgcgtacgatcgacgtaccggttcggaattcccgggtcgacccacgcgtccgcggaccaccggtgacctacccgccgatcaccggccctccaacaacgccgcctgttgtcggcccaccggtgacctacccaccgatcactggcccgcctgcgacgacgcccccggtcaccggtccgcccgtgacctaccctcccggcggaggcgggggaagctcgacgccgtgcccgccgccaccgagcccgacgccgacgccgtcgtcgcctacgtgcccggctgactcgctgaagctgggcgcgtgcgtggacctgctgggcgggctggtgcatatcggcctcggcgaccccgtggtgaacaagtgctgcccggtgctggaggggctggtggagctggaggcggccgtgtgcctctgcaccaccatcaagctcaggctcctca

SEQ ID NO: 99285 - DNA, 452 bp, Zea mays
  unsure (1)..(452): unsure at all n locations
gaaggtgtcanntcccattggatcgaatccaataggactgccgtaccggttcggaattcccgggtcgacccacgcgtccgtgctcttcaggcagcatcggccttggcacttgaggttggtgacaaagcttctgaaaagcttttttgggacaaatatgagaaggccaagtttgtctatagcaagctgtggaacggttcttacttcagttatgatgatggcgacaacaaaatgagcacatctatccaagcagatcaattggctggacaatggtatgccaaagcctgtggtctcttcccaattgttgacaaagacaaggcacaaagtgcgctagagaagatatattctttcaatgtgatgaagttcaagggtggtacaaggggagccatgaatgggatgtggccagatggcactgtggacatgtctgcaatgcaatctagggagatatggccagg

SEQ ID NO: 99286 - DNA, 456 bp, Zea mays
  unsure (1)..(456): unsure at all n locations
gaggtantttatcactggatgcaatccgttaggaccgccgtaccggttcggaattcccgggtcgacccacgcgtccgcaacgtgttcgacgccaacttcgacacgctggtgtcggcgctcaagagggtcgggctcggccacctgccggtcatgatcggcgaggtcggctggccgacggacggcgacaggcacgccacggcggccctcgcggagcgcttctacgcggggctcctccagcggctcgcggccaggagaggcacgccgctccggcccggcgcgcgcatcgaggcctacctgttcgggctcgtggacgaggacgccaagagcgtggcgccgggcaacttcgagcgccactggggaatcttcaccttcgacgggcggcccaagttcccgctggacctgcgcggcgacgggcggccggcgatgcccgtcccggcccggngcgtggagtacctn

SEQ ID NO: 99287 - DNA, 445 bp, Zea mays
  unsure (1)..(445): unsure at all n locations
agagtnnntttcatgaaatgaatctgttaggactgacgtaccggttcggaattcccgggtcgacccacgcgtccggacctcttcaaggccgctgcggccgactgtcgcgacacgctcttctgcgaggtggctccgaacccgccgccgcgggaggagctgccggagccactgaggaacgtgatgctggagtacggcgcggcggtgacgaagctggcgcggttcgtgttcgagctgctgtccgagtccctcggcatgcccagcgaccacctgtacgagatggagtgcatgcagaacctgaacgtggtgtgccagtactacccgccgtgcccggagccgcaccgcaccgtgggcgtcaagaggcacacggaccctggcttcttcaccatcctcctgcaggacggcatgggcggcctgcaggtgcgcctcggcaacaacgggcagagcg

SEQ ID NO: 99288 - DNA, 456 bp, Zea mays
  unsure (1)..(456): unsure at all n locations
tgggccnnnttnccttgaactgaatccgttagacctgcggtaccggttcggaattcccgggtcgacccacgcgtccggttcgttttcaggaaacggcacggaacatggatcttggaggtgcatctagccgcaggtcacggtcaattcacttgacaagctcactttccaccaaatctctcagcctcaggtctggaagtctaaagaatctcagctatcagtacagtactggagcagatggtcgcattgagatgatttctaatgctgataatgaccgcaaatacccagcgccacgtggctacttcttcaagcttctgaaactgaacgcacctgaatggccatatgcagtgttgggggccattggttctgtcctctcaggatttattggcccaacttttgccattgttatgggcgaaatgcttgatgtgttttactacagggaccccaatgaaattgaga

SEQ ID NO: 99289 - DNA, 549 bp, Zea mays
  unsure (1)..(549): unsure at all n locations
tgtaggagtggtccccatgagncacgaaggcactacgtaccgctccggaattcccgggtcgacccacgcgtccgccggccttccccctctcgtcacttatggtgcccagccgctcgctgcgcaactactagcgcaccgtcccctcctcagccatggccgcggcgtcgttcgcccgcgccttatgtctccacatgctcctcctcttcctcgtggttggctcggcgcgctgcaagacggtgaagagagacgtgaaagcattgaatgagatcaaatcttcactaggctggagagttgtatactcatgggtcggtgatgatccttgtgggcatggtgatctacccccctggtctggtgtgacatgttctcagcaaggggattacagagttgtgacggaactggaagtctatgctgtatcaatagttggccctttcccaacagcagtaactaacctggtggatctaagaagattggatctccacaataacaaggtgacaggacccaattccccacaaattggaccggtgaaacatctcaggatatttgaccctg

SEQ ID NO: 99290 - DNA, 548 bp, Zea mays
agtaggatgtgtgtccatgagcactaaggcactacgtaccgctctggaattcccgggtcgacccacgcgtccgcggacgcgtgggcggacgcgtggggggcttaattaggcggaaagattataattgacaacattgacatctctgcaattggccttcatgatctgcggtcacggttgagcatcattccccaagaccctacattatttgagggtactatcagaatgaaccttgatcctcttgaagagtgcactgatcaagaaatttgggaggcactagaaaagtgtcagctaggagaggtcattcgttccaaggaagagaaacttgacagtccagtgctagaaaacggggataactggagcgtgggacagcgccaacttattgcactgggtagggcgctgctcaagcaggcaaaaattttggtactcgatgaggcgacagcatctgttgacacagcaacagacaatcttatccaaaagataatccgcagtgaattcaaggactgcacagtctgtaccaatgctcaccggatatccaccggtattgacag

SEQ ID NO: 99291 - DNA, 448 bp, Zea mays
ggatgatgtggttccactgaaatcagtgcactgacgtaccggtccggaattcccgggtcgacccacgcgtccgccgggtgtccccggccatcgaccacctcgacgcgtacgactccaacccgctgcagctcggcctggccgtagtggaccgcctcaacgctctccaggaggagaccgggcggctggcctacctgcacgtgacgcagccacggtacacggcgtacgggcagacggagtccggccagcacgggagcgccgaggaggagagccggctgatgcgcgccctgcggggcgcctaccgcggcacgttcatgtgcagcggtgggtacacgcgcgagctcggcgtggaggccgtcgagtcgtgggacgccgacctggtgtcctacgggcggctgttcatcgctaacccggacctggtggagcggttccggcgcgacgccccgctgaa

SEQ ID NO: 99292 - DNA, 449 bp, Zea mays
  unsure (1)..(449): unsure at all n locations
gtatgcaantgggcttgagatcgaatccaatagcactgacgtaccggttcggaattcccgggtcgacccacgcgtccgtgaaatgcaccatgaggctctccaggaggtccttcctggtgacaatgttggcttcaatgttaagaatgttgctgtgaaggatctgaagcgtgggtatgtggcctccaactccaaggatgaccctgccaaggaggctgctagcttcacgtcccaggtcatcatcatgaaccaccctgggcagattggcaacggctatgccccagtgctggactgccacacctcgcacattgctgtcaagtttgcggagctcattaccaagattgataggcggtctggcaaagagcttgagaaggagcccaaattcctcaagaatggtgatgctggtatggtgaagatggttcccactaagcccatggtagtggagacctttt

SEQ ID NO: 99293 - DNA, 452 bp, Zea mays
atgctgctaggcctacctgaatgcatagcactgcggtaccggttcggaattcccgggtcgacccacgcgtccgggtgttcctggtccaccttgccaccatctccattactggcactggcatcaacccagctaggagccttggcgctgccatcatctacaacagggatcacgcctggaacgaccattggatcttctgggtcggccccttcattggcgctgctctggctgccatctaccaccaggtgatcatcagagccatcccgttcaagagcaggtcttaagctgccgtggccgtgccgagacatgccagtccgaagaacgggcgtcttcctgtgatgtcttcttgtctgcccacgcctagtttctctgtcgattcctattcgtcgtctcttcagggctggtgctcactgctgcgccgttctgttaaccgaaacaagaactctgtgtattcc

SEQ ID NO: 99294 - DNA, 462 bp, Zea mays
  unsure (1)..(462): unsure at all n locations
tgtggtnngtantcaactgacgtgcgctcgaatagtctcgncggtaccggttcggaattcccgggtcgacccacgcgtccggttcttcccctccgatccgatgtccccatctgcgctcccgtcggcgatcaaacaccggatcgcggcactcgccgccgttgaggaggaggtttccggcgctgcttccagcgccttgccgtcagcaccatgaggaagaagctggacacgcgtttccccgctcctcggattaaaaagatcatgcaaacagatgaagacgtcggcaagattgctcaagctgtacctgttctagtgtccaaagcattggagctatttctgcaagatttatgtgataggacatatgatattacaattcggaagggggtcaagactgtgggttcttcccatttgaaacaatgcatacaaacgtacaacgtctatgacttcttgagggaagtagtcagc

SEQ ID NO: 99295 - DNA, 551 bp, Zea mays
  unsure (1)..(551): unsure at all n locations
tggaggagtcgtnatccatgagnatcgatcgctnttgcgaaccgctttggaattcccgggtcgacccacgcgtccgcttccccgcacccaacccccgtcggagagtgagatggcatcggtggcggagatgcagcccctcgcgccggcggggtaccgccgcgcgccggagatgaaggagaaggtggaggcgtcggtggtggacctggaggccggcaccggggagacgctgtacccggggatctcgcgcggggagagcgccctccgatggggcttcgtccgcaaggtctacggcatcctcgctgcgcagctgctcctcaccaccgccgtctccgccctcaccgttctccaccccaccctcaacgccacgctctccgactccccgggcctcgcgctcgtgctcgccgtcctgcccttcatcctgatgatcccattgtatcattatcagcacaagcacccacacaatttcgttttcctgggtctgttcacgttgtgcttgagcttcagcatcngtgtggcttgtgctaacacccaagggaaaatcggtctggagc

SEQ ID NO: 99296 - DNA, 550 bp, Zea mays
  unsure (1)..(550): unsure at all n locations
cgtaggattcgtcttcgctgagnctcgtaggccttacgtaccgctctcggaattcccgggtcgacccacgcgtccgcttatctacaagcatgctgtgcctgttcctaagtctgagtgcagcaagactacccagttgggtattagctttgctggtggttacgttgccggtgtcttctgtgctattgtttctcacccggctgacaaccttgtgtctttcctgaacaatgccaagggagctacagtgggagatgctgttaagaagcttggtctctggggtctcttcactagaggacttcctcttcgtatcgtcatgattggtacccttactggtgctcagtggggaatttacgatgcattcaaagtgatggttggactcccaacaacgggaggtgttacacctgccccagcagcagaggctggattgaaagccagtgcttgatttttttttctgtgttccctgagatcatatttggtagagtggaattgtatcagccagtcgagagcttagttcccgaatctttttttaatcgtaacgggaaatttgtccggc

SEQ ID NO: 99297 - DNA, 456 bp, Zea mays
  unsure (1)..(456): unsure at all n locations
tggccnncnnnncactggatgactacgtatgacgtaccggtctcggaattcccgggtcgacccacgcgtccggggagggcatggacgagatggagttcaccgaggccgagagcaacatgaacgacctcgtgtccgagtaccagcagtaccaggacgccaccgccgacgaggagggcgagtacgaggacgaggaggagggagatctccaggactagaataggctgcttcacattcagtcaccgtcagtcatgaaaaactaatcatttgctgcttttcgtcgtcgtagtagtagtaggtcggtaatcatctgtcgtgggtttgtttcgtttctatcattaatcagcattagtagtagcagctgctgctgcgggggcacaacacaagggggggataggaactgcaataccctgttgcgctttggttgtttctggaaccgatgttatgttaaattctcaa

SEQ ID NO: 99298 - DNA, 450 bp, Zea mays
  unsure (1)..(450): unsure at all n locations
tgttggnttgtctccctgagatcaatagcactgacgtaccggtctcggaattcccgggtcgacccacgcgtccgcccacgcgtccgggacttcccggaccccaagccgtcgcgcgaagagatgatcgagacatacctccagactctcgccaaggtcgtcgggagttatgaggaggccaagaagaggatgtatgcttttagtacgacgacttatgttggttttcaggctgtaatgaccgaggaaatgtcagaaaaatttcgcggtttgcctggagtagttttcattttgcctgattcatatctatatccagaaacaaaggagtacggaggagacaaatatgacaatggtgtcatcactccaagaccaccacctgttcattatagcagaccatcaagaactgacaggaaccgtaactaccgaggaaactaccaggatggcccttcacagcan

SEQ ID NO: 99299 - DNA, 458 bp, Zea mays
  unsure (1)..(458): unsure at all n locations
agggtnngtgtgcctgatatgactgcagtaggaccgcggtaccggttcggaattcccgggtcgacccacgcgtccgctctccttcccgagcaggaggcggacaatgtaagcagcaatcgcaggaaccctagcgccgccgcacccgcaggaatgggtatcgacctcgtcgccggtgggaggaataagaagaccaagcgcactgcgcccaagtctgacgatgtctacctcaagctcctcgtcaagctctaccgtttcttggtcaggaggaccaagagcaatttcaacgctgtcattctcaagaggcttttcatgagtaaaaccaaccgaccaccaatctccatgcgccgccttgtcaagtttatggaaggaaaggagaagaacattgctgtcattgttggcacagtcacagatgacaaaaggatccaggaggttccagcaatgaaggttactgccctgan

SEQ ID NO: 99300 - DNA, 450 bp, Zea mays
  unsure (1)..(450): unsure at all n locations
atgtgcgntcgtcatgacatgaatctcaataggactgacgtaccggttcggaattcccgggtcgacccacgcgtccgaaaaatataaagcaataaataaagagcagtcgggttaataaaactgagaaaattgactcggaaaaaaaaattggaagctccattgcaggattcaaacctaaccattaaaggagaagctgtgggaacgacaaaacctatgactacataggattttattgaaaagaatcctaacacttcattgggtgggatggcggaacaaaccaaaaaaattgctttatttgataaggttctaaattaacaaataagacaggaaagagtaaatattcgcccgcgaaatccttattggattagaatactttaccacgattcaataagaataaaaaaaaaggagattccaaaaaaggaaggattacattttatataaatattgaat

SEQ ID NO: 99301 - DNA, 553 bp, Zea mays
tgtagcatattgctgccgctgagcactgatggccgtacgtaccgctctggaattcccgggtcgacccacgcgtccggccacgcgtgcggccacgcgtacgcccacgtgtccggttctgctcgacggagaccacaaccgttacgtctcagactacgggctgagctcgttgacgagccttccgatcaccacttcccgagctgtcgctggctaccgagctcaggagaccttcgaatcgaggaagttcacccacaagtccgacgtgtacggcttcggcgtcctgctcatggagacgctgacgggcaaggccccgcttcagtcacagggtcaggacgacgccgtcgacctaccgaggtgggtgcattccgtggtccgcgaggagtggaccgctgaagtgtttgacgtccagctgatgaagtatcccaacatagaagacgagctggtgcagatgctccgtatcgccatggagtgcacggcgtggtcttccgaccggcgtcccacgattgcgcaaggcggtaagattgtggaggagcttcggcactctggttccggaagc

SEQ ID NO: 99302 - DNA, 554 bp, Zea mays
  unsure (1)..(554): unsure at all n locations
aggaggagncngtctcgactgaggcactagagctcttagcgaaccgctctggaattcccgggtcgacccacgcgtccgcccacgcgtccgcaatgtgctacaaataattaaattaaaaccaaaagaccccggcgcggaggtgatcgcgctgtcgccgcgcacgctggtggcgacgaaccggttcgtgtgcgagatctgcaacaaggggttccagcgggaccagaacctgcagctgcaccgccggggccacaacctcccctggaagctccgccagcgcagcagcctcgtcgccccgtcgtcggcggcggcaggctccggcggcaggcagcagcagcagggcgaggccgcgccgccgcgtaagcgcgtctacgtctgccccgagcccacgtgcgtgcaccacgacccggcgagagctctgggggacttgactgggatcaagaagcacttctcgcggaagcacggggagaagcggtggtgctgcgagcgctgcnggaagcgctacgccgtgcaatcggactggaaggcgcacgttaaggggtgtggcacgcgccagt

SEQ ID NO: 99303 - DNA, 543 bp, Zea mays
  unsure (1)..(543): unsure at all n locations
ngatgggaaaaatcctgaaactgtacgaccgtcgtaccggtccggaattcccgggtcgacccacgcgtccggtcgtcctcctagctcctctactcgccagtcgccatgggcaagattaagatcggaatcaacggcttcggaaggatcggcaggctcgtggccagggtcgccctccagagcgaggatgtcgagctcgtcgccgtcaacgaccccttcatcaccacggactacatgacctacatgttcaagtacgacaccgtccacggccactggaagcacagcgacatcacactcaaggactccaagacccttctcttcggtgacaagccggtcaccgtctttggcatcaggaaccctgaggaaatcccgtggggtgaggctggcgctgagtatgtcgtggagtccaccggcgtcttcactgacaatgacaaggctgctgcacatctcaagggtggtgcccagaagggtggtaatcttgccccaaggcaagatgccccatggttgtggtggtgtcatgaggaccggtcaccttggatgtaacat

SEQ ID NO: 99304 - DNA, 546 bp, Zea mays
  unsure (1)..(546): unsure at all n locations
tgggaaannnnattgaaaacgatagccctagcactgaggtaccggttcggaattcccgggtcgacccacgcgtccgcccacgcgtccgcccacgcgtccgcccactcgtccgcccacgcgtccgcggacgcgtgggtcgcctctacatttcttctctctctgctcctccgcctccgcctgatccatccaagacagggatcgccatgtcggactcggaggagcaccacttcgaatcgaaggccgacgctggggcgtccaagacctacccgcagcaggctggcaccgtccgtaagaacggcttcatcgtcatcaagaaccgtccctgcaaggttgtggaggtttctacctccaagactggtaagcatggccacgccaaatgccactttgtgcgcatagacatattcaatgggaaaaagcttgaagatattgttccttcatcacacaactgtgacattccgcatgtgaaccgtactgagtatcagctgattgatatttctgaggatggatttgtgagcccttctactttaaagggcacacttaggatgg

SEQ ID NO: 99305 - DNA, 559 bp, Zea mays
  unsure (1)..(559): unsure at all n locations
tgaggggnnnccncccctgagaatcgatactcgatagcactgacgtaccggtctcggaattcccgggtcgacccacgcgtccgcggacgcgtgggctccgccagtacgacggttcagaccctaagaagccgctcctcatggccatcaagggccagatctacgacgtcacccagagcagaatgttctatggacccggcggaccttatgccctgttcgccggcaaagatgccagcagagctctagcaaagatgtcgttcgagccacaggacctcaccggcgacgtctcgggcctaggcccgtttgagctcgacgccctgcaggactgggagtacaagttcatgagcaagtacgtgaaggtcggcacggtcaagaagagcgtccctgtggaaggcggcagcaccgcgagcaccactgaggctgagaaggcgccgacaaccgaagagaagccaagcggngcggtggttgaggagaaggaagccgtggctaatgaaggtgcccaggaaaactagagcttttctgtgcatgccggcataattcgacatggtcccatttgggtctt

SEQ ID NO: 99306 - DNA, 558 bp, Zea mays
  unsure (1)..(558): unsure at all n locations
gggtggatgtcgtnttgcctgaccctcgattgctcgtaggactgcccgtaccggtccggaattcccgggtcgacccacgcgtccgcgcccgctgctccccgccgacgccttcgaccgcgcgctcgcgcggttctggtgccacttcgccgacgacaagctcgggccggcggtgggcgcggtgttcgcgtcgacgggggagggccaggaggcggcggtgcggcaggtgcacgagaacctggcgctgatcgagtccgagctccgcgacggcgcgttccggggccgccgcttcttcggcggcgacgaggtgggcctgctggacgtcgtcctgggctgcggctcctactggctcgccgtgttcgaggaggtgaccggggtgcgcctcgtggacgccgacgccttcccgcgcttccacgcctggctgcgcgacttcgaggccctggacgaggtccgggagaccattcccgcggtggaccgnctgctcgagtacgcgcgcgggcttcgncacatgcttgntcggnctcgccggggcccggcgccggcgccggcgccgacactccc

SEQ ID NO: 99307 - DNA, 553 bp, Zea mays
  unsure (1)..(553): unsure at all n locations
ngaggtgtggtctcgatgagnctgatngcactngcactgacgtaccggtccggaattcccgggtcgacccacgcgtccgcaacatctacctcaacttcgacgccttccacggcgacaaggaccacggcggcgtgcgcgacggcaccaacatcgtgctctggaagtggtgcgagggcgacaaccagcgctggaagatcgtcccctggtaaatgtgctgttctgtggctgcactggtcatcaccatgatctggagctttgaaggcatagccacctgtggtcagcagctgctgccgtgttgttagaataaagttggtggcgatcgatcgatctgtggtgatgagtgtccctatctgtgtgtttgtgtttagttccagtcgtctgtgaggaagtcagttatgtttgagtgagaggggtacttcgctcttcggtgaacactgtacttgtcatgaggagagttttcatacccggagtgtangaactctgtactgtactcggatccttcctttntcatcgaagtgggttttattttaaaaaanannannnnaaaaaaaaa

SEQ ID NO: 99308 - DNA, 549 bp, Zea mays
  unsure (1)..(549): unsure at all n locations
agtatgtgtgctcttggctgatnatcgatagctactacgtaccggtctcggaattcccgggtcgacccacgcgtccgcccacgcgtccgcccacgcgtccggttggtgatcctcagccttcggaggagtcgtgagtgcatacttcagtggttctttagtggatacttatggtgtaagatttgtttttggtgttacagcacttctgccactgatgacatctgctgttgcagttcttgtaaatgaagaacgcttacctttggggaaaagttcagtctcactttcagttccaagttcagaattaattgagagctctaagaaacgtatcatgcagatttgggattcagtaaagcaacccagcatactcctacccaccttgttcatattcctttggctagcaacaccgcaatcagactctgccatgnttttcttcataacaaataagctcgggtttactccagaatttttaggacgtgttacgcttgtcacaatctgtgcattcttactgggaatcggagtgtataatntgtttctgaaggaagttcattgagg

SEQ ID NO: 99309 - DNA, 552 bp, Zea mays
  unsure (1)..(552): unsure at all n locations
nggtgatgcgctattcgctgatatttgatagcnctagcactgccgtaccggttcggaattcccgggtcgacccacgcgtccgttgcagtagtaaccatgaatttactaaggtgtgataacaacagtatgtaaatactctggcgcgacattagttcgacaggaaatgttccaattctttcttcggttgaaatcaagaacaagtcaggtacagtgaaaagttcacaacggaagtggagggcaaattcactgcaccatgggatcagggttcccggcagcaagaatatcaagcaacgagttctggggctccagctcgtcgtgccacaggggtagcttgtcgccagggtagaagttcctattcacgccatccgcatttattgtaactgtacggacaactcctccgctagcaccatcacgggccatagcaagggaaactaccttcaccacaaatttctctgcctcttnctggctcattccctctttccattcatgatcaagaagtgcataaagataactggaaccttgagccttcaattgcaaatggtggcttaaagt

SEQ ID NO: 99310 - DNA, 553 bp, Zea mays
  unsure (1)..(553): unsure at all n locations
tgtaggagccgccctgcttgaccatgagactcataggactgacgtaccggtccggaattcccgggtcgacccacgcgtccgcccacgcgtccggtgctggccgtgtgcgccttcacggcggcggaggggttcgacatcctgcagatcctggggaagcacgacgagttctcgcagttctgcaagctgctcaacgagacgcacctggccggcgacatcaaccgcgaccgcacaatcaccgtgctggccgtggccaacggcgacatgggccacctcgccgccggccactactcgctcggcaccatccgccacatcctcgagctgcacgtcgtcgccgactactacgacgacaagaagctcaagcagctgtcgcacgccgncaccgncgcgtccaccttgttccagcgatccggatttgcccccggcatggcaggatacgtgaacataacgcagcaccgcggcggcaaggtgtcggtcatcgtggacgacgcggcggacagcgtcaagcccgtcacctacgtgaagcagatcgagagccaccggtacgactactcgg

SEQ ID NO: 99311 - DNA, 551 bp, Zea mays
  unsure (1)..(551): unsure at all n locations
tgagtagtgctctcatgagcatgatactcatagcactgccgtaccggttcggaattcccgggtcgacccacgcgtccgcaaatcgcaaagaggcgtcttccaagcttgtagggttaccggatcggaggagcatccccgcctaggtcaccacagccatggttcgcggatcgctaggcaagcttgcgtcgcgcgccctctccgtcgccgggagatggcagcaccagcagcttcgccgcctcaacatccacgagtaccagggtgcggagttgatggggaagtacggtatcaacgtacccaggggtgcggcggcggggtccgtacaggaggtcaatgacgccttgaagaacatgttccccagtgagaaagagatagttgttaaaagtcaaatccttgctggtggccgagggctgggaactttcaaaagtgggctgcaaggaggtgtccatattgttaaggctgangaagctgaaagcattgcacgtaaaatgttaggccagattctggtaacgaaacaaactggtccggagggaaagattgtgagcaaggtctac

SEQ ID NO: 99312 - DNA, 547 bp, Zea mays
  unsure (1)..(547): unsure at all n locations
tggatggtgtgtnatggatgatnatcgatagcactggcgtaccggtccggaattcccgggtcgacccacgcgtccggagaaggaaaaatatccccaaaccctagctcccgatctcgatggcgaaccctcgcgtcttcttcgacatgaccgtcggcggcgccccggcgggccggatcgtgatggagctgtacgccaacgaggtgcccaagaccgcggagaacttccgcgcgctgtgcacgggcgagaagggcgtgggcaagtccgggaagccgctccactacaagggctccaccttccaccgcgtcatccccgagttcatgtgccagggcggcgacttcacccgcggcaacggcaccggcggcgagtccatctacggcgagaagttccccgacgagaagttcgtgcgcaagcacaccgtccccggtgtgctctccatggccaacgccgggcccaacaccaacggcttccagttcttcatctgcaccgtcgcgaccccttggctcgacngcaagcacgtcgtcttcggcaggtcgtcgagggcatggac

SEQ ID NO: 99313 - DNA, 542 bp, Zea mays
  unsure (1)..(542): unsure at all n locations
gttgtcgtttgatgataatgatagccgttagcactgccgtaccggttcggaattcccgggtcgacccacgcgtccgccaatggtcacatcctccactttggtagatctaacaactagactagatttcttcaaggagcgaaggtcgcaactgatggaacaacttcatagccttgatttgggacgtggatctgctccgcaaggttttccattcaagccaccctctccttggaaccacccaaggtaggaggatgaccgttcgatttcatgattgtaaattcttcagtagtggttcttttctccccgcctggcgattgcagaaaactgcatatacgagtgtaaatgtattttgctcttcgatatggttttagctttcgtgttgtgcgaggatagctccttaagtgggatgtgtgatatagtcttttctgtataacacgttgtcatggagagatgccttttagacaagtttttccaaaaaaaaaaaantntattaataaattaatttgtaaaatatttatatttgataaaaaaaaggcggccggttt

SEQ ID NO: 99314 - DNA, 540 bp, Zea mays
  unsure (1)..(540): unsure at all n locations
tgattcnaatagctttgacctacgttctgatagcactgccgtaccggttcggaattcccgggtcgacccacgcgtccgcatgaactcctcaagttaaaacttatcctatatatgccatgagaccacaactgcaactcgtacgaataaaattgatatccttttacgttattctagtgttgtttttactcatccctcatattcaaatgaattgaacaaaagtacagaactttattgtttattttctcaacctaacatgcaacatttcatcgttttcgtatccagatgtgtgttgttatctttattggaacaaatggccagacgtatttcatcacggcttcacttgttacaagcatccagaatttcccaaagagcaggggcccaacagtgggcatcctcaaaggatttatgggcctaactagcgccattctgacacaagtttatacagtgatgcacactccagaccatgctgcgcttatcttcatggttgctgttggtccgtcgctggttgccattggcttgatgtttgttattaggcctgtt

SEQ ID NO: 99315 - DNA, 554 bp, Zea mays
  unsure (1)..(554): unsure at all n locations
ggaggtgtcgtgtcgatgataattgatgctcatagcgactgacgtaccggtctcggaattcccgggtcgacccacgcgtccgggcaaaagccaaaaggcatcaccttcgcgacgacgatggcagcctcgctccaagccgcgggcaccctgatgcagccggccaagatcggcggccgggcgccctttgcctcgctgccgtcccgcccgtcgtcgcaactcgcctgcagggcgttcggcgtcgacgccggcgccgacaggatcacgtgctccctgcaggacgtcgccagcaggtgcgtcgacgccgcgaagctcgccggcttcgcgctcgccacctcggcgctcctcgtctcgggcgcgagcgcggagggcacgcccaagaggctgacctacgacgagatccagagcaaaacgtacatggaggtgaagggcacgggcacggcgaaccagtgcccgaccatcgactgcggcgagggagtcgtcccgttcaaggccggcaagtaccagatgaagaagctgtgcctggagccgacgtncttcaacggaaaggcgggggg

SEQ ID NO: 99316 - DNA, 545 bp, Zea mays
  unsure (1)..(545): unsure at all n locations
agagtgggttgctctcgctgagnacgatagcactgacgtaccggtccggaattcccgggtcgacccacgcgtccgcccacgcgtgcgcccacgcgtccgcttactacggtcctctctgtggtctattctgctgtacgcgctggctcctctgcaactgtgctctcgccaccagactcaccacgtgggaccgacaagccattgcttcccttcagcaaggcagacgaacaagaagataagaaggatgtgccgaggccggtgacatactcctactctttctttcacctcatcttctccctggccagcatgtactcggcaatgctcttgactggctggtcaacttcggatggtgagagcggaaagcttgtggatgttgggtggccatctgtctgggtcaggattgcaacccagtgggcgacggcaggtctgttcatatggtcgcttgttgcacccgtactctttcccgacagggaattctaagttcaaccacggtaagcctggagcatcaaacgtgtctactgggggagctaatatatcctatcaaggat

SEQ ID NO: 99317 - DNA, 541 bp, Zea mays
  unsure (1)..(541): unsure at all n locations
tgtatgatcgctgttcctagtactcgtagcactgacgtaccggtccggaattcccgggtcgacccacgcgtccggatggactttgccttcccgtacctgttgctgttcattcgtgaatacactagcaaggtggatgatttagtgaaggacaagattgagtcgcagaaggaagaaagagccaaagagaaggaggagaaagaccttgtggctcagcagaacatgtatgcacagctgcttcctctcgctttgcccgccccgccaatgcctggcatgggtggccctccacctccgatgggcggaatgggcatgcctccgatgggtatgccgccgatgccagcatttgggatgccaccgatgggaagctactgatttggttttgcagcataagtggaacttcattggagttgtagatggttgacagtttggaatcaatattcttcattgtaccaggaaactttttggcgagtgagtgaaatcagtcttacccgtaagttgagaagtgcaacctgtgatattgttacgatgggatctganataagat

SEQ ID NO: 99318 - DNA, 540 bp, Zea mays
  unsure (1)..(540): unsure at all n locations
gaaggtgcntttgctgagatgatgctctagcacgacgtaccggttcggaattcccgggtcgacccacgcgtccgcccacgcgtccgcccacgcgtccgggaaatcactccagaattttgaaaaggtgacggaaatagtgaggagcggagaacaccggaatgatccatcctctcgtgctatccctgccctcccccgctataatatcgcgccctcgtcgccatcgtcaccacaccaccactccctcactgccctctcactcccgatccctgcaccactaccgcctcctccgcgtcacccctctcgtcgcctcttgcggcgaccggcggcggatcgtccgctgcgcaagcgcaaccatggggctcttcaccgtgacgaagaaggccatcacccccttcgaaagccagaagcccggtacctnctgcctncgcaagaaggttactgtattccagcagcctcattatctgcagaactttgtccaggcaacatttcatggcccttctgcagaccatgtaaaagggcatccattggtgtctttggggg

SEQ ID NO: 99319 - DNA, 546 bp, Zea mays
  unsure (1)..(546): unsure at all n locations
gtgagctgcaaataggactgatatcgataccgctagcacctgccgtaccggttcggaattcccgggtcgacccacgcgtccgcccacgcgtccggtgctggccgtgtgcgctttcacggcggcggaggggttcgacatcctgcagatcctggggaagcacgacgagttctcgcagttctgcaagctgctcaacgagacgcacctggccggcgacatcaaccgcgaccgcacaatcaccgtgctggccgtggccaacggcgacatgggccacctcgccgccggccactactcgctcggcaccatccgccacatcctcgagctgcacgtcgtcgccgactactacgacgacaagaagctcaagcagctgtcgcacgccgccaccgncgcgtgcaccttgttccagcgatccggatttgcccccggcatggcaggatacgtgaacataacgcagcaccgcggcggcaaggtgtcgttcatcgtggacgacgcggcggacagcgtcaagcccgtcacctacgtgaagcagatcgagagccaccgctacgg

SEQ ID NO: 99320 - DNA, 550 bp, Zea mays
  unsure (1)..(550): unsure at all n locations
tgtaggtgtcaantggcattgagcatgattgctcgtagcactgacgtaccggttcggaattcccgggtcgacccacgcgtccgccgggacagtttggcatcccggacgccggtcccatcggcgcattgaaggagctggagctcgggaacggccgggacgagtcgtcggtgtccgatccggcgtccggcagcgcggagatggcgctcaacaaggggccttccgacggcaatgcgaagaaacggaaggctagcgggaagggcaaaggcaaggatggccccgggtccgccgccgccaaggaggagtcgagtgggaagcggtgccgatcggcggacgagagcagtggcgcggaggacaacaaccccaccaccaagggcaaggccgcgcagagcagtagcgagaatggtggtggcaagaagcagcaggggaaggagagcgcgacgaagccccccgccgaggcgcccaaggactacatccatgtccgggcgcggcgcggcgaggcgacggacagccacaggctcgcggagagggtgagaagggagaagatcaccct

SEQ ID NO: 99321 - DNA, 540 bp, Zea mays
  unsure (1)..(540): unsure at all n locations
cgatgtgannttgcctgatcacgattgccgatagcactgccgtaccggttcggaattcccgggtcgacccacgcgtccgcaggaaaaaaggcccagaggcagtgccgttaccgattcgagacgcaagagaaggatcgagacgaggcggcggttttccggggcagcatcgtctcggccacgaagatgtcttactcaaggggctcaaggtatggatctcgctcaccttactcgagaagcacaaggtaccgaagtcgctctaggagtgtcgactctagtgatgctgaaaaccctgggaacaacctgtatgtgactggtttgtcggctcgtgtaacggatcgagatctggagaagcacttctccactgagggtgaggtgattgatgcaagcgttgtgtatgatccttggacaagggaatcacgggggtttggttntgttaccatggctgctgttaaagatgcagatcgctgcatcaaatatctggaccgttctgtgttgcaaggtcgggtcataactgttgagaaggtaaatcataagattggn

SEQ ID NO: 99322 - DNA, 557 bp, Zea mays
  unsure (1)..(557): unsure at all n locations
tggatgtagccgntccggcttgacccatgatagctcataggactgacgtaccggtccggaattcccgggtcgacccacgcgtccgcggccatggcggagcgggagcagtaagagcaggtggctagcgacgacgcggcggagtggaagcaggtggcggagctgagggccgtcacccaggcccaggacccttcctgcaaggatgaggacgactacacgctccggcgcttcctccgcgcgcgggaccacaacatcggcaaggcgtcggcgatgctgctcaagtacctcaagtggaagcccgcggccaagccccacggcgccatcgcagcggcggaggtggcgcgggaggcggcgcaggggaagctctacctgcagggccacgaccgggaggggccgcccctcatctacggcttcggcgcgcgccaccacccggcgcgcagggacctcgacgagttcaagcgctacgtcgtccacgttctcgacgccaccgtcgcgcgcctgcccccttctncttcttcttcgggagatgctcgccaggaaaagttcggcgncgtcggccg

SEQ ID NO: 99323 - DNA, 555 bp, Zea mays
  unsure (1)..(555): unsure at all n locations
gggatgtagccgntntggcttgacccacgatngctcatagcgacgacgtaccggtccggaattcccgggtcgacccacgcgtccgctttccacaagaacatcacacggcgatagcaaaaccttccgtcggaggatggcttccgccggcgctggagaaggcaaggagacggggacggctgccgggagcagcctccacagcaagactctcctcaagagccaaccactgtaccagtacatactggaatccaccgtcttcccacgcgagccggactgcctgcgggagctccgcgtcgccaccgccacccaccccatggcgggcatggctgcgtcgccggacgaggtgcagctgctgcagctcctgatcgagattcttggcgccaagaacgccatcgaggttggcgtcttcaccgggtactcgctgctcgccaaccgcctcgccctccccgacgacggcaagattgtggccatcgacgttacccgcgagagctacgaccagattgggtcgcccgtgatcgagaaggccggcgtggcgcacaagatcgacttncgcgtcgg

SEQ ID NO: 99324 - DNA, 545 bp, Zea mays
  unsure (1)..(545): unsure at all n locations
cgtatggtgtgctttcgctgaagacgatagcactgacgaacccgtccggaattcccgggtcgacccacgcgtccgggtggacggacggtgctggcatcgccaattcaacttcgcatctgcatcggcagcgcgccagctccataggaggagatggcgctcacaagaatcggtcttgctggccttgcggtcatggggcagaaccttgccctcaacattgcagagaaagggttccccatctctgtgtacaacaggacaacctccaaggtggacgagaccgtgcagcgtgccaaggcagaaggaaaccttcccgtctacggcttccatgaccccgcgtcctttgtgaagtccattcagaagccacgggtggtgatcatgctcgtcaaggccggcgcgccagttgaccagaccatcgcgacgctcgcagctcacttggagcagggcgactgcatcatcgatagggggaacgagtggtacgaggacacggagaggagggagaaagtctgtangagccgcgncttccggatcttggcatgggtgtctctggn

SEQ ID NO: 99325 - DNA, 540 bp, Zea mays
  unsure (1)..(540): unsure at all n locations
cgttcgtngtgtctctatgaaactcgtagcactgacgtaccggtccggaattcccgggtcgacccacgcgtccggcggcggcgagttcgctgccaaggactacacggaccctcccccggcgccgctgatcgacgcggctgagctggggtcctggtcgctgtaccgcgccgtgatcgccgagttcatcgccacgctgctgttcctgtacatcacggtggccaccgtgatcgggtacaagcaccagacggacgcgtcggcgtcgggtgccgacgcggcgtgcggcggcgtgggggtgctgggcatcgcctgggccttcggcggcatgatcttcgtcctcgtctactgcaccggcggcatctcggggggccacatcaaccccgccgtcaccttcggcctcttcctggcgcgcaaggtctccctggtgcgcgcgctgctctacatcgtggcgcantgcctcggcgccatctgcggcgtcggcctcgtaaggcgttccagagcgcctacttcgacagggaccgcggcggcgcccactcgctcgct

SEQ ID NO: 99326 - DNA, 546 bp, Zea mays
gtatggatcgcctattgatgataattagtaggactgacgtaccggtccggaattcccgggtcgacccacgcgtccgcccacgcgtccggacgagttgaaggacattaatgaccaacctcatggaacatgggaggaggtgtacagaaatgtgaaaagggtagataggttaaaaaatgaattgcatgaaagagatgacaaggagcttgagcggacaggtcagccactttgtatatatgagccttttttcggggaggggacctggccatttctgcaccagagctctctttatcgtggagttggcctgtcttcaaaaggtcgaagaccaggagcagatgatattgatgcttcttctcgtcttccacttctcaacaatgtttactacagagatattcttggtgaatttggagctttctttgctcttgccaacagaattgaccgaatacacaaaaattcttggatagggtttcagtcctggaaaggtacagcaagaaaggcaaacttatcagacaatgccgaatttgctatcctagaaactgttcaatctca

SEQ ID NO: 99327 - DNA, 542 bp, Zea mays
  unsure (1)..(542): unsure at all n locations
gttatgtgtgtcttcatgatactcgtagcactgacgtaccggtccggaattcccgggtcgacccacgcgtccgacaggcttagcactcaggtaaaacctcttatctgggtcgaagcacagattgagaaacattctagaagccgtatagaactcatggtgaaggcaaggagtcagttcaaggaaagaagcacagcaacaaatgttgaaattgaagtgcctgttccttcagatgccacaaacccaaatataagaacttcaatgggttctgctgcatatgctcctgagagagatgcaatggtctggaaagtaaaatcattccctggtggcaaggaatacatgtgcagagcagaatttagtcttcctagcataacagcggaagaaggggccccagaaaagaaggcaccaatacgagtgaaatttgagataccatatttcaccgtatcaggtattcaggttccgtatctgaagataattgaaaagagtggttaccaggcactcccctgggttagatatatcacaatgggctgcgaatatgagctgan

SEQ ID NO: 99328 - DNA, 551 bp, Zea mays
  unsure (1)..(551): unsure at all n locations
gggagtagccgtntcccctgaggcccgcggctcataggactgacgtaccggtccggaattcccgggtcgacccacgcgtccgcggacgcgtgggtcatgacggatgagatattcggcccgctgctcccgatcatcacggtgaagaagatcgaagacagcatcaagttcctcaggtccaagcccaagccgctggcgatctacgccttcaccaggaacgagaagctgaagcaacgcatcatagacgagacgtcgtcggggagcatcacgttcaacgacgccatcgtgcagtatggcctggacagcatcccgttcggtggcgtggggcacagcgggttcggccagtaccacggcaagtactcgtttgacatgttcagccacaagaaggcggtgctcaagaggagcttcctcgtcgagttcatgttccgctacccgccgtgggacgagaccaagatcggaatgctcaggcgcgtttaccgctttgactacgtttggctcttcttgngcttatcggcctcaggagatgaagcaaccgccggaaatgcttgaaccat

SEQ ID NO: 99329 - DNA, 552 bp, Zea mays
  unsure (1)..(552): unsure at all n locations
tgtgtgtatgcgtntgcgttgaattccgatgctcatacgactgacgtaccggtccggaattcccgggtcgacccacgcgtccggcggcggcggggacacggtagtgggcctgacggcggtggcgctggcgcacacgctggtggtggccgtcatggtgtcagcggggctgcacgtctccggcggccacatcaacccggccgtgacgctgggcctcgccgccacgggccgcatcacgctgttccgctccgcgctctacgtggccgcccagctgctcggctccacgctcgcctgcctcctcctcgctttcctcgcagttgccgacagcggcgtgcccgtgcacgcgctgggcgccggcgtcggcgcgctccggggcgtgctcatggaggccgtgctcaccttctcgctgctcttcgcggtctacgccaccgtcgtcgacccgcgccgcgccgtcggcggcatgggcccgctgctggtgggcctggtcgtcggcgccaacgtgctcggcggcgggcccttcttcggcgcgttcatgaaccccgcgcgcttcttcgn

SEQ ID NO: 99330 - DNA, 541 bp, Zea mays
  unsure (1)..(541): unsure at all n locations
gcagagcgtattgactgtaacgatagcactngcatacccgtccggaattcccgggtcgacccacgcgtccgcggacgcgtgggcggacgcgtgggcaggtcaccaccattccttccttgttccttccccagctccgcaggctgctcatcgccctccctccgcgcccccgatccagatccagatccaggggcttgtcatggcatccaaacgtatcctcaaggaattaaaggacttgcaaaaggaccctgcaacatcatgcagtgcaggtcctgctggtgaggatatgttccactggcaggcaaccatcatgggtcctcctgatagtccatatgctggaggtgttttctgggtgaacattcatttaccgtcagactaccccttcaagcctacaaaggtatcttttaagacgaaggtcttccatgcaaacatcaatagtgatggaagcatatgtcttgacattcttaaggagcagtggagccctgctttgacaatctctaagggtgcgctttctatctgctcccttgctactgatcccaaccca

SEQ ID NO: 99331 - DNA, 542 bp, Zea mays
  unsure (1)..(542): unsure at all n locations
tgtgtgttttggctgatcatgatagccgatagcactgccgtaccggtctcggaattcccgggtcgacccacgcgtccgcccacgcgtccgcccacgcgtccgcccactcgtccgctctattcccagatcgagagggtaatcacggaggcggcaaagcagtcccgggaaggctggggttcgactggagattggaccgaagtcgagggatcatgggtgttgagaccgaagtccttggagccatcatttgttgtccactttgttggaggaatttttgtcggagccgctccccagatcacataccgcttcttcctcgagtgtctcgcgaacaggggagctttggtgattgctacgccttatgcgagcggctttgaccatttcttcattgcagatgaagttcaatttaagtttgacaggtgtttgagaaacttggatgagcctgtaaatgatctcccaacgtttggtgttggacattcattgggatctgttatccacatgttgattggatcaagatatgctgtgcaacgaagtggaaatgtactggn

SEQ ID NO: 99332 - DNA, 431 bp, Zea mays
gagatatttatgaaatgtgcatcgtaccgccggaattcccgggtcgacccacgcgtcgtgtcttttgatttaccttcacctgaattcgagtctcgtgatactaccattctggggtgcggtaatcaacctgtatgtggatgggaaggttgtaagttttaaatcttggaccggcagaggaacaatgtgggacccatatataagattctcaagtctggttacttaggattggttaatgaaaacctattttaatgaggctggtacaaagcagtggtctgtgaaggaaagaagcagtgcgatatgagaatactcctgctgagcggaatcatgctgatatattgagacgctctttgatttgagatttggaaagccacttcgagctggcactacatcttaagctggagctattgcaagaaatgtgtggactctatgca

SEQ ID NO: 99333 - DNA, 543 bp, Zea mays
  unsure (1)..(543): unsure at all n locations
ngtatgttgntcttcatgaacatgatagcactgcacgtaccggttcggaattcccgggtcgacccacgcgtccgcggacgcgtgggcggacgcgtgggttggttagatcaccaccaaggccaatgttgactacgataagattgtcagggagacctgtcgctacattggttttgtgtcaaacgatgttgggcttgacgccgaccactgcaaggtgctcgtgaacattgagcagcagtcccctgatattgctcaaggtgtgcatggccacttcaccaatcgccccgatgagattggatctggtgaccagtgacacatgttcgggtatgcgaccgatgagacccctgagttgatgcccctcagccatgtccttgccaccaagctaggtgctcgtctcaccgatgtccgcaagaacggaacctgcctctggctcatgcctgatgggaagacccatgtgacagtcctagtaccggaatgagggtggtgccattgtccacattcgngtgcacaccgttctaatttcaaccaacacgacgagacagtgac

SEQ ID NO: 99334 - DNA, 545 bp, Zea mays
  unsure (1)..(545): unsure at all n locations
cgtagagtcgtattgcctgatnactagagcactgacgtaccggtctcggaattcccgggtcgacccacgcgtccgcgccggcaaggttgctgtggtctgcggattcggtgatgtcggcaagggttgtgctgctgccctcaagcaggctggtgcccgtgtcattgtgaccgagatcgaccccatctgtgccctccaggctctgatggagggtcttcaggtccttcccttggaggacgttgtctctgaagctgacatcttcgtgaccaccactggcaacaaggatatcatcatggatgaccacatgaggaagatgaagaacaatgccattgtctgcaacattggccactttgacaatgaaattgatatgctcggccttgagacctaccctggcgtcaagcgcattaccatcaagccccagactgactcgctgggtgatccccgagaccaacactggcatcattgtccttgctgaggggtcgctgaagaaccttgcgtgtgctactggccatccttactttgcatggtctgctcatttactaacccgn

SEQ ID NO: 99335 - DNA, 546 bp, Zea mays
gtttgtgtgctactcgctgaaaactgatagcgttagcactgccgtaccggttcggaattcccgggtcgacccacgcgtccgacaacatgaactcaagggctggtagaggctttacccttgaggagctgaaggctgctggcatcccaaagaagcttgctccaaccattggtattactgatgatcaccgccgcaagaacaaattccttgagggactgcatgccaatgtccagaggcttaagacatacaaggccaagctggttatcttcccaaggcgtgcgcgcaaggtgaaggctggtgactctactccagatgagcttgccaccgctacccacgtccagggtgactacatgccatttactcgtggtgagaaacgttcagttgacgttgtgaaggtcacagatgagatgaagtcatttgctgcctatggcaagctccgtcttgagcggatgaacaagaaacatctttgtgccccgcaaaagaaggcatcttatgcagaaaatgaagatatgaagtgatcgtgttaaaatagtcccctgtcttggtcac

SEQ ID NO: 99336 - DNA, 555 bp, Zea mays
  unsure (1)..(555): unsure at all n locations
gggagccgtcttgcttgacngttgagtactcgataggactgcccgtaccggtccggaattcccgggtcgacccacgcgtccggttcccacagtatgttgtcccgacaatgcgtacaccattgttcatacttaatgcagcctacgattcgtggcaggtcaagaacgtcctagcacctagtccagctgatccgaagaagacttgggcccaatgcaagcttgacatcaagagctgctccgccagccaactcacaaccttgcaaaatttcaggacagattttctggcagcactccctaaaacgcagtctgtaggcatgttcatcgactcatgcaatgctcactgccaatcaggatctcaagacacgtggctagccgatggttctcccacggttaacaagacgcanattggcaaggcggtggnggactggtactacgatagggaggtccctcggcagattgattgcccgtatccctgcaacccaacttgcaagacccgtgatgatgattgagcaattgtataagtagntcatggtatccgaaatgaaacccataaagatn

SEQ ID NO: 99337 - DNA, 544 bp, Zea mays
  unsure (1)..(544): unsure at all n locations
tgagccgtattgcatgataactgatgcctgtaggacctgccgtaccggtccggaattcccgggtcgacccacgcgtccgcccacgcgtccggcagagcacaaaagaaatccatccgtctcattgcttccgcttgttcaccaaacaaaaccgaagccacactccaccgctctcctccccaatcagctatgctcgcccaccgcttcctcctcctcgtcgtcgtcgccgcggctgcggcgagcggcatcgcctccgctaagccgacggcgtacgaagccctcgccgactacgacttccccccggggatccttcccaagggcgtggtcgcctacacggtcgacaacgccacgggcgccttcacggccacgctcgatgcctccgcgtccggcgcgggatcctccatctgcgagttctccatcgagggctcctactcgctacgctaccagaccaagatcaccggcaagatctnccccgaccaccttaccgacctncagggtgtctccgtcaaagtcctcttcttttggctcaacatcgtcgaggtcaccc

SEQ ID NO: 99338 - DNA, 548 bp, Zea mays
  unsure (1)..(548): unsure at all n locations
cgttgagtcgtcatgactgaggactgantgccatagcactgccgttccggttcggaattcccgggtcgacccacgcgtccgcccacgcgtccgcccacgcgtcctacggtgcgggcatcggccccggtgtctacgacatgcactcccccaggatcccgtcggctgaggagatcgccgaccgcatcgacaagatgctggcggtgctggacaccaacatcctctgggtgaaccccgactgcggcctcaagacccgcaagtacacggaggtcaagcccgccctgaccaacatggactccgccgctaagctcatccgcacccagctcgccagcgccaagtgagcaccgtttttttgcctttttcgtttccgaggagggcgtcgtcgatgccaattgggttccaataaacagggctgtgcccgccgttctgttgtactccgactgtggctaggttagtaagtttcttgatctcgcccccacgcggtacctggtttactactctctgtttggtggtttctgaggcaagttccccaggtccttgtataggaaaag

SEQ ID NO: 99339 - DNA, 545 bp, Zea mays
  unsure (1)..(545): unsure at all n locations
gtaganaatatttccttgtgactgatactgtagcactgcggtaccggttcggaattcccgggtcgacccacgcgtccgccaaatttgaagctgccggcatatggtattagcaccgccttatcgatgacatggtagcatacgcacttaagagtgaaggagggtatgtctgggcttgcaagaattatgatggagatgtgcagagcgatttcttagctcaaggttttggctcattgggtttgatgacttcggtactggtgtgccctgatggaaagacgatcgaagctgaagctgcccatggtactgttacccgtcattaccgtgttcaccagaaaggaggtgaaaccagtacgaacagtattgcctcaatctttgcgtggacaagaggactagcacacagggcaaagcttgatgacaatgctagactacttgacttcacccagaagcttgaggctgcctgcgttggagccgtcgagtctgggaagatgaccaaggaccttgcccttctcgttcacggatctttaaatatcacgaggagcccatacctg

SEQ ID NO: 99340 - DNA, 550 bp, Zea mays
  unsure (1)..(550): unsure at all n locations
tgtatccgtntcnctttgagcctgcgactcataggactgcacgtaccggtccggaattcccgggtcgacccacgcgtccgtatcccactagtagcatactgcgtccttcctgctatctgtttactcaccaacaaatttattattcctgcgattagcaattatgctggggcgttcttcatcctgctttttgcttccatcttcgccactggtattttggagcttcgatggagtggtgttggcattgaggattggtggagaaatgagcagttttgggtcattggtggcacctctgcacatctctttgctgtgttccaaggtctcttaaaagtgctagcagggatcgacacaaacttcacggtcacatcaaaggcaaccgatgatgatggtgattttgctgagctgtatgtgttcaagtggacaactcttctgatcccccccaccactgtgcttgtgattaacctggttggtatagtggctggagtgtcgtatgctatcaacagtggctaccaatcatggggtccactattcgggaagctggtctttgcaatct

SEQ ID NO: 99341 - DNA, 553 bp, Zea mays
  unsure (1)..(553): unsure at all n locations
nggagtatgtgtctccatgaaacatgatgagctgttaggactgacgtaccggttcggaattcccgggtcgacccacgcgtccggcaaaagctcaaagttttgcatggttccggtatcactgctctggatgaattagcaggtgaaatcgacatgaactcgcggacaacatttgagagattaaattcacagatacagtcacacacatcagcccttgagaactgtttcggaggaatcgcttcggaagcagataacttgttagatgagcttcagcgcagcctatcgaaacaagaagagaggctagcccatttcgcagtgaagcagagggagggacacctgagagctgtggaagcgtcacgttccatctcaaagatcactgctgggttcttccactcgctagatgtccatgcatctaggctcaccagtattctggaagacacacacagcgtgcaagaccaacaacttcttgaccttgaaaagaaattcgaggagtgcgcagctaatgaagaaaaacagcttctagagaaagtggccgaaatgcttgcaaggtccaacg

SEQ ID NO: 99342 - DNA, 558 bp, Zea mays
tgttggatctcgtctagcttgaccctcgattactcataggactgcacgtaccggtccggaattcccgggtcgacccacgcgtccgcccacgcgtccgtgtagattcgtaatgaattggccaggcgctacttgagcagtatgaggcgaaaaaagcctataccgtttacgcaaaagttcccaaatgcagatccacttgcactatgtttgttagagcgaatgctcgcttttgagccaaaagacaggccaagtgctgaagaggctcttgctgatccttatttcaagaatatagccagtgtggatagagagccttctgcacaggctgtcacaaagcttgaatttgaattcgagaggcggagagttacaaaggaagacataagggagcttatatatagggaaattcttgagtatcatccaaagatgctgaaggagtttcttgaaggaactgagtcaagtggtttcatgtacccaagtgcagtagatcattttaaaaagcagtttgcataccttgaagaacattatgccaagggatctaccggaacttcaacttagaggcaacac

SEQ ID NO: 99343 - DNA, 535 bp, Zea mays
tctggtgtagtgcatcggatcatcgatggactgtaccggtctcggaattcccgggtcgacccacgcgtccgcccacgcgtccgcccacgcgtccgctggttccatcccaccccatcaggctcgggcttgctctcgacttctcagtgttctactacgagatcctcaactcccctgaccgtgcttgcaaccttgcaaagcaggcctttgatgaggcaatctccgagctagacagcctgggagaggagtcctacaaggacagcactctgatcatgcagctcctgcgtgacaacttgaccttatggacttccgacaccaacgaggacggcggggatgagatcaaggaagcagctgctgcccccaaagaatccgcccccgagggccagtaagacggatccgatctaccgacctgatgcgtgtctgctgatgtcggagagtttaccaggactgtgccgttcttgatttctgatagcttatcttctagtacacctcgtgttggtctcttcgtcacggcgccggtgcgcgtgcgctgaagctt

SEQ ID NO: 99344 - DNA, 527 bp, Zea mays
  unsure (1)..(527): unsure at all n locations
tggggtgatatagatagatatgatngnacnnncnnnnntnnnntggaattcccgggtcgacccacgcgtccgccccaattcctccttcggatctcgtatttttcgcagcgcaggtgtgaaggaagggggacgcggaggaagatggggctcgcgttcgggaagctcttcagccggctcttcgccaagaaggagatgcggatcctcatggtcggcctcgacgccgccggtaaaaccaccatcctctacaagctcaagctcggcgagatcgtcaccaccatccccaccatcggtttcaatgttgaaactgttgagtacaagaacattagcttcactgtctgggatgtcgggggtcaggacaagatcagacctctttggaggcattacttccagaacacccagggtcttatttttggtgtggacagcaatgaccgtgaccgtgttgttgaagccagagatgagctccacaggatgctgaacgaggatgagctacgtgatgctgngcttgctgtttttgccacaggccaaat

SEQ ID NO: 99345 - DNA, 510 bp, Zea mays
  unsure (1)..(510): unsure at all n locations
atggngctcgtgcccacncctagacgtgactgcacgtaccggtccggaattcccgggtcgacccacgcgtccgccagtcgctgcagaagagtccacagcgagttncatatccggatttcgccctgctgtgcgtgtactgttcctccttttcgggctagtttggagccacaaaactagagcagattggaggggccaaaatacacttcttattcaaaatttgaataataagtggatttttgtttctccaatcccttccggttttatggctcccaaactagtccatctagtgcgtcggttttacatgtggttcaagtggggtactgtgtgctaacagatacaacaacgaggcttgtctgtatgtctgctgacactagagaccaatgcatataatgattctaatttaggccccgtttgatgattctaatttaggctcanaanaaaaaaannnaannnnaaanannaaananaaaannanaattaaaaaaaanaanaaaaaaaaaaaaaaaaagg

SEQ ID NO: 99346 - DNA, 525 bp, Zea mays
  unsure (1)..(525): unsure at all n locations
cggtngctgtttactatgcaatactaagcatcgctcgtaccggttcggaattcccgggtcgacccacgcgtccgcccacgcgtccgggaagccgaggatgcattttcttcagcaagttatgatgtctctaatgaaggaaggatggcggtcataacaaccactgatgcctctggcagtccattggccatgagagatttcgacggcctagccgactccatgactatgaggagcagcaaatcagaaacccttcgaagtttgcaatcctcctacgagcaagaatcccctagtgtaagccggcgccgccgtgttcgctttgaggtaccagaggaggatggcatgggccggcaagtgaaagaagaactcatggcgctggtggaagcgaaacatgctggggtggcatacatcatgggccattcttatatcaaagctaggaagagctcaagtttcctgaagaagttgctattgatgtggctactctttanctcgaagactgcagangtcatcagtaccctgcacattcacaca

SEQ ID NO: 99347 - DNA, 523 bp, Zea mays
cgtttgttcctagcttgagtacgacgctcaccgtccgaattcccggtcgacccacgcgtcgcggacgcgtgggttactgcaaacttggtttgcatccatcccattagcattggatgaggctgttcgcagtggcaaggtgaagactggtgatattattgccgcatcatgttttggcgctggacttacctggggttcagctattgtcaaatggggctaattattctacgtgagccataacaacatcaatgagatcttcataggccttggggacctacatctatttggtcttcccccccttcacccattttctgtgcaacatttttctatcgcatgtgtcggtcttacttgcacatgaaaatctagtgccattttaccgtatttctttggcttcatacacaactgatagtagattggtggatgaacatgggtgaattttgcatcgatgattattgtggtggttcctaagatgagaatacaactggaaggttaatgagcctttcggttagggaattttacttgatat

SEQ ID NO: 99348 - DNA, 536 bp, Zea mays
  unsure (1)..(536): unsure at all n locations
ttgggntntccatgaagatctttcatcggactgctgtaccggtctcggaattcccgggtcgacccacgcgtccgcccacgcgtccgccgtcgacggcgttcccttcgacacctacctcactaggttcgtgtgggatgagggcaagtaccccacaatgtcccctctcaaggagatcgtcggcagcatacagtcacaggttgccaagatcgaggatgacatgaaggttcgagcatcagaatataataatgtaaggagccagcttagtgcgatcaacaggaagcaaagtgggagcttagcggttcgtgatctttccaatctggtaaaaccggaggatatgatcacctcggaacatctcgtgacacttcttgcaattgttcccaagtactcccaaaaagactggttgtcaagctatgagaaaattgacacattcgtggtacctaggtcctctaaaaagctctatgaagacaatgaatatgctctctacactgtaacactgtttgctaaggttgttgacaattttaaggtccgtgctcgcg

SEQ ID NO: 99349 - DNA, 514 bp, Zea mays
actggtgtcaggcatgagtatgagtgtactgccgtacccgttcggaattcccgggtcgacccacgcgtccggccctgatcacatcatcctgcttgtctctttccaatctagctccatctctctttcatctactcttccatcgatcgatccatcgtactgcgtgaggatggggaggggaaagattgagatcaagaggatcgagaacaccaccagccgccaggtgaccttctgcaagcgcaggaatgggctgctgaagaaggcctacgagctctccatcctctgcgacgctgagatcgctttgatcgtcttctctacccgaggccgcctatatgaatattccagtaacagcgtaaggtcgacgatcgagaggtacaagaaagcctctgccagcacttcaggaacagctccagtgacagatgtcaactctcttcaatactttcagcaagaagcgggcaaactgcgccagcagatacaaaccttgcagaattcaacaggcacctgatgggtgaatcta

SEQ ID NO: 99350 - DNA, 514 bp, Zea mays
cgcctgctcggcatcgattagattgtactgctctaccggtctcggaattcccgggtcgacccacgcgtccgggaacagaggtgcactcgccagttgttctttcaaatgccactccatacaaaacatttgtggacctagtaccttctagtgttcttccggaggacttcctctgtgcaattaaggcagcagattacagctctgcaacaacaaagattaatgtggctgtcgacagactgccacagttccagtgttgcaacaccaatcttgaaggtggtccagagcacatgggcacaatacacattgggtccgaaagcatggaggaaattgacgttgcatacagggaagcagcagacggcatctcgtccaaaagacctgttatagaaatgacaattccttctgttttggataagaccatctctccgccagaaagcctttgctgagcgatgcttctctttgattgatgagtacgcgccgggcttcagctcatcggggtaggctacgatatgctgactcc

SEQ ID NO: 99351 - DNA, 507 bp, Zea mays
  unsure (1)..(507): unsure at all n locations
atggggctcnaatcgatctgtatgtactgctctaccggtccggaattcccgggtcgacccacgcgtccgccaaaccttggcatgaatgatgtttatcttgcttatcttccattggctcatgtctttgaactagcaggggagactgtcatgttagcttctggcagtgccattggatatggttcagcattgactatgactgatacatcgaacaagattaagaagggaacaaaaggagatgtttctgtactgaatcctactcttatgatttcagttcctgcaattttggatcgtatcagagatgcagtatttaagaaagttggtgagaagggtggcctgacaaaaaagctgtttgattnttcatataagcgaaatattgcagcaattgaagggagttggtttggatcttgggcaccagagaggatgttatgggatcacatttattataaaccaatacnggcaatgctncgaggacgtctaagaaattgtccttgtggtggtgcacctctt

SEQ ID NO: 99352 - DNA, 525 bp, Zea mays
ctgtgtgtcctagtgatgatgattgctctaccggttcggaattcccgggtcgacccacgcgtccgcccaaagttgtgcaccgtgacatcaaatttagctttattttgattgatgatgagttcgagtccaaagtatcagatttcggtttagccaagcttcttggcgctggaaagagtcatgtcaccactagagttatgggtacctttgggtatgtggcaccagagtatgcaaatactggactcttgaacgaaaagagtgacatttacagctttggagtcgttctccttgaagcaattaccggaagggatcctgttgactatggacgcccaccaaacgaggtgaatctagttgactggctaaaaatgatggttgccagcaggcggtcagaagaagtagtggatcccaccatagagacacgaccttcgacgagagctctaaagcgtgcacttttgacagctctgaggtgtgtggatccagattcaggagagagaccccgagatggtcaaagtgtccggatgctggaat

SEQ ID NO: 99353 - DNA, 531 bp, Zea mays
  unsure (1)..(531): unsure at all n locations
ggggnttggtgatgataagangtcgtcgcaccgctgtaccggttcggaattcccgggtcgacccacgcgtccgagaaccgagatcctcataacccttttccttcctcccttctcccctctcggatcgagtgcttgagctccgaccaaatctcgcagcggctgcaattccgagcccgaagagcggatcaggcgaggacgacgccttcgattctgatctgcggtcggcgcgacccagagagaaccggagatgcagcagggcgacggcacggaggcgcaggtgacgtgggaggaccagcagaacatcaaccgcttcggtcgcctcaacaaccgcctccacgagctccaggaagagatcaagctcgcaaaggagacgaatgagaaccttgatgatgctgggaatgaactcatcttgtccgatgaagacgttgtacgcttccaaattggggaagtgtttgctcacatgccaagggatgacgtccagactaggctggagcagatgaaagaggatgccgcttagaagctggagaggtn

SEQ ID NO: 99354 - DNA, 532 bp, Zea mays
ctgtgttgtatattgaaatactgtatgactcgccgtaccggtccggaattcccgggtcgacccacgcgtccgggccgagatcaccaacagcgccttttagctatcctccatgatggccaagtgcgatccccgccatggtaagtacatggcctgctgcctcatgtaccgtggtgatgtggtccccaaggatgtgaatgctgctgtggccaccatcaagaccaagcgcaccatccagtttgtggactggtgcccaactggctttaagtgcggcattaactaccagcctccaagtgtggtgcctggtggtgacctggccaaggtgcagcgcgctgtgtgcatgatctccaactccaccagtgttgtggaggtgttctcccgcatcgaccacaagttcgacctcatgtacgccaagcgtgccttcgtgcactggtatgtcggtgaaggtatggaagaaggcgagttctctgaggcccgtgaggatcttgcagcgctcgaaaaagactactaggaaggtggtgcttaatttgatgag

SEQ ID NO: 99355 - DNA, 529 bp, Zea mays
  unsure (1)..(529): unsure at all n locations
tggtgtgtgaacgangtatattgnactgctctaccggtctggaattcccgggtcgacccacgcgtccgatctcctcgcatttcttcccatccgatcttcccttcgcaaccaaaaccccaactcgccccgcatcgatggcgcccaaggccgagaagaaacccgcggcgaagaagccggcggaggaggagcccgcggccgagaaggcgcccgccgggaagaagccgaaggcggagaagcgggtccccgctggcaagtccgctgccaaggaaggcggcgagggcaagaggggcaagaagaagggcaagaagagcgtggagacctacaagatctacatcttcaaggtgctgaagcaggtgcacccggacattggcatctnctncaaggccatgtccatcatgaactccttcattaacgatatcttcgagaagctcgctgctgaggccgncaagctcgcgcgctataacaggaagcctaccatcacctnccgtgagatccagacctccgtgcgcttcgtcttcccggggagctc

SEQ ID NO: 99356 - DNA, 535 bp, Zea mays
tgggttgctgcactgccacatcgatgtgacgtaccggtctcggaattcccgggtcgacccacgcgtccgaagttcacttgcagctggttatctggatgcttcgacgctggcggattatctcgtgaagaagggagtccctttcagaacttctcacgagatagttggaaggtctgttgctctatgcgtctccaagaactgtcagctagctgagcttgaattggctgacctaaaatctgtccatcctgtatttgaggatgacgtctatgaatacctgggggttgaaaacgctgtaaacaagttcatatcctatggctctactggttcagaacaagtgaaaaagcagcttgaggattggcgcatccagctcggggtgagctcataagggttggcatggtccaagaaataagctcgcaaattagtgcttgcgatttttgaaggtgtatgttgacgtcgtgaacttttactgagcgtttgatcatacatgttcgaaactggaatgaatgatgtaaacatgttagacaccttgagccttttt

SEQ ID NO: 99357 - DNA, 531 bp, Zea mays
cgttgttgtccctgccgactaccgatctgctcgtaccggttcggaattcccgggtcgacccacgcgtccgcccacgcgtccgcggactcgtggggcctttatttataggggaacttgagatgctagaggagctggacatcagtagcaaccagatacgagtgcttccagactcttttgggcatctctcaaagctacgtgtgtttcatgctgatgaaactccactggaagtaccgcccaaagaagttgtaaagctaggggctcaggagctggttaattatatgaagaatatggttgctgcaagggaagtgagccagaatcaaacagataagaggagcttctggacctggctccgctcactgtttggttgttacaaaaagaatcaaggattgggaccagttccagcctagctgaaccatatcgtccgcatgtattgtcatgaattattcaggtttgctccatctcttaagtcaacgacgaaatgaggcatgactaactataataattcaaacttatggtttgggatacaatgga

SEQ ID NO: 99358 - DNA, 536 bp, Zea mays
  unsure (1)..(536): unsure at all n locations
atgtngctcgtctagttgtntactgatctgctctaccggtctcggaattcccgggtcgacccacgcgtccgcgcagctggaacagcttagtggatggcattagatatacttcgaaatgaaccatcagatgagaaatgtgacgtcttcagctatggggtcatattatgggagctctgtacattgctgcagccatgggaaggtatgaatcccatgcaggttgttggagctgttggttttcagcaacgacggcttgatattcctggtggtgtggatcctgctgtagcagagataataaggagatgctggcagactgatccaaggatgcggccatcattttcagagatcatggctactttgagaccattgttaaaaaacatgcctgccaaccaacctaccaggaagcgggcacagcanacagatgattaagaatatattggtcagtatcagctgaagacacaggccatagagagactgcattggtttgtcttgctcttgccttcccagcttcaagcaatgggcatctgtaactaatacca

SEQ ID NO: 99359 - DNA, 535 bp, Zea mays
  unsure (1)..(535): unsure at all n locations
aggannnatnaatgatggatgtcgatgcaccgctgtaccggtctcggaattcccgggtcgacccacgcgtccgattcagcggaatgtttacccttgctgtttttatgggtttgcagtttcctgttggacaaactaatattgatgggatacttcaccttcgggagaacgaattgaaacgacatgctggggagaaatctacggcaatagaagcatattgtgcctatgttgctgaagggttcgaaaacctgctggactggaatgatgttatgaagttccaagcgaagaatggatccttgtttaactctccttctgcaactgctgccgctttggtcgccaactatgacgacaaagcgctacagtatctaaatttgcttgtcacacaatttggcagtgcagtaccaacagtgttcccacaaaatattcactatcagctttcaatggtggacacgctcgaaagtgttggaatatcacggcatttttctgtggagaaaaaggctgtcctggacatgatatacagnatggtggtacagaaaga

SEQ ID NO: 99360 - DNA, 516 bp, Zea mays
  unsure (1)..(516): unsure at all n locations
cgggtcgctcagcccacgcatggtcgtcatgactgtaccggtccggaattcccgggtcgacccacgcgtccgcccacgcgtccgccgcggcgagttcaaatttcacaatcttcttgtagcacaccactgtcttcgtccaactcggcggcgatgtctgggcgcggcaagggcggcaaggggctgggcaagggcggcgcgaaacgccaccgtaaggttctccgcgacaacatccagggtatcacgaagccggcaatccggaggctggcgaggaggggcggcgtgaagcgtatctccgggcttatctacgaggaaacccgcggcgtgctcaagatcttcctcgagaatgtcatccgcgacgcggtcacctacaccgagcacgctcgccgcaagaccgtcaccgccatggatgttgtgtacgccctcaagcgccagggccgcactctgtacgggttcggtggttgagcgcatctcttncctcgtctgcagcggcttgccgtggcgtttccttagttncct

SEQ ID NO: 99361 - DNA, 515 bp, Zea mays
atggttgctcagcccagtcacgcataggactgcctgtaccggtccggaattcccgggtcgacccacgcgtccgcccacgcgtccggtccgccctccttgtgctccgcttgcaatggcgtccaccgccgtcaagctcatcgacatcgcagtcaacttcacagatggcatgttcaagggcatctaccacggcaagcagtgccacgtcgccgacatcccggccgtactcgcgcgcgcgtgggctgcaggcgtcgaccgcatcattgtcaccggaggctccctgaaagagtccagagaggcattgcagatcgccgagaccgacgggagactgttctgcactgtgggagtgcacccaacgagatgcggggagttcgaggagagtggagaccccgagggtcattttcaggcactgctggctctagcgaaggaaggtttagataaaggcaaggtcgttgcttgtggtgaatgtgggttggattatgaccgacttcagttctgtcccgcagatatgcaaaaga

SEQ ID NO: 99362 - DNA, 544 bp, Zea mays
  unsure (1)..(544): unsure at all n locations
atgtcgctngtgccacgtangatgattgcatctgctctaccggtctcggaattcccgggtcgacccacgcgtccgcagaaaatcaactccttcccaaatccacgttgccaccaactcgccgtcctccgcgccaagcaccaaagctccgatggcccgcactaaacagacggcgcgcaagtcgacgggcggcaaggcgccccgcaagcagctggcgaccaaggcggcgcgcaagtctgcgccggccaccggcggcgtgaagaagccccaccgcttccgccccggcaccgtcgcgctccgggagatccgcaagtaccagaagagcacggagctgctcatccgcaagttgcccttccagcgcctcgtccgtgagatcgcgcaggacttcaagaccgatctccgcttccagtcctccgccgtcgccgcgctgcaggaggccgccgaggcctacctcgtggggctctntgaggacactaacctctgcgccatncacgccaagcgcgtcaccatcatgcccaaggacatccagctcgggcgccgcatcagn

SEQ ID NO: 99363 - DNA, 534 bp, Zea mays
ctggtgttgtattgatggtatgattgctctaccggtctcggaattcccgggtcgacccacgcgtccgaaaatatccccaaaccctagctcccgatttcgattgcgaaccctcgcgtcttcttcgacatgaccgtcggcggcgccccggcgggccggatcgtgatggagctgtacgccaacgaggtgcccaagaccgcggagaacttccgcgcgctgtgcacgggcgagaagggcgtgggcaagtccgggaagccgctccactacaagggctccaccttccaccgcgtcatccccgagttcatgtgccagggcggcgacttcacccgcggcaacggcaccggcggcgagtccatctacggcgagaagttccccgacgagaagttcgtgcgcaagcacaccgtccccggtgtgctctccatggccaacgccgggcccaacaccaacggcttccagttcttcatctgcaccgtcgcgaccccttggctcgacggcaagcacgtcgtcttcggccaggtcgtcgagggcatggacgtc

SEQ ID NO: 99364 - DNA, 530 bp, Zea mays
  unsure (1)..(530): unsure at all n locations
cgggttgctccggtcagcactgctcgactgccgtaccggtctcggattcccgggtcgacccacgcgtccgcccacgcgtccgtggacgcgtgggttgactcgtgggcgctgggccaccagctttgaccgccgccttccttcccctgcgctactgctcctcctcaccccactcccccgcaggagcggcggcggcggcggcgaggtcgtaccccacatcggcgagcggcggcggcaccgccggaggcaaaggcaagatgttcgggcgcgcgccgaagaagagtgacaacaccaagtactacgagatcctcggggtgcccaagtcggcgtcccaggacgatctcaagaaggcctaccgcaaggctgctatcaagaaccaccccgacaagggcggtgaccccgagaagttcaaggagctcgcacaagcctatgaggttttgagtgatccagagaaacgtgagatttatgatcagtatggtgaagatgccctttaagaaagaatgggcgggtgaagatcccatgttgatcccatn

SEQ ID NO: 99365 - DNA, 534 bp, Zea mays
  unsure (1)..(534): unsure at all n locations
ntgggttggtcatgaaagatatcgtcgcactgcctgtccggttcggaattcccgggtcgacccacgcgtccgaagaggtacaaccccaagaagctgacatatgagcagaggaaggccagcctcattgaaaggctcaaccaactcaactcctccggtggtgctgatgacgacgatgaggacgacgagtaaagttaattgccatcgaagtagtgctatctcaatccagcgatcagcaattgtgtactgtcttatgcggggacctgtagtactgcaataggcatttttgttttaaagttttgcgaggtgaacaaaactgtttctgttagtttcgagcttgagctctcaatgtttactctttacattgaaaaaaaaaaaaaaaaaaaaaaaataaaaaaaaaaaaaaaaaaaaaaaaaaaaaaaaaaaagaaaaaaaaaaaaaaaaaaaaaaaaaaaaacaaaanaaaaaaaaaaaaanaanaaaaaanaaaaaaaaaaaaaaaaaanaannaaannaaaaanaaaaaaaaaaaacaa

SEQ ID NO: 99366 - DNA, 510 bp, Zea mays
gtggttgtaatgacagactcgaaagtactgctcgtaccggtccggaattcccgggtcgacccacgcgtccgcccacgcgtccgcccacgcgtccgcccagtatggattgactttccaagagaagggaacaactggagctatgataaatgcagacgacagtggagccttgtggacactgatcaattggggtacaagtacatgaatgcctttgaccaaaccatgaatgcgctcgatgagagattttccttcctttcgtcgtcaaagcagatcgtcagcgacatgaacgatgaggaaaaggttattggctttgaacgtggagatttagtttttggtttcaatttccattccaagaaaacttacgagggctacaaagtgggatgcgatttgcctgggaaatacagagtatccctggactctgatgctctgggcttcggtggacatgggaaaattggccacgacctggatcactttacgtgtcctgaaagggtgccaggggttgcccgaacgaac

SEQ ID NO: 99367 - DNA, 509 bp, Zea mays
  unsure (1)..(509): unsure at all n locations
tgctcgtattccaggctgaacgtatgctgtaccggtctcggaattcccgggtcgacccacgcgtccgcccacgcgtccgggcgcagagaatccccatgcaatcaaacagggtagagggagaggagaggagaggagaggagaggttgggtctgggacaccatggctccgatgaagctgtacggggcggtgatgtcgtggaacgtgacgaggtgcgcaacggcgctggaggaggctggctccgactacgagatcgtgcccatcaacttcgccaccgccgagcacaagagccccgagcacctcgtccgcaacccgtttggtcaggttccagctctgcaggatggtgacttgtacctcttcgaatcacgagcaatctgcaagtacgctgctcgcaaaaacaagccagagctgttgagggaaggaaacctcgaggaggcagcaatggtggatgtttggatcgaggtggatgctaaccagtacaccgctgcactgaatnccatnctcttncaggg

SEQ ID NO: 99368 - DNA, 536 bp, Zea mays
  unsure (1)..(536): unsure at all n locations
actgtgtgctctagttgacattcgatcgctcgtaccggtctcggaattcccgggtcgacccacgcgtccgggatgccggtcgtttctctgctgcttggcttctttacaaggctcaagaggagctcattaatgtcgctaagctgtatggggttaagctaaccatgttccacggacgaggcggaactgtgggaagaggtgggggccctacccatcttgctatactgtcacagcctccagaaaccatccatggatcacttagggtaaccgttcaaggcgaagtgattgagcaatctttcggagaggagcatttgtgctttaggacactgcagcgtttcacggctgcgacccttgaacatggtatgcacccttcaatttcgccgaaaccagaatggcgtgctttgatggatgagatggctatcgtcgccacaaaggaataccggtcaatcgtatttgaggaaccgcgccttgttgaatattttcgncttgcaacgccagagatngagtatggcaggatgaaccatcgaagcangccatcn

SEQ ID NO: 99369 - DNA, 532 bp, Zea mays
  unsure (1)..(532): unsure at all n locations
tggtgctgatcacgtacgacatcatcgactgccgtaccggttcggaattcccgggtcgacccacgcgtccgcggacgcgtggggcaaggcggttttatctcattgatgcgctcgtgaggctgagcggaatgactgcagagggccaaggtgtgaaggttgaatcctcagcagttccttcagccccaactccagatgttgctgaagcacaggccccagctgctgaggaggaggacgatgatgatgttgacctttttggtgaggagaccgaagatgagaagaaggctgctgaagagcgtgctgcagctgccaaggcttctggcaagaagaaagaatctgggaagtcatcagttntacttgatgtgaagccatgggacgatgagactgacatggccaagcttgaagaagcttgtaagagtgtccaaatggaaaggcttctctggggcgcattcaagcttgtccaatcggatatggtatcaagngctgccaatcatgatgaccataatcgacgatcttgcttctgtcgacactctaa

SEQ ID NO: 99370 - DNA, 511 bp, Zea mays
tgatagctcagccaagccgtggaaggactgctctaccggtccggaattcccgggtcgacccacgcgtccgcgagtggcgatggcagtactgcacttgcatgtggtggcggtggcggtgctgctgatggcgacggggctgcgcgcgcagctgcgggtgggcttctacgacagctcgtgcccagcggcggagatcatcgtgcagcaggaggtgagcagggcggtggcggccaacccgggcctcgccgccggcctgctccgcctccacttccacgactgtttcgttgggggctgcgacgcgtccgtgctcatcgactccaccaagggcaacaccgcggagaaggacgccgggcccaacctcagcctgcggggcttcgaggtcgtcgatcgcatcaaggcgcgcgtcgagcaggcctgcttcggcgtcgtctcctgcgcggacatactcgcgttcgcggccagggacagcgtcgcactcgtaagtcactgctttttagtgtcagtggacgcctgc

SEQ ID NO: 99371 - DNA, 506 bp, Zea mays
  unsure (1)..(506): unsure at all n locations
ntggctgtcagatagatatttatgtactgctgtaccggtccggaattcccgggtcgacccacgcgtccggtttttcctcgtcctcgatccagccccctgtcgcttccagctccgatcgatctgatccctccccaccaccacgcccatggcggaccaactcaccgacgaccagatcgccgagttcaaggaggccttcagcctcttcgacaaggacggggatggttgcatcacgaccaaggagctgggaactgtcatgcgttcactggggcaaaaccctacagaggctgagctccaggacatgatcaatgaggtcgatgccgacggcaacggcaccatcgattttccagagtttctcaaccttatggctcgcaagatgaaggacaccgactctgaggaagagctcaaggaggcctttcgtgtgtttgacaaggaccagaacggcttcatctctgccgccgagctccgccatgtcatgacaaatcttggggagaagctaactgatgagg

SEQ ID NO: 99372 - DNA, 613 bp, Zea mays
  unsure (1)..(613): unsure at all n locations
ncggtcgctcgggcatgtattagtattgtactgctcgtacccgntcggaattacccgggtcgaccccacgtcgtccgcggaccgcgtgggccggactgcgtgaggcaccactgnnctcttataacccatagtaccaaagcgaaggtaacgtcacgatggcaaccttccaatgggttagtctttcgtcttgcatctgcccttagtttctatcttctcccttctccaagtgctcgtccccttgtgcccacctcatgtgggtggctttggttcccacccagttctatgactcattcgtgcccccaagggcgaaggacgaattgtgccagtccacttgtgtgcacagagccctgtggcccaagggagacccacggatggctggtcatacttnntagtcagacctgcnnatttccatgaaactgctttgtcaaagggcttgcgatgccttcgagtgcctgtttggaccaacangnncagcagcatttagttaaggtgaggaaaaggggtcccntnacccgaacaaggaacctcccctcagtgggagttttgaagggtgatccgacccagattaaaggcctgctcnttgagggcttgcctgccccaggcacccagtctc

SEQ ID NO: 99373 - DNA, 532 bp, Zea mays
  unsure (1)..(532): unsure at all n locations
tggnntagtattgactatataggattgctctaccggtctggaattcccggctcgacccacgcgtccgcagcctctccgcctccgctcctcgcgccgttcgcttcgtctcctcctgtacaggtaaggagaggaagagggcgaaatggtgaagcacaacaacgtcatccccaacgggcacttcaagaagcactggcagaactatgtcaagacatggttcaaccagcccgcccgcaagcagaggcgccgcatcgctcgtcaaaagaaggctgtgaagatattcccccgcccgactgctggtcctctacgccccattgttcaatgccagactttaaagtacaacatgaagtcaagggctgggagaggctttacccttgaggagctgaaggctgctggcatcccaaagaagcttgctccaaccattggtatttctgttgatcaccgncgcaagaacaaatcccttgagggactgcangccaatgtccagaggcttaagacatacangggcaaacttggtatctttccaagcgtgcgc

SEQ ID NO: 99374 - DNA, 535 bp, Zea mays
  unsure (1)..(535): unsure at all n locations
tggtgctgtggnccagtccgaacgatngttgttctggactggaatacccggctcgacccacgcgtccgcagtctcttcgcctcctatcctcgcgccttcgatgcgtctcctcctgtacaggtaaggggaggaggtgggctaaatggtgaagcgcaacaacgtcatccccaacgggcacttcaagaagcactggcagaactatgtcaagacatggttcaaccagcccgcccgcaagcagaggcgccgcatcgctcgtcaaaagaaggctgtgaagatattcgcccgcccgactgctggtcctctacgccccattgatcaatgccagactttaaagtacaacatgaagtcaagggctgggagaggctttacccttgaggagctgaaggctgctggcatcccaaagaagcttgctccaaccattggtatatctgttgatcaccgccgcaagaacaaattccttgagggactgcaggccaatgtccagaggctttaaacattcaaggtcaactggttttcttcccaagcgtgcccccan

SEQ ID NO: 99375 - DNA, 537 bp, Zea mays
  unsure (1)..(537): unsure at all n locations
gtgatactaatccatgcactcattcgatctgcctgtaccggtctcggaattcccgggtcgacccacgcgtccgctggattcctcttgcagccacttcgggcgtgggtgggatcggcccgtggccggcggagatgtccggattcgtcggtgtcgtcgtgtccgacccctcgctgcaggggcagttcacgcaggtcgagctccgatcgctcaaggccaagttcgtgtctctgaagagagattccggccatgtcaccactaagaatctcccggcgatgatgaagaagctgagggggctcaatgaggtggtctctgtggaggagatcgcggccttcctgtccgagtcgtaccccgacagcgatcaggagattgaattcgaatccttcctccgggagtatctgaatctgcaggcgccgatgantgccaaggaaggtggtgccggcngtggcccgngttgcaagtcgtcgttcctcaagtccagcaccactacgctggtgcaccacctcantcaggcagagaaatcttcgaatgtggcgcccc

SEQ ID NO: 99376 - DNA, 533 bp, Zea mays
tggtgttgtaaatgctagtcactcatagcactgccgtaccggtccggaattcccgggtcgacccacgcgtccggtcgctcttgagcttgcgtggatgaacaatatgttggactttgccttcccatacctgttgcagttcatccgtgaatacactagcaaggtggatgatttagtgaaggacagaattgagtcacagaatgaagaaagagtcaaagagaaggaggagaaagatcttgttgctcagcagaacatgtatgcgcaattgcttcctcttgctttgcctgctccgccaatgcctggcatgggtggccctccacctccgatgggtgggatgggcatgcctccaatgggtggaatgggtatgccgccgatgggccctggtccgatgccagcattcgggatgccagcaatgggaagctactgagatgtttttgcagagagcttagacgatgatttgaatcgtccctgtgtaagcgaaggtggaaacttcattggagttgtagaatggtacagtttgggaataaatattctta

SEQ ID NO: 99377 - DNA, 537 bp, Zea mays
  unsure (1)..(537): unsure at all n locations
ctggnngtnnccatgatagagatgcataggaccgccgtaccggttcggaattcccgggtcgacccacgcgtccgctcgatccgcacacctcacgcctttcttcctctcgccccaaggacaacgaaaacatcaaacaagagaaccaaaggaaacagagcaagagcatcgctctcgaagcaaaacgcgcaccacgccgtcgccggccggccacttcgcacgtacgtaggacgcgcacgcaccggtgcatatatggggctcctgaaccagctgtgggacgacacggtggccgggccgcgcccggactccggcctcggcaagctccgcaagtacgcctncttcntcccctcgtcgtcgtcgtcggcggcggtggcagcagcagcngcagccggctccgcgcccgctacgggcgccgtgacgcggaacttgaccatgctgcggcggccggcggcgctgtccgtcgtcacgtnggcccgcagcgagtccagcttcgggccggtggtcccgtcgcccggaagcggcgcttcgggatcggccttt

SEQ ID NO: 99378 - DNA, 513 bp, Zea mays
tcggtggtcttcacgctccgagatgtgactgcctgtaccggtccggaattcccgggtcgacccacgcgtccgcccacgcgtccgggcatccgcagagagcttgttccgtccaggcaaccaaaaagcaagttgccccgccgcgcagaggaagaagagagcagaggaggatggctcgtacgaagcagaccgcccgcaagtccacgggaggcaaggccccccgcaagcagctcgccaccaaggtccgtccgtctgcccttctctacccgtttcggatccgctgttctgttctctagggttcccttctgagacgcgccggcggttgtgctgtggttgcaggcggcgaggaagtcggcgccgacgaccggcggcgtgaagaagccccacaggtacaggcccggaaccgtggcgctgcgcgagatccgcaagtaccagaagagcacggagctgctgatccgcaagctgcccttccagcgcctggtgcgcgagatcgcgcaggacttcaagacagacctc

SEQ ID NO: 99379 - DNA, 528 bp, Zea mays
  unsure (1)..(528): unsure at all n locations
agtctngctctggactgggccagtccgtactggcatactcgtctcgaattcccgggtcgacccacgcgtccgctggttaaaaaaaccaccactattgcacatacatgtgtcatcttagtgtacaacgccaagtcatgatctcgacttgcctatgcaatgcaacgtgaaacaaaagacacacatgcatctcgcagcatcaatcaatccacgtacgtacaccctctccgatccgaaagacaatgaagttgcatagcatagccgctgagcttagttgctggggacgaagttggaggcgtatgcccatgcgatgtcgttgactgggtcagcgattgtgacagcgaaggtctagagcgcgcccttgccgacttcgccgacagtcttctacatggtccaaaattctaaaccccttaagctccgccgagaattcccaatgtctacaatgagcttaatttcttcttttttccgcaaatctttgcttgcaattagcctcgctcgcgtaaatatgtgcatagacataatataatttcc

SEQ ID NO: 99380 - DNA, 537 bp, Zea mays
  unsure (1)..(537): unsure at all n locations
cggtggtgctgtgcacgatgatgatcgatctgctgtaccggtctcggaattcccgggtcgacccacgcgtccgcccacgcgtccggcgaacgacgccatcattctgttcggcaactacttcggcccgccgtgcgtgacggtgacgccgctccaggtgctgcagggctacgtgaaggacacgagcttcgtcgccggctgcaactcggccgcctgcaacgtcacgacgatccccgaggcggtccaggcggcgagctcggcggactccgtcgtcttgttcatggggctggaccaggaccaggagagggaggaggttgaccggctggacctgacgctcccgggacagcagcagaccctcatcgagagcgtcgcgaacgcggcgaagaagccggtgatcctggtgctgctctgcggtgggcccgtggatgtgagctttgcgaagaccaaccncaagattggggccatcctgtgggctggctaccccggcgaggcccgcggcattgccatcgcacaggtcctctttcgagagcacaaccccgg

SEQ ID NO: 99381 - DNA, 535 bp, Zea mays
  unsure (1)..(535): unsure at all n locations
ncgctnctgtcacgcaagtatatgattgctgtaccggttcggaattcccgggtcgacccacgcgtccgcggacgcgtgggtgtgaccctccctcagtcgcgttgcgtcccatcctacgatccaaaggtctctctgctcgcagccatggcgaagaactacccgaccgtgagcgccgagtacagcgaggctgtcgagaaggccaggcgcaagctccgagccctcatcgccgagaagagctgcgccccgctcatgctccgtctcgcgtggcactccgcggggacgttcgacgtgtcgtcgaggaccggcggtccattcggcacgatgaagcatcagtcggaattggctcacggcgctaacgcggggctggacatcgcggtgcggctgctcgagcccatcaaggaggagttcccaatcctgtcttacgccgatttctaccagctcgcgggaagtgtggccgtngaagtcacccgtgggcctgagaatgctttcaccccggtagggatgacaagcctnaccccccacctgaggggcggct

SEQ ID NO: 99382 - DNA, 541 bp, Zea mays
  unsure (1)..(541): unsure at all n locations
aggggnnctcttcatgatcagganctcagtgctataccggtctcggaattcccgggtcgacccacgcgtccggtacaccaagcccaagaagatcaaacacatgcactttaaggttaagctctccgtgctgcagttctataaggtggacgacaccactagcaaggtgacccgcctccgcaaggagtgccccaacacagagtgcggcgcgggcgtcttcatggccaaccacttcgaccgccactactgcggcaagtgcggtctcacctatgtctacaaccagaaggcgtaattgcttgccccgatttgctttatccgcctaccctatcgaacatccagctgtcggttactcgaattgtatctcatgtagatctgtctgaggttgaaacttaaatggagcagtagtatctgtcatattggtacccctgttactgaattgatgtgatgctgagtttaattgtggtttcatatcacagaaaaacacaaaaaggcggtcgctctagaggatccaagcttacgtacgcgtgcatgcgacgtcatactn

SEQ ID NO: 99383 - DNA, 533 bp, Zea mays
  unsure (1)..(533): unsure at all n locations
gtgggtcgctactgcagtcgtcgtacgactgccgtaccggtccgngattcccgggtcgacccacgcgtccgcggacgcgtgggcggtcgggtagcttcaatgccgccgcccgccgctcggggatcgcctgctttcctctgccgaccacatctacaccgcaccaccggtccttccaagtgagcttcaaccccctgcgtgtagatggagagggttctcaaggatgacgccgtcgaggagaagggcgagcgcgccagaatggcatcgtttgttggggccatgtcaatctcggatttggcgaagaccacattgggtccaaaaggaatggacaagatcctgcaatcaactggtagagggcgtaatgttactgttacaaatgatggggctaccattttgaagtcacttcacattgacaatcctgctgcaaaggtccttgttgacatctcaaaagttcaagatgatgaagttggtgatgggacaacttctgttggtgttctagctggagaacttttgaaagaggctganaagttaattan

SEQ ID NO: 99384 - DNA, 542 bp, Zea mays
  unsure (1)..(542): unsure at all n locations
atggtagatgtngactgaccgacatgcataggactgccgtaccggtctcggaattcccgggtcgacccacgcgtccgcggacgcgtgggcagaagcttctttaaattgctaaagcccggtggcaaagtcctaatcagcgactactgtaagaatcctggaaaaccatcagaagaatttgctgcgtacattaagcagagaggctatgaccttcacgacgtgaaggcttatggacagatgctgaaggatgctggttttcataatgtcatcgcggaagatcgcactgagcagttcttgaatgttctacagagggagctaggtgaagttgaaaagaacaaagacgctttcctggcagacttcacccaggaggactatgacgacattgtgaatggctggaacgcgaagctgaaacggagctctgccggcgagcagaggtgtgggttgttcattgccaccaagtgatttggccttgcagcatgagggctctatggaataagaatggatggggctctaactctgcttctagacccgtgatgggtcaactt

SEQ ID NO: 99385 - DNA, 512 bp, Zea mays
  unsure (1)..(512): unsure at all n locations
ntgctnnctttgaatgatctagtagtactgcccgtaccggtccggaattcccgggtcgacccacgcgtccgctgaagacaattcagttcctgattttcatttgagctgtgcagcagttaaaagaaaaaggccatactttgtaagaataataagcaagcagatggttggagtgtacctatcaatatgggtacgaagaagcctccgaaagcacattcagagtctgaaagtatcaactgtaggggttggtgctatgggctacattggtaataagggatcaatatcagtaagcatgtccatataccaaacacacttttgctttatatgttgtcacctaacctctggagaaaaggaaggagatgaactaaaaaggaatgctgatgttcaagaaatccaccgaaggacaatatttaatccagtttcgagagtcaacatgcctaaaacgatatatgaccatgaaaggattgtatggctaggtgatctcaactataggatcaacttaccatatgagaaga

SEQ ID NO: 99386 - DNA, 509 bp, Zea mays
  unsure (1)..(509): unsure at all n locations
tggtagtctgctcgtaactgactgtactgctgtaccggtccggaattcccgggtcgacccacgcgtccgcccacgcgtccgcggacgcgtgggtcctctcctcgcggcgactcttgccaagcattcctgcgcgaaaaacgcatccgctccaaggggagttgatcgagaagcgttggtggacatgggtcagatccagtactccgagaagtacttcgacgacacctacgagtacaggcacgtcgtcctcccgccagaggtcgccaagctcctccccaagaaccggctcctcttcgagaacgagtggcgcgcgatcggagtgcagcagagccgcgggtgggtgcactacgcgatccaccgnccggagccgcacatcatgctgttccgncgnccgatcaactaccagcagcagcaagaggcggctgccgcgcagatgcttgccaagtgagcccctggtggccaaggcggggaccaggaacgtttaaaccctaacccccttttcatttctaaaa

SEQ ID NO: 99387 - DNA, 504 bp, Zea mays
gactgtgatcaatcgactgacgtaccggtctcggattcccgggtcgacccacgcgtccgcccacgcgtccggctcttggtccacaccatttgcattaacttcagggagctcggtctctgctccgctaccttcttgatcctcctcagaagagccagatgaaaggatgttgcgcagcgaccttccggagatggaaagcgagttcagctgcgactccacccttcgcatgaactccatcgcctcctgcagcttgccaacggtggcggcctcctcgacgcatgcgtcaaggcgaaggagccctcgtcgtcgtctccctacgcaggcgacgtcgaggccatcaaggccaagatcatctcgcacccacactactactcgctgctcactgcctacctcgagtgcaacaaggtggcggcaccaccggaagtgtctgcgaggctgacggacatagcgcaagaagtggaagcgcggcagcgcacggcgctcggcggtctggccgttgtgaccgac

SEQ ID NO: 99388 - DNA, 509 bp, Zea mays
  unsure (1)..(509): unsure at all n locations
gtggtgctctgatttgatatggattgcatgcctgtaccggtccggaattcccgggtcgacccacgcgtccggcatgtccataatgctcttggaaaaatcattancgtcagcaacaacaatcctgagcatttccttactaccaacccattttacgactctcgtgttgtgggtaaatattgtgaaaagcgggatcctacacttgctgttgttgcttacagacgtgggcagtgtgatgatgaacttattaatgtcactaacaaaaactcattattcaagctacaagctagatatgtggttgagagaatggatggtgatctgtgggataaagttcttcagcctgagaatgaatatagaaggcaactcattgaccaagtggtttcgactgcgttgcctgagagcaagagccctgagcaagtgtctgctgctgntaaggctttcatgactgctgacctgcctcatgaactgattgagcttcttgaaaagattggtcttcagaattccgctttcag

SEQ ID NO: 99389 - DNA, 507 bp, Zea mays
ttgctacctgcgacgatcgggattctatggaccgcctaccggtccggaattcccgggtcgacccacgcgtccgcccacgcgtccgtgatgcgcaagtattggtttaaggcaaagccggcggcgagctcctgcagcccgtggtacggtcccgaccgcgtgctctacctgggcccgctgtccggcgcgcccccgagctacctgacgggcgagttcccgggcgactaccgatgggacaacgcggagctgtcggccgacccagagacgttcggcaagaaccaggagctggaggtcatccactaccgctggggcatgctgggcgcgttgggctgcctggtcccagagctgatctgccgcaacggagtccagttcagctagggcgtgtgagtcaagggcgggtcgcagatcttcagcgatggtgagctggactaccttgagaacccgagcctgagtcacacgcatagcatactcggcatttggtgactgacaggtccgggctcatgggccccc

SEQ ID NO: 99390 - DNA, 515 bp, Zea mays
  unsure (1)..(515): unsure at all n locations
gtgggtggtcagatagtatcgactctcatggcactgccgtaccggtccggaattcccgggtcgacccacgcgtccgcggacgcgtgggcggacgcgtggttgcgttactggtccacggacgtaaacctgtcgtggctgggcatgggcgagctgggccacgtccacgtcggcttcctcaaggcgctgggcctgcaggaggaggacggcaaggacgccacgcgggcgttccccaaggccgcccccaacgccgtcccgggcaagccgctggcctactacgcgctgcgcgaggaggtccagaagcagctgcagaagcacccgaacgccaacgtcgtggtcaccggccacagcctcggcgccgcgctggcgaccatcttcccggcgctgctggcgttccacggngagcggggcgtcctggaccggctgctctccgtggtcacctacgggcagccgcgcgtgggcgacaaggtgttcgcgggctacgtgcgcgccaacgtgcccgtggaagccgttccggt

SEQ ID NO: 99391 - DNA, 508 bp, Zea mays
  unsure (1)..(508): unsure at all n locations
cgttnctngccatgaaagagtctcatcggactgacgtaccggtctcggaattcccgggtcgacccacgcgtccgcccacgcgtccggaaacaaaggttcaggtttctgaaggtctaggagagttaattgatgtaacaagcgagaagactcttaaggaagttgtagtgccaattacaggacctcttatccgcatccttggtgatcggtttccatggcaagttaagtcagcaatcctatcaaccctgacaatcatcatcatgaaaggtggaattgcacttaagcccttccttccacaacttcaaactacattcgtgaaatgtctacaggataacaataagtctgtccggacgagggctgcagctgctctcggaaagcttagtgctcttagcacacgggtggatcctttagttagcgatcttctgtccatgttgcagtcaagagatgaatctgtaaaagaaagtgtgctttctgcactcaaaggtgttatcaaacatgctggcaaaagtgt

SEQ ID NO: 99392 - DNA, 515 bp, Zea mays
  unsure (1)..(515): unsure at all n locations
ttgcnnctcgcgatgtaaagaatctcgatcggactgcctcgtaccggtccggaattcccgggtcgacccacgcgtccgcccacgcgtccggggtcctcctcgtctcagtacctacacaaacaaagccaccaccatcccagcccagacacatcggccgaccacgggcgccgccatgtccaccgctgacgcggcgagcccggccctggcgccggacggggacgcgccggcgggcgaaggcctggccctggcccagttcgccgcgggctgcttctggagcgtggagctggtgtaccagcgcctaccaggcgtggcgcgcacggaggtggggtactcgcagggccaccgacacgccctcacctaccgcgacgtctgcggcaacggcacgggccacgccgaggtggtccgcgtgcactacgaccccaacgcctgcccctacgacgtcctgctggacgtcttctgggccaagcacaaccccaccactctcaacagacagggcaacgacgtcgggacgcagn

SEQ ID NO: 99393 - DNA, 514 bp, Zea mays
tgggctggtcacgatgataggagtctcatcggactgccgtaccggtccggaattcccgggtcgacccacgcgtccgcccacgcgtccggagggattgcactccatttgatgattcacttcatcacaatggcccttggaggtgatggctacttgaattttatgggaaatgagtttggtcacccagaatggattgactttccaagagaagggaacaactggagctatgataaatgcagacgacagtggagccttgtggacactgatcacttgcggtacaagtacatgaatgcgtttgaccaagcgatgaatgcgctcgatgagagattttccttcctttcgtcgtcaaagcagatcgtcagcgacatgaacgatgaggaaaaggttattgtctttgaacgtggagatttagtttttgttttcaatttccatcccaagaaaacttacgagggctacaaagtgggatgcgatttgcctgggaaatacagagtagccctggactctgatgctctggtct

SEQ ID NO: 99394 - DNA, 517 bp, Zea mays
gtggtcgctctgaactgagtatgactgtcatcgcactgccgtaccggttcggaattcccgggtcgacccacgcgtccgggattccggtcctattgtgttgttctacttgatcggttccaacaccagccggcgtcatgtcgaagcgaggtaggggaggttcggctgggaacaagttccgcatgtcactgggtctaccggtggcggccacggtgaactgctcggactacacgggcgccaagaacctctacatcatctccgacaagggcatcaagggccgcctcaaccgccttccgtccgcctgtgtcggcgacatggtcatggccaccgtaaagaagggaaagcccgacctcaggaagaatgtgatgcccgacgtcatcgttcgccagcgcaagccgtggcgtcgcaaggacggtgtctacatgtacttcgaagataatgctggagtgattgtgaatcccaatggtgagatgaaaggttctgcaatcactggacctatcggcatggagtgtgctgaccc

SEQ ID NO: 99395 - DNA, 508 bp, Zea mays
  unsure (1)..(508): unsure at all n locations
tgctgttggcatgaatagaatgtcatcgcactgccgtaccggtccggaattcccgggtcgacccacgcgtccgcggcacgcagcgctacgggtctgttcgtctaggcgctcgatccgtagcctggtcgttaaggctgcaactgtcgtcaccccaaagtacacttcactgaagcctctgggagatagggtgcttgtgaagcttggtgccgcagaggagaagacagttggtggcattttgcttccatctactgcccagactaaaccacaaggaggtgaggttgttgctgttggagcaggaaggaccatcggggacaagaaaatagctgtggatatagagactggagcacaagtagtatactcaaagtatgctgggactgangttgaattcaatgactcanagcatcttattctcaaagaagacgatatcattggtattcttgagacagatgatgtgaaggacatgaagcctctcaaatgaccgtgtctcatcaaggttgcagaagccgan

SEQ ID NO: 99396 - DNA, 513 bp, Zea mays
gtggctagtcggcctactcgtactgcactgacgtaccggtccggaattcccgggtcgacccacgcgtccgctgaaatgaagggtgggtgggtgggtcgactcactgtccgccgccgaagccgagctccctcgcaaatctctcgcatcgcgttcacagcagatggcggggaaggaggagaggaagcgggtgttggtggtgggcggcagcggctacctgggccagcaccttctcgcggcgtcctgcaccgtcgaccgcctcgacgtcgctttcacccaccacagccccgacccgacgcagccgctcctggagacgctcccctccgtgcgcgcattccgcgccgaccttcgctccggcgacggcttcgaggcgatctccgcgtcctttggccagccacacgtggttgtcaactgtgctgcgatgtcagtttctcgggcatgcgaattggatccacctgctgctatggctaccaatgtgccttcttcgcttgtgaattggctgctaaattatgggaa

SEQ ID NO: 99397 - DNA, 512 bp, Zea mays
  unsure (1)..(512): unsure at all n locations
ntggctgctctgatagtaactgtatgtgatgacctaccggtccggaattcccgggtcgacccacgcgtccgagacggctagccggcgcacggaagcgggcattggatcggaggtgagcctctcctgcgtcggactgtccccgcccccgctaggcgccatgaagctgacggtgaagaccctcaagggaacgcacttcgagatccgggtgcagcccaacgacacgattatggctgtgaagaagaatattgaagagatacaaggaaaagacagctatccatggggccaacaactgctgattttcaatggaaaggtcttgaaagatgaaagtacattggaagagaataaagtcaatgaggatgggtttctagttgtcatgcttagtaagggtaaaacatctggttcaactggaacttcatcttcccagcactcaaacactcctgcaacaaggcaggcacctnctctagaggccccacaacaagctcctcaacccccggtggcaccaattacaactt

SEQ ID NO: 99398 - DNA, 518 bp, Zea mays
  unsure (1)..(518): unsure at all n locations
gtggctggctcgggatagtatcgagatatgcatgcctcgtaccggtccggaattcccgggtcgacccacgcgtccgaccaccgctccacacacaagaagagagccgagagctagctacctagcgcgcgatggcgatgtccgcttccaagatgatggcggtcgccgccgctgccctgctagccctggtcctggccgcgtcgaccgcggaggcgaggaacatcaagacgacgacgacgacgacggagaagaaggacgatgcggtggtgcagccgcagaccttcccgcccttcgaccgcctcggcggcggcgcgtccccggcgtccggtggcctccccggcacctcgtcgggcggcagcagcattccagcgttcagcatgccgggcagcggcagcagcctccccggcgggtcgttcttgcccggcagcagcggcagcatcggcagcatgcccctcttcagcggcggctccccggccttcagcggcttcggcggcatgcccgggtcccccgncgcccgctcc

SEQ ID NO: 99399 - DNA, 511 bp, Zea mays
aggctggtctgccagtccgcatcgactgacgtaccggtccggaattcccgggtcgacccacgcgtccgcatcccgtcgcatcccatcccactaccacctatcttttcgtccgccgattcgatccggttgttccaacccaggggcagtgatggcgacgaagaggagcgtgggcaccctcggcgaggcggatctgaaggggaagaaggtgttcgtgcgcgccgacctcaacgtcccgctcgacgatgcccagaagatcaccgacgacacccgcatacgcgcctccgtccccaccatcaagttcctcctcgagaagggcgccaaggtcatcctcgccagccacctgggtcgtccaaaaggtgtcaccccaaagtacagcttgaagcctcttgttccacgcttgtctgagctccttggagttgagtcgtgatggccaatgattgcattggtgaagaagttgagaagttggctgccgctttgccagaaggtggagttctgctcctagagaatgtta

SEQ ID NO: 99400 - DNA, 518 bp, Zea mays
  unsure (1)..(518): unsure at all n locations
tgggcnnnctnnnaactgatcagcttctcatcggactgacgtaccggttcggaattcccgggtcgacccacgcgtccgcaaggatcgggatcaggattaggtttccattcctcctcaaagagtccacaaatgtatacccttcccttatgtacatcaccacacgaagggaagttccccgacgagaagttcgtgcgcaagcacaccgcccccggtgtgctctccatggccaacgccgggcccaacaccaacggctcccagttcttcatctgcaccgtcgcgaccccttggctcgacggcaagcacgtcgtcttcggccaggtcgtcgagggcatggacgtcgtcaaggccatcgagaaggtgggcacccgcaacggctccacctccaaggtggtcaaggtcgctgactgcggacagctctcctagatctctctgatctggtctgttcggcccgcctccctccgtcatcgtcgactccccctgcgtccgttcctttggatctgaataagatggtggtgatn

SEQ ID NO: 99401 - DNA, 508 bp, Zea mays
  unsure (1)..(508): unsure at all n locations
aggctgctgcgctggacgactctcatcgcactgacgtaccggtccggaattcccgggtcgacccacgcgtccgctcgtcgcttccgctccacaggattctcttcgccacccacaaccgtgtgaccgtgcgtgctgccggcgacccctatccgccgacccgtccgtcccaccacaccccaccgccgctcgcagctatgtcgccgtcggagccgacgcgggaggagagcgtgtacatggccaagctggcagagcaggcggagcggtacgaggagatggtcgagttcatggagcgcgtcgcgcgctccgccggcggcgccggcggaggggaggagctctccgtggaggagcgcaacctgctgtccgtcgcctacaagaacgtcatcggcgcccgcagggcctcgtggcggatcatctcctncatcgagcagaaggaggagggccgcgggaacgaggcgcacgccgncttcattcgcgcctaccgctccaagatcgagaccgagctcgnccg

SEQ ID NO: 99402 - DNA, 511 bp, Zea mays
agtggtgctcagatagatagtatattaatgacctaccggtccggaattcccgggtcgacccacgcgtccgcccacgcgtccggacagacattgcatttgttgttgttggagagatgtttcctgcccacaaggtgattctttcagcccggtctcctgtttttagggcgcaactttttggtccaatgaaggataaggacatgaagtgtataaagattgaagacatggaggctccagtattcaaggctttgctccatttcatgtactgggatgagttgccggatcttgaagagcttactggtgtaaatacaacttgggtatccaccttgatggctcaacatttacttgctgctgcagaccgttatgcattggagagattaaagttgctctgtgaacttaagctgtgtgaagatgttgcaataaacacagtggcaaatactttggcactggctgaacagcaccactgctatcagctaaaaactgtttgcttaaaatttgtggctctgcctgagaa

SEQ ID NO: 99403 - DNA, 514 bp, Zea mays
  unsure (1)..(514): unsure at all n locations
aggccnnatatggatgataagagatctcatcggactgacgtaccggtccggaattcccgggtcgacccacgcgtccgggagcgcgaagatgggagcgggggtcggtttggtcgctgcgagcaaagacaaggccagcggcggcggcgccgagcggacgtcgctggacggcgtgcgggataagaacgtgatgcagcttaagaagcttaatacggcgctattccctgtccgctacaatgaaaaatactaccaggacgccatcgcctccaaggatttctccaaactagcatactttagcgatatttgtgttggtgcgatagcttgtcgcctggagaagaaggaaggaggagcagtccgagtttatatcatgaccttgggtgtactggcaccgtatcggggtcttggtattgggacaaagctgctgaatcatgtgttcgatctctcagcaaagcaaaacatctccgagatatacttgcatgttcagaccaacaacgatgatgcaattgctttctacaag

SEQ ID NO: 99404 - DNA, 516 bp, Zea mays
  unsure (1)..(516): unsure at all n locations
gtgtgcnnctttgaatgatcagcgtctcatcggactgacgtaccggtccggaattcccgggtcgacccacgcgtccgagcacctgcaagcgcaagaagaccttgccgtgctactcggggcctcgtccaaaggcggtgcacttcgaggagtgccgggaggtgagcgtgcagggcgtgacgctgcagaacgcgcagcagttccagctgacgttcacgcgctgctcctgcgtgaaggccagcttcctccgggtggtggcgccggcggacagccccaacaccgacggcatccacctcaacgacacctcccacgtccgcatcacggacaacctcatctccacaggggacgactgcgtctccatggtcggcaattgctctgacgtccgtgtgaaagacatctcatgtgggcctggccatggcatcagcatcggaagccttggaaagaaccggaccaccgacatggtggaagacgtgaaggtcgacacctgcttgctcaccaacacgaccaacggcgtccgtn

SEQ ID NO: 99405 - DNA, 513 bp, Zea mays
  unsure (1)..(513): unsure at all n locations
ggccnnntatggctgatacgagtctcatcgcgacctgacgtaccggtccggaattcccgggtcgacccacgcgtccgcccacgcgtccgggagtgtttgttttcgttaagtttgcagctggcactgaggcgattgccaagaagctagctgagcttacaaccacgaagggtgtcactaccatcatcggcggcggcgactctgttgctgctgtcgagaaggctgggctggccgacaagatgagccacatttcgaccggcggcggtgcgagcttggaactcttggaaggcaagactctacctggtgtccttgccctcgatgacgcctagatccgctgctgctgctgctactcaggttctgccagctttgcgtgtcatcttgtttcggaccttggtgtagcactgcaaggctaaggtttactcctccgcacatggacttttggggataggcttgccaccgtgttttgctagatgagtcgtggaataagcttttacttnctcgctgctgtgggtgaag

SEQ ID NO: 99406 - DNA, 509 bp, Zea mays
  unsure (1)..(509): unsure at all n locations
ntcggtgtcggattgaattgtatgcatgatctaccggtccggaattcccgggtcgacccacgcgtccgatgatccattcctgggaaagcgcattgaatatggttattttgtcagtgttcctttgagagatgagttccttgaaaatgctaggctttttattttcgagacatactgccgtatccatcggtgcatcgatatcagcatgcttgctcagaagttgaacatgagctacgatgaggccgagttgtggatcatgaatttggttagaagctcaaaactggatgccaggatcgattcagtatcaggaactctcatcatgacaaccaatcacgtcaatgtccatgagcagattgttgagagcttgaagggccttaatatgaggacctacatgctcgcaaagaacatcgttgagccagctcagcaggcaactcggtgaggatagcagacttcacagttttgagacgccaaggactagtttagagacaacttgtaacttttcgagctctatn

SEQ ID NO: 99407 - DNA, 508 bp, Zea mays
  unsure (1)..(508): unsure at all n locations
agtgccnctctaaatgatatgagtgtcatcgcactgccgtaccggtctcggaattcccgggtcgacccacgcgtccggttctagatcgcgagggccgccttttttttttttttttttttgacacgcatttagcttggcactatatgttgcatacaatccatttacattagctgaaacgctatacatcactctgaaatccagttaaccatacacatacacttgcgatagtgtggcacagcatgtgcaactgtggatatactcatcttgcacgcagccatcgtcgccgctgccatcgtgcatcacctgagcatgtctccaaagtccacgaatgggccgccgccgctcagaatcgatgaggcgctgaaattggtttcgccttcgtcgaacgcgatcctctggccgaacggctgcggcctgtccggcaggtcgggcacgtccatatccccctccagcatcctcagtgcctccggcatggtcgggcggaacgccaccgtgacgtgggcacaca

SEQ ID NO: 99408 - DNA, 519 bp, Zea mays
  unsure (1)..(519): unsure at all n locations
gcatgtccgactcgcgctgtgaacttcagtcatngtagtaccggtccggaattcccggatcgacccagcgcgtcctcgaccccttttgctgaacatgcttaagcctatcaataagtactcggaggggtgcctgtacgacaggcgcgctttgacggcgctgggggtcctgactctcaagcacgacggggagcgcgagttcatgttctacaggaacccgagcgcggacatgctgctgacggaggcggagctggacctgggcctggtgcggcgcgccaaggtgttccactacggctccatctcgctcatctccgagccgtgccgctcggcgcacatggccgccatgcgcgcagccaaagccgtgggcgtgctctgcttctacgaccccaacgtgcgccttccgctctggccgtcgaccgacgccgcacgcgagggcatactcagcatctggaaagaggccgacttcatcaaggtcagcgacgaccaagtggccttccttacgctcggtgacgccaacgacaa

SEQ ID NO: 99409 - DNA, 517 bp, Zea mays
  unsure (1)..(517): unsure at all n locations
tgggctggtagtgaactgagtcactncgattggcgtgacgtaccggtctcggaattcccgggtcgacccacgcgttcgcggacgcgtgggcgcctgtgaaagttcggatccgacggcccgttcagcttcctctgcggcgtccgttccgaagggcaatagttttcaagtggcaatggcggaccatgctaaccaacccactgtgcttcataagctcagtggccagcttcacctgcgctcgatcatctttgaaagtgtactggcccgtaacatatgcccatctgtctcatcttatgaaacgagatttgccacaaggaactacatgacccatagcctttggggcccttcaatgtctgttagcggcggcatcaatgtcccagtgatgcagaccccgatctgtgctaatgctactgctgagaaaggangccaagaacctcatgattgatttcatgaatggcggtgtctcagctgctgtttcaaagactgctgcttgctccattgagcgtgtgaagctggttat

SEQ ID NO: 99410 - DNA, 512 bp, Zea mays
  unsure (1)..(512): unsure at all n locations
tggccnntttcgatgatacgtatctcatcggactgccgtaccggtccggaattcccgggcgacgagttcgggcacatgttggtgaacatcctgaagcagaacattgtgaactcggaggggtgcctgttcgacaagcacgcgcggacggcgctggccttcgtgacgctcaagcacgacggggagcgcgagttcatgttctacaggaacccgagcgcggacatgctgctgacggaggcggagctggacctgggcctggtgcggcgcgccaaggtgttccactacggctccatctcgctcatctccgagccgtgccgctcggcgcacatggccgccatgcgcgcagccaaggccgcgggcgtgctctgctcctacgaccccaacgtgcgccttccgctctggccgtcgcccgacgccgcacgcgagggcatcctcagcatctggaaggaggccgacttcatcaaggtcagcgacgacgaggtggccttcctcacgcgcggngacgccaacgacga

SEQ ID NO: 99411 - DNA, 514 bp, Zea mays
  unsure (1)..(514): unsure at all n locations
gtgnnnnctgtcgctgaatgcactncaattgtactgacgtaccggtctggaattcccgggctctccttttgctcggaacgcacacaccgtccggtccccgttctccgatcccctcgtcgatccaaagatgcagatcttcgtcaagaccctcactggaaagactatcaccctcgaggtggagtcttctgacaccattgacaacgtcaaggccaagatccaggacaaggagggcatccccccggaccagcagcggctcatctttgctggcaagcagctcgaggacgggcgcacacttgccgactacaacatccagaaggagagcaccctccaccttgttctccgcctcaggggaggcatgcagatcttcgtcaagaccctcactggaaagactatcaccctcgaggtggagtcttctgacaccatcgacaacgtcaaggccaagatccaggacaaggagggcatccctccagaccagcagcggctcatttttgccggcaagcagctcgaggacggc

SEQ ID NO: 99412 - DNA, 516 bp, Zea mays
  unsure (1)..(516): unsure at all n locations
ggtagagccnantnngcttgataagagtctcatcggactgccgtaccggtccggaattcccgggtcgacccacgcgtccgcccacgcgtccggctcgctcgtcccagcttatcaggtcgagcacctagtagcgacctgctcgatcatcagtgtagagtgtcggtaggtgtctgtctctcttggtggctggttgcaacggtcatggcgacgtcgtctcgtcgggtgcccttgctgctgctgtgcctgggcgtgctggtgtcctgctccttcgcggcgggcagcttggaccaggagctggacatcacgtggggcgacgggcggggcaaggtccttgacaacgggcggctgctgacgctgtcgctggaccgcacgtccggctccgggttccagtcccggcacgagtacctgttcggcaagatcgacatgcagctgcggctggtgccgggcaactccgncggcaccgtcaccgnctactacctgtcgtcgcagggcggcgcgcacgacgagatcgacttc

SEQ ID NO: 99413 - DNA, 512 bp, Zea mays
  unsure (1)..(512): unsure at all n locations
gggcnngtcgngctgaatcgactctcataggactgccgtaccggtccggaattcccgggtcgacccacgcgtccggcagtacagcagcattatcagggttcgtgtcgtgggagtgggaggttgcctcaggtgcggagcagtcgccggcggcgaccatcggtgtctgagatgaaggagagaggcggctccagggcggcagtggacgagcgctacgcgcagtggaagtcgctcatccccgttctctacgactggtttgccaaccacaacctcgtttggccatccctctcctgccggtgggggccacagtttgagaaagctacctacaagaatcgtcaacgcctttacctatctgaacagaccgatgggagtgtgcctaatactctggttatcgcaaactgtgaagttgcgaaaccaagggttgcagctgctgaacatatctcgcagtttaacgaggaagcacgatcaccttttgtaaagaagtacatgactatagntcatcctggtgaagttta

SEQ ID NO: 99414 - DNA, 513 bp, Zea mays
  unsure (1)..(513): unsure at all n locations
gggcngcntgggctgatatgaatctcataggactgcacgtaccggtccggaattcccgggtcgacccacgcgtccggagctcctgcagccatggcggtttctctgcttctcctcctcctgctgtccgtgtgcacagcctcagatgcggcgttctgcgtgtgcaagccgggcatgtccgacccgatgatgcagtcggccatcgactacgcctgcagcaagggggccgactgcgcctccaccaccaagggcgcgccgtgctacggcaacggcaacaaggtggccgtctgctcctacatctgcaacagctactaccagagccgcagcggcatgggcgccacctgcgacttcaacggcgtcgacaccctcaccggcaccgaccccagctccgggacctgcaagttcgcctccggccccagcagcgtacgcaccggcggcggcgctggtatgggcacccgcggagcatgcgctggcgtcggcggtggcactggcgcccgcgcctgcactggagcatgc

SEQ ID NO: 99415 - DNA, 513 bp, Zea mays
ggggctgctgtaattgataggagactgattgatctaccggtccggaattcccgggtcgacccacgcgtccggcacaggcagttcgagagagagagagagagttagatagataaagatgtcgtggttcgggcaccaccaccacaaccagccggctcccccggcgtcgggccccaaccaggtgttcaagatcttctgccgcgccaacgagaactactgcctggccgtccgcgacggcgccgtcgtgctggccccggtcaaccccaaggacgaccaccagcactggtacaaggacatgcgcttcagcacccgggtcaaggacgaggaaggcatgccggcgttcgcgctcgtcaacaaggccacggggctcgccatcaagcactccctcggccagtcccacccggtcaagctcgcgcctttcagcccggaccaggaggacgcgtcggtgctgtggacggagagcaaggacgtgggcaagggcttccgctgcatccgcatggtcaacaacacccgcct

SEQ ID NO: 99416 - DNA, 515 bp, Zea mays
tgtaggtgtgcttagcatcgataagactgtcatggcataccggtccggaattcccgggtcgacccacgcgtccggtgaaggatatgaaaccactgaatgatcgtattcttattaaggttgctgaagctgaagaacgaactgctggtggtttgctattgacgcaggcaactaaggagaaaccttctgttggatcagtggtagccgttggcccagggccgttgggcgaggacggcagcaggaatcctctgtcgatcactcctggaagcaacgtgatgtattccaagtatgcgggaagtgagttcaagggcgaggacggtgagtacatcgtgctcagggcgtctgacgtgatggctggtctttcctgatcaccaaaccatacagcgccaggtgtgcgataggaagttttgatgttgaggccgagccttatcttttatttgctcttgtttggaattgttggaggcttttgaactgtaatctggtgcgaattataaggaaaataagccgagttgtgtata

SEQ ID NO: 99417 - DNA, 508 bp, Zea mays
gtgctgctgagatagaagtaacgtgatgacctaccggtccggaattcccgggtcgacccacgcgtccgcccacgcgtccgagaaaagaaaaaaaaggcttcgactagccgacgagagcaacgacgaccatggcgacgatggtcgcttcttcctgccacgggcaacttctcctgtttctcctcgtggccgtcgcgtcggcctgcctcggctccgcggcagcgcatcaagccggatctggagagggctacacgatagctggccgcgtcaagatcgatggcatgagcgtgaagggctttggtcttgcaacaaagacatcaaacacaaaagtgatacttaatggcggccagagggttacatttgccaggccagacggctactttgcattccacaacgtgccagctggaactcatctgattgaggtctcctcaattggttacttcttttccccagttcgagtagatatcagtgcaaggaatcctggttatattcaagcagcattgactgaaac

SEQ ID NO: 99418 - DNA, 516 bp, Zea mays
  unsure (1)..(516): unsure at all n locations
gggctcactcaagctcagtggtgagatcgcgatgcacgtaccggtccggaattcccgggtcgacccacgcgtccgagcaagtaatatggcttggtcttgtgctcgttcgatgagcatcgccctcgctgccgtcctcctgctgtgcggcggcgcgtggctgcagcaggcggcggaggcgcgcccccaccacatggacaccgacagcagcatcgacatggaccgcggcagcgacgacttcttctccatcgtggggtactcgccggaggacctgacgcagcacgaccggctcgtcaggctgttcgaggagtgggtggccaagtaccgcaaggcgtacggcagcttcgaggagaagctgcgccggttcgaggtgttcaaggacaacctgcaccacatcgacgaggccaacaggaaggaggtcaccagctactggctgggcctcaacgccttcgccgacctcacgcacgacgagttcaaggccacatacctgggcctnctgccgaagaggaccagcggtgg

SEQ ID NO: 99419 - DNA, 520 bp, Zea mays
  unsure (1)..(520): unsure at all n locations
nggagatgtcgtcagatagtaatagagtgtactgcacgtaccggtccggaattcccgggtcgacccacgcgtccgtttcatatggtgggtgctaatctaatattttactctcgccgttctgactatgtattttccaggtatcgaacacccaaagatggcaatggcaaccttcacatcatccccagttctctgcagcttcaggaccatcgaacagaagaaggcccctctgctgaacaacagcacaaaacggccgcttcacttgggcttcccaaggagcgtgccgacgtcgccgagcttcagagcgaggctagacctgcgcgtcgccgctgtctacaaggtgaagctcatcggccccgaagggcaggagagcgtgctcgacgtgccagaggacagctacatcctggacgcggccgangaagccggtctcgacctgccctactcctgccgcgccggcgcgtgctccacgtgcgccggcaagctcctggagggctccgtcgaccaggcagaccagtcgttcctt

SEQ ID NO: 99420 - DNA, 517 bp, Zea mays
gttctcgctatcccagtcggaggatgcactgcacgtaccggtccggaattcccgggtcgacccacgcgtccgcctgcccaagaagaccgttgagaaggcggctgccatggaggccaagtcgcccaagaaggccgctaagtcccccaagaaggcatagaggggcgcctttaccgctgtgatgttgaatgctcgtgttcagtagatctttacttctgtagtgtcgtcggtgttattggaactggttagtagatctgagcattgtggttgaaacgtgattccctgatttcagaaatctaatttgcaaataaaaatgaacatcaacaatgaatacaaggagaaactaatcggtacatgaaaggaatgatagagtgctctacgtgccaaaagaacatatacatactggacgcatgcgaaagaagaaagggtcgtcctttttaaatgatccaagcttactaacgcgttctttctacgccataacccttcttgaggggtcctaaattcaataagaagcgccttt

SEQ ID NO: 99421 - DNA, 525 bp, Zea mays
  unsure (1)..(525): unsure at all n locations
agaatgcgatnnntnaccgctgagcactgatgctcatagcactgccggccggaattcccgggtcgacccacgcgtccgcccacgcgtccgcccacgcgtccgcccactcgtccttccacgcgtccgcccacgcgtccgtacatttcttctctctctgctcctccgcctccgcctgatccatccaagacagggatcgccatgtcggactcggaggagcaccacttcgaatcgaaggccgacgctggggcgtccaagacctacccgcagcaggctggcaccgtccgtaagaacggcttcatcgtcatcaagaaccgtccctgcaaggttgtggaggtttctacctccaagactggtaagcatggccacgccaaatgccactttgtcgccatagacatattcaatgggaaaaagcttgaagatattgttccttcatcacacaactgtgacattccgcatgtgaaccgtactgagtatcagctgattgatatttctgaagatggatttgtgagccttcttacttcaaat

SEQ ID NO: 99422 - DNA, 514 bp, Zea mays
  unsure (1)..(514): unsure at all n locations
gtccnnattancgctgacactgactctcataggaccgacgtaccggtccggaattcccgggtcgacccacgcgtccgcccacgcgtccgggtgcagctaagggcttatagtaccttcacgacaaggcgagtcctcctgttatttaccgggattttaagtcgtcaaacattcttcttggagaaggatttcatccgaagctatcagactttggccttgcaaaacttggcccggttggtgacaagacccatgtttcaacacgtgtgatgggtacatatggctactgtgccccagaatatgcaatgactgggcagctcacagttaaatccgatgtgtatagctttggagtcgtgttccttgaacttatcacagggcgcaaagcaattgacaacaccaagacccaaggggagcaaaacctagtggcatgggctcgtccactgttcaaggaccgcaggaaattccctaaaatggctgatccaatgcttcagggccgcttccctatgaggggtctatatca

SEQ ID NO: 99423 - DNA, 512 bp, Zea mays
  unsure (1)..(512): unsure at all n locations
tggcnnnctcngcatgaatagaagtctcatcggactgcccgtaccggtccggaattcccgggtcgacccacgcgtccgcccacgcgtccgcccacgcgtccggtctttttcaagactaatgctgatgggaacacaacatgtgccaaggaaatgacaaagctctctggcatctctgaaatcatccccgagatggagatctgcgattttgactttgaaccctgtggctactccatgaatgcgatccatggctctgcattctccacaatccatgtgacgcccgaggacggtttcagctatgccagttatgaggttatgggcttggatgccactgctctgtcttatggtgaccttgtcaagagggtccttcggtgctttggcccctcggagttttccgttgccgtgaccatcttcggcgggcgtggccatgccgggacatggggaaaggcacttggtgcagaggtctatgactgcaacaacatggtggagcaggagctgcctggaggcgggctcct

SEQ ID NO: 99424 - DNA, 512 bp, Zea mays
  unsure (1)..(512): unsure at all n locations
atggatcgctcaggctgcnatcgatagcactagcactgccgttccggttcggaattcccgggtcgacccacgcgtccggcgcaggccgtcatgaagcccattctcgttttcctggcgcagaccgggtcgtacctcatggtgaacgcgtacccgttcttcgcttactccggcaatgcgggagacatctccctcgactacgccctgttccgccccaacgccggcgtgctcgacgccgggaacggcctcaagtactacagcctcctcgacgcgcagctggacgccgagttcgccgcggtcagcaggctcggggagggctacaacgccgtgcgcgtcgtggtcttcgagacggtgtggccgtccaagggcgacgccaacgaggcgggcgcttcagcggccaacgcctcggcgtacaacggcaacctggcccgccgcgtgctctacggcaacgcctgcaccacgcgccgccccgacgccgacatcgacgtgtacctcttcgcgctcttcaacgagag

SEQ ID NO: 99425 - DNA, 502 bp, Zea mays
  unsure (1)..(502): unsure at all n locations
nattgataatcgatagctgctagcactgacgtaccggtccggaattcccgggtcgacccacgcgtccgcccacgcgtccgcccacgcgtctttccattcgtccgcccacgcgtccggcacctcctagggacacactgagaaaacctggagtgctgcaatgtagtgccaaagagaaggtccttgatcctaagaaggcacagaacattgccatcctgctgcgcgcgctgaatgtcactccggaagaggtctccgatgcactgctagatggcaatactgaatgtctgggggcggatttgttggaaaccttggtaaagatggctcctacgaaagaggaagaactgaagcttcgaaactttaccggggactcatcgaagcttggttccgcagagcggtttctcaaggcagtgcttgacatacctttttctttcaaaagagttgatgctatgctctatcgagcaaattttgagagcgaaatcaattacctcaggaaatctttcgaaac

SEQ ID NO: 99426 - DNA, 516 bp, Zea mays
  unsure (1)..(516): unsure at all n locations
gggtgggntgctttccctgcncactgaggcgntcnangncgtaccgnctggaattccgggtcgactcacgcgtccgctgacaagcacactgacttggctgaaaaatatggtgtttctggtttccctacattgaagttcttccctaagggaaacaaagccggtgaagattatgatggtggccgggacttggatgactttgtcaagttcattaatgagaagtgtggcaccagccgggatccaaagggccacctgaatcaagaggctgggcttgtgccaagcttgaatcctcttgtgaaggagtttctcaatgctgctgatgacaagcggaaggaagtcctctctaaaatagaagaggatgttgctaagctcagcggttctgcagccaagcatggaaagatatatgtgacagcttgcaaagagatcatagacaagggctttgactacactaagaaagagactgagaggcttcaccgcatgctggagaagtcaatcaatccttcccaaaggttgttgaan

SEQ ID NO: 99427 - DNA, 521 bp, Zea mays
  unsure (1)..(521): unsure at all n locations
nccggtnnnnnnaaaaggatccgaagctctcacaaccggtccggaattcccgggtcgacccacgcgtnccgccacgcgtnccgtccattattgccgtctcccttttgcgtgagcaaaaaaagaaaacgagaagagcaatccccatgtctggcatcatccacaagatcgaggagaagctccacatggggggcgaccacaagaaggaggatgagcaccacaagaaggccgaggagcaccacaagaaggaggagggggagcaccacaagaaggacggcggggagcataaagaaagcatcgtggagaagatcaaggacaagatcaccggcgagcacggcgacaagtccggcgaccacaaggaaaagaaagacaagaaaaagaagaaggagaagaagaagcacggcgagggccacgaccacgaccacgacggcggtcacagtagcagcagcagcgacagcgactgagacttgtgtcgcaacacaagtgcaacccaaatattccttgttgattgagggatatatccc

SEQ ID NO: 99428 - DNA, 523 bp, Zea mays
  unsure (1)..(523): unsure at all n locations
accgtgtcnnnnnttcctaagtcgatgcagtacaccgccgtaccggtccggaattcccggtcgactcacgcgtccgcggacgcgtgggctgcgtgcatggcgctagcgcggagggcacgcccaagaggctgacctacgactagatccagagcaaaacgtacatggaggtgaagggcacgggcacggcgaaccagtgcccgaccatcgacggcggcgtggagtcgttcccgttcaaggccggcaagtaccagatgaagaagctgtgcctggagccgacgtccttcaccgtcaaggcggagggcatcgccaagaacgccccgcccgagttccagaagaccaagctcatgacccgcctcacgtacacgcttgacgagatcgagggcccgctcgaggtcggcttcgactgcacgctcaagttcgaggagaaggacggctttgactacgcctgccgtaccgtgcagcttccggtgggccaagcgcttctcttcctctttatcggtaaacaatttgttggcacccgtat

SEQ ID NO: 99429 - DNA, 518 bp, Zea mays
  unsure (1)..(518): unsure at all n locations
ggtggtnnnnnccccagctacgaccgcatgctcgaccggnccggaattccggtcgaaccacgccgttcgccacgcggttcgccacgcgttcgacacttatagcaatggctggctacctcaacaaaatcgggctggtctcttggttcaatgggactggtgtgaaatttggtggaaggcttggcatgtcatggcaactctcattcngggggctggtgctgctgtacttctactcgcactatttctttggcagtggggccgcacacatcggagcaatgttcaccgcgttcctgtcgggggcgagtgccctgggcaccccgtcgcttttcgctgccatggttctttcattcctctcgaacctcatgggcgggaccacccactacggcatcggctcttgctccgtcttctacggcgccgggtatgtcccaattggctcagtggtggggctatgggtttgtcatctccgntgtaaacatcattatctggctcggggtgggccggttctggtgggagaataatgg

SEQ ID NO: 99430 - DNA, 515 bp, Zea mays
  unsure (1)..(515): unsure at all n locations
ngggttgggtcctttccccacccactacgctactccnaccgcnncgaatnccgggtcgacccacgccttccgcacgatctcgacatgcctggaccctaggacgtgtcattggggccaaagctcaaacgggggcttggggaggctcgtgacaagtgttcttaagaaaaatctaaccaatttcagctgaataaactaagtgatgagatttcaatgctggagaaaacgctctcggggctccaacagtcagtaggattctgccataacgatctgcagtatggaaatattatgatatatgaagagaccagacaagtcaccttgatagactatgaatatgcgagttttaacccagtcgcattcgacattgctaatcacttctgtgagatggctgctgattaccatacatcaacaccacatgtgttggattttacgaaatatcctgacactggggagcagaaaagattcgttgaagcataccttaactcttcacgtaaaaagcaaccggttggggaagttga

SEQ ID NO: 99431 - DNA, 522 bp, Zea mays
  unsure (1)..(522): unsure at all n locations
gaacgtgnnnntttccaaaatgccccgtagtgcgacnacnnaccggnncggaattcccgggtcgacccacgcgtccggactgcattacctgagagcattatcctttagcaagtgtcagctgctnttaaggctttcgtgactggtgacctgcgacatgaactnattgagcttcttgaaaagattgttcttcagaattctgctttcagtggaaatttcaatctgcagaacctgctcatcttgactgctatcaaagcagatccatccagagtcatggactatgtcaacagacttgataacttctatgggcctgctgttggacaagttgctgttgaatcacaactgtattaagaggcttttgctatattcaagaagttcaacttaaatgtgcatgctgtcgattttctcttggacaacatccggagcatagaatgagctgaagaatttgctttcctttttgaaaaaaattcttttttgaacccagtttcccaacccccaattccttaaatttttgtcctttaatct

SEQ ID NO: 99432 - DNA, 518 bp, Zea mays
  unsure (1)..(518): unsure at all n locations
nnaaggcgtccnanccatgggcactgcccctcagcacgncgtaccggtccggaattcccgggtcgacccacgcgtccggtgatgggaacgtttggctacgtggcgccagagtacgctagcaccggcatgctgaacgagaggagcgacgtgtacagcttcgggatcctgatcatggagatcatctccggccgaagccccgtcgactacgccaggcctgccggagaggtaaaccttgtagagtggctcaagaacaaggtgaccaacagggactacgaggccatcgtggacccgaagctgccggagaagccgtcctccaaggctctcaagaaggcgctcctggtcgcgctgaggtgcgtggatcccgactcgcagaaacggcccaagatggggcacgtaatccacatgctcgaagtcgacgacttcccgtatcgagaggaccgtcgaactcttcggccgggcaacggcagccccctggagaaggcgaggaattcggcngcngggttattccacaggaacaa

SEQ ID NO: 99433 - DNA, 522 bp, Zea mays
  unsure (1)..(522): unsure at all n locations
nggatggtnntnntccggagtcggacgtaatctcanccgcnncggaattnccgggtcgacccacgcgttcggccacgccgttcgccacgcgttcgcttggacactcttaaaggagagctcttcttggagaatcaaatgaatttgttggagacaaagttgcgtatgccctgtctcagggactaaaggtcattgcatgtgttggtgagacacttgagcagaaggaggctgggtctaccatggaggttggtgctgcacaaacaaaagcaattgctgagaagatcaaggactggagcaacgtagttgttgcctatgaaccagtttgggctattggaactggtaaagttgccaccccagctcaggctcaagaagtgcacgcctcccttgaggattggcttaagaccaacgtcagccctgaggttgctgaatctactaggatcatttacggaggctctgtaactgncgngaacttgcaaagagctagcannacanncttgatgttattgggttcttttcgggggagat

SEQ ID NO: 99434 - DNA, 524 bp, Zea mays
  unsure (1)..(524): unsure at all n locations
nnnttgggttttaatcccaactcgagagccatngcgancncgtccggattcccgggtcgacccacgcgtnccggtgagggactacctcaattactggaatcaacaggttcttcaccgggaggggggggtccagaatagtccacgtgttcaacatgagttcactgggccaataagattcgcagctccctatgcacactgggctgaagtgctgatactcggcatcccctccttcgtcgggccagccattgttccaagccacatgatcacattctggctctggattatactccgtcagggggaggctatcgagacacatancggctttgattttccattcaccccgacaaaatatattccattctatggaggagcagaataccatgactatcatcattatgtaggaggccagagccaaagcaattttgcttctgntttcacttactgcgattacttatatggcacttacaaaggttacagaattcacaaaaaatacctatctaagctttatgattttgggacttata

SEQ ID NO: 99435 - DNA, 529 bp, Zea mays
  unsure (1)..(529): unsure at all n locations
ngggatgcggttttnnttccccgaattccccngcagtgtcangccgtaccggnccggaattcccgggtcgacccacgcgtccgcagcaaataaggagtctaggaaacccgatgacggccactggactcctctcacggactacagcaagtcacggtcgaacacctcancgaagacagcgaccacagggagccgtacatcaacgttgccatccaatctgtgccgccatttctcgtttggcgagatccaggcggccaccaagaacttcgaccaagcctctctcctcggtaaaggcggctttggaaacgtgtaccttggagagatagacagtggcacgatggtggcgatcaagcgcgggaacccgacgtctgagcagggcgtccacgagttccagacggagatcgagatgctgtcgaagctccggcaccggcacctcgtgtcgcttatcgggtactgcgacgacatgaatgagctgattctagtgtacgactacatggcgaacgggactttaggggacacctgttcaacaccg

SEQ ID NO: 99436 - DNA, 522 bp, Zea mays
  unsure (1)..(522): unsure at all n locations
gggatggggccnnnccatgaatccaccggctacgcgcacgacgtaccggtccggaattcccgggtcgacccacgcgtccggctggacgatctcaaacatcacagctggtaacaaggagcagattcaggctgtgatcaatgcaaatataattgcacctctggtgcaactcctgcaaactgctgaatttgacatcaagaaagaagcagcctgggcaatttcaaatgccacttctggtggcacacatgatcagatcaagtaccttgttgcccagggttgcattaagccactctgtgatctgcttgtttgcccggatcccagaatcgtaacagtttgcttggagggtctcgagaacatcctgaaggttggcgaggcagagaaaaaccttggtgcaagtgatgtcaatgtctatgcacagatgattgatgatgctgagggcctggacaagattgagaacctgcagagccatgacaacaccgagatatatgagaaggctgtgaagatgcttgaattctactggctggg

SEQ ID NO: 99437 - DNA, 521 bp, Zea mays
  unsure (1)..(521): unsure at all n locations
ggggatgcgtcctnaatccggcattccgggcagntgcacgacgtaccggtccggattcccggtcgacccacgcgtccgcgaggtaggggaggttcggctgtgaacaagttccgcatgtcactgggtctacgcggggcggccacggtgaactgcgcggacaacacgggcgccaagaacctctacatcatctccgtcaagggcatcaagggccgcctcaaccgcctaccgtccgcctgtgtcggcgacatggtcatggccaccgtaaagaagggaaagcccgacctcaggaagaaagtgatgcccgccgtcatcgtccgccagcgcaagccgtggcgtctcaaggacggtgtctacatgtacttcgaagataatgctggagtgattgtgaatcccaagggtgagatgaaaggttctgcaatcactggacctatcggcaaggagtgtgctgaacctttgcctaggaacgccagttcaacaaatgccatcttttgtgagccttttttaatatttttataatctga

SEQ ID NO: 99438 - DNA, 518 bp, Zea mays
  unsure (1)..(518): unsure at all n locations
nnnttgcgcctaacccgcgactcgcgccacgcgancnctnnncgaatccggtcgaccacgcgtncgccacgcttcgtgtccgcgagccctacacgctttacaccaacgtgttcacgcgggggcaggggcaaccggagcaacagttccgcctcttgttcgaccccaccgccgacttccacacctactccatcctctggaaccccaagcacgtcatcttcatggtggacgacatgcccatcaaggacttccgcaacctggagagcaagggggtggcgttccccaagagccagccgatgcggctctactccagcctgtggaacgcggacgactgggcgacgcatggcgggcgcgtcaagacggactggtcccacgccccctttttcgnctnctaccgcgggttcaaggccgacgcttgcgtcgccgtcgcgggcgggccgacccgctgcggcgccaccctccgcacccgaggcacccggggcccccggcttcgtcgnccgggccggggacctggacaaacc

SEQ ID NO: 99439 - DNA, 521 bp, Zea mays
  unsure (1)..(521): unsure at all n locations
ngggaggtnttttaaggaatcggaggtaatctcaaccgctccggaattcccgggtcgacccacgcgtccggacgaagcgaaagacaaagcttttgagttggagttgagctggatctgtgatgaatcggagcgtcagcatcagaagggtccaaatgaactgttggagcaagccaaagctgctgctcaagcagctcttgaggagatggatgctgactaagaaacaagacgatttgcccagacttggtgtttttggtgctgttgaaatctccgatccctttggggtgacccactggacatggccaatttgtcacaatttattattttgacccatgtcatgtgaaactcctttcgttgaagtctggtatctagattgacttgtatcagagctgtggtttacgcaaactggattctggagtactggactgggggtgtgtttttcggaactgtgcatctgacttttagctgntcgntgactttggttttctttttttagataaaaactggtttttgatttgaagcca

SEQ ID NO: 99440 - DNA, 462 bp, Zea mays
  unsure (1)..(462): unsure at all n locations
nggaggtntnccccgtccgcgactccgacgcccggaattcccgggtcgacccacgcgtcgacagatatttctaatagccttttggttactacactcctgattcttatcaagggtgcacggctctcaagctgatctttatcatgtgatgatatatatgttcctgatcctgctgagactgagaaaatcaactgtttggggccaaaagaacttcaatatgtgttacttctggcttgatcgctgtcaggatgctcttcccaaaaccttttatctgaaaaacttcataggagagattcaggtcacacttatcgttctaggacatctgaaatggatccagattctgacctgattcgccgagcacgtatgatgatttcaattcagcgagttttgtgcatcaatgatacatccattgagttgtacttgtgcagttcaaaactgatcttatcttcacttggctttagcttg

SEQ ID NO: 99441 - DNA, 525 bp, Zea mays
  unsure (1)..(525): unsure at all n locations
nnnaaggtntttttaagaagtcgaagagcatgctcaaccgcgtccgaattcccgggtcgacccacgcgtncgcccacgcgtncgggccattgctcttcttgatcccctcacgctgcgagtgcaccacctggaggagaaaaaatacagggtttataatttcaaagcagctctcaccagcaagcagctcgtggagtacattgtgcttgacattgaaacagaatcgcctgaaatttgcatcgatgggtctcggtaccagttggcttatgcgcaggttgcccggatgtcagatttcgggaagaatgacgccatctttactgtgaggacgcatcttgggcatctgctgaatcctggcgatcacgcccttgggtatgatctgtatggtgccaacctgaatgatgatgacatggacatggctatgacccggtacagcttacctgaggtggttcttgtcaagaagagctatgagaagaggcctcgcacaccgcgattgaaagcttaaaagcttccngtggaagaagatgcttc

SEQ ID NO: 99442 - DNA, 531 bp, Zea mays
  unsure (1)..(531): unsure at all n locations
ngggcatggtgntnatcccgcaccctgcacgacncgcatgccgtaccggtccggaattcccgggtcgacccacgcgtccgcggacgcgtgggcgccgccgtcaccgtcgtcgctcgcgctctccgcccggaggggagcgagagtaggggcgtgtcggcggtgaaagcgactgcgtcagccatggcggacgaggagcattcggagaggagagaggaggcctccgagcttgcccccttcgacccgaccaagaagaagaaaaagaagaaggttgtcatccaagaaccttctgatgaagtggacaagcttgcagagaagacagaaacactggcagtcgcagaacccgctgaacttaacttcactggaatgaagaagaaaaagaagaagccggtggatcttgattcaactcttgatgagcttggagatggggaggacactcaagatgatcaagctgtagaggaacaaggggaaggcattgtgctgggaagtgtccctacatacccttgggagggaactgaccgggattattaatan

SEQ ID NO: 99443 - DNA, 529 bp, Zea mays
  unsure (1)..(529): unsure at all n locations
nnnttggcgggccnnnnccccgggtcccgccgcctaacgcacgccgtaccggtccggaattcccgggtcgacccacgcgtccgggattccggtcctattgtgttggccttcgggatcggttccaacaccagccgccgtcatgtcnaagcgaggtaggggaggttcggctgggaacaagttccgcatgtcactgggtctaccggtggcggccacggtgaactgcgcggacaacacgggcgccaagaacctctacatcatctccgtcaagggcatcaagggccgcctcaaccgcctcccgtccgcctgtgtcggcgacatggtcatggccaccgtaaagaagggaaagcccgacctcaggaagaaagtgatgcccgccgtcatcgtccgccagcgcaagccgtggcgtcgcaaggacggtgtctacatgtacttcgaagataatgctggagtgattgtgaatcccaagggtgagatgaaaggttctgcaatcactggacctattggccaagagagtgctcgcaccttggcc

SEQ ID NO: 99444 - DNA, 540 bp, Zea mays
  unsure (1)..(540): unsure at all n locations
atgggatggnnnnnnnnatcctggaaaactgnnnactactcnacngnctgtaccggntcggaattcccgggtcgacccacgcgtccgggagagagatctcgatccgcacaccttatgcctctcttcctctcgccccaaggacaacgaaaacatcaaacgagagaacgaaaggaaacagagcaagagcatcgctctcgaagcaaaacgcgcaccacgccgtcgccggccggccacttcgcacgtacgtaagacgcgcacgcaccggtgcatatatggggctcctgaaccagctgtgggacgacacggtggccgggccgcgcccggactccggcctcggcaagctccgcaagtacgcctccttctccccctcgtcgtcgtcntccgcggcggtggcggctgcngctgctgctggctccgcgccgcctccgggcgccgtgacgcggagcttgaccatgctgcggcggccggcggccctgtccgtcgtcacgtccccccgcaacgagtccagcttcgcgccgtttgtccccgttggcccggaag

SEQ ID NO: 99445 - DNA, 528 bp, Zea mays
  unsure (1)..(528): unsure at all n locations
ggggtgggagggccnnnnaatggtgcatgccgctacgcgatgctgtaccggtccggaattcccgggtcgacccacgcgtccgatctcctcggccgacacgtgctgaggccactgacgttgcaaatgccgttcttgatggaactgactgtgtcatgctcagcggagagagtgccgctggagcctaccccgaggtggctgtgaagatcatggctcgtatttgcatcgaggcagaatcttccctggaccacgaggcagttttcaaggccatgatcaggtccgcgcctcttccaatgagccctctggagtcccttgcatcatctgctgtgaggactggcaacaaggccaaggctgcactgattgtcgtcctgactcgcggtggcaccacggccaaactggtcgccaagtaccgccccagggtccccatcctctccgttgtcgtacccgtgcttacgaccgactctttcgactggaccatcagctccgagggcccagctaggcacaaggctgatctacagaagcctcaattcc

SEQ ID NO: 99446 - DNA, 536 bp, Zea mays
  unsure (1)..(536): unsure at all n locations
nggggntgcggtccntntacccggagtgcngagcgtaatngtgaacgccgtacggattcggggttcgcgccacgcgtcacgcctgcgacgcatggtcagcactgcctttgcacggatttggatccgagtctagcggcatggcggatctcgccggcgagcctgtggcgaggaccaacagcgatggcggcggcggcggcagcaaggactcgggcagcttcgagtgcaacatctgcctggacctggcgcaggaccccgtggtcaccctatgcggccacctcttctgctggccctgcctctacgagtggctccacgttcacgcgcactctcaggagtgtcccgtctgcaaagccgtcgtcgaggaggggaaactcgtccccctctacggccgtggtggcagctccgccgtaccccgtgcaaggtcggtggccggtgtggaaattccgagcaggccgaccgggcaagcgggccttcactggcccgcaggcgggacaccaataacaatacccgcaccaggaccccttggttaatgttgctgg

SEQ ID NO: 99447 - DNA, 524 bp, Zea mays
  unsure (1)..(524): unsure at all n locations
gggatggcgtgtctnnnccgcgacctgccagacagcatgctctaccggtccggaattcccgggtcgacccacgcgttctacacataccggatcataaaatctaccgttttattgatgatccagagcttcagctgtcgacaataagtgatggtgatcatcttgcagtttataagctcccaaagttggaaaagagggtgaattacattcagtttgtgcatcgtcatgaagatctggaccatggaaacaataacagcttgacatcttggaaaccgtaccgtgttcctcttcttgcacaaatttcttgcaatgaaattgtcacgggttttgatatccatgagttggtccataaaatgcttgtgcccgtgctaaagaattcggactctctgcatttggctggtcaaagttctgttttcacaagaactcatagttatcataccgacagcagcgaatttcagcttctgttgggtgatgatagccacacaaccctttgaaaaaaaaaataatgcttttacgggtccccacaa

SEQ ID NO: 99448 - DNA, 535 bp, Zea mays
  unsure (1)..(535): unsure at all n locations
nnnttgcccggcnaatcttgaaatccctncatntcnannnncntnnnnnnttngaanagccgggtggacgccacgcgtccggtttattctgagaacaacccttatgtgtgtcaccctaatccaatgcaagaaggacaggagctcttccgcaagggcctgttaagtgaacctgttcttgctttagaggctgaagttttgaagaatcctgataatgcttaaggttggaggttgttaggcataacacatgcagaaaatgatgatgaccaacaggccattgcatcaatgatgcttgcgttggaagctaatccgacaaaccttgaagatcttcttgctcttggtgttagtcacacaaatgaattgtagcacggagaagcattaaggtatctttataggttgcttcagaatcatccaaaatatggcggcccttgtcctccacaggcaacttgattaaccttatgggtctgattttgcgaattttatgtaatttttgtgtgttttaatccaccttatcaatgaggttttttaatcttattac

SEQ ID NO: 99449 - DNA, 541 bp, Zea mays
  unsure (1)..(541): unsure at all n locations
agatgccccgtnntaggctgttcctgcncttttagtcctcatgtaccggcccggaattcccgggtcgacccacgcgtccgaatcctactgtcccgctaggattacgtgcttaccctattccaaaacctcacagcggagaagagcgcaagatgttcgtgtgtgggcaccacggacaccacggccagaacccgacggcgcacgggggcgtgcaccaaaccaccttgaagatcttctgcaaggccgacaaggggtactgcctcacaggacgctactgcaacgtggtgctggcccccgccaacccgcgcgacgagcaccagcactggtacaaggacatgcgcttcagcacccatgtcaaggacgaggagggcaaccctgcgttcgacctggtcaacaaggccactgggctcgtcatcaagcactccctcggtcagtcccacctcgtgaagctggtgccgttcaacccagtgtaccatgacgagtcagtgctgtggactgagagcggcgacgtgggcaaggtgcttcgctgcattcgcatggagaa

SEQ ID NO: 99450 - DNA, 542 bp, Zea mays
  unsure (1)..(542): unsure at all n locations
tgagtctctnnagtggttgatcctgcnactatagctacagtacgtacggctcggaattcccgggtcgacccacgcgtccgaccacgcgtgcgcgaaggccgcggcccactcgccagctttgaggcccgcatgcaggggatcaccagcgaaatctggaacgcgcaccaactgttcgtcgttgtgttcgacaccgacaggctcaagggctccacgctcgtaaccaatggcgtgataacgggcgggtctgacgagtgggcgatctacggcggtaccggggtgtttgccatggcgaggggcgtcatacggagaaggtatctcgtcgacagggcccgtgggaacactgatgagctcaacatggatgtcttctgtcggccgtttggctcacagtcacagctgcaagataagatgcaagtgcaagggcatgggcagggctctagcgtcaccaagattggactatggtgtggaccgggagggtcggcacaggacatcacggcagagcggtcaccgtagcatgttcacagcttcaccgatcgtgctggcgt

SEQ ID NO: 99451 - DNA, 543 bp, Zea mays
  unsure (1)..(543): unsure at all n locations
tgatgcccnnnntaggctaatcatgagactttagaacattanagcactgctgtaccggtccggaattcccgggtcgacccacgcgtccgatcatcaagcataccctggagatcattcatttgctcaccgatgccaaccccatccaggtcgtcgtcgacgcgatcatcaacagtggaccccgtgaggatgccacccgtattggttccgctggtgttgtgaggaggcaggccgtggatatctcacccctgaggagggtgaaccaggccatctacctgctcaccactggtgccagggagagtgctttccggaacatcaaaaccattgccgagtgccttgcagatgagctgatcaacgctgccaagggctcatccaacagttacgccatcaagaagaaggacgagattgagcgtgttgccaaggccaaccgttgaactgagcttgtatcctggtgcactctgcgctggaaacttttatgtcgctggcagtcgtatcggttcttggtttaccaatgtttagagttttttgagacctatatgcggtttt

SEQ ID NO: 99452 - DNA, 533 bp, Zea mays
  unsure (1)..(533): unsure at all n locations
agtatgccggnnttagctggatagatcatgaagtactgcctcgccggtcccgaattcccgggtcgacccacgcgtccgcaagaccgcggagaacttccgcgcgctgtgcacgggcgagaagggcgtgggcaagtccgggaagccgctgcactacaagggctccaccttccaccgcgtcatccccgagttcatgtgccagggcggcgacttcacccgcggcaacggcaccggcggcgagtccatctacggcgagaagttccccgacgagaagttcgtgcgcaagcacaccgcccccggtgtgctctccatggccaacgccgggcccaacaccaacggctcccagttcttcatctgcaccgtcgcgaccccttggctcgacggcaagcacgtcgtcttcggccaggtcgtcgagggcatggacgtcgtcaaggccatcgagaaggtgggcacccgcaacggctccacctncaaggtggtcaaggtcgctgactgcggacagctctcctagatctctctgatctggtctgttcggc

SEQ ID NO: 99453 - DNA, 534 bp, Zea mays
ggagtcccttaagtgctgtcccaccactatagataatgatgtaccggcccggaattcccgggtcgacccacgcgtccgctggacgtccggcagtttcaagtttgaactgcccaccatttcttgctgttgaggcctgcagggagcgcttgggtgtccatccttgtgacaagaggaggagcatcacagagtaccgtgctctcttccctgccattgatttttcgctgatagagagtgacgaagatgttctctgggtaccagatgtcagagaaacctttgagtcactcgcagaaaggggtatgaagttcattgactggctatggacaagagaagagagagagatagccatcgtcacccatagcggtttattaagccataccttgcgcatgtacagcaaaaagtgccatccaacaagtacacaagaagtgagcaagtactttgcaaactgcgagctccggccttggtacctggtgacaggagtattctgggtcaaatggcccaagtacaacaactaccttggaaaatgaaaatcccggc

SEQ ID NO: 99454 - DNA, 540 bp, Zea mays
  unsure (1)..(540): unsure at all n locations
agtatgccnnnnntggctatcatgagactacagcactctatcgacctgctctaccggtccggaattcccgggtcgacccacgcgtccgcccacgcgtccgcaagtttttgaacggagatgttggacccaagaccattcatgttcctactggggagaagctttctgtttttgatgcggccatgagatacaaatctgagggccatgctactataatcctcgctggtgctgagtatggaagcggcagttctcgtgattgggctgctaagggtccgatgctcctgggagttaaagctgtaattgccaagagctttgagcgtatccacagaagcaacttggtggggatgggaatcattcctctgtgcttcaaagctggtgaggatgctgattcgcttggcctcactggacatgagcggtacagcatcgatctccctaccaacctcagtgagatccgtcccggccaggatgtgactgttactaccgacaatgggaaatctttcacttgcatcgntcgctatgacactgangtggagctggcgtact

SEQ ID NO: 99455 - DNA, 531 bp, Zea mays
  unsure (1)..(531): unsure at all n locations
gtatgcccgnnttgtgtggatagagcataagagatgagtaagaagtcctcgaattcccgggtcgacccacgcgtccgcgctcctcgcgccgacgtcgcgtctgctcctgtacaggtaaggagaggaagagggcgaaatggtgaagcgcaacatcgtcatgcccaacgggcacttcaagaagcactggcagaactatgtcaagacatggctcaaccagcccgcccgcaagcagaggcgccgcatcgctcgtcaaaagaaggctgtgaagatattcccccgcccgactgctggtcctctacgcccgattgttcaatgccagactttaaagtacaacatgaagtcaagggctgggagaggctttacccttgaggagctgaaagctggtggcatgcccaagaagcttgatccaaccattggtatatctgatgatcaccgtcgtaagaacaaatcccttgagggactgcatgccaatgtgcagaggcttaagacatacaatgccaagctggttatctttccaaagcgtgcgcgcaa

SEQ ID NO: 99456 - DNA, 529 bp, Zea mays
  unsure (1)..(529): unsure at all n locations
tgatgccnnnnttagtgtcgcatgatctcaaagaatgatacgcagtcctcgaattcccgggtcgacccacgcgtgcgcggacgcgtgggctcactcccactttactcttatccactgcggactggacgcgtgcgagaggcttgaccgagcagcagcagcagcagcagcgatggcgcctctgaagctgtacgggatgccgctgtgccccaacgtggtgcgcgtggccaccgtgctcaacgagaagggcctcgacttcgagatcgtccccgttgacctcaccaccggcgcccacaagcagtccgacttgctgaccctcaaccctttcggacagatacccgctctcgtccacggagacgaactcctcttctagtgccgtgcgatcaaccggtacatctccagcaagcacgcgtctgagggcacggacctgctccccgcgactgcgtctgtggcgaagctggacgtgtggctagaggtagcgttgcaccacttgtaccctaacgcgttgccacttggggttcaactgctcctt

SEQ ID NO: 99457 - DNA, 527 bp, Zea mays
  unsure (1)..(527): unsure at all n locations
tgatgccgnnntaggtcaccagcactctcagttgccctcgccagtctcgaattcccgggtcgacccacgcgtccgcagcgggactgtcgttgggatcaagtgcaatgatggcattgttctgggtgtcgagaagctggtaacctcgaagatgatgctggaggggtcaaatcggaggatccattcagtgcaccggcattcgggcttggttgttgctggtttggcagcagatggcagacaaattgtttcaagggccaaatcagaagctgccagttatgaaaaggtctatggagaacccattcctgtgaaggatttggcagatcgcgtagcaagttatgttcatctttgcacgctgtactggcggcttacaccttttggttgctgcgttattcttggaggttatgatatggatggaccacagctttacatgatagagtcctcaagagcttcctataaatacttaggtgctgcatttgggaaaggaatgcatgccgtagatactgcgatagaaaagttcgaactttcgtggg

SEQ ID NO: 99458 - DNA, 542 bp, Zea mays
  unsure (1)..(542): unsure at all n locations
ggaggcncngnnaagtgctatcccaccactaaaagaaaanctccgtaccggcttcgaattcccgggtcgacccacgcgtccggggaaatcaactttttgttaacccaaaagtgggagaattcactgatgggatggacatctactgagggtccatatgctaatggcagagaagcaggacttacattcaacagtgcggagtcagcaaaagcatattgtgtaaaacatggatggaattatgtggtacggaaacggcatacaccttttatgaagcctaatgcctacgctgagaactctaagtggaaaggccctctgaaggcggatcaagcatgagctctaggcctccaccaacatgtgaccctgtcactggaatgatgcgattctcctcctgagctctatagtctagacctcttgttcgtgagccttttctttcaacagagtgcgtcgtgaaagtacgagctagaatacgcatctatcaaacatgtgatatgcatgatctgcaatcaaacagaaatacttgcagaacgtgtggtccttgatgacat

SEQ ID NO: 99459 - DNA, 531 bp, Zea mays
  unsure (1)..(531): unsure at all n locations
tgatgcccgnntagtgtgtatagatctttagtactcatggaccggctccgaattcccggtcgaccacgcgtccgggtttgcaggcgttgtcttccggattttggtccactacactggtcagcctcttcttggagctaaagttgtagcctccatgctgatgtttgcgacggtcgctgggattctcatggcactcttcttgaacactgctggcggcgcctgggataatgcacagaagtacattgagactggcgctcttggtggcaagggcagcgagtcccacaaggctgcggttactggcgacacggttggagacccattcaaagacactgctggaccgtcgctgcatgttcttatcaagatgctcgccacaatcacgctggtcatggctccgatattcttgtgattaaccaaccactcatcaagcttgctattaaccctgcggagatgtacctatgcgaccaggtagatgaggtgtgtgtgtgtgtgtgttacctgcatgtgatgatgtaacggtccaatcggctcgcgtca

SEQ ID NO: 99460 - DNA, 537 bp, Zea mays
  unsure (1)..(537): unsure at all n locations
aggatgccnnnnattgaggtcatccagcnactcttcagtttagccctcaccagtctcgaattcccgggtcgacccacgcgtccgaaaagcgaggctgcgagagcggagagagagtgtgagggaggcgccgacgccgagtcctttcttcatcctgcatctgccgctgtttccgacaggatgtttctcacgaggacggagtacgaccgtggggtgaacaccttctctccggaggggcggctgttccacgtcgagtacgccatcgaggccatcaagttgggatccactgcgatcggtttgaatacaaaggatggtgttgtcctcgccgttgagaaacgtgtgacctcaccactgctggaaccaaacagagtggaaaaaataatggaaattgatgagcacatacgctgtgccatgagtggacttatcgctgatgctagaacactagtggaacatgctcgtgctgaaactcagaatcataggttctcatacggagagccaatgactgcataatcttcgacacaagctatctgtgacttagct

SEQ ID NO: 99461 - DNA, 544 bp, Zea mays
  unsure (1)..(544): unsure at all n locations
tggagtnctcngnnatatggctaatccagggactattgttactcatgtaccggctcggaattcccgggtcgacccacgcgtccgaacccgcacaacggcacgattctcctccttcgtccgcgtagctctcggtttcggcgatgtcggggcgcggcaagggcggcaaggggctgggcaagggcggcgccaagcgccaccgcaaggtgctgcgcgacaacatccagggcatcacgaagccggcgatccgtaggctggccaggaggggcggcgtcaagcgcatttctgggctcatctactaagagacccgcggagtgctcaagatcttcctcgagaacgtcatccgcgacgccgtcacctacaccgagcacgcccgccgcaagaccgtcaccgccatggatgtcgtatacgcgctcaagcgccagggccgcacgctctacggcttcggcggctaggccgnctgcccttctgatgctctgatgtgacggccgtggtcggttgaatgtctagttggccggtctactgtaacttgatctggatcttccat

SEQ ID NO: 99462 - DNA, 531 bp, Zea mays
  unsure (1)..(531): unsure at all n locations
gtgctgctaatgatacccctgcncgtcatccgacctgccgtaccggtctcggattcccgggtcgacccacgcgtccgcggacgcgtgggtctccctccgccactccttccatctgctcgctcccactccccgggtagctactaagcgtggcgtccgttaccgcccgcgccccggtcgcggcccttcgcccgtctgccgcatcgctcaagtcgtcatctgccttccttggccactctagccgcctcggtcgcaccgagtcacccacgaggcgcaacctcaaggcagaggccaagggcgagtggctccccggccttccctgcccctcctacctcgacggcatcctggcgtgtgacaatggcttggacctgttgctcctggcggaggacccatagaacctgctgcgtttcgtgcaggcggagctggcgaacggtcggaggtccatgcttggcgtgctcagtatgctcaatccggatgtgctgaccaaaggcggactgatcaacgctccgcagtgcgtcgactcactacaagatg

SEQ ID NO: 99463 - DNA, 532 bp, Zea mays
  unsure (1)..(532): unsure at all n locations
tgatggccanannatgagagctgatgtgagcttaagagaatgctgactgcagtcctcaattcccgggtcgacccacgcgtccgacagaacgtgcaactgatgttgtcttctcttctgctgatgactgcttagcaacagcttcagctgatagaactgcaaaattatggaaaccagatgggtcacttttgatgtcttttgatggccaccttgatcgtcttgctcgccttgcttttcatccatctggaaagtaccttggtacagctagctttgacaagacttggagattgtgggacatcaatactgtcaaggaactgctactccaagaggggcacagcacaagtgtatatggagttagctttcaccctgatggttctttggcagcatcttgtggtcttgatgcatatgctcgagtatgggatctgagatctggaagattgttctttacactcaagggccatgtgaaacctgtcctaggagtcagcttctctactaatggttatctggttgcaactggaagtgaagacaatttctg

SEQ ID NO: 99464 - DNA, 530 bp, Zea mays
  unsure (1)..(530): unsure at all n locations
tgatgccgnnntggagtatccagcactctacgagtagccctcactcagtctcgaattcccgggtcgacccacgcgtccgctcaaagatgatgctggaggggtcaaatcgttggatccattcagtgcaccggcattcgggcttggttgttgctggtttggcagcagatggcagacaaattgtttcaagggccaaatcagaagctgccagttatgaaaaggtctatggagaacccattcctgtgaaggatttggcagatcgtgtagcaagttatgttcatctttgcacgctgtactggtggctcagaccttttggttgcggtgttattcttggaggttatgatagggatggaccacagctttacatgatagagccctcaggagtttcctataaatactttggtgctgcattggagaagggaaggcaggccgcatagactgagatagaaaagttgaaactttcggagcttacctgccgagaaggcattgttgaagttgcaaagataatttatggagtgcatgacgaatccaag

SEQ ID NO: 99465 - DNA, 545 bp, Zea mays
  unsure (1)..(545): unsure at all n locations
aggatgtcctgtagtagtgtatcccacngctgtagtcctcatgtacacggccggaattcccgggtcgacccacgcgtccgaggacatgtactatatcacctgaatgcgttcgaaccatctacacctgtgaaggagactgtcatactcattgaccgcatacgaaagaacacacgaaagtagcgcgaaggctctgtgctgaaaaaatgagccttcaaagatcaaaacgaaatctcttgttaacactctgcttagccttgaagattgcacgataagctgcttatggcacgcttgatgcctgctgttccactaagcactattttactttgacattcctaactcaagcactatcaacatgttgagaaggaggaacagtgtccatagaagtgctcaggtgatcaaatggatgctgagcagacggcaatgaaatacaatgagaacatatgaactgatggcatgtgcactccagaaggataatagagctcaaggagcgcatagaatatggccgaatagacaggctcacgatctggattaagtaacttttgcgc

SEQ ID NO: 99466 - DNA, 525 bp, Zea mays
  unsure (1)..(525): unsure at all n locations
tgtgtgtccatcncttattgtactcatgtaccggtccggaattcccgggtcgacccacgcgtccgaggacgaggagggcaaccctgcgttcgccctggtcaacttggccactgggctcgccatcaagcactccctcggccagtcccacccggtgaagctggtgccgttcaacccggagtaccaggacgagtcggtgctgtggacggagagcggcgacttgggcaagggcttccgctgcatccgcatggtgaacaacatccgcctcaacttcgacgccttccacggcgacaagggccacggcggcgtgcacgacggcaccaccgtggtgctgtgggagtgggccaagggcgacaaccagagctggaagatcctgccctggggcgaccaggcctacgccgcgggaggcagcagcgccgccaacgcgccccgcttcggcggcggctgcgagcccaccgtacgcatctactgcaaggccgacgaggggttcagcgccacggtccgcaacggcgccgtgtgcctcgcgcc

SEQ ID NO: 99467 - DNA, 531 bp, Zea mays
  unsure (1)..(531): unsure at all n locations
tggatgccgtnnnttagctgagctagctcttaaagagtcgataacaggtcccgaattcccgggtcgacccacgcgtccgcaggatggggttgaagcaacagtttaactccttgaaggaaactatcagacatctcagccttctaccagcaggtggtggtggaatcctggcacacgctgttgcacgtgttgcttcttcaatcaagattaaaggcgataactctggagatggcattgagtcccttataaacaaagtagaaagcatgattgtcaatggagacttgagtacagcggccgatgccttggagcaagggctacatggaactgaagcagaggagatagctaccgagtgggtgaagcaagccaggaaacgcgctcttgcagagcagacacttgctctccttcgcgcttgtgcttcttcgaccacgttctcgtgattttgacaaccatttacccttccttttcttcgaccgcatttgccggtactccttgcaaccgcatattttttccccagaccatgctgcatatgtgtgg

SEQ ID NO: 99468 - DNA, 525 bp, Zea mays
ggatccggacttagtcagttttgatccatcagctaagactgtctgaccgcgttcgactccacgcttgagccaagcgttcgtacggcttctagaagaccactgaaggggtttcggggatgctgctgatggtgtgccttgtggaggtttcttctgctccaaagagacaagaacaaatactggaagaagaactacattctcccgataacaagccacttattgtgagagacgggaacagatggctaatgcaggacatagattgtagcgggttgtgcaagacgaggtgcactgcacattccatacccaacttgtgcactaaggcgtgtggcacatgctgagtgaggtgtaagtgtctcccacctggtacatctggaaatacgcaactatgtggagcttgctacactgatatgactacccatggcaacacgaccaagtgcccttagagaaactacccattgcgaaatgtgtgcttcattgattatgcaccgaacttcaagtgtactagtatgtgggggttcaattctgttt

SEQ ID NO: 99469 - DNA, 524 bp, Zea mays
gtgctatgctacgacctcagtcactcatggaccggtctggaattcccgggtcgacccacgcgtccggctgtggaagatgcctttgaactgcttcatgagatcaactaacgtgtccggactgggctatgggttggcgattgtttcatctacaataattcttcatggcgtcttaattactgtgtaggacgagaggtcacaactttgtttcacttggatcggccaatgtatttattaggatatcttgcaaaccaaagccgtgtctatcttattgataagcaatttaatgttgtggggtatactttactccttagtttgatcgaatctaaaacacttgtcatgcgtgcggatttctatcgcgcgaatgatgttatatcatctataccaaaggaacaatatgacagtgtggcgcgtttcttggaatcacagtgaatgttggacgaagccctcgagatagcaactgacactcattacaagattgacctggctgtgcaacttggtcgacttgaaatttcgaaggcgattag

SEQ ID NO: 99470 - DNA, 538 bp, Zea mays
  unsure (1)..(538): unsure at all n locations
ggagttccggttntagtgtgtcctggactgtagctctcatctaccggcccggaattcccgggtcgacccacgcgtccgaggactcctgggcagctcaaggctgtgctggcctcattaacccttgctccccaggacgtgatgaatgctctcctggaggctctctttggtggtgtgggtaagggattcaccaaagaggttgtgaagaacaagaagtaccttgcagttgctgtgccagatgatggtgcccagacccttctggttcacgccattgatgcttttggtgggaagtgcaaccctgatgcgctgaaagaggttcccgttgtcctcaaagccctctacgatggagatatcctggacgaggaaaccattgtggactggtacaatgatgctgtcgcagctgggaaggactcccaggttgtcaagaatgccaagccgttcgtcgagtggctccagagtgccgagtctgatgaagatggtgacgacgagtgaagaagccacgctgctctactgctaatggccaaactcgataatattatgt

SEQ ID NO: 99471 - DNA, 548 bp, Zea mays
  unsure (1)..(548): unsure at all n locations
gttatgttctcanntnttgtgcgttcatgaaaccttagctactcatccgacctgacgtaccggtccggaattcccgggtcgacccacgcgtccgctctcctcctcgcgaagtatcggcggcggctagcgcggcaggctagagcctcgttgctgaggaggggagatggcgggtatgggcgatatgccgatgaggcctgcgcggccgggcccgccgatgcagcaccgtggtccgcccccgatggcgcgcctccgccccgaaccaatcgaccgcgagaagacctgtcctctgctgctcagggttttcacaagggttgctggtcaccaccaaaatgaagagtttgcagtgagagggaaggaaccaaaggatgaagttcagatttacacatggaaggatgcgaccctacgcgagctcactgatcttgtgaaagaggttgctcttgcagcaagaaaaaagaatgcaaggctntcttttgcatttgtatacccagacaagaatggtcgatttggtgtcagacaggtgggttcgaccttcgcttacggtcatggan

SEQ ID NO: 99472 - DNA, 533 bp, Zea mays
  unsure (1)..(533): unsure at all n locations
cgtgggttcatgagacctctagctcgactacgcactgctcgtaccggtccggaattcccgggtcgacccacgcgtccgcgtggttctggtggttcacgtgaatacaactgaagaggacctccaccaggaacaggccgttgttttaactgtggagttgatggtcactgggcaagagactgtcaggctggtgactggaagaacaaatgctaccgttgtggcgaaaggggccatatagaaagaaattgccagaacagtccaaggaacctcaggcgtgagagaagctattcacggtctccatccccacgccgaggacggggccgcagccggagctacagcagaagccggagctatagccgatccagatccacgactggatctactaggggtggacgccgagaccgtgatgagaggagatcaatgagtcttagctacagcaggagcgcaagccctangcgttctgtgtcacctgcaaacganaatgagcgcagccgtacacctgatggcagtaggagccccatcccaagggacaaggt

SEQ ID NO: 99473 - DNA, 532 bp, Zea mays
  unsure (1)..(532): unsure at all n locations
ggagtcccggantttgagcgcagctagctcatcaccgactgcctaagaagtctcgaattcccgggtcgacccacgcgtgcgcggacgcgtgggtgctccattctcagccgccgccaatcccttcccgtgctccgcaaccgctgagtgagaggaagagatggccggcaagggcgatggcccggctatcggcatcgatctcggcacgacgtactcttgcgtcggcgcgtggcagcacgaccgcgtcgagatcattgccaacgaccagggtaaccgcaccacgccctcgtacgtcgccttcaccgactccgagcgcctcatcggagatgccgccaagaaccaggtcgccatgaaccccatcaacaccgtctttgatgccaagcgtctcatctgcaggaggttcagagatgcgtatgtccagagtgatatcaagctgtggcccttcaaggacatctctgggcctggtgagaagccaatgattgttgtccagcacaagggtgaggagaagcagattgcagctgaagagatctcctgt

SEQ ID NO: 99474 - DNA, 528 bp, Zea mays
  unsure (1)..(528): unsure at all n locations
agaatgccgtntttgtgtcaatagaacttaaagaatgagtaagaagtcccgaattcccgggtcgacccacgcgtccgcccacgcgtccgcggacgcgtgggatactttaggtcaaggaacatgaaaacccgtgttattggttgcccagagactatcgatggggatctgaaatgtaaggaggttccgacaagctttggatttgatacagcttgcaagatatactctgaaatgattggcaatgttatgactgatgcgagatccactggaaaatactaccactttgtgaggcttatgggtcgtgctgcttgtcacattacgctggaatgcgctttgcaaacacaccccaatgctgcactcattggggaagaggttgctgcatagaagcaaacccttaagaatgtcacaaactacattactgatatcatctgcaagcgtgcagatcttggttacaactatggggttatccttataccagaaggcctgattgatttcataccagaggttcaaaaactcatcgcggaattgaat

SEQ ID NO: 99475 - DNA, 528 bp, Zea mays
  unsure (1)..(528): unsure at all n locations
tgtgcgtcctgggactgctagctctcatcgtacggtctggaattgctgggtcgacccacgcgtccgggccggagcagccgcagtcccggcgatccctccgactgtcgccctcatacttactcgtgactgccttgggttctctttccaacaatcgagatgagccgtggcggtagcgccggtggtggtcaaagttctctgggttacctctttggaagcggtgagccccccaaaccagcagtggcaccagctgtaagtgctccacctgctgctgcaggtgctccacctgctgagaaaccacctgctgcaaagcctgatggcaccagtcagattgctgctggggttaccagccaaaccaataactaccacagggccgacggtcagaacaccggaaacttccttacggaccgtccttcgaccaaggtccacgctgctcctggcggtggctcttccctgggatacctgcttggtggcaactgatgccgctcaccaagctatcaccccacactgtcgccgcatgctttttctgan

SEQ ID NO: 99476 - DNA, 529 bp, Zea mays
gtgctgtttcctagaagcctaaagatcgatgcacctgacgtaccggtccggaattcccgggtcgacccacgcgtccgtacggctgctacacgacgacactatggcatttaacgcctacacaaacaccatctatcatgccactcatgatgtgggcttctgtcactgccaatgcactcaaactctcttctgtctccaaacctcatctcttgcctcctttatctttctccagatgcttatcttccgtcttggatggacttaagtacgctcattcacatgaatggctcaagcaccaatgctcagtcgcccccattgttatcactgaccatgcccagtaccatcttgtagaggttgcctatgtggagctgtcagaaccacatgacacagtttccaacaagtctggcttctgatcccgttaaactgttaaagcaacaagcgatataaacccttcaatctcgcatgagatcgcctatgtcaacaaaaagcttacaaaaactccttccctgttcaactcagcccattcgaagattta

SEQ ID NO: 99477 - DNA, 547 bp, Zea mays
  unsure (1)..(547): unsure at all n locations
gtaatttcactggatttagtgcgcgctgggacgtcagctncactacgaactgccgtaccggtccggaattcccgggtcgacccacgcgtccggcgtactgatatgtcaatatccaagagctctccttcctacttggccaagctgcaatgggaggaagaaaccagtactcagcatcaacggctctctgagcaaggatatcgttgagaatctgtagtaaacctggaaatacaaattatgctctggaataacatcaggtttctccaagacaacaactggtcttacgacaatgtcaaggtgtgaatacttaacctcttgctgctgctgcgttgcaaagggagctgaaacttcgatatcctttgacccttcaggcagaacaacctttacgataagcttttcaatgagaatctcctccaatggacaaccaaatgtgatattgagaaatctctttccatcagaatagaacacagactcttcaactcggaaaccataaccaacagcgaacgttgtttgccaaccaccagacaatggaaaccttcgtattattaac

SEQ ID NO: 99478 - DNA, 531 bp, Zea mays
  unsure (1)..(531): unsure at all n locations
gtgccgntatgangacttagtatcactcagcacctgctgtaccggtccggaattcccgggtcgacccacgcgtccgcccacgcgtccgctcgccgggctcgggcgttccggaagaaacaagcctggaaaatatatggtatataaacaactcgaccaaacccaagtccagacccgcagcgcccgccggaggcggagggaaccgagccggcgaccggcagaccgcagagaagaggcctggagccgaccgcagagaagaggccaggagccgaccgcaggcagccgccaccgcaccagaacccgaggtctcgaggcaatcgagcgcacgcgggtcgggggctgcggccatgtcggtgagttgcgggctcgagtgggtggtgtgccttggctgcacgcggtgggcgtggaagcggctcacctacatcggcgcctacgacagcgagacgtggccgccggcgtncgncgacgagttcgagcccgtcccgcgcctctgccgcgccgtgctcgcgaactacgacgaggagctctncagcc

SEQ ID NO: 99479 - DNA, 552 bp, Zea mays
  unsure (1)..(552): unsure at all n locations
gggatgtccccggtnngtaggcntcaatgatnactacgggancatcatgtgactgctctaccggtccggaattcccgggtcgacccacgcgtccggtcccacaccgtcgaggagttcctgcaggctgccttcggctacgccggcctcagctggaaggatcacgtggtcattgacaagaagtacttccggcctgcagaagtcgacagcctcaagggggacgccaccaaggcgaggaaggtgctcaagtggaagcccaaggttgggttccaggagctcgtggagatgatggtcgatcacgacattgagctcgccaagaaggagaaggtcctggtggatgctgggtaccgtgatcccaagcaacagccatagaaacatcacagttgcttcttgctcttgtggggctcggattcaaattgttcccctcatacatggtggttctcaggggtagaggttgaccgaagttactatcgatatttatcctggtaagaaataaggatngttgcaatatgatcttacagtgtggtcatttacttttcaaaaaaaaaaaaaaag

SEQ ID NO: 99480 - DNA, 532 bp, Zea mays
tgtgcgaccctgaaaccgcaggcactcatagcaccgccgtaccggtccggaattcccgggtcgacccacgcgtccgcccacgcgtccgctcgtcgggctcgggcgttccggaagaaacaagcctggaaaatatagggtatataaacaactggaccaaacccaagtccagacccgcagcgcccgccggaggcggagggaaccgagccggcgaccggcagaccgcagagaagaggcctggagccgaccgcagagaagaggccaggagccgaccgcaggcagccgccaccgcaccagaacccgaggtctcgaggcaatcgagcgcacgcgggtcgggggctgcggccatgtcggtgagttgcgggctcgagtgggtggtgtgccttggctgcacgcggtgggcgtggaagcggctcacctacatcggcgcctacgacagcgagacgtggccgccggcgtacgccgacgagttcgagcccgtgccgcgcctctgacgcgccgtgctcgcgaactacgacgaggagctctccagccc

SEQ ID NO: 99481 - DNA, 531 bp, Zea mays
  unsure (1)..(531): unsure at all n locations
gtggcgtccacgactttagctcacctacgaactgncgtaccggcttggaagacccacgcgtccggctacttttacacgtagatgctggaggaggatgtggaagttccagtctcatctgcaaatgaagctccaaacgatactatgaagatggacacagatgatgtgccaagtgatcctgctgctggatctgatgtgactatgcaggagcagcctcctgcagctggaaatggagcacaagataatgaggaaaagtctgtttcgatggaaactgatgcaaaggttgagccgtcaaaaaagaaagttaagaaaactactgttccggtccatgagttggtctatggggccttggctgcagctgacctgcagaaggctgtagagaaagagtatgagatggctcttcaagacagagtaatggaagaaacaaaggagaagaagaatgcttgtgaagcttatgtgtatgacatgcgtaacaagctatatgacaagtacagtgattttgtcacacctgaggacaaggaaggttngatcggt

SEQ ID NO: 99482 - DNA, 547 bp, Zea mays
  unsure (1)..(547): unsure at all n locations
agtagtcccgnanggtgctttctgagactttactcactaagcatcgctcgtaccggtctcgaattcccgggtcgacccactcgttcggggatgacttgcctcctgaagcacggcatttactcctcaaattggataagcaaactctgattgaacaagcacgcaagaatttctactgctcaaagtgcaatgggttgcttctggaaagttttgcatatattggtatatatgggaagtcattgcagcaagaagcttcatatatttgtcgactgatgacagctattgaatcaagagttacgcaaggagagcaagatggggctcatgacccatcaattcatccctggtgaggccttctatccacaaaagatggcttccttacacttcttgactgctttataaaagcataatcattatgtgtgcttcagaatgtatgagacaatgcacgggcaagagaatggtaacggaaaatgctttatcctgatgcctgtggtgctatttgcaaaggatggatctgtccttgaaatgctgactataagggtcatggtaataa

SEQ ID NO: 99483 - DNA, 535 bp, Zea mays
  unsure (1)..(535): unsure at all n locations
tggatgccaggnatgtggtagtgcctgcnactcttcagctgcgtacgcagtctcgaattcccgggtcgacccacgcgtgcgcccacgcgtccgcccacgcgtccgcccacgcgtccggcgatgacgatgacggagaagatactggcgcgggcgtcggagcgcgcggcgctggagcccggggagaacgtgtgggtcgacgtcgacgtgctcatgacgcacgacgtctgcgggcccggcgccttcgacatcttcaagaaggagttcggggaggacgccagggtctgggaccgcgagaagctcgtcgtcatcccggaccactacatcttcaccagcgacgaccgcgccaaccgcaacgtcgacatcctcagggacttctgtgcggagcagaacatcaagtacttctatgacatcaaggacctcaccgatttcagggctaatccggactacaaaggcgtctgccacatcggacttgctcaggaaggccactgccgaccaggcgaggttctcttgggcactgattctcatacatgcaatg

SEQ ID NO: 99484 - DNA, 515 bp, Zea mays
  unsure (1)..(515): unsure at all n locations
agcntacggnnnnnnnaactgaaccanagcatagcacacgccttggattcccggtcgagcacgcgtccgcggacgcttggccggacccttggccggactcttgggtccgattccaaacccaaatcaccgttccctccaaatcccattccctcggcccagaccagctcgcgaaatggacggcggcggcccgaaggcgaagaaggcggctgctgggcaaaagctaggcggcggcgggccgaaaaggaagccggtgtcgcggtcagttaaggccgggctccagttccccgtgggccgaatcggacggtacctgaagaaagggcggtccgcgcagcgcgtgggcacgggcgctcccgtgttcctggccgccgtcctcgagtacctcgccgttgaggtcctggagctggctggcaacgcggcgcgcgacaacaagaaaacccgtattatcccgcgccacctccttcttgccatccgcaacgacgaggagctcggcaagctgctgggtggggtcaccatcc

SEQ ID NO: 99485 - DNA, 508 bp, Zea mays
  unsure (1)..(508): unsure at all n locations
ngagatgctgttacacgaacgatagtagtatccccgtcctaattcccggtcgagcacgcgtccggggaaagagcttacgctgctggggttatgggttagcccgttcgtgctccgggcgcgcatcgcggtcagcctcaaaggcctcacctacgcttactccgaggagaacctcgacgacaagagcgagcttctcctcagctccaaccccgtgctcaagaaggtgcccgtgctcatccaccacggcaagcccgtctgcgagtcccagatcatcgtgcagtacgtcgacgaggctttccccgccgccgcacctaatttccttccatccgacccctacgaccgcgccattgctcgcttctgggcctcctacgtcgacgacaagttctacagcgcgtggatacccgtgttcaagggcaagacggcggangaaatggcggatgcggccaagcaagccgtcgcggcgcttgagacgctggagcaagccgtcaaggaatgctccaaagggaaggcc

SEQ ID NO: 99486 - DNA, 510 bp, Zea mays
  unsure (1)..(510): unsure at all n locations
ggacaagggctgagtatcgatcgtantgtagtgtaacctccctgaattgaatccgagtcgacctacgcgtgacgccgtacgctaaggctgtccacgggatctggtgttggcactgatccagatgctgcttgggcccgagcctgcggtgctgcagatgctgctgcccctgctgcagaggagaagaaggaagagcccaaggaggagtctgatgacgacatgggcttcagcctgttcgactgagagtctgagaccctcgctacccagccattagcaaattcgcttatgctgtccaagacttatcttacgttatgtctgtaggcttttgttattacaagtactcaagttttgagtttttgagatgtggctatgacaatgtgatgaagaatcctaaaccatcgtattagagtgaaacttggttctatataaagttccaaggttcttgaacctcaaaaaaaaaatanaaaaatattaaacttaaaagaagaatgaatgataatcataacccaggaa

SEQ ID NO: 99487 - DNA, 518 bp, Zea mays
  unsure (1)..(518): unsure at all n locations
gctagacagtggtaatcatagancaggtacgtatgcacaaccggtcctgaattcccgggtcgacccacgcgtccggaggagagaccgtgcactacacacctcacgcctgaaggccagatctaagccttctcgtcgtcgggcaatgacaacgatgaacatgtaagaaccaaacaaatcagagcacgaccatcggtctctaatcaaaacgcgcagcacgcacgtagcagagcgcgcatggggcttctggaccagctgtgggacgacacggtggccgggccgtgtccggactccggcctcagcaagctccgcaagcacgcgtacttctccccctcgtcggccgtgccgtcgacgaccgccgaaggcgcagcaccggccgccgtgacgcggagcatcaccatgctgcggtcggcagcactttccggcgccacgtcgtccgacaacgagtccaactacgcgccgtcgtcgacgatcgccgcaaacagcgcttccgaactcgccttccgcgcaacgacgacccn

SEQ ID NO: 99488 - DNA, 528 bp, Zea mays
  unsure (1)..(528): unsure at all n locations
gcgcgtgagncctgaccttcgctagctgcatggtctcggatttccggtcgacccacgcgtccggatggcttctatctccncttcggttcgggttctggttcgtgaggatcttccggggttcggtttgttgggtgagcggatcgagatggcggcgtcggatgttgagtaccgctgcttcgacggcggcctcgcctgtgccacggacgaccactccctgcacaacgccttcagcacctacggcgaggtcctcgagtccaagatcatcctcgatcgggagacgcagaggtcccgcggcttcggcttcgtcaccttctccaccgaagaggcgatgccgaacgccatcgagggcatgaacggctaggagctggacggtcgcaacatcaccgtcaacgaagcccagtcccgctgccggacgtgcaggcggccgcggcagtcggcacagtggtggaccttgaagccgcggctacagttgccgcaggccccctgatagccgctgcggctaccgcaatggcggccaattccgtggtg

SEQ ID NO: 99489 - DNA, 520 bp, Zea mays
tgacttagacagtgagaacctgctcatagtaggctactccctcctgaattcccgggtcgagccacgcgtccggacgacctgacgacacaagttcagaacaaggttatcctcatgagcagaatcgacgacgccgtctgcagggtccttcgtgtcaagttcaccatgggcctgttcgagaacccttaccccgactctagcctcgccggcgagctctggaaacaagaacaccgggaactggcgcgcgaaaccgtcaggaaatccctggttctcctgaagaacagcgagtccttctacgcttcgctgctgcccctcccgaagaagggccgcaagatcctggtcgccagcagccacgccaacgacctgggcaaccagtgcggggggtggaccatcacgtggcaaggaaacaaccgcaacaccactgtcggcacgacgatcctctttcggatcgaagccaccgtggaccccaccacgcaggtggtgtacttcgagagccccgacagcggcctgctgtgcccaaatg

SEQ ID NO: 99490 - DNA, 531 bp, Zea mays
  unsure (1)..(531): unsure at all n locations
gactggtggccatgacaggtttgccatgctcctcggtctgtaattcccgggtcgaccgacgcgtccgatggctccctccagaattcatgtaacatgtgtgttagttcatgggccttcaccaacaggaaggatccaccaaggagtttgttcaacatggatgaagaatacaattcctctggaatatagcgaagaatgcagctgggctcccatctttgtgaggcagtcaaatttcaagttacctgctgatccgtccactcctattatcatgattggtcctgggacagggctggctccttttagaggcttcttgcaggaaaggttagcattgaaacaatctggggcagaattgggcacttcaatccttttctttggatgcaggaaccgtaatatggactacatatatgaagatgagttgcaaactttccttgaggagggggcgctttctgagctaattgntgcattctctcgggaagggccaacgaaagaatatgtgcaacataagatgggtgaaaaggccacagatatttggaa

SEQ ID NO: 99491 - DNA, 531 bp, Zea mays
  unsure (1)..(531): unsure at all n locations
caggctggncagctccanagccagagtctccggtccggaattcccgggtcgacccacgcgtccgcccacgcgttcgcctactcctgctcctgcttctatcacagctagcgcctgctccccttcgccgatgatcatgtcttgcagcagcggcaagtgcgactgcggctccagctgctcctgcggcagctcatgcaactgcatgtcccctaacgtggagaccgccgacgtcagcagcatcaagaccatggtcctcgctgcgccgaccaccaaggccagcgccggcggcttcgaagcgggcaccgagggctgcggctgcgactgcaacacctgcaagtgcggcaccaactgcagctgctcctgctgcagctgcaactgagcgccggacggtccggcgatggcgcgcacgaatcgaccgaacgaccacgaccaagtcgataaatataatagcggcgtctaaataagatcctgtcaaactgaaccggcatcatcgatccattgacgctccctgaggtcatggtcatctgatacaac

SEQ ID NO: 99492 - DNA, 518 bp, Zea mays
  unsure (1)..(518): unsure at all n locations
cgttctagatgnttnncctgatctcgcatgtanagtatgactcaccggtcttgaattcccgggtcgacccacgcgtccggggggccatgcgggtattactattctgccactcttctcacaggccactcctgcaagcagttcggtgtcccaagaagacattgaggctctcaccaagaggacacaagatggtgggacagaggttgttgaagcaaaggctggaaagggctctgcaacattgtccatggcatatgctggtgctgtttttgcagatgcatgcttgaagggtctgaatggaattccggacattgtagagtgctcttttgtgcaatcaactgtgacagagttgccgttctttgcctccaaggttcggctcggcaagaatggagtggaagaagtgcttggtctgggtgagctcaacgacttcgagaagaaggggctggaaagcctcaaggtcgagctcaaatcttccattgacaaaggtatcaagttcgcccacgggaactaagcaacttccccgt

SEQ ID NO: 99493 - DNA, 510 bp, Zea mays
  unsure (1)..(510): unsure at all n locations
cgaggtgncctgacacgcaagatagtatgctcaccggtcttgaattcccgggtcgacccacgcgtccggaggctgttaaagaagtgcttggatctttagtaaaggctgcgaagcaagcgcgacttgagaaggttgagataccagtcaaaatcaagctgataccagagccatggacccccgagtcgggactcgtcactgctgccctcaaactcaagagggaggtgatcaggaagacgtacgagaacgatctggctgagttgtacgcatgatggttctactctttttgatacgtttagtgtggaaaatgtgtagagtgtcaatgtcacgctgagatctatggtaatttgataccgattatcgttctgggattattattattattttgttcaggtagaagagatatataaaccttgaaattttgagttatatggcttctcttgatgccgaaaaactatattgcgatgaaaaaaaaanaaannnaananaaaaaaaaaaaaaaaaaaacaaaaa

SEQ ID NO: 99494 - DNA, 523 bp, Zea mays
gcgggtgtgcccagctggaagcatgctctccggctggaattcccggtcgacgacgcgtccgcccacgcgtccgcagctctcggcttctgtctctcatcggcacacccgagctcgcgccctccggccacgtcgaggtccgagtcctgctttgatggcgaccgacgtgactgagactcccgcgccgttggtggatgcggccccagaggcgcccgccgacgccccggcggcgcctgctgccgacgcgaagccggccaaggccaagaaggccaccgcgccgaagaagcgcgccagcccgacccacccgccgtacgccgagatggtctcggaggcgatcacgtcgctcaaggagaggacggggtccagcagctacgcgattgccaagttcgtggaggacaagcacaaggccaagctcccgcccaacttccgcaagcttctgaacgttcagctcaagaagctcgtcgccggcggcaagctgaccaaggtgaagaactcgtaccagctgtcgttcggcaccaagccggat

SEQ ID NO: 99495 - DNA, 520 bp, Zea mays
  unsure (1)..(520): unsure at all n locations
cgtntagatgtgctacgttacctgacaacagttacgctactacccttcttgcaattcccggntcgggccgggcgtccgccctgacaagatccactttgttcccatctctgggttttaaggtgacaacatgattgagaggggcccgaccttgactggtacaagggccgaaccctacttgaggctttggacttgatcaatgagccgaagaggccttcagacaagcccctgcgtctccccctacaggatgtgtacaagattggtggtattggaactgttcctgttgaacgtgttgagactggtatcatcaagcctggtatggttgttacctttggtcctagtggccttactactgaggtgaagtctgttgaaatgcaccatgaggctctccaggaggcccttcctggtgacaatgttggcttcaatgttaagaatgttgctgtgaaagatctgaaacgtgggtatttgggcttcaacttcaaggatgaccctgccaaagaggcttgtaacttcacttcccaga

SEQ ID NO: 99496 - DNA, 514 bp, Zea mays
ggtatagcgctgtgctgactcgcctagacagtattctcaccggtcttgaattcccgggtcgacccacgcgtccgaaatggctggaagcaagcccctttatgtagtttttgcgcagcgtaaagaagacagaacggcaaggctacatgcacagttttcacaaatgcgtcctgttgcaatggcgccttcaatacgtcctcgcatgcccatgtttgcacctggtgtccctggagttcgtcagcatctggtctatggtcagccaccaccagccttcatcaaccctcaggctggatttgcttttcagcaacctctgatgcctggtatgaagcctggtggtccaatgccgaactttatgatgcctatggctcagcaacgacagcaaccacagcgtcctgcttgtaaacgtgctggtggaatgcagcaacccatgccaatgggtggtcaacaacaagtggtccctaaaggtggtccgggctatcgctatcctactggacgtggaatggctgatccttgcatt

SEQ ID NO: 99497 - DNA, 530 bp, Zea mays
  unsure (1)..(530): unsure at all n locations
caggctgagcccagctgcgaagnagatctccggctctaattcccggtcgacccacgcgtccgcccacgcgtncgcccacgcgttcgcggacgtttgggcagttttttggactctacacaaaactggtatcttcaactaattatgtgacacgaagacaatcagtgaagtttctttcagagtttctgttggaggccccaaatgctcaaataatgaagcgttacattttggaagttcattacttaaacattatgatgggcctgctaaaagattcaagcaaaaatatcaggatatgtgccttccacatttttaaggtatttgttgccaatccaaacaagcctcgtgagattattcaggttttggttgagaatcacagagaagtgttgaagctacttcacaatcttcccacaagcaaaagtgaagatgaacagcttgatgaggagagagattaattatcaaagaaatcgagaagcttgtggccgtggcaatataaacccctcangaaaatcgagcgtattctttgaaaacatact

SEQ ID NO: 99498 - DNA, 537 bp, Zea mays
  unsure (1)..(537): unsure at all n locations
cgatggtgagccctcgcccaggtacgcnagnagccaccggtctgtaattcccgggtcgaccgacgcgtccgcccacgcgttcganaaagaacaacaacatgtgtaggtactgctgtggttatagtcatgctnaggacgacattcctcatggtgccaataatgctgctggtgtggaagagccactggatcctcgtggtgaccttcatcgtgctgtcgctgatggtggaggttccctacttcgtggcctgcatactgaagatcgaccagggcggctgggtgccgctggtggtggcgacggccttcttcgtcatcatgtacgtgtggcatttctgcacggtgaagcggtacgagttcgagatgcacagcaaggtgtccatggcgtggatcctgggcctgggcccgaacctgggcctggtgagggtccccgggatcgggttcgtgtacaccgagcttgctaacggcgtgccggacatctttctccacttcatcacccacctgcccgggatccactcggtggtggtgttcgggtgcgtcaag

SEQ ID NO: 99499 - DNA, 517 bp, Zea mays
ggtgtaggtggtgcgctgactgccatgtacgtcagtacaaccgttcctgaattcacgggtccacccacgcgtccgcccacgcgtccgggaaaacctctcttcactatttctttccctggttgagaacaacgatgggaggacaaagttcttagaccatgacgcttggattcaattggatggaattctaccatctatgaaaaagttccgcaagctagcagagttgcttgatatgtcattgaagtccatcacatcatgttgggaaagtggagacctaattagatgtggtttcacatcatctgaggtgcaaaatttcatcaaagcaatattcgctgactcgcctcttaggaaggagtgcctaagatggatcgttaggactccagcttagaatacagaaacagcatatttctgtctgtgggtcaatgattttttttttcatattcttttgtccaccataccatatagtgaagtattaattggtatgagctcagtttgcactggagacagacttgcaatctga

SEQ ID NO: 99500 - DNA, 513 bp, Zea mays
gttaaggtgctgtgtgactcgccaagacagtactctcaccggtcctgaattcccgggtcgacccacgcgtccggacgaagcttcaccccctgtcacctgaagttatctcacgccaagcaacaatcaatatgggtaccgttggccatgtggctcatggagagtccactgttgttaaagctatatctggtgttcagactgttcggttcaagaatgagctggaacgtaacattactataaagctgggttacgctaatgcaaaaatctacaaatgtgacgatgacagatgtccgcgaccaatgtgctacaaggcctatggaagcggaaaagaagatagccctctatgtgatgtgcccggatttgaaaacactagaatgaaactactgagacatgtttcttttgttgattgcccgggacacgacattctcatggctacaatgcttaatggagctgctatcatggatggagctcttcttttgatcgcagcatatgaaagttgtccacagccccagacat

SEQ ID NO: 99501 - DNA, 530 bp, Zea mays
  unsure (1)..(530): unsure at all n locations
agatgtgtggcccagctggaagcagngtctaccggctcggaattcccgggtcgaccgacgcgtccgcccacgcgtccgcccacgcgttcggcgctttcgtcgttgcacgcagggctgcgacgcgtcaggtctgctcaacgcgaccggcggcatcgaggcggagaaggacgcggcgcccaacctgacgctgcgcggattcggcttcatcgaccgcatcaaggcgctgctcgagaaggagtgccccggcgtggtgtcctgcgccgacatcgtcgcgctcgccgcccgcgactgcgtcggcgtcatcggcggcccgtactggagcgtgccgacggggaggcgcgacggcaccgtgtccatcaagcaggaggcgctggaccagatccccgcgcccaccatgaacttcacccaactcctgcagtccttgcagaacaagagcctcaacctcggcgacctcgtctggctctcgagggctcacacgatcgggatcttccaatgcaactncttcagcgagcgcctgtacaacttcacgg

SEQ ID NO: 99502 - DNA, 515 bp, Zea mays
agtagagattcttggttccgactctcgtatgctacttcgtcttgaattcccgggtcgacccacgcgtccgcccacgcgtccgcggacgcgtgggcggacgcttgggctcgggcccttcgagtgctacccggacggcaaggctgcggcgcacgtcggcgtgtacgagagcagcgtggaggagctgcacgtgccgtacattgcccccgtggagtgcggcggtcgggcggacgtcatgtgggtggcactccgcgacgccggcgggctcggcctgtacgcgtcggctcacggcggctccccgccgatgcagatgagcgcgagctactacggcgccgcggagctggacagggcaacgcacgtccacaggctggtgaagggggacgacatcgaggtgcatcttgaccacaggcacatggggctgggcggcgacgacagctggtcgccgtgcgtgcacgagcagtacctgctgcccgcgacgcggtacgccttctccctgcggctctgccccctgctgccgt

SEQ ID NO: 99503 - DNA, 526 bp, Zea mays
  unsure (1)..(526): unsure at all n locations
agtcattagagggtgggtacgatcgacatgtaaagtacgctctaccggactggaaggttcgacccacgcgtccgcgcaggacgccgtgatcgcgttcaagacggttctctggttctggatgaacaacgtgcaccgtgtgatgccgcaaggcttcggcgccaccatcagggccatcaacggcgccctcgagtgcaacgggaacaaccccgcccagatgaacgcgcgcgtcggctactacaagcagtactgccagcagctccgcgtcgacccagggcccaacctcacttgctaggccagcagctcctgctagctcgtccacaataaatgctcggcgtcgcaccctcgcgaaaccaagagtttactgactagtacgagctaactagcatgcagtaataataatcatcgtaataataataataaaacgacggggctgagccactttgttcgacctgtatgaataatgaaacaactgtatgttccctcggtaaaaaaaaaaaannnannnnnnaaaanaaaaaaaaaaaaa

SEQ ID NO: 99504 - DNA, 519 bp, Zea mays
  unsure (1)..(519): unsure at all n locations
cgaatagcgtggtgcttacttgcacatagtaagtctcacccgtcctgaattcccgggtcgagccacgcgtccgctctgcggcgcaacggccacaccttccccggtcccgcctccgtctctgtccagcgggcctgcagtctgctcgccgaccgcccgcctgtccctccctcctcgccgccatgaacaacctgctcacggattcctttgagctccctcagcgggactcctcaagagacgcagatattgaaatgggaatgcatcatgctgatgcttcagacaacttgaaagatttcttgaagaaggtcgatgcaattgagagtataattgcaaagctgacaaatctattgaataagctccagactgcaaatgacgaatccaaagcagttacaaaagcaagttccatgaaagcaattaagcagcggatggagaaagatattgatgaagtggggaaaattgctcgtcaggcaaagacaaaagttgatgaactggaaagagataacctatcgaataagcaaaaan

SEQ ID NO: 99505 - DNA, 518 bp, Zea mays
  unsure (1)..(518): unsure at all n locations
ggacggagcgggtgcgctaccgccacaagttctnctttccgnctgattnngnaccgggcgggcgggcgtccgctggagatgatggagaaagctatagcagctgttaagaagaatccactgcccaagtatgagaagtccttaattcttctaggactaatgaagtatgaagaagctctggatgagttggagcggctaaaggagattgcacctcatgagagtagtatgtatgcactgatgggaaagatttacaagcaactcaatattcttgacaaagctgttttctgcttcggcattgccctggatttgaaaccacctgctgctgatcttgctataattaagtccgcaatggagaaagtacatcttcctgatgaactgatggaggatgacctataagttcactcaagcatcgtgagaaatgaacatttactttcgggtcatggatacccggctgggcttcnggttccgggcctatgggcctgcttgggcttctcaaggggaactcggaagtcggagctttg

SEQ ID NO: 99506 - DNA, 515 bp, Zea mays
  unsure (1)..(515): unsure at all n locations
tgtctagtggntagtgctgacagcatatacagcatcgacgaccggtcttgaattcccgggtcgagccacgcgtccgacaagccaaagttgcaaagatggcttgatgagtttggggagtactatagcagagttgtggtagggctttctttggttgttgcacttgtgggaccattactttttaagtggcctttttttggtaactcaggggttcaatttaccgtggattatgacttatggtggctgcatctccctgtgcattggctgtagctccattggcatatgcaactgcaatcagttctcttgctagtaagggaattttgttgaaaggtggccatgtcttggatgctctttcgtcttgtcagtctattgcttttgataagacaggcacactaacaactgggaagcttatgtgcaaagcaattgagcctatccatggacatttgggtgtgaaaagtggtcgtagtaatccttcttgctgcactccaaactgtgaaagtgaagcattagctgttgct

SEQ ID NO: 99507 - DNA, 509 bp, Zea mays
  unsure (1)..(509): unsure at all n locations
agcttgctgtgnccaactccgacgccanttctacccttctaattccgtcgacccaccgtcgctacctcgcgacctactctgacttcactcttatctccaccgatccatgagctataaactctaactccgccggccactccttccccaacacccaacacatctcaacctctgctatgcgcaatgcatacatccagaccgaatcacgccgtcccttgccaaaaatctcccaatgtgatgaccacgatcccgcttgcccaaaccgatttactttcatattccacaaacccagacatgaccaaaactgctgcaactgccaatacacaggatcatctttcaagcaccccacaactgataagctagactcttatcctgcataaccctgctccaagaaatcccttcgctgtctgacaggcagccctacgcaatgctgatgaacccaattgcatgcactagacatactggccctatcatttactatacatactatccataagacactgtatatgtcc

SEQ ID NO: 99508 - DNA, 518 bp, Zea mays
ggagagagtgtgagaactgtctattcgtacttgcgatccgtcttgaattcccgggtcgacccacgcgtccgcccacgcgtccgcccacgcgtccgcccacgcgttcgggaagggttgtgtcctagccagccggcgaagatgagctgctgatggtaatgatgatgataagaggccactgctaccctactacgtaccctcctctttgtgtgctgccatccgtccccgttagacgatcgaggagagaataacgcagagctctctgctcccggcctgtcttctgccgtcccggccgtttaatttactagtgtgttcgtcctatatgtttagcagcagcaggtgtattgtgcgggtatgtaatggtattgcaactatattgggtgtaaaaccataataaatgtgggcaaaaaaaaaacaaaaaaattaaaaaaaaaaaaaaaaagggcggccgctctaaaggatccaagcttacgtacgcgtgcatgcgacgtcatagctcttctatagtgtcacctaaattc

SEQ ID NO: 99509 - DNA, 535 bp, Zea mays
  unsure (1)..(535): unsure at all n locations
agttnttgcaagagagcggatgctgatacagcatagtacgtattgctctaccggtcttgaattcccgggtcgacccacgcgtccgcccacgcgtccgcccacgcgtccgcggacgcttgggtcctcgcgccgccgccgccgccgccgggacggaaggaagaggaggagcaaggagcacgacgcgatgggccactccaacgtgtggaactcgcaccctaagaactacggccctggctcccgcgtctgccgggtctgcgcgaaccctcacggtctgatcaggaagtacgggctcatgtgctgcaggcagtgcttccgcagcaacgccaaggacattggtttcatcaagtaccgttgaagaggccactgtgctgctgtggagaacttcctacatcaaagaaatgggtccttcattagaaggcctaatttatgcgctttagctttttgttcagaacttgagactcatgtgttaaactcgacttgttaaagttttgatggctactttgtgcttgttggaccagctataatcagaagattg

SEQ ID NO: 99510 - DNA, 525 bp, Zea mays
  unsure (1)..(525): unsure at all n locations
agctttgtgaggtagctgatgttaggtctccagtatgctgtaccgtcnctgaattattgggtcgacccacgcgtccgcttcatggttttgctatttctcggttataattattgcttctcttcctctaaagaccaatgagaagtcagtgtggttcgtgatgattggcatgatcatatgaaaagtttgaagagatattcttttataatgacatgttccctcacatgcttggatgtttggcatttttcagtcatttagcagaaccaaagacatgacatggcgacctgatctatttagtgatagcatggcggctagtggaatagaaactggtacaaaattgtacatttcaaacttggactatggggtctctaatgaggatataaaggagctgttttcggaagttggtcatttgaaacgctttgctgttcactacgatggttatggcccgccaaatggcactgcagaggtggtgtttacacggaggagcgatgcaattgctgcactgaaacgttataataatgttctacn

SEQ ID NO: 99511 - DNA, 535 bp, Zea mays
  unsure (1)..(535): unsure at all n locations
agtntagttggaggggtgcggctaactgaagacccgcacatcactgtattgacgtaccggtctggaattcccgggtcgacccacgcgtccgcccacgcgtccgcgccaatgatatctgaagttgcactccttttctgaagcagaaatagagggggcgtgcaacatttcacttgtgctgctgcatcattgggtcatgggttttacaggtataggtcaactaggctcaaagatacacaggttatgcgagatcaagatctactgtaccatgaattaagatttaagagagagacgttgtgcgcctcttgttacgacacttgatgaacagcatagggaatgataccatcatagttttagtagtcaaaaaaaaaaaaaaagggcggccgctctagaggatccaagcttacgtacgcgtgcatgcgacgtcatagctcttctatagtgtcacctaaattcaattcactggccgtcgttttacaacgtcgtgactgggaaaaccctggcgttacccaacttaatcgccttgcaacacatccct

SEQ ID NO: 99512 - DNA, 503 bp, Zea mays
  unsure (1)..(503): unsure at all n locations
atggtgttgttactgattattgacgtactgccggtcctggaattaccgggccgacccacgcgtccgcccacgcgtccgcatgcatcaaccagcatttactgcggatcgatgggtgctgttacccgcgtcaggctttattctaagttaaatcctaaggaaaaaaaatggtgcttcttggtgctgcaaaaaaaaaaaaaaaagggcggccgctctagaggatccaagcttacgtacgcgtgcatgcgacgtcatagctcttctatagtgtcacctaaattcaattcactggccgtcgttttacaacgtcgtgactgggaaaaccctggcgttacccaacttaatcgccttgcagcacatccccctttcgccagctggcgtaataacgaaaaggccccgaccgatcgccctttccaacagttgcgcagcctgaatggcgaaagggacgcgctcttgaacggcgcattaagcgcggncggtgtggtggttacgcgcaccgtgaccgt

SEQ ID NO: 99513 - DNA, 518 bp, Zea mays
  unsure (1)..(518): unsure at all n locations
taggagatgtggttcaaagggttgnagtancgtcncggcctggaattaccggtccgacccacgcgtccgggagaaactgtattttgagacagagcggtttgtccgagaaaagcaacttaaggagcaggaggaatcactgcaggaatgggagaaaaagctgaaggaaagtcagaatagacttaatgagttgcagagatctataaatgagcgagaggagagagcaaataagaatgatcaacttttcaagataaaacaggacgaactggaggaggcacgaaggacagtggaggccgctaaagttactctgaaagtcaaagaggatgatattaacaaaagactaaatgaattgcatttacaggaaaaggatgctgactcaaagcgtattgcattggaagagcacgggaaaaaattggatgagagagaagcaaaggtcacttatagagaaaaagaagggcttcagaaaccttttgaagatcattaagtggagccttgatcccaaaagactggattttggaata

SEQ ID NO: 99514 - DNA, 538 bp, Zea mays
  unsure (1)..(538): unsure at all n locations
gtacggtcactgatgttaacttgtgangcaggtgcaatccgtcttgaattaccgggtcgacccactcgtccggacagactggggaaaagatattgtctggactaatggatcagttacagaagatatgctaactgatttcaagatgcatgtgtcatggttggcggtcaatttactgcatacctaaacgggttgcattcaaaggttctgcacctctgaatctttcagatcgtcttcaccaggtgcttcggtgggctcttgggtctattgagatcttcttcagcaatcattgccctctttggtatgggtatggtggcggtcttttattctacttaagttttttttacttcttccccaatttttcttcctttttatctatttattcttttgttgttaatttttatttctcttctttttttcctcttctcttattattatgtttcactatttacttctttttttattatcttacccttgttttcacttttctaatgtttccttcatcttattcctcttctcaatttcatcttattatcctttt

SEQ ID NO: 99515 - DNA, 525 bp, Zea mays
  unsure (1)..(525): unsure at all n locations
cggagggttgctgatgttacganatcatacnattgacgttccggtctggaattaccgggccgacccacgcgtccgcccacgcgtccgcaaaaccctagctcgcccttcccaattccccatttcggccacaccctcggggcctccacggatccacccctgcttcaggttacctgtgccagcgacgccggtagaagccatggacagctctctcgcgagcgcggcggcgatagccgatcagcgccagaagatcgagcagtaccgccacatcctcgcctccgtcctatcgtcttccccaccggacatctctcaggccaagcgcttcctcgaccacatggtttccgacgaagttccgctcgtggagtcccgtcaattgctccagacgttcgcgcaagacctagggaagctggagtcggacgcgcagaaggaggttgcccactacgcgctcacgcagatccagccgcgtgtggtctccttcgaggagcaggtggtagtgattagagagaagcttgcagaactatatgagtc

SEQ ID NO: 99516 - DNA, 514 bp, Zea mays
  unsure (1)..(514): unsure at all n locations
tgagaagtgggttcagtcgatcgagtancgtcncggnctggaatacccgggccgacccacgcgtccgatgcgcttcagcacccatgtcaaggacgatgatggcaaccctgcgttcgccctggtcagcaaggccactgggctcgccatcaagcactccctcggccagtcccacccggtgaagctggtgccgttcaacccggagtaccaggacgagtcggtgctgtggacggagagcggcgacgtgggcaagggcttccgctgcatccgcatggtgaacaacatccgcctcaacttcgacgccttccacggcgacaagggccacggcggcgtgcacgacggcaccaccgtggtgctgtgggagtgggccaagggcgacaaccagagctggaagatcctggcctggggcgacgaggcctacgccgcgggaggcatcagcggcgtcaacgcgccccgcttcggcggccgcggcgaagccaccggtcggatttactggcagggcgacgagggggtcaan

SEQ ID NO: 99517 - DNA, 502 bp, Zea mays
  unsure (1)..(502): unsure at all n locations
tcggtctgnttcggttctanctacgtacgtcgcggnctggaattcccggcccgacccacgcgtccgcccacgcgtccggctgaagatgtccaggctctcctgcgccatgaacctcacctccgacgggaccggcgcgcaccacggctggtactgcaactacctcgaggccacggtcacggggccccacctcgggtgcgcgcagcagctcttcaccgtcgagcagtggctcgccaccgacgcgtcgccctaccgcctgtacgcggtcgtcgacaagtgcaagacgaagcggcaggagccgcgacgctcgccggccggcgaggccgaggccaccgtgaccgtgctctaggtacgaccagtagtaaatcatcgacagaggctagctcctgcctctgctgtgtgtaattactgtatgtgagtgaccgatcccatcggattgcgttcggcttgtggacactctgcgaaaacgcccagggggttcgctttcgccccttgtttttacaag

SEQ ID NO: 99518 - DNA, 538 bp, Zea mays
  unsure (1)..(538): unsure at all n locations
agtatcgttaatcagcggtcgcgntcgctgagggttacggggctcgacgtgtgacgtaccggnctggaattaccgggccgacccacgcgtccggcagaggacactactcctcagaactctcccttccctcttgtaggggccaaaagggtcagagagctaggaagaagagaactagtgcccaagcctaacaagaaagcaagctcttctgcaactgttggcattcgccttaatttgtatccatcccaatggcaggcctatctctggaacacccctgggcattcactttcggcctcctaggcaacgttatctccttcatgaccttcctggccccgataccgacgttctaccgcatctacaagagcaagtcgacggagggcttccagtcggttccgtacgtggtggccctgttcagcgccatgctgtggatcttctacgcactgatcaagtccaacgagacgttcctcatcaccatcaacgcggccggctgcgtgatcgagaccgtctacgtggtcatgtacttcgtctacgcgaccaagaa

SEQ ID NO: 99519 - DNA, 525 bp, Zea mays
  unsure (1)..(525): unsure at all n locations
gtgtggnttgctgaggtccgaagatcgactactgacgctccggtctggaattaccgggccgacccacgcgtccgcccacgcgtccgggcgaggcaaaagcattgttaccacagacagcgcgcgcttcaaggccttgtttttttgagataacaaggaggagaggaggagatggcggtcacgatcacgtgggtgaaggcgaggcagatcttcgacagccgcggcaaccccaccgtcgaggtggacgtgggccttagcgacggcagctacgcgaggggggccgtacccagcggcgcatccactggaatatatgaggccttggagttgagggatggaggatctgattatcttggcaagggtgttcttaaggctgtcagcaatgtaaataacattattggaccagcaattgttggaaaggaccccactgagcaggttgagattgacaacttcatggtccaacagcttgatggaacctccaatgagtggggctggtgcaaacagaagcttggagcaaatgccatccttgcg

SEQ ID NO: 99520 - DNA, 513 bp, Zea mays
  unsure (1)..(513): unsure at all n locations
cgtgtagtgtgttaaagggtttgagtaactgcccggtctggaatacccgggccgacccacgcgtccgccacgtttgcgaacagctctggagatgctgttatcgacacaagagatagaaaggcgtctagaagaggtttctttgcccttgatcattttgcacggtgaggctgatatggttactgacccggcggttagtaaggctctgtatgagaaagccaagagccaagacaagaagctgtgcctctacaaaggtgcgtatcacgctatcttggaaggtgaaccggaccagacaatattccaagttctcgatgatatcatatcctggctcgatcagcattccacaaaagaaggtatatcgttgtgaatcaggcagcgctgttcgccaggattgggtgaattcctttggcaatgctgtatcgcttncggttggggatcccggattcaacggtggggattccatttttgatatgaccctggtaaattcttagntcagattattgatgtctccgtcag

SEQ ID NO: 99521 - DNA, 507 bp, Zea mays
  unsure (1)..(507): unsure at all n locations
tagtgtgtcagtcctatctagtantcgtccggcttgaatacccgggccgacccacgcgtccggcagatccgtaactttggggatgctgtctctgtgtgcactcgctcgcccgagaagctggggcgcggatccttgacatgtatgaggcgcttgctgaggtgatccctgaactaaaggagctgttctttgggagttatggnggtgatgtcatccatgatctggagggggttcttgaaaggcttggtgacgcggtcaagggtacccttcttgagtttgggaaggtcctacaacaggagtcatcgcggcgacccatgatggctggtgagatccacccaatgacacgctatgtgatgaactatctcagattgttggtcgtttactgtgacacacttgacatacttttggatgacagtggtgctggagctgtagatcattaatatttacataatggcaccgatgangatcatgagtatctgaagagtttgacctcattttgacgcccgttag

SEQ ID NO: 99522 - DNA, 517 bp, Zea mays
  unsure (1)..(517): unsure at all n locations
ggaagctgcctctgttgtttcagtgtgccttattancttccctnctgggtcgaccacccgtccggaccgagcgaattgaccacagcttctcaccttcgctattttcgatggcacccaaggcggacgggaagcgggctgctaataaggcggcagaggatgagcccgcgacagagaaggcggataatgctccggcggggaagaagcccaaggccgagaagcgcctcccggcgggcaagttctccggtaaggagggcggctagggcaagaaggggaaaaagaaagcgaagaagtccgtggagacctacaagatctacatctttaaggtgctgaagcacgtgcaccccgacatcggtatcttgttcaagggcatgttcatcatgaactccttcatcaacgacattttcgagaaactcgcggtcgagttcgtccagctggcgcgctataacaagaagcccaccgttaccttccgcgagatccaaacctctgtgcgccttgttctcctcgggagcttgccaan

SEQ ID NO: 99523 - DNA, 525 bp, Zea mays
gttgggtcatgatgtccagggatgcctgattgacgtatccggtctggaattcccgggtcgacccacgcgtccggaggaaatgaagaaaaacgctcaagctgctttagttactgctcattactacgaggatgagagtgctcctactggcacatgtgctgtatgtgttgttggtggtgaaaggtcattgattgcaaatctgtcagcggcaaactgttacaaatctgagcatctaaagagaccagagaactgggcactagttgaaaaggcaaaatacatctacattgctggatttttccttacagtgtcgcctgattctatccagctagtcgctgagcatgctgcagcaaataacaaggtgttcctgatgaacctctctgctcccttcatttgtgagttcttccgtgatgcccaagagaaagtcctcccgtatgctgactacatcttcggcaacgaaactgaggcaaagatctttgccaaagtcagaggatgggagactgagaatattgaggagattgctttgaagat

SEQ ID NO: 99524 - DNA, 534 bp, Zea mays
  unsure (1)..(534): unsure at all n locations
agtcttgcnnagagctgtgtctgcatatcagctagcgtgcaccggccttgaattaccgggtcgacccacgcgtccgcccacgcgtccgaagcccttgagctcagtgtctctgacattggtggtggctatgagctttatgttgatgaagccaaaccaagaggcgatggccagcgtggtggtggtagatctggtggccgttctggtgggagatttggtgaccgttctggtggccggcgtggtggtggtagatttggtgaaagatctgggggcagggatggtggcggcagattcggtggccgacgtggtggtagggatggcggccgaagacgtggtggccgtggctttggtaacaagcacagcgctggcacttccagtgcaagaaagaagactacttttggtgatgattgatgatgaacgcggaggatgcggcaaaaggatccaatgaaattgtgtttttttggtcttggttgggtaccgtaactggaatttggtattttttggctactatttactgtantgttttctggattttcn

SEQ ID NO: 99525 - DNA, 506 bp, Zea mays
  unsure (1)..(506): unsure at all n locations
tgctggacccgcacctacgctagnactctcncggnctggaaaacccgggccgacccacgcgtccgcccacgcgtccggaacatcgtcttcatcgtcggcgcggacgacgtgcgcggccagatcccgtcggcggtgggcgggctgacggagctcatgtcgctgacgctgttccggctgccggggctgacgggcgccatcccgccctgcctcacggcgctgtcgaacctccagttcctcaccgtctcccacaccaacgtgtccggcgccatcccggagtcgctggcgcggctgcgcggcctcgactccgtggacctctccagcaaccggctgacgggcggcatcccggcggcgttcgccgacctgcccagcctncggtcgctggacctncggcacaaccagctgacgggccccatnccggccgggcttgtgcaggggccagttcggtcgctgggtccggcctacaaacagcntaacgcccccatcccgngcgacgacgcgcgcgacag

SEQ ID NO: 99526 - DNA, 512 bp, Zea mays
  unsure (1)..(512): unsure at all n locations
tgcgtggttcagggtgctngtactgacttcccggnctggaatacccggcccgacccacgcgtccgcccacgcgtccggaggatgcgagggagcttatcgcggcgccatggacgacgaggagcacgagggttacggccaggaaatgccggaggacggcgacatggacggcgctgacgttgatatggctgcctccggcgatgacgcggcgaagctgcaggagctcgacgagatgaagcgcacgctgaaggagatggacgaggaagccgccgtcctgcgcgatatgcaggccatggtcgccaaggagatgcaaggacgcgaccctagcgcatctacagctgacgcaaaagaacaggtggatgccccggctgtgcatgttggaaatgtggattatgcttgcacccccagaggacgtgcatcagcattttgcaagcttgtggaactgtcaacagggttacaatcgtgactgacaaggttggacagccaaaaagctttggttatggttgatttcctga

SEQ ID NO: 99527 - DNA, 507 bp, Zea mays
  unsure (1)..(507): unsure at all n locations
tgcgtgggtagttcgtnntgatgntctgtcggctcgaattaccggccgacccacgcgtccgcccacgcgtccggcacggcaagagagagtgttttttcgttcgatctgctgccggagtgcgaagaggacgaggaagaggagcgccggaattgtaaagatgttcctggtggactggttctatggggtgctggcatcgcttgggctgtggcagaaggaggctaagatcctcttccttggcctctacaacgccggcaagaccacccttctccacatgctgaaggacgagcggctcgtacagcaccagtcgacgcaataccccacgtgagaagagttgagcatcgggaggatcaagttcaaagcgttcgaccttgggggccaccagaacgtccgacgcgtcttgaaggactactacgccaagggtgatgctggtgggcacttggtggatgctgttgacaaggaacattttgtcgagtcccaaaatgagctcgatacgcttcttgccgatga

SEQ ID NO: 99528 - DNA, 532 bp, Zea mays
  unsure (1)..(532): unsure at all n locations
ggcatgtcctgagagcttatgctagnttttcagtatgcatgattggtcntgccttattgggtcgacccacgcgttcgcggacgcgtgggcggacgcgtgggtgatcactcatcatttactcgcctactactgtggattggtatgccattatagacttggtgctgcgaaagactgctttggtgatttgtgggtttgttgctgtgtaaaaagatcctcatggcttccagaagaccatgaaggtttggatctatcatgtaattccttgttatctgccaattatgtatggactatggacatgtgttgcgctgttcaactcactacaaataagtaatcgatatattccctaaaaaaaaaaataaaaaaaatttaataaataatataaaaaaaaaagggcggccgctctagaggatccaagcttacgtacgcgtgcatgcgacgtcatagctcttctatagtgtcacctaaattcaattcactggccgtcgttttacaacgttgtgactgggaaaaccctggcgttacccaacttatg

SEQ ID NO: 99529 - DNA, 510 bp, Zea mays
  unsure (1)..(510): unsure at all n locations
agctggtgnttaagtccgattgnagtancgtctcggnctggaatacccggcccgacccacgcgtccggcctcacgcagacggacttgatcgcgctttttttcgcgcacacgatcggggtgacgcagtgggacaagttcgtgcggcggatctacacgttcaagcagcggctggcgtggaacccgccgatgaacctggacttactgcgctcgctgcggcgggtgtgccccctcagctacagccccacggcgttcgccatgctggacgtcaccacgcccagggtcttcgacaacgcctacttcaacaacctgcgctacaacaagggcctgctcgcctccgaccaggtgctcttcaccgaccgccgctcccgacccaccgtcaacctctttagcgtcaacggcaccggcttctacgaaggcattcgtggcgacatgccaagcttcgcaggaacgggcttaagaccggggccgacggcgagatacgccggtttgaaccgccgtcacttaccctgc

SEQ ID NO: 99530 - DNA, 540 bp, Zea mays
  unsure (1)..(540): unsure at all n locations
cgatatagcncatcagaggttgtgnccggggaccagggtgnactgtattgccactgaattactcgggtcgacccacgcgtccgcccacgcgtccggcaggaggcgctggaccagtatcccctcgcccaccatgaacttcacccaaggcctccggtccttccagaacaagagcctgaacctcgccgacctcgtctggctctcaggggctcacacgatcggcatctcccaatgcaactccttcagcgagcgcctgtacaacttcacggggcgcggcgggcccgacgacgcggacccgtcgctggacccgctgtacgccgcgaagttgcggctcaagtgcaagacgctgacggacaacacgacgatcgtggagatggaccccggcagcttccgcaccttcgacctgagctactaccgcggcgtgctcaagcggcggggcctgttccagtccgacgccgcgctcatcaccgacgccgncttcaaggccgacatcctcagcgtgatcaacgcgccngccgaggtgttcttccaggtcttcgcggn

SEQ ID NO: 99531 - DNA, 528 bp, Zea mays
  unsure (1)..(528): unsure at all n locations
cgtgccgctcgctgatgttacggagctcatcgnantgacgtaccggtctggaattcccgggtcgacccacgcgtccgcggacgcgtgggctgagctgctcatccgcattctccccttccagcgcctcgtccgcgagatggcgcaggacttcaagactgatctgaggttccagtcctccgccgtcgcggcgctgcaggaggccgccgaggcgtacctggtgggtctcttcgaggacaccaacctttgcgccatccacgccaagcgcgtcactatcatgcccaaggacatccagctcgcgcggcgcatcaggggcgagagggcttgagcgcccgtcgtgctgctcgtcgttgtagtgttactagaagtagatggtggctttcgtttcgtggcttccttatcctgtaggagtaatgttctagatgtcttggcttcagtgcaatggactgtgtttgctcatttctgaaatttatcaatggacttgttcttgcaaaaaaaaaaananaaaataaaaaaaaaaaaaagggcggn

SEQ ID NO: 99532 - DNA, 539 bp, Zea mays
  unsure (1)..(539): unsure at all n locations
gttttgcgggtnntnnnnaactggagatggcnactancgnacgtactgtccggnctggaattcccgggtcgacccacgcgtccgcccacgcgtccggaatccttctttatggccttcatcaactgcaccatcgaggagagccttggtcggtaccgcggcgtcacagcggctgccaagaaacacgggctaagcatccgggggtacgtgtcatgtgtgattgcttgccccgttggaggcgcaaccgatccggcgaaggtggcgtacgtagctaaggagctgtataccatgggctgctcggagatctcgctcggcgacacgaccggtgtcgggacaccaggtagcgtggttgctatgcttcaagctgtcatgtcgtttgtcccggtggacaagattgccgttcatttccacgatacgtacgggcaggcccttgccaacattctcgtctcccttcaaatggggatcaacatagtggacttcgttggtgtcggccctgggagctgcccgtattgccagggcgccactgggaacgttggcacggt

SEQ ID NO: 99533 - DNA, 518 bp, Zea mays
  unsure (1)..(518): unsure at all n locations
tggtctgtgtanccaattggccgnagtancgtcncggtctgngttacccggcccgacccacgcgtccgcagaaggagaacatcattaacgccgccttttctttcggcaacatcacgttgagcgtcacgaagagcatcccggagaccggggaggtcatcggcgtcttcgagagcgtgcagccgtccgacaccgacctcggggccaaggcgcccaaggatgtcaagatccagggggtctggtacgctcagctcgagtgattcgagtgtctaactgctaggtgtccgaccgtcgtcatggatcttgggaaggtgtatgtataccatggaaaactttggagagcagaggaggaatcgtgtatgtaatgtacttgttaatgcaaattcgggctgtcgcttttttactcaaaaaaaaaaaatcatcgtgacctgtttatattggaatattcagtaatgcctagttcttttgataaataaaggggcgtgccttttataggtcccagctttccttcccgtgcattg

SEQ ID NO: 99534 - DNA, 509 bp, Zea mays
  unsure (1)..(509): unsure at all n locations
gtggnnnnacgtcgacgctgcagtacgancgtacctggattgacttgccggaccgacgcgtccgaagcgcctgacactgtcactggagatattttctttgttctccagcagaaggagcatccgaaggtcaagagaaagggcgatgacctcttctacgagcacaccctgaccttgactgaatctctgtgtggcttccagtttgttgtgactcacttggataacaggcagctgctgatcaaatcaaatccgggcgaagttgtgaagcctgattctttcaaggcgatcaacgacgaaggcatgcccatgtaccagaggccgttcatgaagggcaagctgtacatccacttctcggtggagttcccggactcgctgagcccggagcagtgcaaggccctggaggctgtgctcccgcccaagccggtgtcgcagtacaccgacatggagctggacgagtgcgaggagacgatgccctatgacgtgaacatcgaagcggagatgctgaggcggct

SEQ ID NO: 99535 - DNA, 555 bp, Zea mays
  unsure (1)..(555): unsure at all n locations
cgtgtctgagatgctgaagcctaaatgttccagntgtgacatgcatgtcccttccggnctggaattaccgggtcgacccacgcgtccggtttgagatataaaatctgctttggatggttgacacattcttagtcgtgattatatgacaggcaagttgtgggatctaatcatggattcaggcccagttgcaacttttcaggttcatgaatacttacgtcctaagctttgtgatttatacgagaacgattcaatttttgacaaatttgaatgctgtctcagcggtgatggactccatgttgcaactggttcttatagtaatttgtttcgtgtttttggttgttctcctgaaagcgtggaggcatcaacgttggaagccagcagaaatcccatgaggcgacaggttgttgatccagcaaggcctgcacggactctgaccggtgctgtgaggagaggtggagaaaacacaatcgttgacgccagcggaaactcttgcgatctttcaacaaagctgttccatcttgcgtggcacccaactgagaactccatcgggtgcgc

SEQ ID NO: 99536 - DNA, 527 bp, Zea mays
  unsure (1)..(527): unsure at all n locations
ggtccgagtgccgtctttattcagnactagacgttctaccgccttcgacaccctcgccacgctcacgaccttcgcagttttccgcgtcttccttaccctacgctactggtcctcctggccccacttccccgcaagagcggctgccgcagctgcgaggtccgtaccccacatcggcgagcggcggcggaaccgccggaggcaaaggcaagatgttcgggcgcgcgccgaaaaagagcgacatcaccaagtactacgagatcctcggggtgcccaagtcggcgtcccagaacgatctcaagaaggcctaccgcaaggctgctataaagaaccaccccgacaaggccggtgaccccgaaaagtttaaggacctcgtacaagcctatgaggttttgaatgaacccaaaaaaaccttaaattaatgaccagattgtgaaaaatccccttaaggaaagaatggtccttcgaaggatcccatgttggtccctttgacatttttaaatcaatttttggacccttttttgaaggat

SEQ ID NO: 99537 - DNA, 536 bp, Zea mays
  unsure (1)..(536): unsure at all n locations
gggtctgagggctcggacctaagttctngatgntactagtaccgtctaattaccgtgtcgacccacgcgttcggtcctgcgccgtcggccgctgacgaggactggaaccgtttgtcggtcttgaagtcctgcgcgatctccggcaccagccgctggaagggcagcttccggatgagcagctccgtgctcttctggtacttgcggatctcgcggagcgcgacggtgccggggcgaaacctgtgcggcttcttcacgccgccggtggccggggccgactttcgcgccgccttggtggacagctgcttccgcggcgccttgccgacggtcgacttcctcgccgtctgcttcgtgcgcgccatcggagagagctgcgtgaggcgtacctggggggtctcttcgaggacaccaacctctgcgccatccatgccaagagggtcaccatcatgcctaaggacattcagctcgcgcgccgcatcatgggcgagagggcctgattgctgctcttgcttactgtttctgtagtgtctgaactaggn

SEQ ID NO: 99538 - DNA, 543 bp, Zea mays
  unsure (1)..(543): unsure at all n locations
gagccggagtgccgccctgatnttcagnntacttagactgacacaccgaccttgtcgacccacgcgtgcgggatgttcgacctatattctgggccaacagttcaaagagttatcttaaaaggacattagggggggatcaggatccccatggacggtggggtgattctcggaacccatcatatggagcacttactgaccaccagttcacaagaccacgaggccgtggtaagaagctccaagaggaatgggctgttccactgaaatctgtggaggacattagtgagcgcttcacaaacttctgtcaagggaaactcacaagcagcccatggtcagaattggacggtcttcaaccagagacaaagattatcgatgaccagttggtgaatattaaccagaagggtgtccttacaattaacagccaacctgctgtaaatggagagaaatacgactcgcctactgatggttggggtggtcctggaggctacgtttattaaaaggtctaccttcgattcttctgcgcaaaggagaagcttgaccaactaa

SEQ ID NO: 99539 - DNA, 553 bp, Zea mays
tggttcaggagagctcgagtcagtaatctaacttatcatagtactgacattccggacttgaattaccgggtcgacccacgcgtccgtctgatcgtgatcgcacgaagatcaaaaattcctaaacaggtgtgaaggatgaggtcactggcaggcgaaacatgcgcataaagtattgcattcttggactaacctcacaagcagcaagagagctatcattctctggcgatgatcgtggtactgtgaagactgtagtccaatacttcatggagacttatggatttagcattcagcacaccactttaccgtgcttgcaagtgggcaatcaacagagaccaaattatgtgcctatggaggtttgcacgatagctgaaggacagcgttactcaaagcgactcattgagaaacagatcaccgctctactgaaagtgacctgtcagcgacatcaagagcgtgagctggacattttacagactgtgcatcacaatgcgtactatgaggacccgtatgcacaggaattaggtctaagaattgatgatacgccttgctgcagacg

SEQ ID NO: 99540 - DNA, 525 bp, Zea mays
  unsure (1)..(525): unsure at all n locations
gatgccggagtgctcatcctcctattccaataactacgacttcttccanttgaattaccggtcgaccacgcgtccgcccacgcgttcgccacgcgtttgtcgatttcgncgccagaccgctcccttccccgcggcgggcccaagccaggccaacagttttgaggtggtaatggcggaccagctaccaacccactgtccttcataagctaggtggccagttccacctgagctccagcttctctgaaggtgtacgggcccgtaacatctgcctttctttctcatcttatgaaaggagatttgccacgaggaactacatgacccatagcctttggggcccttcaatgtctgttagcggtggcatcaatgttccagtgatgccgactccgctttttgccaatgctccagccgagaaaggtggcaaaaacttcatgattgatttcatgatgggcggtgtttcagctgctgtttcgaagactgcagctgctcccattgaacgagtgaagctgcttattcagaatcaggatg

SEQ ID NO: 99541 - DNA, 550 bp, Zea mays
  unsure (1)..(550): unsure at all n locations
cgagtccggtagggctgtggctgcnattgtcagnngatttagnactgacgtaccggtcttgaattaccgggtcgacccacgcgttcgactgcgactgcctccaagggtttcaggtcttccactcgctgggaggaggtacaggttcagggatgggcaccctgctcatctccaagatcagggaggagtacccggaccggatgatgttgacattctctgtcttcccgtcgcccaaggtgtctgatactgttgtggagccctacaacgccacgctctccgttcaccagctcgttgagaacgcagacgagtgcatggtgctcgacaacgaggctctctatgacatctgcttccgcacgctcaagcttgccacaccaacctttggtgatctcaaccaccttatctctgcaaccatgagtggtgttacgtgctgccttcgcttccctggtcagctgaattctgacctccggaagcttgcagtgaacctgatccccttcccacgtctgcacttcttcatggttggatttgctccactgacctcgcggggctcccagca

SEQ ID NO: 99542 - DNA, 545 bp, Zea mays
cggtctctgaggagccggaaactaggatgtcagttgagcttagtactgacttaccggtcttgaattcccgggtcgacccacgcgtccggacaaccataaggttcgctgatttcaaacattagagatacagtgttccccttgtgataggaagcggtctccttgtcctgcagcagctaagtggtgtcaatggcattctattttatgctgcgagcatcttcaaagctgctggtattacaaacagtaatctagcaacatttggtttaggggctgttcaggtgattgctactggagtgacaacctggttgactgacaaagctggtcgaaggcttcttctcattatttccaccacaggaatggtcattactcttgttattgtttctgtgtcattttttgtgaaggacaacatagctgctggttcgcacttatactctgtaatgagtatgctttcactggctggacttgtggcatttgtgattgcattttctcttggcttgggagcgattccgtggatcattatgtctgagatcctttcctgtaacatcaag

SEQ ID NO: 99543 - DNA, 542 bp, Zea mays
  unsure (1)..(542): unsure at all n locations
cgtgctcgagagtccgcactgcgtgttcagntgactaagtactgacttaccggtcttgaattcccgggtcgacccacgcgtccgcccacgcgttcgcggactcgtgtttcgcatttcagtttgaggcgcttggatcagctattggggtgcgttgctcagtgcttgttggaggagtggatcgggtgcagcaagtgttatccatcggaaaacgtccacatattgtagttggaactcctggccgtcttttggaccatttgacagagactaaaggttttagccttaagaaaatcaagtatttggtattggatgaagctgataaattacttaatgtggagtttgagaaatcccttgatgacattctaagcgagatgcctaaagacaggaggactttccttttttcagcgactatgaccaaaaaggtaaataaactgcaacgtgcttgtctcaggaatcctgctaaggttgaagtgtcctccaaatattctacagtagattcacttaaacaagagttctattttgttcctgcagatgacaaggattgg

SEQ ID NO: 99544 - DNA, 516 bp, Zea mays
  unsure (1)..(516): unsure at all n locations
tatggctcggttagttcgagtanagtattgctagtaccgttctcggaattcccggctcgacccacgcgtccgagcaaagcaatcagagccaagcacccaccttcctcctttctttccttcgactcatcacggcatgtcttgctgcggcggcaactgcgcgtgcacctccggctgcaactgcggcagcggatgcggcggctgcaagatgttccctgacgtggagaccgccggcgtcgccagcgtgaagcccacggtcctcgccgcccccgccaccaaggcgagcgccggcgggttcgaggcggccgttttaaagaaccaagcttacctacccctgcctgccaacttataacttttctattggggcacctaaaatcaattcactggcccgcggtttacaacggtctgacttggaaaaccctggcggtacccaacctaatcggcttggagcacaatccccttttggcagatgggcgtataaccaataaggccggaacgaacggcctttccaacaagtgc

SEQ ID NO: 99545 - DNA, 544 bp, Zea mays
cgtgcctgagagctcgatccgtgttagcatgatttcatatgtacgtccttccggtcttgaattcccgggccgacccacgcgtccggtaggaagggtgttgccatcttttttgagatttgcgacgacgaacgtatgctggttgacatgcataagttctacaacgtgttgattgaggagctgcctgccaatgttgctgaccttctgtgatcaatttcaagaaaaaacataacaaaaaagggtggtgaggaacctggtaaggcttggttttgtcgaaataccgtgggagagggggtgattaggacggtggggtttctatgttgaagtcgtggacatggacaatttgtgattttttctcctttatgccatgttttggaatatttgtagctgcctatgcctcgttgtaatgtgctgctgtggtggttcattaatttgatgaggaagactctgctggcgctgaatcattatacttataagtattttgtttaaaactattttttacccgaatgagtggatatatttgtggtattccttgattcttattttc

SEQ ID NO: 99546 - DNA, 548 bp, Zea mays
  unsure (1)..(548): unsure at all n locations
gggtcctggagtggtcatgctgcnattctaagctnagccagtactgacgtaccggtctggaattaccgggtcgacccacgcgtccggtgcgccctcgcgaggtcgaacccccaaggtgaggcgacgaaaccctcgccagtccccaacgggaacctcagtcaggcggcgtgagggagggagagttcgaggaccgaggcggcgtcgggcgagatgaagcttaacgtcaagaccctcaagggcaccaacttcgagatcgaggcgagccccgatgcgtcggttgctgacgtgaagaggatcattgagaccactcagggtcagagtacctaccgggcggaccagcaaatgcttatataccaagggaaaattctcaaggatgagaccactttggaaagcaacggagttgctgagaacagcttccttgttataatgttgtccaaggctaaagcatcgtcgagtggagcttctaccactactgctgcaaaagctcctgcaactttggcccaacctgctgcccctgtgccccctgctgcatcagttgcaagaacacc

SEQ ID NO: 99547 - DNA, 531 bp, Zea mays
gggccgaactgggtgtcaggtatcatagactgtcgtaccggtctggaattcccgggtcgacccacgcgtccggtgatcccctccagcacccgcttgtggagttctactggggcaatgtcaatcccatcggtgtgaggagctgttacgatgagggcaagcgtacagccgaaacgttgaccatggattaccaccgtggtgccaaccttgaggttaggatcgcacgtatcttcaacacatatggccctcgcatgtgcattgacgatggccgtgttgtcagtaacttcgttgctcaggcactgaggaaggagcccttgacggtttatggtgatggaaagcaaaccaggagtttccaatatgtttctgatctggtcgagggtctgatgaagctgatggaaggcgagcatgtaggaccatttaacctgtgcaaccccggcgagttcaccatgctggagcttgccaaggttgtccaggacaccatcgaccccaacgcacggatcgagttccgtcagaacacccaggacgacccacact

SEQ ID NO: 99548 - DNA, 504 bp, Zea mays
  unsure (1)..(504): unsure at all n locations
tatggtgggttaccttngtttctgatgntgactgtaccgtgctggaattcccgggtcgacccacgcgtccggcactccattacaatggcgtgatcgatgctttcaggaagactgttcgtcatgaaggaggtggtgctctgtacaagggtcttgtgccgaactcagtcaaggtggtgccctcaattgccattgcatttgtgacttacgaggttgtgaaggatgtgctaggagtagagatgaggatatcagactgaggatggtcgttttcaactgctatttttgtaggctttgggaagttgtgtttttttgtaggcagggcgggtagaaggatatgaccgcggctccattcagcatcagcccatgttggatatatcatatatcctgccactggctttaggtcctagaattgtttgctgggtcgtgcaaaagtaataaagtcgctgtaaagcttattaagcatttgctaacttatcaaagaaatctattcctaattgatgatgtcct

SEQ ID NO: 99549 - DNA, 548 bp, Zea mays
  unsure (1)..(548): unsure at all n locations
gggtcccagagtggctgaaagcatcnagttcgattgaggtcatagcacgttcctaattaccgtgtcgacccacgcgtacgcgaccccttggctcgacggcaagcacgtagtcttcggccatgtcgtcgagggcatggacgtggtcaagggcatcgagaaggtgggcacccgcaacggctccacctacaaggtggtcaaggtcgctgactgcggacagctcttctagatctctctgatctggcctgttcggtcgacctacctccgtcatcgctgactccccctgcgtccgttactttggatctgaataagatggtggtgatctgaatggtggtcttagtacatcatgtatcgctcgcagtttaatatagcggtttatgtgtggatctgtgaaccccatggcgcctgtgcttgattcgtgtttcaccaaatgaaaacttcaattgcaattgttagggatgaattaatgataccctgtttgcaagggctactgggtgtatgccgtgccccatgaggctgtgactaatgcgccaattcaagaactcttgagg

SEQ ID NO: 99550 - DNA, 544 bp, Zea mays
cgagctctgagtgtccgtatcgatttaagctaaatatcatagtactgtctttccggtctggaattaccgggccgacccacgcgtccgaccatttccaattttgaagattttccttctataaggatatagattcttttatggcatcaggcttcaagctggttggctatgatccccaccagaagatagagatgaaaatggcagtgtaatggtggcttggctggagcccccatcctatggactcggtggatgtaatcagtaggactggtactacataaaaattaaccggacaccgcactagcttgtttttggtgatggtgctgaatgttcagtgggagacgttttctctgatttatcaattgcgatttgcgtattatggtcgcttaagtcaactctacaaaatcggctcccttttatctggagccagttgattactcgattgcgaatgtgatggatgatctaagcatactctgttgcaagggcctactgggtgtgtgcccggccccatgatgctttgacgattgcgccagtctaagacctttttagt

SEQ ID NO: 99551 - DNA, 538 bp, Zea mays
  unsure (1)..(538): unsure at all n locations
ggtgccagagggctgagcctcctatctaatnggtctngcagggccgaattacgtgtcgacccacgcgtccggcaagccatgtggaggagggctttagcgattttcctgtttatggctggcgccgcgctgctcgccggggctgccggcgccggcgcgcagcagggcgtgtggagcatcatcacccggcccatgttccagagcatgctgagccaccgcggcgacagcgggtgccagggcgccttctacacctacgacgccttcatcgaggccgccagcaagttccccggcttcggcaccaccggcgacgagcagacgcgcaggcgggagctcgccgccttcttcggccagacgtcccacgaaaccaccggtggatgggcgactgctccggatggaccgtttgcctggggatactgccgggtgaaggaacagaaacagacggacccaccctactatggacgaagacccatacagctaactcataagtacaactacaggctcgccgggcaagcgctgaaccttgacctggtgggcgacccgg

SEQ ID NO: 99552 - DNA, 546 bp, Zea mays
  unsure (1)..(546): unsure at all n locations
cgatgtcttagagctcgnaactgggtatttcagntgacttagactgtctgtaccggtcttgaattcccgggtcgacccacgcgtccgctcaaggtgggttcggttctttttggctgtttcttcctgtatgatatcttctgggtgtttagctccaagagatggtttcatgagagcgtgatgattgtggttgcgcgtggcgacaagaccgacgaggatggtgtgcccatgctgctaaaaatcccgcgcatgtttgatccatggggtggatacagcatcattggctttggtgatatccttcttcctggtcttttagttgctttctcgctaagatacgatttttctgcaaagaagggcttacggtctggttactttttgtgggcaatggtggcctatggctctggacttctaatcacatatgttgcgctgaacctgatggatgggcatggacaacctgcccttttgtacatcgtgcccttcactcttggcaccttgatcgcgcttggatggaagagaggggagctgcagaacctgtgggcgaggggagat

SEQ ID NO: 99553 - DNA, 511 bp, Zea mays
  unsure (1)..(511): unsure at all n locations
cgagtgtgttagttncatcaagtatcgacgtaccgttctggaattcccgggctcgacccacgcgtccggttgctatggtcttgggctacgatgatgttaaaaatgcccaactactcaaatgcgaccgtgctggtcacttctttggacataaggcaactagtgccgggctcaaggagcaggaagcaataaattttctggagaagaaaatgaaggatgacccgaaattcacctatgacgaaactgtgcagattgcaatatctgcgttgcaatcagttctccaggaagatttcaaggccactgagatcgaagttggtgttgtgagaaaagatgaccgcgttttcagagctctcacgacagaggagatcgatcagcacctgacggcaattagtgaacgtgactgagatgtcatatgctgcacatttcagcgctgcatacactgcgccgtgccattgtgcttcggcagtcaattaagtttcatagtcatcataggaactgagtgtaccatttcacg

SEQ ID NO: 99554 - DNA, 510 bp, Zea mays
  unsure (1)..(510): unsure at all n locations
cgcgttgnttcggtntangtagtancactgtaccgtgttngaaaacccggctcgacccacgcgtccgcttgcccgccccctcctatggggaattcttcggagctgtaccacaagatcctcagcaggcccaaggacacctcgccggacgaaatccgcgccgcgtacaagaacctcgtcaagaagtggcaccccgacaagcacccgccgtcgtccaggccggaggccgaggcgcgcttcaaggccatcagcgaggcctacgaggcgctcctggaccagcaggagaacaggggcgtgttcgagctgtgcaacgacggccgggcgggtgagaggacgcgcggcgccttcggcggcgccggcggcggcggtggcggaggaggaggaggcctcggcgccggcgtcggggcgcgcatggagaggacgcgcagcgacgggttctgcacgaggagcgcgcccggcacgccggcgagggagttcaagaaggtgtacagcttcggcgaccccggccggcgc

SEQ ID NO: 99555 - DNA, 547 bp, Zea mays
  unsure (1)..(547): unsure at all n locations
cgaggcggacgtggtcgatgcctggtgtttctaaaatggcttgcactgactcatccaanttggcgaaccantccggcggactcgagcgaacgggcgtatcgccactcgctcagaggttttacagcgccggcctggacaaggaggcctggtaccttacaatgggccctctgaaggagatcgtcggcagcatacagtcacaggttgccaagatcgaggatgacatgaaggttcgagcatcagaatataataatgtaaggagccagcttagtgcgatcaacaggaagcaaagtgggagcttagcggttcgtgatctttccaatctggtaaaaccggaggatatgatcacctcggaacatctcgtgacacttcttgcaattgttcccaagtactcccaaaaagactggttgtcaagctatgagaaaattgacacattcgtggtacctaggtcctctaaaaagctctatgaagacaatgaatatgctctctacactgtaacactgtttgctaaagttgttgacaattttaagtccctgctcgcgagaagggt

SEQ ID NO: 99556 - DNA, 544 bp, Zea mays
  unsure (1)..(544): unsure at all n locations
gggtgcgagagccggtgctgcnagttcagntgtcatagtatgtcgcaccgtcttgaattaccgggccgacccacgcgtccgcccacgcgtccgcccacgcgttcgggtggtttgacggtgctggcatcgccaattcaactccgcatctgcatcggcagcgcgccagctccatagtgtaggaggagatggcgctcacaagaatcggtcttgctggccttgcggtcatggggcagaaccttgccctcaacattgcagagaaagggttccccatctctgtgtacaacaggacaaccttcaaggtggacgagaccgtgcagcgtgccaaggcagaaggaaaccttcccgtctacggcttccatgaccccgcgtcctttgtgaagtccattcagaagccacgggtggtgatcatgctcgtcaaggccggcgcgccagttgaccagaccatcgcgacgctcgcagctcacttggagcagggcgactgcatcatcgatagggggaacgagtggtacgagaacacggagaggagggagaaggccatggagga

SEQ ID NO: 99557 - DNA, 545 bp, Zea mays
  unsure (1)..(545): unsure at all n locations
tgggnccntagatgcgtgctgaggactcacgcatctcatcgattgacttaccggtcttgaattaccgggtcgacccacgcgtccgcggacgcgtgggcggacgcgtgggcggacgtttgggcggacgcgtgggcggacgcgtgggcggacgcgtgggagagaaggaaaaatatccccaaaccctagctcccgatctcgatggcgaaccctcgcgtcttcttcgacatgaccgtcggcggcgccccggcgggccggatcgtgatggagctgtacgccaacgaggtgcccaagaccgcggagaacttccgcgcgctgtgcacgggcgagaagggcgtgggcaagtccgggaagccgctccactacaagggctccaccttccaccgcgtcatccccgagttcatgtgccagggcggcgacttcacccgcggcaacggcaccggcggcgagtccatctacggcgagaagttccccgacgagaagttcgtgcgcaagcacaccgtccccggtgtgctctccatggccaacgccgggcccaacaccaacgg

SEQ ID NO: 99558 - DNA, 568 bp, Zea mays
  unsure (1)..(568): unsure at all n locations
cgcgggnnncccgatgagngacgtangnnactgacacctccttngttgagaaaatccgggctcgactccacgtcgtctcgagcagtgtctttggaattctctgttggtagattgcattatgtcaatcacggaagggcttcaatctcgggatggcaacnttcttttgtcatgtagagagaagcacttcatgccatcataagaaacgcgaagagctgatgatgctagttgtgtcagactagggacaatgtttgctaaatactgggtctagttcagtcaagccacaggaacctgatccnaaatgctttccaagtcctcctgtttcggcctgcgaacttctgaaacatctnggacattcaattggggagctttcttatggctcagcnaggctgcatatncctgcatatcgaaacttatgactatcagccattcaaatgccacaagcctgctgctcaaacagctgcctatggcgcttatccttcaacatactctggtcaggcctatacacaacaaagctacacacaacctgcaacaattccggcagcaccagtgccagcagtggtaccagcac

SEQ ID NO: 99559 - DNA, 533 bp, Zea mays
  unsure (1)..(533): unsure at all n locations
tgaatatgtgtcgtagagcctttacctcgtntgcgatgcatccggcnttgaattcccgggtcgacccacgcgtccggaagaagaggtcggatccaggtgacatgggttctgcatctgcaagtacctcttcaataccggacaagggacctgaaaaggctaaatcaggcgcagataagaaaaataggccaaaagatgtttttggtcggccattggcaacagaacaagaatttgaagttctcaagaatgctccaaggttagacacaggtgctcctgcaagggtcaaaccatttggagttgaagttcgtaatgttagatgtttaaggtgtggaaactatggtcaccaaagtggtgaccgggaatgtcccttgaaggatgcaatcatgcctaacgaggagagtctgttgaaaagagacgatccacttacaactataatggcgcatacggattcaagtgagcctttgaagtgggaacttaagcagaaaccatgcatgagccctcctcgtggtggatttgacccagatgatcctaatcan

SEQ ID NO: 99560 - DNA, 549 bp, Zea mays
  unsure (1)..(549): unsure at all n locations
cgtcgtcggttnnnttntnncctgcnncattagctcatcatcnattnatcgctccggaatggaacacccgggccgacccacgcgtccgaacaccagccgtcgtcatgtcgattcgaggtttgggaggttcggctgggaacaggttccgggtggcactgggtctaccggtggcggccacggtgaactgcgcggacaacacgggcgccaagaacctctacatcatctacgacaagggcatcaagggccgcctcaacctgatcccgtgcgcctgtgtccgcgacatggtcatggccaccgtcaagaatggaaagcccgacctcaagaagaaagtgatgcccgtcgtcatcgttcgccagcgcaagccgtggcgtctcaaggacggtgtctacatgtacttcgaagataatgctggagtgattgtgaatcccaagggtgagatgaaaggttctgcaatcactggacctatcggcaaggactgtgctgacctttggtctacgatcgtcagtgcatcaaatgccatcgcttgagagcttgatggaatgtgtttan

SEQ ID NO: 99561 - DNA, 546 bp, Zea mays
  unsure (1)..(546): unsure at all n locations
tgtagactggtgctgatgnccggggtctacgccagctacgcagcgaccgntccggtattgaactcccgggtcgacccacgcgtccggactagttctaggtcaagagcagttcagcttccaaacaagctctcctttcgctggcgatccatggagctcgacggcgacaacctgagcgccaccgagctccgcctcggcctgcctgggaccagcagcagcagcagcgacgactggcagaagaagccgtcgccctccgtcggggccaagcgcgctctggacgacggcaccaagagcgaggcctcggggaccagcccggccgncagagacctcgacttcgaccacgaccacgacaccgtcgcgccttccaaggcgcaagtggtcgggtggccgccggtgaaggcgtacaggaagaacaccttccaggcggcggcggcggccaagaaggtcgagcagaagcagaagcagcagcagcagggaggcctgtacgtgaaggtgagcatggacggcgcgccgtacctcaggaaggtggacctncggatgtacaaaggg

SEQ ID NO: 99562 - DNA, 526 bp, Zea mays
  unsure (1)..(526): unsure at all n locations
cganggctgtgtgtgngncattcccagtcnagtcgcattgacgttccggctggaatcccggccgacccacgcgtacgccacgcgtccgttttggtgcccttatgggttcattggatggaggcctggatatgcctcagagcgagaagaggttggctggattcaagaaggacgacaagcagttggatgctgatacccaccgcaggtacatctatggtggccatgttgctgactacatgaagaaccttgctgaagaggacccagaaaagtaccagagtcacttcagtgcgtacattaagaagggagttgaggctgatgaaatagaagcgctgtacaagaaggtccatgctgccatccgtgccgatccttacattgttaagtcaaccaagcagccaccaaaggagcataagaggtacaaccccaagaagctgacatatgaacagaagaaggccagcctcattgaaaggctcaaccaactcaactgcttcggtggtgctgatgacgacgatgaagacgacgaagtaaggtn

SEQ ID NO: 99563 - DNA, 522 bp, Zea mays
tgtgactgtgtaggaacccacacgctatcatgcatcgcccctgaatacccggccgacccacgcgtccggcacaagcgcactctagctatggcttctgatgttgtccgccctagcgacgccgagctactggaggcacaagccgacatatggcggctcagcctctcctacctcacgcccctgtcactgaggtgcgccgtggagcttggcatccccacggcgatctaccgccatggcggggctgcctcagccgctgagctggtcacggcgctgtctctcccctccactaagctgccgttcctccgccgcctgctgcggctcctcgccgcgtcgggcgtgttcaccgtcgacaagcagagcacggaagaagagcggtaccgcatcagccccgtgtcctacctcctggtggacggcatccctcacgaggaccacatgaaccacaccgctctggtgctcacctgcacctcgacgcgctacatcgaggcggggatagggctggcggagtggttcaagagggacgtggtt

SEQ ID NO: 99564 - DNA, 541 bp, Zea mays
  unsure (1)..(541): unsure at all n locations
atgcaatgtgtggttatgnttgggtctacgcctacatcgcatcagcnctggaatatccgggccgacccacgcgtccgagaacatacacaaaggattatgtcagcaacttgacagtgcagcaggatattgagcgagtggaagctgatgcggatggcctgtcaaagagactcgaagcacttgaagcttacaaaaggaaacttttgggtgagaggttggaagactgctccattgaagagctgcatagtttggaagtcaagcttgagaagagcctgcattgcatcaggggaagaaagactcagctgctggaggagcaagtccgtaagctgaagcagaaggagatgagtctgcgcaagagcaacgaagatttgcgtgaaaagtgcaagaagcagccgcctatgacgatggctccgccgncgactcgtgcgccggcagtcgacaccgtggaggacgatcaccgggagccgaaagacgacggaatggacgtggagacggagctgtacataggattgcccggcagaaactaccgntcgagcaaaaacan

SEQ ID NO: 99565 - DNA, 540 bp, Zea mays
  unsure (1)..(540): unsure at all n locations
gacagcgtgcgctatgnttgggctctacgctcactcgcattaatcgctccggtctggaattcccgggtcgacccacgcgtccgggcggttagaataggtttataattttatattatgaaattatgtgcatcttcaggggtttgtgcctcactgctctgtaaggacatataaaattggtatttgtactttctaaggttctccttggaatggtagagttttacagggaaccttccatcatcagttgctgacatagctcgaactcgacgtttcttcttcgccagttgcggctctggataaactcgaagctgacctatccaagttcgacgacgggcccttcttcctaggccaattcagcttggcggatgtagcgtacattacgattctggaaagggttcagatatactattcccatcttaggaactacgacatcgccgaaggcaggcccaacctccaggaattcatcgaggagatgaacaagattgaagcgtatgcgcagaccaagaacgatcctctgttcttgcttgatcttgccaagaaccn

SEQ ID NO: 99566 - DNA, 530 bp, Zea mays
  unsure (1)..(530): unsure at all n locations
tggggactggtgttacgcctggggtcagccactacgcattgatcnatccggtctggaattcccgggccgacccacgcgttcgcggggaccaagacaccgtcgtggttttgattctcgacggcttcgcgaaggcgcgggtgccgtactacccggtggcgggccgcatcgtggacgcgagccccggggagcctgtggtggagtgcaccgggcatggcgtctggttcgtggaggccgctgctagctgcgcgctcgccgacgttaactacctcgagcgccctctgctcatccccaaggaggagctcctcctgcgccctccgcccgaggagaagctcgaggacctcgtcctcatggcacaagtgaccaagttcgcctgcggcgggttcgcggtcgggatctgcttcagccacctggtgttcgacgggcatggtgcggcgcagttcctcaaggcggccggcgagatggcccggaggctgacggcgccgtcggtcgcgccggtctgggaccgcgacgcgatcccggacccgtctaaa

SEQ ID NO: 99567 - DNA, 541 bp, Zea mays
  unsure (1)..(541): unsure at all n locations
cggagggcccnnnaggagccaatcagtnctctctagctcatcactgtacagccgccccggnctggaaaacccgggccgacccacgcgtccgcccacgcgtccgggcggcgcgtgcggctactagacggccgtcggaaagaaggcattcgacgggatgatcgccggcgggagcacgccactgtacaggggaggcgagggctgcggcgcctgctacgaggtgaaatgcacgaccaacgccgcgtgctccggccagcccgtgaccatcgtaatcaccgaccagtcccctggcgggctgttccccggcgaggtcgagcactttgacatgagcggcaccgccatgggcgccatggcacggcccggcatggccgacaagctccgcgctggcggcgtgctcaggatcctgtacaggagggtgccgtgcaagtacaccggcgtcaacatcgcgttcaaggtggatcagggcgcgaacccgtactacttcgacgtgctcatcgagttcgaggacgacgaccgcgacctcagcgccggggaccttatggan

SEQ ID NO: 99568 - DNA, 540 bp, Zea mays
  unsure (1)..(540): unsure at all n locations
aggtgtgccnnnnnnagagccgttcaggattttctagttgatcatgnacagncgccccggnntggaanacccgggccgacccacgcgtccggcgaagacccacctgccaccttcgatggacttcgccggccgggtatccgtcgggctcttcggcctggtcgctggcactgtagcaaacgaccagatcttcaccacttcaggtttgccatttgggcgaagttcgcgtgagccaaggtaccgcgtcgagttccatcctgttgattcgccattccatccagagaatggtcaggaatcggtaccaatggctagtcatgaggggaagcgttataagtgctttctaccagttgaagaaactaaaaccatgaagtcaatgctcccacaaaatgcgactaatattataatagaaagtgaaaggcgaattaagccaaaggagccggatgagttacttgaggttctcaaggatcagtgtttctacaggcacgaaggttggtggtcgtatgaattcttgtattatgggaaaatcagacaggtccatgtaan

SEQ ID NO: 99569 - DNA, 540 bp, Zea mays
  unsure (1)..(540): unsure at all n locations
cgctcacgtgtgctatcgncctttacctcgcncnagttgcattcagcngctggaatttccgggccgacccacgcgtgcgcgtaatctggtacgaactaatgacaaacagtancgattgacattgaagctaccaagagggcgcacgagtttcatgtaggatgggtcgcggacccgttcttcttcggagactacccggcgacgatgcgggctcgggttggagagaggctgcccaagttcaccgcagacgatgctgcccttgtcaagggggccctggacttcatgggcataaaccactacaccactttctacacgaggcataacgacaccaacatcatcggacggctgctgaacgacactttggcggacaccggaaccatcagcctgcccttcgacaaaaacgggaagcccattggagatcgggctaattcgatatggctgtacatcgtacccagcgggatcaggaagctgatgaactatgtcaaggagcgggacaatatcccaacggtttacatcactgaaaatgggatggacgactgccct

SEQ ID NO: 99570 - DNA, 534 bp, Zea mays
  unsure (1)..(534): unsure at all n locations
cgtaatggtgtgtatgcctttccatagactacatcgcatagcnctggaatttccgggccgacccacgcgtccggtcggcaggtcccgtgctcgactgcctggttaatctgtcggacagcgtgggccacctccgggacgcggcgcaggagatgggcggcgccgggatgggccgcgcggggacgccggcgttcaggtggcacctcagcaacgtgcagacctggtgcagcgccgcgctcaccgacgaggacacctgcctcgacggcctctcgtcccgcgccgtcgacgccggcacgcgcgccgccatccggggcaaggtcgtcgaggtcgcacaggtcaccagcaacgcgctcgcgctcgtcaataaggtcgggcctgggtactaacacggggaggggacccaagatccaggcccaggcccagcccaggtaccacacccgctactagtatagtactaggcgccttcaccttcacggcgttgggtgtttctcgtccgttaatagctcggtttgctttgcttgtgtttgtgtaagatat

SEQ ID NO: 99571 - DNA, 537 bp, Zea mays
  unsure (1)..(537): unsure at all n locations
ggcttagcgatgccgatcgaatgaagttcttncactancnacctgacgcaccggtctggaattcccgggccgacccacgcgtccgactagttctagatcgcgtctaaacccttgtttccttcttatccccacctccctcgcggagcgactcgccgccgccgccggccgcagccatcgccgtgatgctgtccctgtcgagggcgatcgggaggcggctcttctcgtccgccgaggccgcgtcgacggctgcggtgaggacggcgcagaacccgctcgaggagttcttcgaggtcgagcggagcaccgaggagggcaagcctcctccccactacggtcgcagctggaaggcttctgaactgcgactaaaatcttgggatgaccttcagaaattgtggtatgttcttctaaaggaaaagaacatgctaatgacacagcgtcaaatgctgcattcagagagcatgaggttcccaaatccagaacgaatttccaaggtaaagaaatcaatgtgccggataaagcatgtcttgactgagaggg

SEQ ID NO: 99572 - DNA, 539 bp, Zea mays
  unsure (1)..(539): unsure at all n locations
cgattatggtgtggtatgcctacnctacagatcactacgcattgacgcatccggtcttgaattcccgggtcgacccacgcgtccgcccacgcgtccgatctcacccgactcgtcttacgtcagccagcagttcgaaacgaaggagggatccaggagcttccggaaggcgaggcgcgcgcgcagcgtcgaggtgctggtgccggtgccgcccatggatcgggctcgcggatccgcgttcctgctcggcgtcctgctcgcaggatccttgttcgcgttttcagttgctaaagaggagaccaagaagctcgggaccgtgatcggtatcgatctcggtaccacctactcctgtgtcggtgtctacaagaacggtcatgtcgagatcatcgccaatgaccagggtaaccgtatcacaccctcatgggttgccttcaccgatagcgagaggctcatcggtgaggctgccaagaaccaggcagccgtcaaccctgagaggaccatctttgacgtcaagcgtctcatcggaagaaagttcgcggaca

SEQ ID NO: 99573 - DNA, 535 bp, Zea mays
  unsure (1)..(535): unsure at all n locations
tgttatagtgatgcgtatggcctgcntctagcccactaagcactgacgtaccggtctggaattcccgggtcgacccacgcgtccgaaggaatgtaagcttgtcttccattacaatttctgcatacacagtggcagaccttcagggggcaacgtgcagcttcagtcctgaaagttttatcggtgagggatcggtaggccgtgtttacaaagccaaattcggtgatcagaaggtcatggctgtaaagaaaataaacttgtctgtatttccaagccatccttcagatttgttcattgagttggtcgcaaacatttcaatgttaaatcatccaaaccttgctgagctcgctggttactgcttaaagcatggacaatgcttgctggcatatgaattctaccgaaacggttctcttcatgattatcttcatctgaatgatgaacacatgatgccattgtcttggaacagccgtgtcaagattgcgctaggatctttgagagcattagagttcctacatgatacttgttcacgctttgagta

SEQ ID NO: 99574 - DNA, 529 bp, Zea mays
  unsure (1)..(529): unsure at all n locations
cggagatgcggtgtatgnttgggtancagcctacatgcaactgcnctggaatacccgggccgacccacgcgtccgaacccagctcgctcgtcccagctgatcatgttgagcacctagtagcgacctgctcgatcagcantgtagagtgtcggtaggtgtctgtctctcttggtggctggttgcaacggtcatggcgacgtcgtctcgtcgggtgcccttgctgctgctgtgcctgggcgtgctggtgtcctgctccttcgcggcgggcagcttggaccaggagctggacatcacgtggggcgacgggcggggcaaggtccttgacaacgggcggctgctgacgctgtcgctggaccgcacgtccggctccgggttccagtcccggcacgagtacctgttcggcaagatcgacatgcagctgcggctggtgccgggcaacttcgtcggcaccgtcaccgtctactacctgtcgtcgcagggcggcgcgcacgacgagatcgacttcgagttcctgggcaacgtgtccggg

SEQ ID NO: 99575 - DNA, 535 bp, Zea mays
  unsure (1)..(535): unsure at all n locations
atgatatgcggtgctatgnaaggggtactagttcatcgtcgaacngctctggaattcccgggccgacccacgcgtccgcccacgcgtccgcccactcgtccgcccacgtttccgccaatctttaccccaggacaatgtgtttatgatatcaaacccaaaggcaaaataccctgtgctgcagctggaccttagattgatatcagatcttgttgttgttatcgtgtctgctacatgtggtggaatcgcttttgcttgccttgggcaacctgtgattacaggttatctacttgcaggatctataattgggcctggaggttttagctttgtcaatgaaatggtgcaagttgaaacggtagcccagtttggtgtgatatttctcctgtttgcattgggacttgagttttctactgcaaaacttcgagttgttcgtgctggtgctggtctcggaggaatgctccaaattatgctgttcatgtttctttgtggtattttggctacactatgtggaggcaaaacaaaagaaggtgtttttgtt

SEQ ID NO: 99576 - DNA, 535 bp, Zea mays
  unsure (1)..(535): unsure at all n locations
tgtcatgctgtgtgagnttgggttcatgtcatcatgcactgncgctccggtctggaattcccgggccgacccacgcgtccgacggtacaatattgaacctcgcgtttcagtttggtacttccaacagaagatagagtactggaaagacaaggtgggagcaaactttgttagggagaggagagcaatgaagagagaatatgagggattcaaagggagaatcaatggcttaatttgccaaagccaaaaaggttcttgaaaaaggttgaccattcaagaatgaacccccttgcctggaaacaatggtcgtgatcattctggaatgattcaagtctttcttggccaaagcggaagccttgactgtgagggaaatgaactgccacgattggtttatgtttctagagagaaacgaccaggctataaccatcataagaaagctggtgctatgaatgcattggtccgagtctctgctgtactaacaaatgctccatatttgctaaacttggatggtgatcactacatcaacaacagcaaggtg

SEQ ID NO: 99577 - DNA, 522 bp, Zea mays
  unsure (1)..(522): unsure at all n locations
ggagtcgttcagtnccnttccaaaatgcctgcanantcnnccgnnntggaaaaaagggccgacccacgcgtncgcccacgcgttcgcccacgcgttcgggatgtttctcgccgaaaagatcggccagatgacgcgggtcgggagggaagacgccacggccgacgcgctggccaaatacttcataggtagcgtgctgagcggcggaggcagcgtgcctgctcctcaggcgtctgctcaggcttgggccgccatggtgaccgagatgcagaagggcgctctttctacgcgtctgggtataccgatcatctacggtatcgatgcagtgcatgggcacaacaacgtctacaaagctactatttttcctcacaacgtcgggcttggagctaccagggaccctgacctcgttaagagaattggagaagcaactgctcttgaagatagagctactggaattccttacgcctttgctccctgtatagcgggttgtagagatccaagatggggacgctgctatgagagcta

SEQ ID NO: 99578 - DNA, 519 bp, Zea mays
  unsure (1)..(519): unsure at all n locations
gagccgtccaaaatgtcccaaaagccangnannnntcncnnnnntggaaaaangggccgacccacgcgtncggccgctattagaagaaccctttttcaagactatgccatgtccgtcttcgggggacctgggaggcggtggcgcagctccgcaaggccgggaaggtcaccgtgagggagaccacgctcaagaggctgggcgccacgcacttgaggtacggcgtcgcagatggacacttcgaggtgacggggttcgcgctgcttgagacgatcaaggaggcgctccccgctgacatgtggagcctctagatgaagaaagcctgggccgaggcctacagccagctggtggcggccatcaagcgggagatgaagcccgatgcctagtagtggcgattgcgaccagtgtttaacccatgacgcagcgccgtcacagatgtcccgtgtggtcttgcgctttagcaatttctctctggagggagcgcgtattggtatcttgagacccaaagccctggtgctgacn

SEQ ID NO: 99579 - DNA, 532 bp, Zea mays
  unsure (1)..(532): unsure at all n locations
gaattcggtcgctgcgncctttacttcgcctatcatgcaataccgctggaatttccgggccgacccacgcgtccgcttacgaggatgtccagaatgtcggtgaactcgagcctgcgggtggcggacggnggcttggcgtgcttcggcgggccgttcgaccctaagtcacgctcgcctaccgtgctcaccattgccctcgtcgtcctgggtgtcatttttctcattgcctacttcaacagcagcccaggtgtaactgttacgagcaaagagactgtgaccaggtctgaaggttcttgcacatcagaagttatgcgggcgcttccatatcttaagaaggcatatggcaatgccatgcaaaaggttctccatgtaggccctgatagttgtacagtagtttctaacctgttgaaagaaggaaaggttgaagcatggggagtggagccttatgatttggaggatactgacagtacttgcaaaagactcgtgcgcaagggctttgtccgtatgtctgatattaagttcccccttccat

SEQ ID NO: 99580 - DNA, 538 bp, Zea mays
  unsure (1)..(538): unsure at all n locations
tgatcccgtgtgctaaggccgtaacctccgcntagcatcgcatctagccctggaatacccgggccgacccacgcgtccgcccacgcgtccgcgcgttctccgtctccgtttccgtctccgtccgcccggcgtaaagaaagccctcggtcaccacagccggcacgccatggccgaggagaccgacaccaggcctgcctccgcgggctcccgaggccgccccgcgcccgaggacgacgacagggaggagggcgagatcaccgacctcgcctgcgctccttccccgcccgccacgcacccgctcgagcactcctggaccttctggttcgacaacccgcagagcaagtccaagcaggccgcctgggggagctccatccggcccatacacaccttcttcaccgtcgaggaattctgggggctttacaataacattaatcaccctagcaaattgatcgtgggagctgatttccattgcttcaagaacaagatcgagccaaaatgggaagaccctatttgtgcgaatggtggtaaatggaccatc

SEQ ID NO: 99581 - DNA, 541 bp, Zea mays
  unsure (1)..(541): unsure at all n locations
cgcnttcctgggatcgctagcgnccatttcctacgcctacanctgcatcagccctggaatatccgggccgacccacgcgtccgcggacgcgtgggcagcatggaagcatggcttatgtcctacatttaattaccttttatcttgcactttggggtgccattttgtacaatgggtttacatactatgaagtaaaccgcatgctgaataatgcaacgcagatggctgctggcataagtgatcgatcaaatcagtctgacatgagggcagacaggaaggcatttaaccgatggggttattaccctctaattctaatcggttcatgggcttttgcaactatcaatcgtctttatgactttgccaatccagggcacaggatagtctggctctcctttcttgatgttgggttcgctggacttatgggcctattcaattccattgcttatgggctaaactcttttgtgcgccgagctattgcagagagaatcgacacgttcctacctgagagaataaaaaggagcctccctgctttgtcaaggctgag

SEQ ID NO: 99582 - DNA, 534 bp, Zea mays
  unsure (1)..(534): unsure at all n locations
agttttggtgtgttgcctggtaccgancacgtagnactgatcgctctcggtctggaattcccgggtcgacccacgcgtccgtggagagcgagaacgtggtctcggttaagatcagcaaccggctgcatgacacccggtgcggggtggtcacctccaagtacgggtggagcgccaacatggagaagatcatgcaggcgcagaccctgtcggactcgagcaagcaggcgtacatgcgcggcaagagggtgctcgagatcaaccccaggcaccccatcatcaaggagctccgcgacaaggtcgcccaggacaacgagagcgaggagctgaagcacacggcgaggctggtgtaccagacggccctgatggagagcgggttcaacctgcccgaccccaaggagttcgcgtccagcatctacaagtcggtgcagatgggcctggacctgagccccgacgcgaccgtggaggaggacgacgaggcagaggagcagccggaggtggaggagaaggatccggaaccggagccgtcgtcctact

SEQ ID NO: 99583 - DNA, 540 bp, Zea mays
  unsure (1)..(540): unsure at all n locations
ggggagggccnnnnagnagccgatccaggggcnttccagnntncaagnagnantcncccnnnntggaancccgggccgacccacgcgtncgatccaggacacggagggcatttctacggatttgcagcggctcatttttgccggcaagcagggggaggacgggcgcacgctggccgactacaacattcagaaggagagcaccctccacttggtgctgcgtctcaggggtggcatgcagatcttcgagaagacacttactggcaagacgatcacccttgaggtggagtcctcagacaccattgacaacgtcaaggccaagatccaggacaaggagggcattccaccggaccagcagcggctgatcttcgccggcaagcagctggaggatggtcgcaccttggctgactacaacatccagaaggagagcaccctccacctggtgctccgcctcaggggtggtatgcagatttttgtgaagacattgactggcaagaccatcaccttggaggtggagtcgtctgacacaatcgataatgtaaa

SEQ ID NO: 99584 - DNA, 524 bp, Zea mays
  unsure (1)..(524): unsure at all n locations
gagctcgtctaaaannacctaggggngcctgcannntcnnccnnnntggaaaaaccgggccgacccacgcgtccgtcacggtgtccaccgtgatcttgtacaagtttcagacggacgcgtcggcgtggggtgccggcgcggcgtgcggcggcgtgggggtgctgggcatcgcctgggccttcggcggcatgatcttcgtcctcgtctactgcaccgccggcatctcggggggccacatcaaccccgccgtcaccttcggcctcttcctggcgcgcaaggtctccctggtgcgcgcgctgctctacatcgtggcgcagtgcctcggcgccatctgcggcgtcggcctcgtcaaggcgttccagagcgcctacttcgacaggtacggcggcggagccaactcgctcgccttcggctactcccgcgggaccggcctcggcgccgagatcatcggcaccttcgtgctcgtctacaccgtcttctccggcaccgaccccaagcgcaacgcccgcgacttccacgtgccg

SEQ ID NO: 99585 - DNA, 523 bp, Zea mays
  unsure (1)..(523): unsure at all n locations
cgatcccggtgtgtgnatttcattagtcacgctgcattgcnctggaattaccgggtcgacttacgcgtccgcccacgcgtccgcccacgcgtccgcgttcttattcgctgttgaagatgtcttctccatcagcggtcgtggtacagttgccactggccgtatcgagcgtggcaccgtcaagattggtgacacagttgatatcgttggaatccgggacacccggaactgcaccgtgactggcgttgagatgttccagaagaccatggacgatgccatggctggagacaatgtcggactgctgctccgtggtatgcagaaggatgacattgagagaggcatggtgctggcaaagcccggctctatcacaccgcacaccaagtttgaagcttgtgtgtatgtgcttaanaaggtagaaggtggccggcacttaacttttctcccttgttaccgcccggagtttacattaagacacccgatgtgcagggattgtgacgggattatgaatgacaaaattaggagcgan

SEQ ID NO: 99586 - DNA, 531 bp, Zea mays
  unsure (1)..(531): unsure at all n locations
tgtataggatcgtctagccttttccagcncacattgcatatcctgcatatccggccgacccacgcgtccgaaagccaactgcaccatcaaaacatccttttcagatccacagctccctccaaaagaacgagagcggcgggtgccaatgccgaggctcatgaagcgtattgcaaaccgtcttaaggattctcagaacacctttgcaatgctgagtacatttaatgaagttgacatgaccaatttgatgaagcttcgttctgattataaagatgaatttgtcacaaagcatggtgtaaaattgggtcttatgtcttgctttgtcaaggctgctgtttctgcacttcaaaaccagccaattgtcaatgctgtcattgatggtgatgacatcatatacagagactacgtagacatcagtgttgctgttggcacttccaagggccttgtggttcctgttatccgagatgctgataccatgaactttgctgacattgagaaagggataaacaaccttgcaaagaatgcaactgaggg

SEQ ID NO: 99587 - DNA, 537 bp, Zea mays
  unsure (1)..(537): unsure at all n locations
tgattaccgagcggtatcgccagcgaccccgantatgacgcattgctcgctccggtcttgaattcccgggtcgacccacgcgtccgctcggccacgacctctgggtgcacctcttctccaccagcgaggctgtggtcagcgccttgggctccatgacgccgatgctcatcggctccgtcgtgctggactccacgcagggggtactctgcggcgtcgccaggggctgcaggtggcagcacctggcggcgtggaccaacctggtggccttctatgtcatcggcttgccgctcgccatccttttcggattcacgctcgccttccaaaccaaggggctgtggatggggcagatatgcagcctcctctgccagaactacgtcctcttttttatcaccctgtgaaccaactggcaggagttagacctgaccatgttcaacaaggacaacgattttgtgtgctaggaatctagaaagagtttttattntcttttttgccatgtgctgttgctgaaacattgaaccatcagcatcaggcttcgan

SEQ ID NO: 99588 - DNA, 539 bp, Zea mays
  unsure (1)..(539): unsure at all n locations
cgtccctggagantaangnctgggctcagcncactacgcactgatcgtccggncttgaattcccgggtcgacccacgcgtccgcggacgcgtggggttccaggtattagcagtttaccggttcctcggagcacgatgaagttggttgctgcctacctgcttgctgtcctcgctgggaacgccagcccctccgctgacgatttgactgccattctggagtcagttggctgtgaagttgacaatgaaaagatggaactcctgctgtcccaactgagcggtaaggacatcaccgagctcattgccgcgggcagggagaagtttgcttcagtcccatgtggtggcggcggtgtcgctgttgcggcagctgcacctgctgctggcggagctgcttctgcagctgaggcaaagaaagaagagaaggtggaagagaaggaagaaagcgatgatgatatgggcttcagcctcttcgactaggctgcacagtcatcacagtattgttttgggcagtgaaaccagaggaaaaccagagtcatgtttaga

SEQ ID NO: 99589 - DNA, 535 bp, Zea mays
  unsure (1)..(535): unsure at all n locations
tgtctcgcgtgcgtatcgcctgggccacgancactacgcattgacgatccggtctggaattcccgggccgacccacgcgtccggatccacaggcattcctgtgaagaatttgtttctgtcctcaaagggaagggtacgctcttgatgggatcaagctcactaaagtacccagggcagccacaggaaattcctttctttcagaataccacattttcaatccctgtaaacgatccacaccaggtttggaattctgacgagcacgaagatttgcaagctcttgtgatcatttcgagaccacctgctaagatatttttatatgatgattggagcatgcctcatacagccgcggtactgaaattccccttcgtatgggatgaagactgcttcgaagcagcaaaagacgaactctaggtcacaagtgttttctgcaatgtatctgcttcatccatgatcctgctggactactaaaattcacatgcactagtcgtaataaagccagtgcgctattcatgtataattctgtattggggctccn

SEQ ID NO: 99590 - DNA, 542 bp, Zea mays
  unsure (1)..(542): unsure at all n locations
tgatctggagcgtacgnttggggtccagccacgtcgcactagatgtaccggtctggaatatacccgggctcgacccacgcgtccggtacaccaagcccaagaagatcatacacattcacaagaaggttaagctctccgtgctgcagttctataaggtggacgacacgactagcaaggtgacccgcctccgcaaggagtgccccaacacagagtgcggcgcgggcgtcttcatggccaaccacttcgaccgccactactgcggcaagtgcggactcacctatgtctacaaccagaaggcgtaattgcttgccccgatttgctttatccgcctaccctatcgaacatccagctgttggttactcgaattgtatctcatgtagatctggctgaggttgaaacttaaatggaacagtagtatatgtcatattggaacccgtgttactgaattgaagtgatgccttcagtaattttgatttcagttcacatgaattacagtaatggttgtcccactataacagccgagctaccgatccttgcatgat

SEQ ID NO: 99591 - DNA, 529 bp, Zea mays
  unsure (1)..(529): unsure at all n locations
cggaggccnnnnagggccaaccagggccccnccaagttgccgcagnatcnccnnnnntnagaaaaggggcgagcacgcgttcgtgaggttactgaccattttgctatggcttatgcaggcgcgccaagggggacgaccggcggaggggtgactgtcgggctatcactcctctgcgctggggccggcccgggcgccgcgcaaaaatgcggatggcagccaaacgtatgctgcagcaagattggctactgcggcacgaccgacaagaactgcggggacaggtgccagaccggcccgtgccgctcgggcggcggcggcagcaacggcggccgcggtgcgaacgtggctagcagtcgacaccggctccttcttcaacggcatcaagagccacgccgggagcggctgcgagggcaagaacatctacacccggagcgcgttgctgagcgccgtcaaggcgaacccaggcttcgcccatggcgggtcgcaagtgcatggcaagcgcgagatcgtcgtcttttttgtgcagccaagg

SEQ ID NO: 99592 - DNA, 532 bp, Zea mays
  unsure (1)..(532): unsure at all n locations
cgacccccggtgctgtggcctttcctagcctatcatgcatctgccctggaatatccgggccgacccacgcgtccgcagaaggagaagctcgccggttcctataacttgtngtttgttaaactactacacctcacggggctccgaaaacatcgatatctgaccaaactactcacctgtgctcaacactgacgacgcctacgccagtcaagaagttaacgggcctgacgggaagcccattggtcctcctatgggaaatccatggatctacatgtaccctgagggcttgaaggatctccttatgatcatgaagaacaaatacggaaacccacctatctacatcacggagaacggaatcggggatgttgataccaaggagacacctctacccatggaggatgccttaaatgactacaaaaggctagattacatccagcgccacatcgctactcttaaggaatcaatagacttgggatcaaatgtgcaaggctacttcgcttggtctctgctggacaactttgaatggttcgccggg

SEQ ID NO: 99593 - DNA, 538 bp, Zea mays
  unsure (1)..(538): unsure at all n locations
tggtgcgggtgctatcgnctgggtcacgactacatcgcattaccgctgaatatccgggccgacccacgcgtccgctcccatccagccgccaccaggtgcagagtttttcgtcatctcttctccggcgaagaacggccagtggcccaccagatcacttgttaaactttgttgaggggtgatggcggtttctttcgcaaacctcaacaccgaggcagggcttaaaaagcttgatgagtaccttctcactcgcagctacatcactggctaccaagcttccaaggatgacttggctgtctacacttcgttttcgtctgctccctcgtccaagtatatcaacgtagcaaggtggtttaatcacattgatgcgctcgtgaggctgagcggaattactgcagagggccaaggtgtgaaagttgaatcctcagcagttccttcagccccaactccagatgttgctgaagcacaggccccagctgctgaggaggaagacgatgatgatgttgacctttttggtgaggagaccgaagatgagaagaan

SEQ ID NO: 99594 - DNA, 540 bp, Zea mays
  unsure (1)..(540): unsure at all n locations
atggcccacgtgtgtaaggnccggggctcacgccctatcactgcatcnagccctggaatactccggcccgacccacgcgtccggcctcaagggggtttaggatctccacctacttgtattggtggatccgtcagggggtttcagagagcattggccgacaactcgagatcgttcaggctccctacttatttgcacgagaggttggtagccattcgcggcgcaaagtacgcgtttagaagaccaaggaattgctccgacagtaaggaccttaccggggtccttcacattttccagaagaaagtgcacaacgcctccagaggctgtgcacaaggtaatttaactgaatcaacaggggttcccttcctaaaccggcttactggggatacacttcataggtacctagaggatcaaaacgttgcaaatgatccgtggcacggatttgaagaaaggtacctcaaggaggaagttaacagtcttataaattcaactctcaacgagcgcgagagggacattattcgattatatcatggcataggaaaa

SEQ ID NO: 99595 - DNA, 528 bp, Zea mays
  unsure (1)..(528): unsure at all n locations
tgattcgtgcgttgcctcntttacgatatgangtagtgctcctccggtctggaattcccgggccgacccacgcgtccgcccacgcgtccgtccacgcgtccggttttgttgatcctggtccacatggagcaggtagatgttctgaccatatgttacctgaaattgtgaagaaagattggagaaagggtgcacagtggtttacagtgaaacggcagcatgcagttcttattcttgctgacaccctttactatgggaagttcaagcgttactgtaagccaggaaatgagtggcataactgctattcagatgagcactacttgccaactctcttcaatatggctgacccgactggaattgcaaactggtcagtgacgcacgtagattggtccgaagggaaatggcatcccaaagtctacagggctgtggatacgagcttcgagctgctcaagaacatctcgtccattgatgagagcgtccatgtcagcagcaacgcgaagcatgtagcgcagaggaggccgtgcgtgtgga

SEQ ID NO: 99596 - DNA, 537 bp, Zea mays
  unsure (1)..(537): unsure at all n locations
cgttttgggccgtatncctgggtccagccactacgcatggtcctgggatatccggcccgacccacgcgtccgggggacggtaccggcgccgctcctccagctttggggcctgcgcacgctcgtgctctcggggacggcctctcgggcgagagcccgcggtcggtccgggcgccgctgctccacctggacctgcgcgggaaccggctgtcgggcggggtgccgccgctgccgggcacgctgtcgtacctgtcgctggcggggaaccgtctctcgggccccgtggacggcgtgctgcggcgcctgccgaggctgacgttcctcgacctcggccggaactggctgtcgggcgaggtcccgggcgaggtgttcgcgttccggcgcatcgcgtacctgcagctgcggaagaacgccttctcgggcgagctccggcccgcggggcgcgtgccggcgggcgccacggtggacctgagccacaacgcgctgtcggggcgcgtgccgcccgagctgggcaccgtccggcgccgttacctggaccgn

SEQ ID NO: 99597 - DNA, 531 bp, Zea mays
  unsure (1)..(531): unsure at all n locations
tgtttctcgtgtgtaggnttgggttacgcttatcatgcatccgccctggaatttctcgggtcgacccacgcgtccggaaagccgtccgtgcagctggtgagcctcttttcgattattggagctgtctcaagtccacggttcggacttttgaggcgcaatgtgggtcgttggcgcagtatgggatgaagcacatgcggtccttcgcaaacatctgcaacgctggcatccttcctgaagcagtgtccaaggtcgctgctcaggcttgcaccagcattccttccaacccctggagttctatccacaagggttttagcgcctaagaatcataaggtgaggcgaaatatttcagccgctccaccgcaacgaactggtttacattaccagtcctcaggggggtcctagttcttgaaccataagtgaagcagacttataccactattatagctgttccaccgtcgttccagattacatagctatgcccaatttgcggtgtacatatatagtcggaaagttatttggcaattgtattgg

SEQ ID NO: 99598 - DNA, 534 bp, Zea mays
  unsure (1)..(534): unsure at all n locations
aggtgtgcccccnagnggccaannctttganncctaaagagctangnanatctccccnnnntgagaaaagggccgagcacgcgtncgntcaggatggcaacaacatttttgcgatgttcgattgctacaccccanccggcgagccaagccccaccaacaagaggtacaacgcccccaatatcttcagcagccctgaagtcgccgccgaggagcccgggtatggtattgagcaggagtacaccctcctccagaaggacaccaactggccccttgggtggcccatcggtggcttacccggccctcagggtccttactactgtggaatcggcgccgaaaagtcgttcggccgcgacatcgtggacgcccactacaaggcctgcttgtatgcgggcatcaacatcagtggcatcaacggggaggtgatgccagggcagtgggagttccaagccgggccttccgtgggtatatcttcaggcgaccaggtctgggtcgctcgctacattcttgagaggatcacggagatccgcggggggg

SEQ ID NO: 99599 - DNA, 528 bp, Zea mays
  unsure (1)..(528): unsure at all n locations
gggatggccgggctagcnaaancctttgttccctagtgagtttgcannnccccnnnntngaaaacngggccgaccacgcgtncgntatcttctggttgctgttatcgactactatgagttctacgaagatgcggacggtaccggtggcaacaagatggtagagagcacgcagctgttcgagagcatcaccctccatccgacattcgagcaagcagacttccttctgctcctcaccaagttcgatctcctagagcagaagatcagcagttccccgctgacctcgtgcgactggttcagcgacttcactcccctgatcagccgcaacctcctcaacggcggcagcggcggccgctctagaggatccaagcttacgtacgcgtgcatgcgacgtcatagctcttctatagtgtcacctaaattcaattcactggccgtcgttttacaacgtcgtgactgggaaacccttgcgttacccaactaaatcgcttgagcacatccccctttcgcagctgcgtataacgaagagcc

SEQ ID NO: 99600 - DNA, 550 bp, Zea mays
  unsure (1)..(550): unsure at all n locations
gatgagtttggctcggcgtggcgnaactgttaaaaggtcagntcaccttcgtactgntcgtccggtctggaattaccgggccgacccacgcgtccgcgtcatcatcggggtgctcgacaccggcgtttggcccgagagccccagcttcggggacggggggcatggccctgtgcctgcgcggtggcgcgggagctgcgagaccaatgccaccgacttcccgtcctcgatgtgcaaccgcaagctcatcggcgcccgtgccttgttccgcggctactcgtcgggggccggcgacgggtctcgagtcggcgccgacctaatgtcggcgagggaccacgacgggcacggcacgcacaccgcgagtacggcagccggggccggtcgtggcgggcgcaagccttctcgggtacgcgccgggcacggtgcggtgcatgggccccggggcgcgccgttctggtgtacaaagggtgcttgaggcaaaggggctttaatttccgaatttttggggggcattgggaaaggccattaagacaggggttaagtggtgtttttc

SEQ ID NO: 99601 - DNA, 567 bp, Zea mays
  unsure (1)..(567): unsure at all n locations
ataagtttttattcgggtgctaatcgctacnagcctgntgtgctagtactgacgtaccggtcttgaattcccgggccgacccactcgtccggggttggcttctcctccccctcttgttcgttttcggggacgtgaggttctacggggttcggggtcgtgggttagcggatcgagatggcggcgtcggatgttgagtacaagtatttcgtcgacggactaagattagacatagattaccacttttttctcaacataatatatacctacggctaggtactgtatttctatagcatatttgttangatatacacactaataattttagtattaatatttgttacctttctccacggaagttgcagatgcgtgaacaccataatagggcataaactggcaattagcttggacggtcttatcatttaccattcaactaatgcccaattaatgcttgtggtcgaatataagatttgatttttttaaggtactagtggtataactattaatggtttaaaaatatattaattatcacttatagatattatatattatttgtattcatttatatac

SEQ ID NO: 99602 - DNA, 538 bp, Zea mays
gataagatagacacgaggtggtaaatgcaggtggcctaaaatgcatgcagcggcctgaattactgggccgacccacgcgtccgcgatgaggagatgaagccatgattgccatttgtgctcttgctgccgactgtttctcgtttggcatccagggattgcttattggctattatttgcacgcaaaggaaaaaaaagatgttatgttttatatcttaggccagactgctgtatctacttatttgtgactgctgtgtgtgcatggatttatagtgaatctagattattgggcttgtgctttgttcatgccgctgctgtctgcccatttttctattcagacatgaaattctttgttgggagcttgataagctgcatgataagaagccctttttaagtattgactagttaaaaaaaaaattttattaaaaaaaaaaagggcggtcgctctaaaggatccaagcttacgtacgcgtgcatgccacgtcattagctcttttataagggcacctaaaatgaattaactggcccttgttttacaaag

SEQ ID NO: 99603 - DNA, 545 bp, Zea mays
gagaagtagtaattggagggtccgaatggctggaggcctggactcatagtactgcctgtccggtcttgaattcccgggccgacccacgcgtgcgccgaccagaccaatggcactgcggctacccatctcctcgacccacgggctggcctcctcgggagcgcccatctgctccacgacgacgtgccggccggccgccgccagtgtgagcttgatcccgccagctgccctgatcgcagttgccatccgctgggcgtagtcgacagcgtcccaaaagagggtgctgctgctgacgactgctaggggctgtggagtcgcgccggtgaggtcgagcgggatcgagacgacgtcgacctcggtgggagctgaagccgtcaccgggcaggtcacggaggtcaacaaggacaccttctggcccatcgtcgaggccgtcggcgacaaggtcgtcgtccttgacatgtacaccgaatggtgcgggccttggcaagtgatggctcccaagttccaggagatgtccgtagaggaaccggacgtcgtgttccttaacg

SEQ ID NO: 99604 - DNA, 536 bp, Zea mays
  unsure (1)..(536): unsure at all n locations
aggagtgcccccnacgggcccaccctccaaggcctagnnnggccagcannaccnncnnnnnnnngacgacgcgtgcggccacgcgtccgcccattctctcgctcgcttggagaagctttcttcgttgctgctgccggggccacatagatggggggtttggggaagactcataanaccaatgcgtatttcaaacgtttccaagtgaaattcaagagaaggcgggctggcaagacagactacagggccaggataaggctgattaaccaagacaaaaacaagtacaacacacccaaatacagatttgttgtgcgatttaccaacaaggacatcactgcccaaatcatatctgctagtatagcgggtgatatggttcttgcttctgcctactcgcatgagttgccacgatatggtcttgaagttggtctgaccaactatgcagctgtctactgcactggccttctgttggctctccgtgtgctcaagaatcgtggtttggatcatgagtaccaaggccatgttcatgccactggtgaagg

SEQ ID NO: 99605 - DNA, 542 bp, Zea mays
  unsure (1)..(542): unsure at all n locations
gatgtagcagttgatcgggtccgacntgctgcnactcatgctccctaagnactgacgctccggtcttgaattcccgggtcgacccacgcgttcgcggacgcgtgggcggacgcgtgttcaagcttaagcaacaaggcagcagcacaagcaagaacggcaccttctcccttcgcctgtgatcatgtcgtcttgctgcggcggcaagtgcgggtgcggctccagctgctcctgcggcagcggatgcaacggctgcggtatgtaccctgacgtggagaccgtcgtcaccagcagcgtcaagaccacggtcctcgccgcgccgaccaccaaggccagcgccggcggcttcgaggcggccaccgagggcggcggctgcgactgcaacacctgcaagtgcggcaccagctgcggctgctcctgctgcagctgcaactgagccggcccggctcggcgatggcgcacgagagtcgagaggacgacgacgaggaggcgtataataaatataatagcggcgttcaataaataagatcctgtcaactgcaccc

SEQ ID NO: 99606 - DNA, 542 bp, Zea mays
  unsure (1)..(542): unsure at all n locations
ataatagttaattaggtccggatcactgatggccaaaaatcatagtactgncgctccggnctggaattcccgggccgacccactcatgcggcctgcgtggacttttcaagggcaatggttctaattgtgcaaggattgttctcaaattctggggtgaagttttttaggctacgagcaggcgtcaaagggaattctgtgggcctaccgtcaacagactggtgaagaggatgctcatcttactccgttcttgcaccttgtatctggagcatgtgctgctatcatatttatgtctgctacttacccgatggatatggttaggggaaggatcactgttcagacagacaaatctccctaccagtaccgtggtatgtttcatgcactgggtacagtctaccgtgaagaaggctttcgtgctctatacaaagggtggctttcatctgtaatccgagttggtccatatggtggtctcaacttcgctggatatgagtccctcaaagacttgctacttcagacatattcatttggccttgcaaatgacaacg

SEQ ID NO: 99607 - DNA, 531 bp, Zea mays
  unsure (1)..(531): unsure at all n locations
ggggatggccgnnagggcnaannttggagangctagnngacttagcanntcgaanncngggncgacgacgcgtccgcccacgcgtccggcattttgggttgggctgttgtacgattatgaatcattacaaagcattggagacatgacttttgactggagacaggaggaaagagagatgctaagacataaggtaccgttgactggtctgaagacaccatttcgcgatggatatgttagagatttagccgaggaagttctaaaactggccaagaatggattggaaagaagaggatacaaggaggtcggtttccttagagaggttgacgaagtggtgaggacaggagtgacacctgccgagagacttctgcatctgtacgagacgaagtggcaacgcaacgtcgaccatgttttcgagcacttgctatactgacgttgtagatgtaccctagtacaaaaatctcatctttgattcattcaacgccttgagtgggagggcacaggaacacatcttttgttaagttgctgaccggg

SEQ ID NO: 99608 - DNA, 506 bp, Zea mays
  unsure (1)..(506): unsure at all n locations
aggagtgccnnnnaggcaaanccttttgagctagngncctagcagnaccaannnnggnngangangcgtccgcccacgcgtncgcccacgcgtccgatcccgttgcatcccattccactaccacccatctcggggtccgccgattcgatccgggtcttccaacccaggggcagtgatggcgacgaagaggagcgtgggcaccctcggcgaggcggatctgaaggggaagaaggtgttcgtgcgcgccgacctcaacgtcccgctcgacgatgcccagaagatcaccgacgacacccgcatccgcgcctccgtccccaccatcaagttcctcctcgagaagggcgccaaggtcatcctcgccagccacctgggtcgtccaaaaggtgtcaccccaaagtacagcttggagcctcttgtccacgcttgctgagctcttggagtgagtcggatgccaatgatgcatgggagaagtgagagtgctgcgcttgcagagggagtctgtctag

SEQ ID NO: 99609 - DNA, 543 bp, Zea mays
gtgtgagtttgtgaggtgcgaatgctgatagcctggtaatcatagtactgtcgctccggtcttgaattcccgggccgacccacgcgtccgcggacgcgtgggcggaccaggttagcagcttcaggaaccctatcaccgttcgcatccgcagggatgggtatcgacctcgttgccggtgggaggaacaagaagaccaagcgcacagcgccgaagtccgacgatgtttatctcaagctccttgtcaagctctaccgtttcttggtcaggaggaccaagagcaacttcagtgctgtgattctcaataggctcttcatgagcaaaaccaatcgcccaccaatctccatgcgccgccttgtcaagttcatggaaggaaaggagaagaacattgctgtgattgttggcacagtcacagatgacaagaggatccaagaggttccagcaatgaaagttactgccctgaggttcaccgagacggcaagggccaggattgtcaatgctggtgggggagtgcctgacatttgaccaggttggtcttcgtgctcg

SEQ ID NO: 99610 - DNA, 541 bp, Zea mays
  unsure (1)..(541): unsure at all n locations
aagaaagacgttacgcgagtgcgtattgctgagacttcagctacctaagtactgncgctccggnctggaattaccgggccgacccacgcgtacgggttatgtaggagaggatgtagaatctatattatacaagttactcacggtggcagattttggtgtgcaagcagcacagcaagggatggtgtacatagacgaggttgataagatcacaaaaaaggctgaaagtcttaacatcatcagagacgtatctggtgaaggtgttcagcaggcattgctgaaaatgctggaaggcacgatagtcaacgttcctgaaaaaggagcaaggaagcatcctcgtggtgataatatacagatagataccaaagatattctttttatatgtggtggcgctttcgtggatttggagaaaactatatcggagagacggcaggattcttctattggcttcggcgcaccagttcgtgcaaacatgagggtcggtggcactttaagtgctcaagtgacatcgtccttggtggaatcgggtgagaatggtgatcta

SEQ ID NO: 99611 - DNA, 536 bp, Zea mays
atggttggttgtgaggtccggatgatgatggttggtatcatacgatgtcgctccggtctggaattcccgggccgacccacgcgtccgcccacgcgtccgcggacgcgtgggttttgttttgccgaggccattggtgccatgcggccagcccttttcttctccatggttcccatcgatgtgtttttgttcggttctctcgtcagatctgtataaataggcgcctaccttctccgccattcctcggtcctgtgaagcgtttcagttcatcgattgagttcttggatgcctctagttgtattgtgtgtttcttctttctggtctatgtactaggactatagtaccaggatctgagtcgtttttttttgggtcttgctcctgtctgccgtttctttccccccttccagagttaggttctgttggtttcttgcctgcaatatagtttcgtggcgcaccgtcaagggtgtgtctagactttaaagactggttgttggcagttgggtttatgtcgtgctgggagggttttaattttaagatgt

SEQ ID NO: 99612 - DNA, 526 bp, Zea mays
  unsure (1)..(526): unsure at all n locations
ggatgccgnnagtgccaaccaagtnacccttttgtcatgcanatcnncannggncgangangngtgcggaagtcgccccctctcttaaaccctcttttttcccctcctttgctcgacccagatcgagggctcgatccggggggcatggcgctggagtgggtggtgctgggctacgcggcgggcgcggaggcgatcatgctgctgctgctgacgctgccggggctcgacggcctgcgccggggcatgatctccgtggtgcggagcgcgctgaagcccatgatgtcggtggtgcccttctgcctcttcctgctcatggacatctactggaagtacgagacgcgccccacctgcgacgacgagcacgcctgcaccccctccgagcaccttcgtcaccagaagtccatcatgaagtcgcagcggaacgcgctcctcatcgccgccgcgctgcttctctactggatcctcttctccgtcacccagctcgtcgtcaggctcgagcaagatgcagcagcgcgttgacaagctn

SEQ ID NO: 99613 - DNA, 542 bp, Zea mays
  unsure (1)..(542): unsure at all n locations
atgatagtaatatgggtgccgagtagttgtattgccaaatgaactagnactgccgtccggnctggaattaccgggccgacccacgcgtccgcccacgcgtccgcggacgcgtgggcgccttttgatcgctcttggtgcatctgaaggcctgggttaccttcaccatgactgcagcccacgaataattcaccgggacgtaaaatcaaagaatatactcctcgacaaagattaggaagcccatcttacagactatagcatcgctaagagcttatgtgagtcgaagactttcacgtctacctacgtcgtgtgcactattggttacattgatcccgaatacgcccgcaccttccggcttaacgagaagtctgatgtctacagctacggcatcgttctgctggagctgctgaccgggaagaagccaggggacaacaagtgcaatcttcatcacttggtcctatcgaagaccgcgagcaacgaggtcatggaaaccgtggaccccgactgggagacatcttgcaggacctgtgccaggtgaaaaactn

SEQ ID NO: 99614 - DNA, 529 bp, Zea mays
  unsure (1)..(529): unsure at all n locations
ggaggcccccncgtgccnnnaagggangcctagnnggccagnannatcnnccnnngnncgangangcgtgcgcggacgcgtgggtgaacatcaagggtctgctctacctgacttgtcagactgttgctgacaggatcaatggcgagacaccagaagagattcgcaagaccttcaatatcaagaatgacttcacccctgaggaggaagaggagatccgcagggagaaccagtgggccttcgagtaaggaggtgctggatctattgatgcctaagtttggtggtgtctactactatgtctactttatgttgtcctaatggttgtaagtattttgggagtcactttgcttgcgaatgtctcgcgtaagacttatgtggtcaatggtcggttattaacttattaccatgaaagcacttcgtctgctgccctaagaggtttagtcccatttgcattataacccnnnnnaaaaannnnnnntnnattnnttaatattaatatttttatttattattataaaaagggccgctcctg

SEQ ID NO: 99615 - DNA, 542 bp, Zea mays
  unsure (1)..(542): unsure at all n locations
ggagtgcccggagtcgnnanannttggggagcctagnngngccagcaaaacccccnacngggncgacccacgcgtccggttgttatgctggttggtaacaaatctgatttccgccatcttgtagcagttcaaactgatgaaggaaaagcattcgcagagagggagtcattgtatttcatggagacctctgcactcgagtcgactaacgttgaaaatgcattcgcagaggtcttaactcagatctaccgtattgtgagcaagagagcagttgaagcaggcgaagatgcagcatctgggcctggcaagggcgagaagattaacataaaggatgatgtttcggcggtgaagaagggtggctgctgctctagctgagctgccctgctgtattttttgaagttgtggtgatgtagcttatggtacggcatttccagcgacccagaactggtactggcattagcagcttctattgtacctagaaagtttattgtcaaactggggaaaataactgaaagcttagatcggtggtaaaatctttttggtcc

SEQ ID NO: 99616 - DNA, 505 bp, Zea mays
  unsure (1)..(505): unsure at all n locations
gaggctgtccnccgcccagcgccgtctggcttgcaccggttcggaattaccgggccgacccacgcgtccgcccacgcgtccgcccacgcgtccgcctttctttacgagtatccaagtccaaccagggagaggggaggcgctgcacgcaggtcacgcggcgatggacatatgcgatgtttgagcaggcggtggcagatttctgctggcatgcgagggaagtagtgtcgtcagggatggggctctggggttggccgtgggggcgacgtgggccgtcgggcttcggctccgcgtccaccgccgaggaggtcaccgccggcgtcgacgcaagcaacatcactgccatcgtcacaggagcgacgaatggcattggaaaagagacagccagagttctagcactgaggggagccaaggtaatcataccagctaggacactggagagtggcctcaagtgaaagagagcctccagataaggtccaaagctcaggtcacgtnttgagattgactg

SEQ ID NO: 99617 - DNA, 508 bp, Zea mays
  unsure (1)..(508): unsure at all n locations
aatgcatggtaaaggaagccgggangtnacnncnacnggnttgaattaccggccgacccacgcgtccgctaggaatgaacctttagaatgttgttcctcacatgctgggttcatgcaaaaagggaagtntctctaaggatgacagtgtgattcttgatggcgctggaaacaaaaagtctattgaagagagggcagaccagattagatcagcagttgagaacagcacttcagattatgacaaggaaaagctccaggaacggttggcaaagctctctggaggtgttgctgttctgaagattggaggagccaccgaagcagaagttggtgagaagaaggatagagtgacagatgcactgaatgctactaaagctgctgttgaagaaggcattgtaccacgtggtggtgttgctcttctcctatgcattgaaggagctcgattagatggaaaccagcaaattttatcaaaaaattgggggcccaacatttcaaatgcttttaatacacccgc

SEQ ID NO: 99618 - DNA, 508 bp, Zea mays
  unsure (1)..(508): unsure at all n locations
tcgggctgtcccccccgactcccttggatctcacggtcttgaatacccgggccgacccacgcgtccgaacaacttatggatctttgcgcccaccttttggaaaacatcgtctgaagattgtagaagggatctctgtgctgcttacaagtggaaatgaaactgctgaaaaagagctaaaaaaggcgtcagcaataaaacgccccaatggtttggtctttgaagattcctataacaaccttttgcccccacatggtgggaatataaatggtggctggccggaggggaaaaaaacctgaagtggtgagcatgtccttcatgaatgtgataatgtgggtaaaattcttgcctcaaaaaggttttcatccttgtcgactgagtctaatgggcctactggtccctctgaagggaaaacccctccaagaattggaaatggtggtcacatgacangaatagcccataaaactattcagttgggcatagtaacaacacaatccatgctcacttacag

SEQ ID NO: 99619 - DNA, 508 bp, Zea mays
  unsure (1)..(508): unsure at all n locations
taggntnnttactttgatcctgatgtacgaccnccnggntcggaatcccggccgacccacgcgtccgcggacgcgtgggcggacgcgtgggcggtctcgtgggttcaacgccagggaagccaccgggggcagtaacgccgacgcgtgcagcagcaagcgcggtgtggccgggtcacagccggcggcaagccagaccaaggtgagcgcgcagaaggaggaggagatgctgaagctgttcgagcagaggaagaaggacctggagaagctgctggacatctacgagcagcgcctggaggaggccacgttcctggccggcgacaacttcaccatcgccgacctgtcgcacctgccctacgcggaccacctcgtcttcgacccgcgctcccgccgcatgttcgagtcccgcaagaacgtcagcaggtggtggcacgacgtctncggccgcgacacctgtaaagtacgtaaagacctgcagcgcccgtcgttcacgttcaccgacgccatcgcg

SEQ ID NO: 99620 - DNA, 498 bp, Zea mays
  unsure (1)..(498): unsure at all n locations
tatactgtgtttgacttgtatatctcggctcganaccggccgccgcgcgtncagatgangccatatactactagatggcgtggtcatacagaagttccagcttanggtggtgagggcacatatggggcctggtagtcaaaaaaccagctttgttaatgacacaataagggcaaacattgcctatggaaaagatggacaagcaacagaatctgagatcatatctgctgcagaattggcaaatgctcacaagtttatcagttcggcgctgcagggatatgacacagtggttggagagcgtggagcccagttgtcaagagggcagaagcagcgagtggcgatcgcccgtgcaattgtgaaggaccctaggatcctgcttctggacgaagcgactagtgcgctggatgctgaatccgaacggatcgtccaggacgcactggacagggtgatggtgaacccgacaacagtgatcgtcgctcaccgtctgtcaacaatacaaat

SEQ ID NO: 99621 - DNA, 510 bp, Zea mays
  unsure (1)..(510): unsure at all n locations
acgggtgnnnngggctagnnngnncnttctgtaccgtttcggaattaccgggccgacccacgcgtccggcatgattgagacatctagctagaacttttagatttcaatgatggaagaaagctcagggggcagttatataacattatgggcttccagttttggcatcttctattgtgttaagaaaacttcattttaactgacaaagtgtcatcttactatttagtttgctaaagggatgttactcatggttagtccacaatattttacatttttacatatcttgtagctcttcactttcaggtttcttaaggaactagacttacaaaagagttgtgtgaaacatcaagaccatcagtggattaattgttttcccaagtcttcaacatcactagaatgcttgaatttttcctgcttgactggggaggtgaatgcttgtgcactggaggaacttgttgcaaggagtccaaatcttaaaagtttaaggctgaatctttgcagtccatttgatgg

SEQ ID NO: 99622 - DNA, 515 bp, Zea mays
  unsure (1)..(515): unsure at all n locations
atggnttgnnncctgtnaagcctgtgangtcacnantcnaccggnttggaattaccgggccgacccacgcgtccgtccagctctagtgaagcaagatttccaatttctgatataatcctaagaacagttactgggagtatgtttcctgttattgatccacggcaagtaatctccattcaggaacatgagtatgtttattgcctggcaatcgtcaagagcatgaagctcaacattattggacaaaatttcatgactggtcttcgtgttgtgttcgatcgggaaaagaaaattcttggatggaagaaatttaattgtttctcaccttcaacatctgagaactactctccgcaggaagcaaggaacccagctggtgtttcccagttgagaccactgaacaattcatcaccagcagcgttatatgatagcttgctcctgatgcttatcttggtccacctggcttgtaattaantttggtcttaaaataaaatactganaagcttgactagaggtacaca

SEQ ID NO: 99623 - DNA, 497 bp, Zea mays
  unsure (1)..(497): unsure at all n locations
tacgtttttttgtcattngntnntcaacnnnnttttaaagccgcggagggggngcaacggcgaccttcctctttgtaacccttttaaaaaaaccaaagcgagaaannacttggggacacaaaaaggggaacgggagccccgacgacgncagggccaagcccaaggggtccaaggctgtgtcgcggccgaccaaggctgggctgcagttccccgtcggccgcatcgcgcgctacctcaaggccggcaagtacgccgagcgcgtcggcggtggtgcgcccgtctacctctccgccgtcctcgagtatctcgcggcagaggtgttggaactggcgggcaacgcggcgcgcgacaacaagaagaaccgcatcgtgccgcgtcacatncagctcgccgtgcgcaacgacgaggaactcagcangctgctcggagctgtcaccatcgccggcggaggtgtggtggccacaattatcagacgcttgttgccaagaaggcccgtg

SEQ ID NO: 99624 - DNA, 521 bp, Zea mays
  unsure (1)..(521): unsure at all n locations
nnnaatggggttgtnnnnggaactgnagnnagnacntncgnnctggntttnccgggccgaccgacgcgttcgcccacgcgttcgggaagaaatacgtagattattttatgggttcagattaaaaaggcagtgtgaggtctatggatgcgtgtgaggagtatataaaggacattataaatcaatgggagcaaaggaaaggaaaggaaaggaaagggagaaaatttcatatagcaattgtttcgcgtataggagggagaacaaaggtcgcgtctcgaaagttcttgccttgttgggaagggatggcgtcggaggtggaggacgacgcggcggtgccgggcgcgccgctggtcgccaatggtgcagccgacgtccgccggaggagggatcaggcgaaggcgattttgtccaagcaggccgtcaagatcgccaccaatgccgagcagcacgagcgcttcatctttaaggtcacacacttgctgggtgttctttggaattggggaattttgctatctttttggggg

SEQ ID NO: 99625 - DNA, 518 bp, Zea mays
  unsure (1)..(518): unsure at all n locations
nnnaaggcntttgtnnnnnaaacttgnngnnagtacnnncngnnctggatttcccgggccgaccgacgcgtccgcggacgcgtgggcggtctcgtggggtcttcgcttgcttcctttcgaaagtccttgcgtggcaggctcctatcgatcgagtgtgtccggattccanagaggcccaactgccgaagccatcgatcgccgccacctcttcgagcagaatagttgagaatggctgacgaggatatccagcctatcgtatgtgacaatggcactggaatggtcaaggccggtttcgctggtgatgatgcgccaagagctgtcttccccagcattgtgggaagaccacgccacaccggtgtcatggtcggcatgggccaaaaggatgcctacgtaggtgatgaggctcaagccaagagaggcatcctgacactgaagtacccgattgagcatggcattgtcaacaactgggatgacatggagaaaatctggcatcacaccttctacaacgagcttcgtgt

SEQ ID NO: 99626 - DNA, 518 bp, Zea mays
  unsure (1)..(518): unsure at all n locations
tttttacgggnggcttttttatcttntgangtatcgncgcaccggttcggaattcccgggccgacccacgcgtccgagcaaaccacaccagtcaccagccttattttctcaaccccaaaccaatccgtcgcggacgctcattgtcgcaggatgccggcgccnccttagcaccaccagccccaggacgaagaggacgacgataccgcaggcgttgtcaagctcatcagcgccgagggcttcgaattcgttgctgacaggaaggccgacatggtctccaacaccctccgcaacatgctcacatccccaggcgggttctctgagacgcgccagggcgaggtccgcttcccagagatccccaccaacatcctcgagaagatctgccagtatttctattggtcgctccattactccagtgggaaggagacagcggagtttccaatcgaaccggagataacccttgagcttatgatggcccgaaactatctggacacttgatgaagaagcctgaggggattaat

SEQ ID NO: 99627 - DNA, 510 bp, Zea mays
  unsure (1)..(510): unsure at all n locations
ntggttgtgnnnaagccagganagtacgncgcaccgtttcggaattaccgggccgacccacgcgtccggtttcctcccttcccatcccccactgcttatcagtcagtcagcactcgccacccacacgggttcgttccggccacgggtcgactccaactctccgatctccaggaatccgcggctgaggcgccggcgatggcggctcccatggtcgacgccgaatacctgcgccaggtcgacagggcgcgccgccacctccgcgccctcatctccaacaagggatgcgccccgatcatgctccgcctcgcatggcatgatgctggaacttatgacctgaagacaaaaactggtggtgcaaatggttcgattagatatgaagaagagtacactcatggttcaaatgctggtttaaagattgctatcgatctccttgagcctatcaaaggcaagaatccaaagataacatatgcagacctgtatcaacttgctggaagtgttgcaatccaaagg

SEQ ID NO: 99628 - DNA, 510 bp, Zea mays
  unsure (1)..(510): unsure at all n locations
aggnnagtgaaaagggttagganagtacgncgcaccggtttggaattaccgggccgacccacgcgtccgcccacgcgtccgcccactcgtccgttggtcttcaacaacatcacgcggctagcctgcgggatacggttcgtggacgcgagcggccaactggacgagcaagggcgcgagttcaaggggatcgtccacaacggcatcaagatcggtgcgtgcctctccatcgcgcagcacataccgtggctgcgctggctggccccggtcgacgagcaggccttcaaagcccacggcgaacggcgcgaccgcctcaccgtgaagatcatggaggagcacgccagggccctcaagcagcgcggcgcccagcagcacttcgtcgacgcagctcttcactctcagggacaagtacgacctcagcgatgacaccgtcatatgcctcctctgggacatgatcaccggcggcacggacacgacggtgatctcngtggagtgggcgatggcggaacttgt

SEQ ID NO: 99629 - DNA, 516 bp, Zea mays
  unsure (1)..(516): unsure at all n locations
naagctgtttttcccgccaaaccagccatggtattggcctccccttaanggnccggccgangggnnnggccgacgcttccgaactcaataactgaactctttattgattcagtaggtagctagctaggggagtcacaatggatcctaggaagttccgtccgtccagtagccacgacacgacggtgacgacgactaacgcgggcgctcctgtgtggaacgacaacgaggcgctgactgtggggcctcgcggtcccatcctgctggaggactaccacctgatcgagaaggtggcgcacttcgcgcgcgagcgcatcccggagcgcgtggtgcacgcgcgcggggcctccgccaagggcttcttcgagtgcacccacgacgtgacgtcgctgacgtgcgccgacttcctgcgcgcgcccggcgtgcggacgcccgtgatcgtgcgcttctcgacggtgatccacgagcgggggtccccggagaccattcgcgacccgcgcgggttcgccgtgaaagtct

SEQ ID NO: 99630 - DNA, 523 bp, Zea mays
  unsure (1)..(523): unsure at all n locations
ngactggtgtgtctcncgccctatcgctcgtcgtcttcnnacctnttcggaattaccgggccgacccacgcgtccgcggacgcatggtctttaaaggggtttgttatagagacaagacagagagaacaaagggagagatagttgagtgggagacgggcgagaggctgccgtgtagggaccgtagactcagcgactgcgaaggagggataaggggatggccgggatcggaccgatcaggcaggactgggagccggtcgttgtgcggaagaaggcacccaccgccgccgccaagaaggatgagaaggccgtcaacgccgcgcgccgcgccggtgcggagatcgataccatgaagaagtacaacgctggtacgaacaaggcggcatccagcggtacatccctcaacaccaagcgcctcgacgacgacaccgaaaacctcgcccatgagcgagttccaagtgatctgaaaaaaaatctcatgcaagcaaagctcgataagaagctgacacaggcacaacttgtttag

SEQ ID NO: 99631 - DNA, 508 bp, Zea mays
  unsure (1)..(508): unsure at all n locations
nnaaatggtgtnncccaaatggcagnacgtacnacngnntnnatttacnggtccgaccgacgcgtncgnccacgcgtncgatcttttctaaatcaattagttcttttgcatctcagtatgtctactgctgcgggatatttgaacttgaggctgcgtaaagtcaatgttaatggcggtgcaatggctcttggacatcctttgggtgctacaggtgcacggtgcgtcagtactcttctcaatgagatgaagcgccgcggcaaggattgccggttcggagtgatttctatgtgcataggttctgggatgggtgccgctgctgtgttcgagcggtgagacggcgttgatgagctcaccaatgctcggggaatctcgacccacaactggcttttcaaggacgccatgtaaagctacacccaccaaattttgcctgactggtagcattggttccagatcgctgattgagcgaattggcaataaatgatttttatttgcacccctgctgggattn

SEQ ID NO: 99632 - DNA, 500 bp, Zea mays
  unsure (1)..(500): unsure at all n locations
agctgttatctccccccatcnccctggtatcaccgtcctcggattaaccgggccgacccacgcgtccgggaacagatgtgcactctccagttgtgcctcntaaatgccactccatacaaaacatttagggacctattacctggtagggggcttccacaggacttcctctgtgcaattaaggcagcagattacagctctgcaacaacaaagattaatgtggctgtcgacagactgccacagttccagtgttgcaacaccaatcttgaatgttgtccagagcacatgggcacaatacacattgggtccgaaagcatggaggaaattgacgttgcatacacggaagcagcagacggcatctctttcaaaaaaactgttatagaaattacaattccttctgtttagattaaaacatcctccccccaaaagcctttgagagaaaaaatcttttggataattagtcgaccttcctaatcaaaacttgtttaatccatctttccttc

SEQ ID NO: 99633 - DNA, 513 bp, Zea mays
  unsure (1)..(513): unsure at all n locations
tttagactggggattttttnccgattnnntcgtacnaccggntcggaanaccggccgacccacgcgtccgggcgcacggcgcaccgcacacctcactgtctctcccttctcgtctcctctcctctgcgtggcctcgtcggatccggcgccgacccaccgcccctctgctcgctccttccgccggaatcgctgctcctctctgtgctgtcgatttgtgcggcgactgttagtttggttcggtcccatccttctgttgatcaatggctgacggtgaggatatccagccacttgtgtgtgacaatggcactggaatggtcaaggctggctttgctggtgatgatgcgcccagagcagtgttccctagtatagtcggccgccctcggcacacgggtgtgatggttggaatgggccaaaaggacgcctatgtatgtgacgaagcacaatcaaaaagaggtatctttgacctgaaataccccaatgagcaccggatcgggaacaactgggaggatatgg

SEQ ID NO: 99634 - DNA, 517 bp, Zea mays
  unsure (1)..(517): unsure at all n locations
ttttcactgttgtgttttaagccttttgangcnacgnctcaccgtntcggaattcccgggccgacccacgcgtccgcccacgcgtccggcatctggatgctgatttccaccgcaagtacatctatggtctccatggggctgagtatatgaagaatggggctgatgaggagcccgagaagtaccaggctcacttcagcgagtacatcaagaaggggattgaggccgatgacatggaagctctgtacaagaaggtccatgctgccatccgtgctgatcctagcatggccaagtcaacaaaggcgcaaccaaaggagcacaagaggcacaaccccaagaagttgacctatgagcagaggaaggccagactcgtggaaaggctcaatgccctcaattcctcgggtggtgtcgatgatgatgaggatgacgaatgaagtgctagtcgcggcacagtagtgctatcctatttggcgatcagaacttgcgcaatggcatttgtggttcctttacctctgtaaca

SEQ ID NO: 99635 - DNA, 511 bp, Zea mays
  unsure (1)..(511): unsure at all n locations
ncgggtctgnnnaaaccccngacgtacgncgacctgttcggaattaccgggccgacccacgcgtccgcccacgcgtccgaatatatctgaagattgttgcaaagaagaagggttccaaggattgcagggctaatggtttgaagaagaaggctactactgctactggctctgatgaggaccactcatcctctccaactcgcagacatgatggtgacaaagcagctgcagatgatgatgacgatgatgtccagtggcagactgacacttcaattgaggctgcgaagcatcgcatgcaagagcagctgagtgcagcaactgctgaaatggtgatgctgtcgactgaggagactgagaagaagatgaaacaggcaacccacaaagatggaagcactaatggttcagcaaaagaaatccctaatgacaagcctgccggcactaagcctattccctatgaaaaactgattggagacatcaacgctagcctcaggagtgctcctaacccctaccaatg

SEQ ID NO: 99636 - DNA, 511 bp, Zea mays
  unsure (1)..(511): unsure at all n locations
agggctgtnnccgaatggcagnaggnacnacngnnntgatttaccgggccgaccgacgcgtncgnccacgcgtncgnccactcgttcgnccactcgttctgaagagctcgccgcaatcaaaatgcaggccgccttccgaggttacgtggcaaggaaggcactaagagcactacgaggccttgtacgattgaagtcattggttgagggtaattcagttaagcgtcaatctgcaagcactctgcgctgtatgcaaactctatcgcgggtgcagtcacaaatacgatctaggagagcaaagatgtccgaggagaaccaggccctccaacgccagctcctacttaaacaggaactggagaatttcagaatgggtgagaactgggacgacagcactcaatccaaggagcaaatcgaggcaagcctaataagcaggcaagaggcagcgataagaagagaaagaactcttgcatatgcattttcacatcagtggaagagcacatcaagatctgcgaac

SEQ ID NO: 99637 - DNA, 509 bp, Zea mays
  unsure (1)..(509): unsure at all n locations
gcgtgttttnngggctaaagnngcntgctgtaccttctcggaattaccgggccgacccacgcgtccggtccctccaaggttgttaaggtttctatctccaagactggtaagcatggccacgccgagtgccactttgtcgccatagacgatattcaatgggaaaaagcttgaagatattgttccttcatcacacaactgtgacattccgcatgtgaaccgtactgagtatcagctgattgatatttctgaggatggatttctgagccttcttacttcagatggcaacactaaggatgatcttagactcccaactgatgagactcttgtggcccagattaaggaagggttcgaaagcgggaaggatcttgttgtgactgtccactctgcgatgggggaggagcacatctgcgcgttgaaggatgttggccccaagtaacttccttggctttggagacggcaccctactgtatctcaacctaaatcgtgaaagaagtgtatcaccaaatgat

SEQ ID NO: 99638 - DNA, 522 bp, Zea mays
  unsure (1)..(522): unsure at all n locations
ggacacgcgtgctgttcagcttccacagtnantaggtacaccacccttttacctttccgacccacgcgtccgtctactccttctccgactcgtgcgctgtcaggatatcaaggacgcattctactaattggccagtattcttggtcttctctgcgaatgggactgggcactcctgtggcatggctgagatggctgctcctgttgactatcacaaggacatggacttctggtgtcaggataaacggaccggctgcttacctgtgagatggcacactgttaaagatataccgactggttttttgcagcatatcacactgcagaataatgaaaacaagcctgtgactcacagcagagatacacaggaaataccatacctgcctggaatatctgtgatcaagatcttcatagacctcagagtgagggactgcctgtctgatgatgttatgacatatgaggcagaacaggcgcaaatgaagccgcacagaagatgcaagctgagttacgatgcttcagattttgtac

SEQ ID NO: 99639 - DNA, 514 bp, Zea mays
  unsure (1)..(514): unsure at all n locations
gccgactgtgtgaggtcatntcgtacgtactgcatattcgttcggaattcccggctcgacccacgcgtccgccactcatcttttcgcgtttagaacctttaaaatttcccccactcgccagtcgcagcaggacctgtagccatggacgccagcggagccggtagcaaggggaagaagggtgcggccggtcgcaaggcatgcggacccaggaagaagtcggtgacgcggtccgtcaaggccgggctgcagttccccgtcggccggatcgggcgctacctgaagaagggccggtacgcgcagcgcgtgggcactggcgcccccgtctacctcgccgtcgtcctggagtacctcgccgtcgaggttctggagttggcatggaacgcggcgaaagacaacaagaagacgcgcatcatcccgcgccacgtgctcctggcgatccgcaacgacgaggagctcgggaagctgctggcaggcgtcaccatcgcgcacggcggcgtgcttcccaacattcact

SEQ ID NO: 99640 - DNA, 410 bp, Zea mays
  unsure (1)..(410): unsure at all n locations
gatgaggtaggttcctagctgtgcatttctccctagctcgagcgtcgtcgctnattttcttgctaccttaaatttccatcccatcgacagacggtaccatgaccgagcgaccgtagcaagggaaaaggtcggcggcgcaagcagcggcccagaaaagtcggaccggccgtcaaggcggctgcagtcccgtcgcggatcggcgctacctgaaaaggccgtacccacgctggcactggcccccgtctacctcgcgccgtctgagtacctgcgcgagttctggagttggcaggaacgcgcgaaagacacagaaacgcgcatatcccggccactgctcctgcgatccgacgacgagagctgggagctgctgcagcgtaccatcggcaggcggcttctcccaaatccactcgtgt

SEQ ID NO: 99641 - DNA, 514 bp, Zea mays
aggtaagtgtgatatgcgaggggggtagcctcctaccggttcggaattcccgggctcgacccacgcgtccgcggacgcgtgggcggtcgcgtgggcggtcgcgtgggctatccgcgagcctcgtaccggggcagccatggcggaggagcccgccgttgtcgtggcctcctccagctacgaggttgacctcgggaacctcatggcgtacgatccgtcgcatcacgtcgccaccgccttcagggaggagctgagacaggagtgcctgcggaagggtacagagctggcgcaggcggtggccgacgtcctcttcgcgctgccgtccaacgaggaccgcgacggccccattatccaccttccgccgtccaccttcagactcccgcgggagaagcatctacccaagcccaagccaccgaccaagtgggagctgtttgcaaaggcgaaaggaattaccaagcgcaaaaagaacaagcgtgagtgggatgagcaaactcaatcctggaagcggactcatggc

SEQ ID NO: 99642 - DNA, 519 bp, Zea mays
gttagagtggtggtaccgcatgcggggatcagtagactcctccggttcggattcccgggtcgacccacgcgtccgctacaccaagggtgatggccttggcgctgagattgttggcaccttcatcctagtctacaccgtcttctcagccaccgatgccaagaggaatgccagggactcccatgttcctatccttgccccactgccaattgggttcgcggtgttcctggtccaccttgccaccatccccattactggcactggcatcaacccagctaggagccttggcgctgccatcatctacaacagggatcacgcctggaacgaccattggatcttctgggtcggccccttcattggcgctgctctggctgccatctaccaccaggtgatcatcagagccatcccgttcaagagcaggtcttaagctgccgtggccgtgccgagacatgccagtccgaagaacgggcgtcttcctgtgatgtcttcttgtctggccacgcctagtttctctgtcgattc

SEQ ID NO: 99643 - DNA, 514 bp, Zea mays
ggttaagcgtaggtcagacacgacaatattgctatgccgtaccggttcggaattcccgggtcgacccacgcgtccgagcgaacgtgttgataaactagttggttatgcttcgagttatcaactcaaggatgaccgtattcaaactcctggaaaggatgcgagagttgtcctttctggtgtaagccttaagtatggaattgatttgttggaaagtatccaaagtggccctaagaagaagagcacaaagaagtcactcaaggatgttgtcacagagaatgaatttgaaaaacgtcttcttccagatgtcatccctccagatgagattggtgttacctttgaggatattggagcattagaaaatgtcaaggaaactttgcaggagttagttatgcttcctttgcaaaggcctgagttgttctccaaaggacaacttatgaagccatgtaaagggatattgctttttggtccacctggcaccggtaagaccatgcttgccaaagctgttgcaacagag

SEQ ID NO: 99644 - DNA, 526 bp, Zea mays
  unsure (1)..(526): unsure at all n locations
tactgtgtgtcactagatttattagttatcctgctccggtctggaattcccgggtcgacccacgcgtccgcggacgcgtgggcaccaatgatgcgaagttttgtgatgggaacatatgtcatcgcaaaggtgaagaaagaagacggaaatatttatgtcttgttgaatgggatgggtgccacaccagaaggaaatgttccattcctcgatttgtttgatataaatactgngagtaaagagcgtatatgggagagcgacagggaaaagtactatgaaactgttgttgcactgatgtcagacaaaactgacggggaactgctccttgatcagttaaagatacttacgtcgaaagaatcaaaaacagaaaacacacaatattacttgcagacttggccagaaaagaatcaagttaagataacaaatttcccncacccatatcctcagcttgcttcattgnataaggaaatgataagatccagcggaaggatggagttcaacttacagcanactataccttgccccaggg

SEQ ID NO: 99645 - DNA, 521 bp, Zea mays
agttttaaagtcgttgtagacgaagggaggatagtacacctcgttcggaattcccgggtcgacccacgcgtccgcccacgcgtccggaccgacaggacgagtactcgcagctagctgacacggccgagaagcagcttgcattgcaggcgtagtacgtacccagcagcagctagcactagcagtccatcggagcgacgatggtgagaaggacggtgctggcggcgctgctggtggccgccgccctcgccggcggcgcgcgggcgcagctcaaggaggggttctacgactactcctgcccacaggcggagaagatcgtcaaggactacgtgaaggcgcacattccccacgcgcccgacgtcgccttcaccctgcttcgcacccacttccacgactgcttcgtcaggggctgcgacgcgtcagtgctgctcaacgcgactggcggcagcgaggcggagaaggacgcggcgcccaacctgacgctgcgcggcttcggcttcatcgaccgcatcaaggcgctgctc

SEQ ID NO: 99646 - DNA, 522 bp, Zea mays
  unsure (1)..(522): unsure at all n locations
agtntttatgcataggtacgtacgggggggataatagtcatagctcgtaccggttcggaattcccgggtcgacccactcgtccgcccactcgttcggcaagagaacgaacatgtagagttttgactcttcaatcattcattcgtggtgagaatgcacggcaaatttactcctctttgttgaagaaacatatagccgcaattgttttgcagagaaatgtgagaagttggcttgcaagaaagtatttcataaatgttccgaaagcctaagtgatcatacagtctggtattcgtggcagtcttgatcgaagatgtaatggcaatattgatctaataaatgtgctaagagagtttgaatcagaacaggacgcacatggtgaccaaattttgatcaaggccttagtcctggctgagttacagaggctgatactaaaagccgaggccacagtacgtgaaaaggatgaagagaacgagatgctatatcagcggcttcagcaatatgaaaaccgcttgttagagtacgac

SEQ ID NO: 99647 - DNA, 529 bp, Zea mays
  unsure (1)..(529): unsure at all n locations
agatttgctgagcaagcctcngacgctagatctaccccggtttggaattaccgggtcgacccacgcgtccgcccacgcgtccgccacgggataatcatgattcacaagtacagtttgcattggagagaggggtccctgcatatattggtgtcctcggatcaataaagctgccatttccatctcgtgtttttgacatggcccattgctcgagatgtttaattccatggagtggaaatgatggtatgtacatgatggaagttgacagagtactaaggcctggtggatattgggtgctatcaagcccacccattggctggaagattcactataaagggtggcaacgttcaaaggaagatcttcggaatgagcaaagaaaaatagaatacttcgcacaacttctttgttggaagaaggtatctgagaaggatggtatcgccatatggacaaagaggttaaatgacaagtcttgctccatgaaacaagattattcacatggtggtaaatgtgattttaccagcgacagtgatgt

SEQ ID NO: 99648 - DNA, 531 bp, Zea mays
  unsure (1)..(531): unsure at all n locations
cggggtgaccatgatagtatatcatngctctaccggtccggaattcccgggtcgacccacgcgtccgccggtctcctccgcccgttgccttcgtcctttccatctccggctgcgacgccggcgagccggacaccgcgaatcggatccgccgacaaggcgagagggaagagatggggctcacgttcaccaagctgttcagccggctgttcgccaagaaggagatgcggatcctgatggtgggactcgacgccgccggaaagaccaccatcctctacaagctgaagctcggcgagatcgtcaccaccatccccaccatcggattcaatgttgaaactgtggagtacaagaacatcagcttcactgtctgggatgtcgggggccaagacaagatcaagccactgtggaggcattacttccagaacacccagggtctcatctttgttgtggacagcaatgatagggaccgtgttggtgaagcaagggatgagcttcaccgaatgctgaatgaggatgagttgcgtgatgctgttn

SEQ ID NO: 99649 - DNA, 528 bp, Zea mays
  unsure (1)..(528): unsure at all n locations
gatggtgatccactgcactatagcatagctcgcaccggtctggaattcccgggtcgacccacgcgtccggctagggttttccatcaccgccgccgccgtttcatccaaacccaaatcaagccaccacccgctcctcctcctcagcggcgagcaccaccagcgacagcgagacacgatgaggccgatcttgatgaagggccacgagcgcccgctcacgttcctgcgctacaaccgcgacggggacctcctcttctcctgcgccaaggaccacacccccacggtctggtacgccgacaacggcgaccgcctcggcacctaccgcggccacaacggcgctgtctggacctgcgacgtctcccgcgactcggcgcgtctcatcaccggatccgccgaccagaccgncaagctctgggatgtcagcacggngaaggagctcttcagcttccgcttcgacgcgcccgccaagtccgtcgagttcgccattcgggacgcgctcgncgtcgtcaccaccgaccacttcattgacca

SEQ ID NO: 99650 - DNA, 512 bp, Zea mays
gatgacgtgtgagtccgccacagacagtattgtataacgcttcggaattcccggctcgacccacgcgtccgattacctgccctagccgtcgtcgccgctcgtgttcctgagaggtgccgggaccgacgggttgggcgagttctatgtagagaatcggctttacttgtctcagcccgttgtctgctgcgtctggcggtggtgaacgggagaaattcgtgagatctgatccggatcaggcgcgcgagctcgggaatcaggggtttcacacatagcttcgtcgatttgaatctgatgtactaatggactctaatggtggcaaaaagtctagcattagtcgctctatgatgtatgaagctccccttggctacagcattgaggacgttcgacctgccggacgcgtgtagaagttccagtctgctgcttactccaactgcgcgaagaagccatcctgatataccttttggcttcctcattctagtacgttaggacctcttgtctgacactacgattct

SEQ ID NO: 99651 - DNA, 515 bp, Zea mays
  unsure (1)..(515): unsure at all n locations
ggantgatgcgtcgttctactcgaagatacagtatagctctaccggttcggaattcccgggtcgacccacgcgtccgggaaagactatcgaagctgaagctggctatggtactgttacccgtcattaccgtgttcgccagaaaggaagtgaaaccagtacgaacagtattgcctcaatctttgcgtggacaagaggacttgcacacagggcaaagcttgatgacaatgctagactacttgacttcacccagaagcttgaggctgcctgcagttggagccgtcgagtctgggaagatgaccaaggaccttgcccttctcgttcacggatcttcaaatatcacgaggagccattacctgaacactgaggagttcattgacgctgttgctgacgagctcagatcaaggctggcggccaactcgaacctttgaaatccttgccgaagttgtggtgctttcctgcgcgacgctctcgaaccgtttttattatgtcggcattgtcttatcctgtgccacca

SEQ ID NO: 99652 - DNA, 519 bp, Zea mays
  unsure (1)..(519): unsure at all n locations
agttaggtagggtntgtacgtatccagacatatagtatngatctaccggtttggaattcccggctcgacccacgcgtccgcccacgcgtacgcccactcgtccgggctacgccgcgctgtacgtgggctaccggtcgtgcgccgacaaccacccgctccacgacaacaaccggtgggacacgtgggcgcggttcgtggagcgcagcgtggcgtaccagccgtgggtctggactgcagtcaaccacgagctggacttcgcgccggatctgtgcgagaccacgccgttcaagcccttcgcgcaccggtacccgacgccgtaccacgccggcgggagcacggagcccttgtggtactcggttaacgtcgcctacgcgcacgtggtcgtgctggactactactgcgcctacggcaagtacacgccgcactgggcgtggctgcaggcggagctggcgcgcgtggaccggaagaccacgccgaggctcgtcgtgctcacgcactcgccctggtacaacagcaaca

SEQ ID NO: 99653 - DNA, 525 bp, Zea mays
  unsure (1)..(525): unsure at all n locations
gagggtgagccatgccattatagtaggctccaccggttcggaattcccgggtcgacccacgcgtccgagacagtgaggagggtccgtgttcgtggatgtaatgtgaaatggagggctcttcgccttgagactggtaactactcatggggaagtgaagctgttacccgcaagacccgtatcctcgacgtggtctacaatgcatcaaacaatgagcttgtgaggacacaaacccttgtgaagagtgccattgtgcaagttgatgctgccccattcaagcagtggtacctcactcactatggagttgacattggtaggaagaagaaaacccctgctgcatagaaggataatgctganggacaagaggttgaggcagcagctgaggaaacgaataagagcaaccatgtcacgaggaagcttgagaagcgcaaggagggacgtacccttgacccacacattgaggagcaatttggcagtggacggttgctggcatgcatttcttccgccctggacagtgtggccgagctt

SEQ ID NO: 99654 - DNA, 517 bp, Zea mays
gttggagtgggtgagtctagctcaagaaatatctcataacgcttcggaattcccgggtggacccacgcgtccgagaatcgtctcgctcgtggctgccctgctcatactgcttgccctcgccgtatcgttcaggcgcggcgcacaggaggattccatgggcgacaacaccgggacgttggcgggcggcatcaaggacgtgccggtgaacgagaacgaccttcacctccaggagctcgcccgattcgccgtcgatgagcacaacaagaacgccaatgctcttctggggttcgagaagcttgtgaaggccaagacacaagtggttgctggcacgatgtactatctcactattgaagtgaaggatggcgaaatcaagaagctctacgaagctaaggtctgggagaagccatgggagaacttcaaggagctgcaggaattcaagcctgttgaagagggtgctagcgcctaaggatctctacttatacatgtgcgagcctgaagctcacagcacagttgcaaa

SEQ ID NO: 99655 - DNA, 519 bp, Zea mays
  unsure (1)..(519): unsure at all n locations
ngtnttgaatgtggttagtatgacgcgaaggggtatcagtactactcgtccggaattcccgggtcgacccacgcgttcggccatgcgccttggaccagcatccaacaagaataatactggtggaccacaaccatcgagtgctatttaccagaacacccaaggaactgattctgatagtgatccgaacaatactactgtatttgttggcggccttgacccgagtgtgactgatgagcttctgaagcaaaccttcagtccatatggagagcttctctatgtcaaaataccggtaggaaagcgctgcggatttgtccaatattctaacagggcatcagctgaggaggccataagggtgttaaatggaagccagctgggaggtcagagcataagactctcatggggccgtagccctgcaaacaagcagcctcagcaagagcagagccaatggagtggtggtggctattatgggtatcctcaaggatacgatccatatggctatgctcggccccctcaagatcc

SEQ ID NO: 99656 - DNA, 525 bp, Zea mays
  unsure (1)..(525): unsure at all n locations
aggtaagaatgcgtgttagttccgtaaggccgggagataagtagngctcgtaccggttcggaattcccgggtcgacccacgcgtccgcggacgcgtgggacgcctcggcgccgttgccggcgtgcgccttctccaagccgttcggggacacctcgttccaggcgtcgctgggcagcgacacgctgcgcctgggcaaggacgccatcgccggctacgcgttcgggtgcgtgggcgcggtggccgggccgacgaccaacctgccgaagcaggggctcctcggcctcggccggggccccatgtctctgctatcccagaccgggagcaggtacaacggcgtcttctcctactgcctgcccagctacaggtcctactacttctccggctccctccggctgggagccgccgggcagcccaggaacgtccggtacacgccgctgctgaccaacccgcaccgtccgtcgctctactacgtgaacgtgacggggctcagcgtgggtcggacctgggtgaaggtcccccgcgggt

SEQ ID NO: 99657 - DNA, 523 bp, Zea mays
  unsure (1)..(523): unsure at all n locations
aggttttaagtggttgggctgtacaccgaatgatacagctaagctcgtaccggttcggaattcccggctcgacccacgcgtccggtgcagggcgcgagcgcggagggcacgcccaagaggctgacctacgacgagagccagggcaaaacgtacatggaggtgaagggcacgggcacggcgaaccagtgcccgaccatcgacggcggcgtggagtcgttcccgttcaaggccggcaagtaccagatgaagaagctgtgcctggagccgacgtccttcaccgtcaaggcggagggcatcgccaagaacgccccgcccgagttccagaagaccaagctcatgacccgcctcacgtacacgctggacgagatcgagggcccgctcgaggtcggctccgacggcacgctcaagttcgaggagaaggacggcatcgactacgccgccgtcaccgtgcagctcccggggggcgagcgcgtgccgttcctcttcaccgtcaagcagctcgtcgtcaccggcaagcccgagn

SEQ ID NO: 99658 - DNA, 524 bp, Zea mays
  unsure (1)..(524): unsure at all n locations
agggttatgcgtcgttcggccgtacccgccaatacagtcatngcctgtaccggttcggaattcccggctcgacccacgcgtccgggagggttggttccacaggaagcacttttatgctctcccaaccccaaccgcgccgccgggtgctgaagaaaccttctacaacggtcctgttcactatccatccatagactctacgcctgtcgatgtaaccatgccggctaccactggaggcggtagtacaacagtcatcgcaacggcagcacctacagaacagttagaaaatgaagctgatgcaagtgacagcggcaaaactccctctggtacttgcgttatatgtctggatgcccctgtggaaggtgcctgcatcccgtgcggccacatggctggttgcatgtcctgtttgaaggacatagaatccaagaagtggggatgccctatctgccgtgccacgattaaccaggttgttcgcctctatgctgtttgaggagttgaaacggtgggttcagaaagttggcaatgga

SEQ ID NO: 99659 - DNA, 522 bp, Zea mays
  unsure (1)..(522): unsure at all n locations
ggttaaaagtgtntggaactgacaacggaaagtatcagtactgctcgtaccggttcggaattcccggctcgacccacgcgtccggttgtcatggccgagactgctgagacctactacaactcgagcttctcgatgcagagtggagaaagatgttgggaagggtgataaatcaggggataagggaactgctgagaagtttgcaatatatcagaagcatcgttcttcgttggcagacactgttcaattcaggaggccagctgctccaacttccagtgtgaatgctgatattgtgggaacatccactctgcagtctgcatctctaccgaaacaagaatcctcaacagctacatccaagagctatactttcagagaaggtgatagggtgcgttatgtgggtccagctcagttatcctcattgtcacaaaggctcctctccttttgctggcttcgctgttggaagcgagacatcatgtggtgtggataacgtccttgcagagcacgtgaactcaaatttcactctaa

SEQ ID NO: 99660 - DNA, 515 bp, Zea mays
cgtatgagtgggtgagtctagccagagagtactgctataccgttcggaattcccggctcgacccacgcgtccgctagttgatgttgttgagggaaaagtaatggatgtattcaaggaggatcaagctgtgggggttgtcaagttcaatccaagcaaccccgatctcttcctatctggtgggtccaagggttcccttaaactctgggatattcgatgtggtctggtaacaaaagaatttcagagaagccttggaaccatccttgacattgacttcagtgctgatggaagacaatttatctcttcaactgacacaaccagaagcaatattagtgagaacactataattgtttgggatgtcctgcgacaagttcctttatctaaccaggtttataccgaagcattcacatgcccgtgtgtaaggtaccacccacgtgaagcatcatttgttgcacagtccaatgggaactacattgctattttttcagcaaggccacccttcaagctgaacaagtaca

SEQ ID NO: 99661 - DNA, 515 bp, Zea mays
  unsure (1)..(515): unsure at all n locations
gtaagagctgcttgtacgacacgcagatacagtataactcgtaccggttcggaattcccggctcgacccacgcgtccgcccacgcgtccgtacgtgccttatccttcaggtatgtctcatgttgactttgcttttggaatggtactgttggcttcattgctggaatgctggttataatcaacctttactgctctatattggtctttttttggtttgcacaaccagggtggttggttttctgaatcaatcaatccatttcctcggacacaagataatttttgtatgttacacttcccaaaattgcaattaattcagaagtctgcctactttcattcagttagttctcagcaacactgaaaggatatgaatcagtcaacccgatagatgtttatctggttattccaaacaatctgacatcacatctgtttctgcaggcgagataaggaaaatctgaaatgctatcaccatttaaaacattggctcctggaagttcaggagtcgttcttaaacagcan

SEQ ID NO: 99662 - DNA, 515 bp, Zea mays
  unsure (1)..(515): unsure at all n locations
ggtgaagcgcgttgtacgaccgagagtcatgccanaccttaccggttcgaattcccggctcgacccacgcgtccgcccacgcgtccggacgccgtttcttgtctcagggtcgcgccgccgccgccgccgccaatgccagccccctccgcgacgtcgccgccgccgctgctggcggccggatcaccatgggcaacgacctgtggtacggcccggaccgcgtcaagtaccttggccccttctccgcccagacgccctcgtacctgaccggcgagttccccggcgactacggctgggacaccgtcgggctgtccgcggacccggaggcgttcgcgcggaacagggcgctggaggtgatccacgggcggtgggcgatgctgggtgcgctgggctgcatcaccccggaggtgctggagaagtgggtgcgcgtggacttcaaggagcccgtgtggttcaaggccggcgcgcagatcttctcggagggcgggctggactacctgggcaaccccaacctggtg

SEQ ID NO: 99663 - DNA, 524 bp, Zea mays
gtgggtgagccatgacatattgtatgctgctccggtctcggaattcccggtcgaccgacgcgtccgcccacgcgtccgctgctacggccgccgtcttttgcgtcgagttcccgctcattggcgttggcggggccacgctcatcgtgacgggccttgtcgcggccctgatgcgccggcggcggcgtccctggcaccaagcgccttttgtggaagggaaacccgcaccaaaagcaagctgcgcggtcagcgatggcgggacggacgtcatcatcgtcggcgccggggtagctggatctgcgctggcatacacgctcggaaaggatggccgttcggtgcatgtcatcgagagggatctgacagaacctgacagaattgtgggcgagctgttgcaacctcggggttacttgaaattaattgagctgggcctccaagattgtgtggaagaaattgatgcccaacgcgtgcttggttacgcattatttcaagatggaaggaacacaaagctgcttaacccctggagaagt

SEQ ID NO: 99664 - DNA, 534 bp, Zea mays
  unsure (1)..(534): unsure at all n locations
agctggtgcgcctcgctactatatgcatgctccaccggtccggaattcccgggtcgacccacgcgtccgacgagagagacgaatcttccgaatctctcggtggcgatggcgctctccgaccgctcccgggggtcgctcctcccgagcttcctgtacgcctcctcggcgcgctctttcgctgccacaggagccgccgcgcgcctccctgtctcctccccagcgcctgccacggctggagcaggaggcggcgtgccgttctcgatccaggcgcccaaggagaagatcgagatgtactcgccggccttctatgccgnctgcactgccggaggaatcgccagctgcgggctcacccacatggccgtcacgcctctcgacctcgtcaagtgcaatatgcagattgacccagcgaaatacaagagtatctcatctggatttggtatcctggtaaagggagcaggggccaggggtttcttcaggggatgggtgcctactttgctnggttacagtgctcanggggctngcaagtttggcttc

SEQ ID NO: 99665 - DNA, 516 bp, Zea mays
  unsure (1)..(516): unsure at all n locations
agttgctggccgttggctttacgcccntactgcagtatgtttcggaattcccggctcgacccacgcgtccgattacaagactgcttacagctacttctttgaatcatttgaagctttcagttcactgggggatgccaatgctatcttcaggttgaagtacatgcttctgtgcaagataatggtcaaccaagctgatgatgttgcaggaatcatctcatcgaaggctggcctcaagtatctgggtcctgatgttgatgctatgaaagctgtggccgatgcctactccaaaaggtctctgaagtacttcgaaactgctctccgtgattacaaagctcagctggaagaagatcctattgtccacaggcacctttcctcgctgtatgacactctcttggagcagaacctctgcaggctgattgagccctactcaagggtggagattgctcacatagcagagatgattgagctgccaatgaaccatgttgagaagaagctgtcccagatgatcctcgacaa

SEQ ID NO: 99666 - DNA, 518 bp, Zea mays
  unsure (1)..(518): unsure at all n locations
gtntgtggcgtgctgagtctagctcgagagtcactgctataccgtctcggaattcccggctcgacccacgcgtccgatgggtgccgtcgagggctaccgcattgccggctggccgctcggcgaggtcgtcgaccggctggaccctggcggcagcttcgaccccctcgggctggccgacgaccccgaggccttcgccgagctcaaggtgaaggagctcaagaacggccgactagccatgctttccatgttcggcttcttcgtccaggccatcgtcaccggcaagggcccgctcgagaacctcgctgaccacatcgctgacccagtcaacaacaacgcatgggcctacgccaccaacttcgtacccagcaactaagctcaacggctatgctatgcaacttcattgactttcggatcggagagggtgtacgtacgtggattgattgatgctgcgagatgcatgtgtgtcttatggttcacgttgcattgcataggcaagtcgagatgatgagttggcgttc

SEQ ID NO: 99667 - DNA, 527 bp, Zea mays
agttttaactgcgtggtgtggtacgtacccccgacatatcgtccattctgtccggaattcccgggtcgacccacgcgtccgggccaacgggatcgatccaccgaagctctcgacgcagcctgacaaacctacatcttcgtgctgttcgagcgaacgtgctaacatcgacgctcttctctccaagttatgctccgcagatcctgaggaacagagatcagctgctgcggagctccggctcctggcaaagcggaatgcaaacaatcgtatctgcattgccgaagctggtgccattcccttactattgagtctcctgtcgtcatctaatctgcagacccaggaacatgctgtgactgcacttctgaacctctctatacacgaagataacaagacgagcatcatatcatccggtgccgtcccgggcatagttcatgtcttgaagaatggaagcatggaggcacgggagaatgccgcagccacccttttcagcctgtctgtggtcgatgaatacaaggtaacaatcggaggaa

SEQ ID NO: 99668 - DNA, 523 bp, Zea mays
gtatgagcgcgtgtgagtccattctgacgtcactactatactcggttcggaattcccggctcgacccacgcgtccgcaaccgcgccatcgttaccgactcaccgtcgactcttgctcactcactcgcactctccggccagatcagagcgctcgcttccaatagcggcgtcttgtacgagaaagcctgcgcagtaagccatggcacactaatgacaccctgagaagatgcaagaggcctccaagcttagcgcctacgatccaaccaagattaacaaagctaataacgttgtcatacaatagccttttgatgaagtagacaagcttgcagagaagacacaatcactagacatgcactgaaccagctgaacataactatactggacaggacaagaatcatatgaagcaggtgcatcctgagcaaagtatagatgaccgtgaatataaggatgacactacaggagatcaactcgtacaggaacaatgaggacggcattgtgctttgaagacgacgtacctatcctag

SEQ ID NO: 99669 - DNA, 532 bp, Zea mays
  unsure (1)..(532): unsure at all n locations
gtgtggtgcgcattgctgatcgcattcttcncgttccgtaattctcccggctcgacccacgcgtccgcggaggagaagctgctggaaggaggcaattttagaggcagactggaggctaggagggcactgttccaaggcagccaggataggtcggccaagctggctggatacaaagcagggtcacgagttgttccatacgaaggtggtggtaatttggaagagatttcagaagttgaaggtagatcggaaaggtatgcagttcagaaagacgagagcttgtcagaaataaggacgcaactccttcagattgaaaatcagcaaagcagtttactggatcttctccagaaatttatggggaagtccgaaaacggtatgcgttctttggagacaagagtgcatgggctggaaatggctttggatgagatctctcgtgatttggccttctcttcangaaagatgtcaagcagagagcctgatgcaaagacgtgctgcatttcgagcccaaaattctggagaaagcacaatggtggta

SEQ ID NO: 99670 - DNA, 526 bp, Zea mays
  unsure (1)..(526): unsure at all n locations
gtattagagcgtgtntggacgcacacgacactcccnactacgctaccggttcggaattcccggctcgacccacgcgtccgggactccaccgtcaactgccgcgccaactgcagcctcttcgacgtcgaccacatgtgcggcctcagcctcaagggccgaggggccatccccttactcgagtccctcgtcgtcgccgacgtcgccgcgctcagggacggcaccggcaccctcaccgtcttcaccaacgagcagggcggcgccatcgacgactccgtcatcgccaaggtcaccgaccaccacatctacctcgtcgtcaacgccggatgcaaggacaaggacctcgcccacatcgaggcgcacatggaggccttcaacaagaagggcggggacgtcaagtggcacattcacgacgaccgatcgctgctcgcattgcagggtcctcttgctgcacctactctgcagatgctgacgaaagaagatatgagcaaaatgtacttcagtgacttcaagatgnatgacatcaatg

SEQ ID NO: 99671 - DNA, 517 bp, Zea mays
agtctgacgtgttgaatgttaccgcactcatctgcacgccgtaccggttcggaattcccggctcgacccacgcgtccgggcactttccctgcctgattggcgatttatagcggtgggggagggaaggccgatggtcagggaaagagagtaggtggacggacggtgctggcatcgccaattcaactccgcatctgcatcggcagcgcgccagctccataggaggagatggcgctcacaagaatcggtcttgctggccttgcggtcatggggcagaaccttgccctcaacattgcagagaaagggttccccatctctgtgtacaacaggacaacctccaaggtggacgagaccgtgcagcgtgccaaggcagaaggaaaccttcccgtctacggcttccatgaccccgcgtcctttgtgaagtccattcagaagccacgggtggtgatcatgctcgtcaaggccggcgcgccagttgaccagaccatcgcgacgctcgcagctcacttggagcagggcg

SEQ ID NO: 99672 - DNA, 526 bp, Zea mays
  unsure (1)..(526): unsure at all n locations
ggtgctaggttacgtatctacgtagtancgtcgcggtcttgaattcccgggtcgacccacgcgtccggcacaagcttagtcgagaatattgcttttgagtcgcggaagcagaggggataaaaatcttagtcatgtttggactttaactttgttttatgttggaaagtacttgaaagacttttcctgtggtaattctaggcgtaggttgctgtgctggttggggtttactggtgaaccagagtttttctatcccactatgaatttgttacctcaagttacctggaaaaaaaaaaaaaaaaaaaaaaaaaaaaaaaaaaaaaaaataaaaaaaaaaaaaaaaaaaaaaaaaaaaaaaagggcggccgttctaaaggatccaagcttacgtacgcgtgcatgcgacgtcatagctcttctatagggtcacctaaattcaattcactggccgtcgttttacaacgtcgtgactgggaaaaccctggcgttacccaacttaatcgccttgaagaacatccccttttggcaa

SEQ ID NO: 99673 - DNA, 523 bp, Zea mays
  unsure (1)..(523): unsure at all n locations
ttgggttcgttcatgcccgatgcagtancaacgtaccgttctggaattcccgggtcgacccacgcgtccgggcaacttcaccaccatcgcctcccagtgcctcatgaagctccccgcaagcaacaacgaggtcacctacaactgcgacggtcacactttcaattacctcgtggaagacggattcacatactgtgttgttgctgttgaatcggtggggcaacaaattcctattgctttcatggatagggttaaggaggatttcacaaaaaggtatggtggtgggaaagctgctactgctgcagctaacagcctcaatcgagagtttggatcaaaacttaaagaacacatgcagtattgtgtggatcaccctgaagaggttagcaagctggccaaagtgaaggcgcaagtttcagaagtcaagggtgttatgatggaaaacattgaaaaggttctggatcgtggagagaagattgagctgcttgtcgacaagaccgagaatttcggttacaaggacaagatttta

SEQ ID NO: 99674 - DNA, 541 bp, Zea mays
  unsure (1)..(541): unsure at all n locations
cgactatgcgtngntgatgcctagcttagantagtagtgcaccctctcgaatcccgggtcgacccacgcgtccgcccacgcgtccgctcgcggtgttattcctctcgagtcgcctccccctcaagttccacaaacgcaagcgccaatctcgccgtcaccacctcaatccagcaaacgcaaaccccatctcgccgccgccgcgatgtctcgccgctatgacagccgcacgacgatcttctcgccggaggggcgtctctaccaggtggagtacgcgatggaggcgatcggcaacgccgggtcagccctcgggatcctagcggccgacggcgtggtcctcgtcggcgagaagaaagtgacctncaagctcctncagacctcgcgctccgccgagaagatgtacaggatcgactcccacctggcgtgcgccgtggccgggatcatgtccgacgccaacatcctcatcaacacggnccgcttcaaggcccaacggtacgcgcttttctaacagggacccaatcccggggagcaactcggtcaagcc

SEQ ID NO: 99675 - DNA, 542 bp, Zea mays
  unsure (1)..(542): unsure at all n locations
ggggnaaggtgctgatccccccagcncttcgcnacgnagnnncgnnntggaatnnccgggncgacccacgcgtccgcccacgcgtncgccgacgcccagaattcacgtgaacgcacacgcacccacacgacacatacaggagaggcttanggtttccccgtgcccggccgccacagtgccaacccagctctccggtgcgcccgcgacccctgctcccgtcgacagggtggcagcgccgtgcggagtcgactcgccgtccgctggcgccgtgtgcagggccgcgggcaaggggaaggaagtgctcacccgggtcctgttccaaccctttgaggagatcaagggggagctcggcctcgtgccccaatccccagacaaatcgctcgcgcgccacaagatctgcgataactggaagccgccctcaacgagcagaacaacggggagtacaacgcctcgtatgcataccactccctcttcgcctatttcgaccgcgacaacgtcgctcttaaaggatttgcctagtcttcaagaatccagcgacgagg

SEQ ID NO: 99676 - DNA, 526 bp, Zea mays
ttgggttagcatcgacattatggagtactctcgcggtctggaattcccgggtcgacccacgcgtccgggccctgcagctcgcggagggccacgcgtgctctgaccgagcagtgcccgtccgtggaggccgagggcgcgcactgcgagggcctggcgttcgacgtgcacctgcgggtgcggaacgcgggcgagaggtccggcgggcacacggtgttcctgttctcgtcgccgccggcggtgcacaacgcgccggcgaagcacctgctgggcttcgagaaggtgtctctggagcccgggcaggcgggcgtggtggcgttcaaggtggacgtgtgcaaggacctcagcgtcgtggacgagctgggcaacaggaaggtggcgctcggcagccacacgctgcacgtcggggacctcaagcacacgctcaacttgggagtctgatggccgaaaggggaatggctaccaagtaccaacgtgaaagcagttggaatttggagggctggattggtcggaggcaatccggagagac

SEQ ID NO: 99677 - DNA, 526 bp, Zea mays
  unsure (1)..(526): unsure at all n locations
acgggtctgnaacggatctattgatgtaccgcctgtccgttctggaattcccgggtcgacccacgcgtccgcggacgcgtgggcggactcgtgggcggtctcgtgggggcgacgccgagcaccggagggtggtcaacgccggcgcccacccgcggacgcccttctacggggagttcctgcgcgcggccaaggccgtgtggatgctgcacctgctagccttcgcgctggagccgccgcccagccacttcgatgccggacgcggtgcggagttccaccaggagtacatggagagcgtgaccggcgcgccaccgcacggcggcgcgggcctggtcgtcgggttcgccgtcgcgcccgggttccggctggggaacggcgccgtcgtgcgcgcccgggtctacctggtgccgcgtggtggccgaccgtgacagacccatgcatggcgtgacagaccgcgtggtagcgttgcatagcgccgtgggccacggatcacctccgagagttgttggtgggtgcccatgcgcaccct

SEQ ID NO: 99678 - DNA, 534 bp, Zea mays
  unsure (1)..(534): unsure at all n locations
gggggnaagagggtgatttttttcagtcntnttatggtgaacncgcccggaanncccgggncgacccacgcgtccggggacactccatgggaggggctttagcttcgttttgtgcccttgatctatctgttaaatttggatcgcaggaggttgaactcatgacctttggacagcctcggataggcaatcctgcatttgctgtatactttggtgaacaagtcccaagaacaatccgtgtgacccatcagaatgatattgtgccgcatttaccaccgtattattattacctaggtgaatggacataccaccactttgctagagaggtatggcttcatgagagcatagatggaaatgtagttaccagaaacgagacggtatgtgatgattctggtgaagacccgacctgtagcaggtcggtctatgggatgagcgtagcagatcatcttgagtactatggtgtcacactacatgcttgatcaggggaacctgtcaatcgtgattgtgcagccaaccaatgtacactatgttcggaat

SEQ ID NO: 99679 - DNA, 536 bp, Zea mays
  unsure (1)..(536): unsure at all n locations
nccggttggttctcccccacctccttcggtagcactcnnnnngaannnnngggncgacccacgcgtccgcggacgcgtgggctccagcctccagcgtgatctgagtcctgaccaagccctaaacgccaccggccgtggcaaatctcctttccctgcgatccatggccgccgccgtcgccgaccccgcgccatcccgcaagacggagacctacaccgacaccaagcgccgcgacgacgtgcgcggcgccaacatcgccgctgcgcgcgccgtcgacgacgccgtgcgcacctcggtgggcccccgtggcatggataagatgatcgcttcgggcgaccaggctcaggaggtcatcatcaccaatgacggtgccaccatcctctcccgcatggcgctcctncaggccgccgcgcgcatgctcgncgagctatnccggctccaggaacccgccgctggggacggcaacacgacccgcgacggnctagcttgaatccttctacggcgggcccaaggcgttcttttcagccgggcttaaccc

SEQ ID NO: 99680 - DNA, 635 bp, Zea mays
  unsure (1)..(635): unsure at all n locations
aganaaannaagacggnccccatgctcccgactttcgctacntcccannnnnnnnnnnnnnnnnngnggaggngaacgnnnggcctnctacgaaataaccttaatttttagncatcaccgaccggnatacaaaaacggctcgctttttaagttttnttaccttctcctcccaaaactccatgctcgacgctatcgagaacatgaacagcaaggaactcgactgcctaaacatcaccgttaaccaggcccagtcccgtggcggtggcaatagctaaattagctaccgcggcggtcacagatgctgcagctattgtggcgggcgccgttacttttagaaatggctgcttgtaaccagctaacaacggtcagaaaccgaaggtttttagctgctcaaataacggaaggccgttggccttactaacccagtgtatcggcaaccaaaaagtatgtttggtttgtcaaacataaacaaactgtactaataattttatacatggtttgtcgatgtggacctctaaattattacatgagccccccatatcctgtttgcttataaagacccccaagtttaataaacttaaaatatatatccttatttaatggaatatcagtgggttacaccccctttacacctg

SEQ ID NO: 99681 - DNA, 528 bp, Zea mays
  unsure (1)..(528): unsure at all n locations
agagggtttttttctcccgactccttccgtacactcnnnnnatnnnngggncgagccaggcggncggtcctagtacaattttgttggccgcatcctttgtccaagaggaaattccttgaagcggatggaggcgaatacagattgccgcgtgctaataaaaagtcgtggcancataaaagatccagcacgggaggaaatgatgcgagggaagccaggatatgagcatctgaatgaacctctccatatattggttgaggcagagctacctgttgacatcattgatgctcggctgatgcaagcccgcgagatccttcaagatctgctaaagcctgtggatgaatcccaggacttcttcaagaagcagcagctccgggagctcgcgatgcttaatggcaccctgcgtgaggaaaggatgcagaggttcggttcagcgtccccttttcacaacagcctttgaatgaagagagccaagacagggggtgatgaagaaagtcgcagcatcatgaaaggagactttaatcataattt

SEQ ID NO: 99682 - DNA, 535 bp, Zea mays
  unsure (1)..(535): unsure at all n locations
agcgtgtgnccccccagctcncgcacgactnnccggnnnggaattcccgggtcgacccacgcgtccgcccacgcgtccgcccacgcgtccgcccacgctttcgcccacgcgtncgctcgggaacgtagagcttgctgatcccactatcaagaaagtggaggaaagtgctaccgacttcttggttgataaggtctcgcgatttcctggagaggtctctgtgctcgccttgggtcctctgacaaacatagcattggccatcaagaaggatccctcattcgtgaaaaacgttaagaagatcgttgtgctgggtggagcgttctttgcgggctggaatgccactcccttccgctgaagcaaatatccacagtgatcccgaagcagccgacatggttttcacttctggggcggacatctacggtcgtggccctaacatcacaacgcangtcaacttcacagataaggatcctctggagctaaaaaacctccaagggaaagacgcacagttcctatgtgatgatgcaagtctacttggatg

SEQ ID NO: 99683 - DNA, 513 bp, Zea mays
  unsure (1)..(513): unsure at all n locations
cggtgctgtggtcatncccgttcgactaacgtcccggtctggaattcccgggccgacccacgcgtccgcccacgcgtccgcccacgcgtccgacggcgaccatcacgttccggggcacggtgatgggcgcgtccccggcgccgtccgtggccttcttctcgtcgcgcgggccgaacaaggcgagcccgggcattctgaagccggacatcaccgggcccggaatgaacatcctggcggcgtgggcgcccagcgagatgcacccggagttcgcggacgacgtgagcctgcccttcttcatggagtccgggacgtccatgtcgacgccggacctgagcggcatcgcggtcatcatcaagagcctgcacccgagctggtcccccagggcgatcaagtcggcgatcatgacgtcttcggcacgggtggaccacccggcgtgcggatcaagactagcaattcaagcggcgagcttctcagcatgggcgcccggtacgtgtacccggtcgcgccgtcgac

SEQ ID NO: 99684 - DNA, 522 bp, Zea mays
  unsure (1)..(522): unsure at all n locations
ccgctcgctgtgttcaggtcccatcgcagtancgccncggtctggaattcccgggtcgacccacgcgtccgacaacctgaacaactggcgagaagagtttttaattcaggctagcccatcagatcctgatgagtgcccttttgttctgttgggtaacaaagttgatgtagatggtggcaacagccgcgtggtatctgagaaaaaggcaaaggcatggtgtgcttccaaagggaacatcccgtactttgagacgtctgctaaggacggaacgaacgtggaagacgccttccagtgtatcgtgaagaacgctctgaagaatgagccagaggaagaactgtatgtgccagataccgtggacgtggtgggtggcaaccgggcccagagatcatctggttgctgttaaggcacgaggcatcacgaggcgttgtgatcatcatcgtcgggtatgcagtgaccaaacaataccttagcattgctgggtcttcgtggttatctacgtatccgtatcccaattggtacctt

SEQ ID NO: 99685 - DNA, 525 bp, Zea mays
  unsure (1)..(525): unsure at all n locations
tgggntcgctggttccggtncattanagcagcgtcgctaccggtctcggaattcccgggtcgacccacgcgtccggccacgcgtacggccatgtggaggagggctttagcgatggtcctgttcatggctggggcggcgctgctcgccggggctgccggcgccggcgcgcagcagggcgtgtggagcatcatcacccggcccatgttccagagcatgctgagccaccgcggcgacagcgggtgccagggcgccttctacacctacgacgccttcatcgaggccgccagctagttccccggcttcggcaccaccggcgacgagcagacgcgcaggcgggagctcgccgacttcttcggccagacgtcccacgaaaccaccggtggatgggcgactgctccggatggaccgttcgcctggggatactgccgggtgaaggaacagaaacagacggacccaccctactatggacgaggacccatacagctaactcataagtacaactacaggcttgccgggcaagcgctg

SEQ ID NO: 99686 - DNA, 529 bp, Zea mays
  unsure (1)..(529): unsure at all n locations
actgtgctgtgttcagggggcctangcagancgccgcgccgtnctggaattcccgggtcgacccacgcgtccgcccaatctcccctacaccagaaaaattcctagttctttggtccgcgtcagagaggcggcggcgatgtctgggcgcggcaagggcggcaagggtctgggcaagggcggcgcgaagcgccaccggaaggtgctccgcgacaacatccagggcatcaccaagccggcgatccggaggctggctaggaggggtggcgtgaagcgcatctcggggctcatctacgaggagacccgcggcgtgctcaagatctttctcgagaacgtcatccgcgacgccgtcacctacaccgagcacgcgcgccgcaagaccgtgaccgccatggacgtcgtctacgcgctcaagcgccaaggacgcaccctctacggcttcggaggctaggctaggcgcctcttcatagtcggggactggttaggggacatgtctctgtgtgatgctttctgtggtattattgctgcaata

SEQ ID NO: 99687 - DNA, 618 bp, Zea mays
  unsure (1)..(618): unsure at all n locations
nnnnccctgtgtttttncccccccgcccttcngnangccacttncnnnncnnannnnnngggnncgacccacgcgtgccgcagaaaacccatggaagggtcactttgtgcctcgcttcatgatagtctggttgcgaaagggtatacccctccagcgtgttggcgcggactctnntttcggcccctgaagcggagtttcttggcaagcccctgtggcttttgggggtccctcgagcccccggatggagaaaagtacccgtcaagggtcaaaggtccccgaggctnaagcggagccgacccgnngctgcaggaggggtggtcccggaccctgctcaagaaacccatcctgctcgtgatgaaagagcaaagggcatcccttgcgaaagaggaaagcacgatcgggnggcgacaagcctgtgggaagctgacgtgggcttcacgcgaaacaacatctcgaccagtctgcttgcctgatgtttttccaaagccaggagtacgaagcacagagcaacaccggtagcccaaagaggcccaatcctggtgaagcgtaacggtcaatgttttaacctgtgtgccaccggggtgtattgtttaattggtttactaaggttactactgc

SEQ ID NO: 99688 - DNA, 537 bp, Zea mays
  unsure (1)..(537): unsure at all n locations
nggggnatggtgttanttctttatccnnttgcacgcctcnncggnnnggaannncngggncgagcgacgcgtncgatcgctgactctggagggtgtggtatatgttgttgatagtggattttccaagcagaaatggggtggtccgatttcggacatagagagtttagttgtcgcaccaatatccaaggcatctgcaagacaacgagcaggcagagctggaagggtgcgacctgngaagtgctttaggatctatacagaggaatattatcttaatgaaatgcagtcagaaggaattccagaaatgcaaaggtccaacctggtctcctgcataatacagttaaaagccctaggcatagacaacatcctgngctttgattggccagcttctccatctccagaggcaatgattcgggctcttgaagttctattcttcctaggtatnctcgatgaagatgccanattaacaataccccattgctaccaaagtgctgagatccctctggacccatgatttcaaaatgatcttgcagcaatgag

SEQ ID NO: 99689 - DNA, 522 bp, Zea mays
  unsure (1)..(522): unsure at all n locations
ttggttnngtctggtcagtttaccttacgancgtcgtaccggtctggaattcccgggtcgacccacgcgtccggcaagacatctatttggtgctgtagagatgcgatgggttgacacttacttcccatttgccggcccatcctttgagctcgaaatatactttcaggatgattggttggaggttttggggtgtggagtcaccgagcaggaaattttgaaaagaaatggcaggagggaccatgtggcttgggcctttggattgggcttggagcgccttgcaatggtcctttttgacattccagatattcgactcttctggtcgaatgataaacggttcacgtcccagttctcagaaggcaagcttggtgtcaagttcaagccattttcaaagtttcctccttgttacaaggatatgagtttctggatcaatgatgcatttacagagaacaacttatgtgaggttgtcagaggaattgctggtgatcttgttgaggaggtaaaacttaatgataatttcacgag

SEQ ID NO: 99690 - DNA, 530 bp, Zea mays
  unsure (1)..(530): unsure at all n locations
gtgggntnntgcttcagcctcctttagtancgccgtaccggtctcggaattcccgggtcgacccacgcgtccgggtcaagcaaaatgtacattggaaagctgtcgacgaatctactcggcacaaagattgcaagatatgatacccaggccccatgcaatgcagcagaacccgggaaaacaagccgtcggttctactcccggaaggtgtcgacaaaggtctcctacatcacctacaacataacgcaggtttcatatgagctgaatgtcttgagtactcggggccctaggcggatgaactgtgatatgcactacattcctacctcgtgccttgacgctggaggcactgttcccagccagctggacagcatgcttgctcgctctactgatgagtcatttggcagcatttccttgttcaagtcatctggagcggaccggcctatgcgtttcaccagctcaagattcttcgacatctcaatgagcagcatccgcatgattggagacacggcatcgggagacaatgatgagtgcan

SEQ ID NO: 99691 - DNA, 532 bp, Zea mays
  unsure (1)..(532): unsure at all n locations
cggnnnnnnncccgttgacaccagctagtancgtcggtaccggttcggaattcccgggtcgacccacgcgtccgcccacgcgtccgcccacgcgtccgcccactcgtccggccacgcgttctgcggattctgcgggagatcaagcttatgagactcctaagacatccagatatcgttgagagcacacatattatggtgcctacatcaagacgggaattcaaagatatttatgttgttgatgaacttatggagcctgatcttgaccacgttatcatggctaatgatgacctgacactggaacattatcagttctctctgtaccaactgatccgtgctgtgaaatacatgcacacagctaacgtatatcaccgggacctgaagccaaagaatatattagcaaattctaactgcaaactgaaaatttgcgattttggactagcacgagttgcattcaatgataccgccacaaccattttctcgacagattatgttgcaacangatggtacagagctgcagagctctgtggatcct

SEQ ID NO: 99692 - DNA, 526 bp, Zea mays
  unsure (1)..(526): unsure at all n locations
ccggtgctctgntttagtcccgatgangtancgtcgcgctcttgtattaccgggtcgaccgacgcgtccgcgcacgcgtgcgttcgaggagggcacccgttatcgtccctatggccactgcctcgtcgcggggggcgtcaagtacccaaagaaggtgatccgcaaggactccgccaagaagactgcgaagaagtcgcgcgtcaagtgcttcatcaagctcgtcaacttcactcacctcatgcccacccgctacaccctcgacgtcgatttcaaggatgtcgccaccggtgggcccgacgcactctctacccacgacaagaaggtcgccgcctgcaagacggccaaagcgcgccttgaggagaggttcaagaccggcaagaacaggtggttctttaccaagctccgcttctagatgctcggccttccgaatagtcctgctttagctgtcgatttgtttgatcgggcacactccatctctgttttcgtttaccatgaatatttcggggttaatcctggggcttttaaa

SEQ ID NO: 99693 - DNA, 530 bp, Zea mays
  unsure (1)..(530): unsure at all n locations
atggcnctgtggctgaagacaatcatagcancgtcggtaccggttcggaattcccgggtcgacccacgcgtccgcccacgcgtccggaagaatctttactgggttgacagtggtgatttagtaacaattgcaagggatacgtcattctacattttgaaatataatagggatgtagtttcatctcatttagacggagggggttcagctgctgaggaaggtgtggaagatgcctttgaactgcttcatgagatcaatgaacgtgtccggactgggctatgggttggtgattgttttatctacaacaattcttcgtggcggcttaattactgcgtangaagagaggttacaaccttatttcacttggatcggccaatgtatttactaagatatcttgcaaaccaaagccgtgtctatcttattgataagcaatttaatgttgtggggtatactttactccttagtttgatcgagtataaaacacttgtaatgcgtggggattttgatcgtgcaaatgatgttttatcatctat

SEQ ID NO: 99694 - DNA, 532 bp, Zea mays
  unsure (1)..(532): unsure at all n locations
atgcctttaacttttaagtcatangtacnancgnnnnnaannnnggnncgacccagcgtccgcccacgcgtgcgcnnacacgtttatgcaggtttattccgtcagtgttgagactgttctcatgggaagatatattcaagtcatggaccatgactccttgacagntgtcaaacttaagatgacactgtgagctgatgacaatagtgataccagccactacaacgttgaaactaccataaaacctcaatgcctgcatcaagtttaatctgtggcattctttcaaactccacatcttactgcatgaaagcatccaaagctggtgtgtctatgccgctatatgccacaatcatgtgagacggaaagaacaagacaaagcaaggaacagattgaaacaaatggcaattagactgcataaacctatgggtgcccgtgacaacttttacgggctttctactgcaaaacattgtggatagtgaaaagtaaactggtatggtcataagcccctttcaacgctcactatcataagctgtgg

SEQ ID NO: 99695 - DNA, 525 bp, Zea mays
  unsure (1)..(525): unsure at all n locations
gggtgctgtgttcatnngtcaagtactgactgcccggtccggaattcccgggtcgacccacgcgtccgaagttttgagggtagagcagttgggtgattacgacgaagagagatgggcctcctcgacaagctgtgggacgacaccgtcgcaggcccgcgcccggacaccgggctcggccgcctccgcaagcagcctgtgcgtcccgccgccgtcaagatcagtgatccggccggggacgctgcggcgttcgtgccgccctcgccggcttcgggtagcgaggagacgccggtgaaggtgacgcgcagcatcatgatcaagcgccccgcggggtacccgtcgtcgccgaggagcgcggcaagcacgccgtcggcctcgccactggggactacngccgccatctcgccgtttgccggcgccggtggtcgcttcagaaggaaatcatcgtccgacgcatacgagagggcgaccccaccagggacgaccagccacccttcttccttcgacgtgtgaactgaccggaccctt

SEQ ID NO: 99696 - DNA, 531 bp, Zea mays
  unsure (1)..(531): unsure at all n locations
ctggntnggtngattaagacaatcatcgatcgcctgtccggttcggaattcccgggtcgacccacgcgtccgcggacgcgtgggtaaaacgttaaaagtgcttgcccaagtttcagaagttaaaaatatgaggttaaacaacatagaaaagactttggaccgcggagaaaagttgagtgaactccaagacaagacttctgatctacatagtcaggcccaggagttcaagaaacagggggtgaagattcgtcggaagacatggctgcagaacgtgaaaattaagctggtgattcttggaatccttttgctccttgtgatcatagtctgggtatctggttgtcaaggctttgactgcaccaagcatgaaacatagtagtaataagaatggtgcaacacgactgtggcagagctgcgatggatgtgagtttgtgctggtgaagtcaagtgtgtacccacatatgctttggctctcaagttcgattccaccagacaagtatcacggtacaaatgtaagtccgagctggtctttgg

SEQ ID NO: 99697 - DNA, 526 bp, Zea mays
  unsure (1)..(526): unsure at all n locations
gggntgctgattcatttacataagtancgacgtaccggtctcggaattcccgggtcgacccacgcgtccggaaacaataacttaggtcatctgcgaccactctgagcctgggagtcaagactggcctgccagacatctggcacagcaaggctagcaaccccttcgttaacttgaagaaggaatacaagggcatcttctggcaggaggacatcatccccttcttccagaacgtgaccatccccaaggactgcgacaccgtccaaaagtgctacatctacctctctggacaagtgaaggagaagctgggcacgattgacccctactttgtcaagctcggtgacgccatggtcacctggatcgaggcctgggatgagctgaacccgtcgacccctgccgccgcaaatggcaaggccaagtagatgtgccatcacttcggcactggagtgaaaaagaaagtatgattgggtcctgcctaggccccatagatatagctcttttttgagaaggaagagagattaattcagca

SEQ ID NO: 99698 - DNA, 549 bp, Zea mays
  unsure (1)..(549): unsure at all n locations
nggggnaatggnttgtctctnccgcacctccgttcgctancnncncnctttaattaccgggccgacccacgcgttcgtccacgcnnncnnncacgcgtncgnccacgcgtccgtccacgcgtccgcttttgttgagtttgttcgtgctgagggtgccatcatggctctgaattgcagcgggatgattttgggaactctgcctgtcagggtgagtccttctaagactccggtgaagccacgtgtaaatcgaatgggatctaactgactctgcctaagctcaaccggaaggcatggccataagctgaaggcttccgtggtcctgtgcatcatgatgcatttgcttacattcttacaaacactctgtttgtacccttttgcaaacctgttgngagggaacttggtaggtcaggcccttttgccttgcattttaaacatgatggaaccattgagaatgactattccgcaattaaccatcaaaagtacttctgtcaaaaaaaaaaaaaaaaaggccggccgtttataaggacccaacttacctacccctgcttn

SEQ ID NO: 99699 - DNA, 531 bp, Zea mays
  unsure (1)..(531): unsure at all n locations
ngggtnctcatgnncttacnngacaatagtatcgcccgtaccggtccggaattcccgggtcgacccacgcgtccgcccacgcgtccggcaaaagcaacaaggcagcagcacaagcaagaaccacacctcctcggtgcgcctgtgatcatgtcgtcttgctgcggcggcaagtgcgggtgcggctccagctgctcctgcggcagcggatgcaacggctgcggtatgtaccctgacgtggagaccgccgccaccagcagcgtcaagaccacggtcctcgccgcgccgaccaccaaggccagcgccggcggcttcgaggcggccaccgagggcggcggctgcgactgcaacacctgcaagtgcggcaccagctgcggctgctcctgctgcagctgcaactgagccggcccggctcggcgatggcgcacgagagtcgagaggacgacgacgaggaggcgtataataaatataatagcggcgtccagtaaataagatcctgtcaactgcacccgccattatccatggtcgctcgct

SEQ ID NO: 99700 - DNA, 537 bp, Zea mays
  unsure (1)..(537): unsure at all n locations
gcggggtagttgnttcaggtngatcgatgtgatcgtcncggcctggatgtaattcccgggccgacccacgcgtccggggaatattcttggtttttcagctggagctagtggcgaatggcacaagtggtttccattgctaacgacaagagcatgctgtgaagcttgcggtaattcgaaagtagctttcttagttgcatgagtatttctttcgttatgtatgtctgttaccctgtacttcgctgaagagagcccactagatccaaaagatacacactgactatcagattctgctactctagtgaacggttctagaaatgctgcccatgcatcaaatgatccaaatgatgcaagattttctaatggcccatgtggtttaaacaatggtgcggctaacaacaacactgacgaatttaccaatgtgaatttcaactcagagaatggacgagtcttcaatgattggccaagatcatatttgggtaacattttgaccataatgaggcatctacctgccgggatgcatttagtgcttttagtttn

SEQ ID NO: 99701 - DNA, 525 bp, Zea mays
  unsure (1)..(525): unsure at all n locations
agtcgttgtgccagttggccctnagtancgtcgtaccttctcgaattcccgggtcgacccacgcgtccgcggacgcgtgggcggacgcgtgggcggactcgtgggctccgccgccgacaacagcgtggggtagtgtagttccggagagggttggcgagagtagtagtgatccgcaatgtcgacggaggaggctgttgtggctgaggtcccggtgaccgaggtgccagcggaggtcccggcggcccaggtggccgaggcgcccaaggcgaagaaggcgcccaaggagaagaaggcgcctaaggagaagaagctttccgcggcgaagaagccggcggcgcaccctccctacgctgagatgattgtagaggcgatcgctgccctcaaggagaggaaggggtcgagctcggtggccatcagcaagtacgtcgaggggaagcatggcggcaagcttcccaccaacttccgcaagcagctcactgtgcagctgaagaagctcgctgtcgncggcaagctgacgagggtgaa

SEQ ID NO: 99702 - DNA, 536 bp, Zea mays
  unsure (1)..(536): unsure at all n locations
nnnaactcggnngcccccnagttcggnangnacnancgnnnggaatnccgggncgagccacgcgtccgatcctgagccagagatcaaacaaaccagatgttagctaagcatggcggcaggcttgcaggtgtggggggagccggcgtctactgatgtctgcagggttctgacatgcctgtttgagaagaaactggagttcgatcttgtccgcatcgatacgttcaagacgcatcacaagcttcccgagttcatcaggcttcgggatcctaatgggcaagtgaccttgaagcacggcgacaaaactctcgttgattcgagggacatctgccggtacgtctgcacccagtttccaaacgatggaaacaagagcctttacggatccggcgctctagaacgggcgtcgatagaacagtggcttcaggcggaggctcagaacttcgggccccccagctccgcgctcgtctttcagctggcgttcgtncctcacctcacccacctgggcgttcgtcaggaccctgccgtgatcgccgagaaca

SEQ ID NO: 99703 - DNA, 542 bp, Zea mays
  unsure (1)..(542): unsure at all n locations
aagcgttttnncccnccccacgttcncnccagcctcaannngaatnnngggncgacccacgcgtccgcccacgcgtccgcggactcgtgggcggacttttgtttgaacagattatcccacaactgatgggacgggcataatagattatattgatgtcacanatttagttgatgctcatgtgaaagcactcaacaaggcagagcctagaaaagtcagcatttacaatgttggaacaggaagaggtcgctcggttaatgagttcgtcgatgcctgcaagaaggcaactggggttaacatcaaaattgagtacctcagcagaaagccaggagattatgcagaagtatatagcgacccaacaaaaatcaacaaggagctcaactggacagctcgatatactgatctttaagagagtctgtcagtcccattgggggggcaaaaagtcgcatcccagtggctacgggccaaatcgaatataanctgctgaattataattcactgaatcaatacataataattttttaagtagcgataaaaaaatcttt

SEQ ID NO: 99704 - DNA, 541 bp, Zea mays
  unsure (1)..(541): unsure at all n locations
agggggntnnnaacagggccccagtcccncgcacgctccaccggaanggaagggncgacccgagcgagcggntgctcagaactgctgggtgaagaagggttgtgcattcactggtgaaattagtgctgaaatgctggtcaaccttggcgttccctgggtcattcttggacactctgaaaggagagctctgctgggagaatcaaatgagtttgttggagacaaggttgcttttgctctgtctcagggactaaaggtcattgcatgtgttggtgagacccttgaggagagggaggctggttcaaccatggatgttgttgctgcacaaacaaaagcaattgctgagaagatcaaggactggagcaacgttgttcttgcctatgaaccagtctgggctattggaactggcaaagtcgccaccccagctcaggctcaggaagtgcacgcctncctgagggattgggtaaaagacaatgtcagccctgaggtctctgaatctacaaagatcatctatggaggtcagntacttgctgcgacttgcaaa

SEQ ID NO: 99705 - DNA, 525 bp, Zea mays
  unsure (1)..(525): unsure at all n locations
cgggttgtgttcccaatcttcgcatcgactatcggtctggaattcccgggtcgacccacgcgtccggtcggcgcgtgagcagcggtgggcgccgttcgggacgcactttcaccagttcgtggtgccggccaggatcggcttccggcgggactgcacctacggcaagctggccgccatgaggctgcccaaggacgtgcagggcctcagctcctgcgagtacacgatggagcgcggggtggtgcacgcgtgccacgccggcggcgtggtgcacttcctggaaggctggggccaccacgaggtgggcgccatcgacgtcgaccggatcgacgtcgtctggaaggcggcgctcaagcacgggctggcgccggtgtgatcatatcgcatcgtcgagccgcaccgcgcgcgcggtttgttttgcagcggctacctacctagctgcatatgcttgccaggccggtgtccagccgtcgcggttctgtgtgcatgcatgcaacagcccagcagaccacgggctaccgtgcgtgn

SEQ ID NO: 99706 - DNA, 534 bp, Zea mays
  unsure (1)..(534): unsure at all n locations
catgggntnnnttaggtgtcncatcctgccgtaggctgccccggnccggaanncccgggtcgacccacgcgtccgcccacgcgtccgggcaagccttctcggcacaagatccagggcgtcgggccgggattcgtgcggaagaacctggacacctctgtcaccgacgagatcgttacggtgaccgcagaagatgcgatggcgaacgccaggaggttggccagggaagagggtctgctagtgggcatatcgtctggggcgaatctggcagcttgcctcaaggtggcgtcgagacaggagaaccgagggaagatgatcgtcaccgtgtttcctagcggtggcgagaggtacatgagctccgatctcttcgcggatgcaagggaggagtgcgtcgccatgaccttctgatcttctggacgctctgtgcggatctgcagcggcaaactgctatttctcagcgtggaatggatttttagtatcgtcgatccaatccagcagcttgcggaggcaagagatttggaatncttctgcagaaaa

SEQ ID NO: 99707 - DNA, 535 bp, Zea mays
  unsure (1)..(535): unsure at all n locations
ntgcgttggnaaagccccagtccgcacgnatgnctccaccggnccggaanncccgggtcgacccacgcgtccgcggacgcgtgggctgcattctcaagctgggatgcttttaaatctcactacattttgcggatgggttgggcgctcgctatatcacgcactcgtcgttttcttcattacgatatgcgcctactcagatgagaaaagtgagatgcacgaactgtcaatggtagcactgtccggttgcatttggttacaggcttttgttgtgacaatggatacaaactcattcacttgcccgcanatccttctcatctggggaaactttgtggccttctacatgatcaacttaatactcagtaccgtcccaagtctccaactgtacacaatcacgttccgcctgtgtagccaaccttcctactgnatctccatggctctgacggttgcaatangaatgggaccggtggtggctttcaggtacttgaagaacctgtatcagcctagcgccgttaacatactccagcaggtcgagcaa

SEQ ID NO: 99708 - DNA, 528 bp, Zea mays
  unsure (1)..(528): unsure at all n locations
acaganctgtttcatcgcaaaaagtatgtatcaactgtcctgaattcccgggtcgacccacgcgtccgggacagtctgaagaagacatgctgcagtgcttcattgattccaagtacaagaatgggcgtggcacgagtgatggcgaggtaaccgggctacttatcgcagcactcttcgctgggcagcacaccagctctatcacctcaacctggactggagcatacatgcttcggttcaagcagtacttcgcagaggctgtagaggagcagaaagatgtcatgaaacggcacggcgacaagattgatcatgacatcctcgcggagatggacgtcctctaccggtgcatcaaggaagccctacgtctacacccgtcgctaatcatgttgcttcgtcaatcacacagcgacttcaccgtgacaacaaaggaaagcaaagtgtatgacatccccaagggccacatcgtcgcgacatcaccatncttcgncaacaggctgtcccacatctacaagaaccctgactcatatgacn

SEQ ID NO: 99709 - DNA, 538 bp, Zea mays
  unsure (1)..(538): unsure at all n locations
cgaggntnnnntttgttttttgacccnntcgcaggactcnacnggnccggaannnccgggccgacccacgcgtccgccttcgcctcctacggcgagatcctcgacttcaaggtcatcaccgaccgggagacggggagggctcgcggcttcagcttcgttaccttctcctccgagaactccatgctcgacgctatcgagaacatgaacggcaaggagctcgacggccgtaacatcaccgttaaccaggcccagtcccgtggcggtggcggtggcggcggtggctacggcggccgtcgcggcggcggcggctatggtggcgggcgccgtgaccgcggttatggcggcggtggcggctaccgcggtcggcacgagggtggtggcggcggctacagaggctgtggccgctacagcagtcngcacgagggtggttgttgcggctactgctgcngctggggcngcttgagggacttgatgtgtggcccatcctggcttctggccgagtattctatctatctataggatcgtngtaaccgtcgcg

SEQ ID NO: 99710 - DNA, 547 bp, Zea mays
  unsure (1)..(547): unsure at all n locations
gggggnaagtgcgntnnnaacgccccattccgcaccgcangcctnaccggnccggaanncccgggtcgacccacgcgtccggtcgcgctagactatgaacaagaactcgagaccgccaagagcagctcatcagttgagaagaggtacgagctgcctgatgggcaagtgatcaccataggcgcagagcgcttcagatgcccggaggtgctcttccagccatccatgatcggtatggaagctccaggaatccacgagacgacctacaactccatcatgaagtgcgacgtggacatcagaaaggacctgtacggcaacattgtcctcagcggtggatccaccatgttcccaggcatcgctgaccgcatgagcaaggagatcaccgcgctcgcgccaagcagcatgaagatcaaggtcgtcgctccgccggagaggaagtacagtgtctggattggaggatcaatcctcgcatccctgagcacattccagcagatgtggatctcaagggctgagtatgaggagtctggtccagctattgtccacaggaagt

SEQ ID NO: 99711 - DNA, 529 bp, Zea mays
cgatagggtgttcatgtccagggggagagtagcactgtcctgaattcccgggtcgacccacgcgtccgtccaagtagttgctgtgattctcagtgctagtatttcagcgggctgattgcaaatttgtgcgggtaggactttggccgctggacggtgcactctgcgggatccccaacctcctgctgagctcccgcacagagggcgggcatggctggaaagcataccatgattctcatgcaaccatcacagaacagatcgacgaggacatttatggactacgattcagttaaccacgcgctggatggaatatgtggtctatacgaaaggaaaatcaggaacataaacccaatggtcaggaacttgactcatgatatcggtgacctgtacaacttcatcgatggcctgaccgacataagtgcactgacgtacgatgattcacttgacgctttcctgacgtatgaccgtcagtggataaaacagatgctgtttcagcacctgtagcggatggcgcagcagtatggaatccacc

SEQ ID NO: 99712 - DNA, 544 bp, Zea mays
  unsure (1)..(544): unsure at all n locations
nggggnnnnggatgnnggnaatgttcnncgccaatccgtcgtatgccccggnccggaattcccgggtcgacccacgcgtccgcggacgcgtgggagaagttgtgaactttgcatcagcatgaggtctggagtctagacacagcgtggcaaactgaggtttaatcatcttagcaactacggtacgtgaccctgagcgcgtgattgttgcgaaacaacgaccacctcggtctacaccttaaaggtttgcgcgacatggcttttcatagtgctcaattggatctatcccctgagcataggagaaaagtatcaatttgtacagtggatccaagtattctataaagcatgcatcctccaatttcccacaagcgagaatggcatgatatgatggatgaaatggctgttgcggtcaattgtctttcaaggatcaattgtctttcaagaaccacactttgtattggtttgtgtgcagttcaagctctacaaggtgaggtctgttcagtttggccagaaaagtatcccctacctgaacacctacgacgaccgc

SEQ ID NO: 99713 - DNA, 535 bp, Zea mays
  unsure (1)..(535): unsure at all n locations
agaaatggtcgcgnttattgtaacacagtatcgctactaccgctcctgaattcccgggtcgacccacgcgtccgcccacgcgtccgcccacgcgtccgaggatgatatttgcctgccactgatgatatcattgtggcaagtgaacggtctgcgcttgccgccttgcttgatggctttgcctgctgatctcaagactaaggtattggggtttttacctggggttgatcttgcaaaggttgagtgcacatgcaaggaaatgatgaatcttgcatcagatgatagtatctggaagaagcttgtatccaagtttgaaaattatggcgagggctctaggctggcaggcaagaatgcaaaggccatatttgtagaagcttggcaggccaataagagacggcagaagaggcccaatccaaccttttggaactatggctggggaaacagtccttatagccgtccacttaggctgccattgattggtggggactcggacagacttncttttattgggaatcatggttctgttgggcgccactct

SEQ ID NO: 99714 - DNA, 534 bp, Zea mays
  unsure (1)..(534): unsure at all n locations
agtcgctggtgtgtttccgttctatgtantgcagttncgctcctcaattcccgggtcgacccacgcgtccgctaagctggcgaacttgctgcatgcgaaggagctctctagaaggctgaaggaagaaggaggaaacgatcacagttaacagtgtccatcctggattgatcatgaccaatttgatgaggcactcctttgttctcatgaaggtgcttcaggttgccacttacatactgtggaagaatgtaccccatggagctgcgactacttgctacgtaggactgagccctcaactcaagggagtgacaggaaagtactttgctgactgcaacgtggagaagacgagcaaactggcgaagagcgaggagttggcgaagcagctctgtgacttcagcgaggagctgatcaagtctgcgaagtgagagccgaaagagctggatcagagaaaatgttgtggtcctgcttggcatctagtggtacaagtgatgactgattaatttatagcacggatgatgaaacctgggcgatggctgg

SEQ ID NO: 99715 - DNA, 534 bp, Zea mays
  unsure (1)..(534): unsure at all n locations
gaaacggctgtgtccaggccggatcgtattgcatcttccgttnntccnctgnaattaccgggccgacccacgcgtccggatattcttgattttcatttatttttaaatacttcggccagtatcggtggattgcgtatgggtccatttccctcggatcttgctttgttgtcatcttcttgattggaaccaaagagccaggatcaattcggcactgtttggataagagtccttccagaatttcatgggactactggttcaagagagtattgtactaccaagttgctctagtctatactctgactagattggtgaccaatgtttcacaggcatttcttgctttctatgtaataaatgatttagaaatgaatcaatcctccaaagcattggtacctgctattatctacatctgcagcttgatagtatctgtaatattacaagagactagatggtcaagttggcgtcttaagctttacttttcagatggagcaatgctttggatattgtcaggtcagggaattgttcttctaccgagcn

SEQ ID NO: 99716 - DNA, 537 bp, Zea mays
  unsure (1)..(537): unsure at all n locations
nnnnttggcnnncnaactgccccgactctcgcacgctcnacnggnnnggaanncccgggccgacccacgcgtccgcccacgcatccgctcacactacacaatgtttatgaccaaatgcctgaccctaaatgggctcttgcaatttgcagctgttgcaacggctgtccatactaccattactcctactctgctgtacgtggatgtcaccgtatcgtcctctgtggacatctacgtgcctgggtgcccaccaactggtgacgcacttgtgtacggcgttcttcagctgcaaaagaaaatcaacacgcgtaacgatttccttcactggtggaccaagtgaagcatgcttctgctgttgctagcttgctacgtttatttgcactctacctacctgtcttatatgaaataaagacagactgtgctcggattcacaaatgtgctgtccctggaaggatgcatgcccacgttgccacgaacatataacttgtgtacttggagtcagctcgcctgtaattgacaccagacctgctgcgaatcttt

SEQ ID NO: 99717 - DNA, 532 bp, Zea mays
gaaagatggtgctttcttgaacatagtatcgtacctttgtccggaattcccgggtcgacccacgcgtccggggagcggcttctttcgtcagctgttcttgctttgcctgagcctcttccgcctgcttcgtggtctggacaggagccggtgacctcggacgatatcttggaggacaagatgtcgggggctgttcttgtcgccatagtcgcctccatcggcaatctattgcaagggtgggacaatgccaccatcgcagctgctgttctgtatattaaagaagaatttcaattggcaaatgagcccactgtgggagggactaattgtgtcaatgtcacttatcgggccaccaatgttactacattcttcgggccattatcagactcgattggtcgacgccctatgcttattctttcttcaaatctgaacttcttcaacggcctcatcatgctatgggcctcctaatgtctatggtccgcttgttgcacgcctcgtaaatggaattggtattagccttgggtgtcacgccctgtcc

SEQ ID NO: 99718 - DNA, 524 bp, Zea mays
  unsure (1)..(524): unsure at all n locations
gacggctgtttctccgaacaagtacgctccaccggtcttgatttcccgggtcgacccacgcgtccggcaagtaccagaatagcacggacctgctcatccgcaagctgcccttccagcccctcttccgggagagcgcgcaggatttcaagaccgacctccgcttncagtcctccgctgtcgccgcgctgcangaggccgccgaggcctacctcgtggggctcttcgaggacaccaacctctgcgccatccacgccaagcgcgtcaccatcatgcccaaggacatccagctcgcgcgccgcatcaggggcgagagggcttgatctcccgttgttgtcgtccacgttgttgggcctttcctctgtgtctctgcttgtagaatccttgcttctgttcggttccttctgttcgcatgatggtgttcgtagtgttaggagttgcattttctaatctgcttgttcttgcaccggtgcctctgaagtggccgttccccctatcttaatggaaatggaatgtgccttaaaaaa

SEQ ID NO: 99719 - DNA, 536 bp, Zea mays
cgttagcggctaggttctctgaacatcgtatagtatctcttcgtccggtcttgaattcccgggtcgacccacgcgtccgcgctccttccctccctctacccgtcgccgttgctgccatggacgaagtcgtcaggcggatgttggagaagcaagtgctgtctgccgcgaaggcggtggaggacaagctcgatgaggagatcgccgcgctcgaccgtctcgatccggacgatatcgaggcgctccgcgagcgccggatccagcagatgcgccgcgccgccgagcgccgcgccaagtggcgtgcgctggggcacggggagtacaccgaggtccccgagaaggagttcttctccatcgccaaagccagcgagcggctcgtctgccacttctaccgcgacaactggcccttgcaggtcgtggacaagcacctgtcggcttttggcaaacagcacgtggagacacggttcgtgaaggtccacgccgagaatgccccctttctgaccgagaaacttaggatagtcgttcttccgacccttgcc

SEQ ID NO: 99720 - DNA, 546 bp, Zea mays
  unsure (1)..(546): unsure at all n locations
nnnaaaatggnncccccgccggaccctttcgcaggacgctaccggnccggaanncccgggccgacccacgcgtccgatctgcaaagaacaaacgtttccgctgaggcttagaaatggtagcaacggaaattgtgataccggtgaaataactgtctatgactactatgcaaagaaaggaatcgatctaaagtattctggtgatttcccctgtataaatacagggaaggcaaagcgcccaacatattttccaatcgagctatgctcgcttgttccgcttcaaagatacaccaaagctttgtctacgctacaaaggtcatcccttgtggagaagtctagacagaagcctgaagaaaggatgaccgttctaaatgatgcactgcaacgcagtaactacgattctgaccccatgttgagggcatgtggtgtttcagttgctccaaaatttacccaaagttgaggaaggatccttcaagccccaaagctgaaagccggcaatggtgatgatatcttttcacgaaatggacggtggaatttcactaataagan

SEQ ID NO: 99721 - DNA, 534 bp, Zea mays
  unsure (1)..(534): unsure at all n locations
gttatagcgggtcgcgtttccatttctcgtacgtcgtcatttccggaattcccgggtcgacccactcgtccgcccacgcgtgcggactcacttaacgcttatctaacttcgatgcatacgtgcaaattctgagacaggtccttgacaatacccacattgatgacttcaagcttaatattgatcttaacagctaactacgaagctatcagcaagaacggatcaactggcttgcattcctacgtcggtctaagttacatggaattccatgcgacgacatcgtgctcgctaagacgctccaagcatatactatcgcctcaagtgacattgctgaaccacgtgcacagaatgatgaacaaattctcacatctctgactatctgcacttctacattaatgcaccactgtgaatatgacatagagaaatacatagacagctctatctagaaacctnttcaacacgttggctcttctcatgacagagtgacacttcctagtaagcttgtaaagttcaacgtatcataacatcatatcacag

SEQ ID NO: 99722 - DNA, 531 bp, Zea mays
agtggtcgctgtcagcccgaaaggtatagtatctgctctaccggtccggaattcccgggtcgacccacgcgtccgtactggtcgaataatcaaaggacaggatgtatctcttcccaagagcaaatatgaagaggaggtgttcattaataatcacacgagcgtgtggggttcatggtggaaagatcatcaatggggctacaagtgctgcaagcagactatcaagaatagttactgtactggcttggctggaatagaagctgccgaagcatcagcagatctaatgaaggccaatatggctcgcaaggaggctgcagaagatgagcctgtacagcatgaagagaagcgattagccacttggggaaccgatgtgcctcaggatcttattcttaacgagaagaagctccaggaatctctaaagaaagaaactgcgaagaggaaagaagagaaagatgaaaggaagaggaagtataacgtgaagtttaacgatgaggttactgcagaagacatggaggcctaccgtattgaaaagaa

SEQ ID NO: 99723 - DNA, 538 bp, Zea mays
agatttaagggtgtgtcaccagacatagtattgcactaccgtaccggtctggaattcccgggtcgacccacgcgtccgcccacgcgtccggagctaaatatgaagctgtagaagctccagaggacaagcagtggtcaagggcgcatgattcagaagactgaacatgctcttaaagctgctgaggaggagctgatgaaggctcagttggaaacaacaacatatgtaaaacagcttatagaggttcatggagcctggttgccaccatggttagcgacacatgcagcccgctctatggaggtgatgtcaaatcactggaatgaacatgggaaacctgcctttgacagcttcttgcagaaggcatctgaaaaaacagtgcagacaaagaaatgggctgagcctcatctggaaactgctaagacaaaatggatgcctgttgctaaagaaaaatgggttaccttgaagaaacatgcaaaagcctatgttccaaatggtctcagagaaatcatgggaggctaatcaaacatcaagggactttgtc

SEQ ID NO: 99724 - DNA, 546 bp, Zea mays
  unsure (1)..(546): unsure at all n locations
ntgcgttttnaaccccnggatccganagcacgngcnaccggnccggaancccgggtcgacccacgcgtccgcccacgcgtccgaacaatattttgaatatactgaaagtgtatgattcgtttcttgcggagtggggtctttgctttgggtattgcaagaaatatgctgaccatgaagcgagacttgatggtgtgagtaaagctatagaggtgtatgaacgagcagttctcgcagttacttattcagtggacatttggtataactattgtcagtttgcaatttcaacatatgatgattcagatatcatacgaagactgtttgaacgtggcttggcatatgttggaacaaaatatcattcccatattttgggggatgaggtataataaatatgaaaaagcacttgaaggttggagtcatctagcttgatttatttacaagaatatttggaaccatccattcagcaacttggatcggtattttaaattggctcaaaggaaatgggcttccaaggcacaagttattcaaaaaatccttacttgaagaaaa

SEQ ID NO: 99725 - DNA, 542 bp, Zea mays
  unsure (1)..(542): unsure at all n locations
agtaataaagtgctaatgtttccctgtcccagtngctagtacactcctgaattgccggatcgacccacgcgtccgcccacgcgtgcgacccaatctcccctacaccagaaaaattcccagttctttggtccgcgtgagagagtctgttgcgatgtctgggcgcggcaagggcggcaagggtctgggcaagggcggcgcgaagcgccaccggaaggtgctccgcgacaacatccagggcatcaccaagccggctatccggaagctggctaggaagggtggcgtgaagcgcatctcggggctcatctacgaggagacccgctgcgtgctcaagatctttctcgagaacgtcatccgcgacgccgtcacctacaccgagcacgctcgccgcaagaccgtgaccgccatggacgtcgtctacgcgctcaagcgccatggaaccaccctttacggctttcgaggctaagcttagcgcctcttcataagtcgggactggttaagggacatgtctctgtgtgatgccttctcgtggaataatgctggan

SEQ ID NO: 99726 - DNA, 532 bp, Zea mays
  unsure (1)..(532): unsure at all n locations
agtgctcgctgttctaaccctngtactactgaccgtaccggtcttgaattcccgggtcgacccacgcgtccgcccacgcgtccgcccacgcgtccgcccacgcttccgcccacgcgtccgctcccagctgctcaaactgtaagtggtgggccaccatcatatatttgtcgactcagtggaaagagcgatgtggattggtctttctggttggaggcaaactcttctgaaagtctgagagtcgatgtcgcagtacttgatcagtaccttgttgatagtacaaagaaactcaagagcctcttcccaagttgggccgggctgtttgtataaatatggaatgcaaggtgccctttgttgggtctgccggaaattatccagaaaaaaaaaaaaaaaaaaaaaaactaatataaaaaaaaaaaaaaaaaagtaacaaaaataaataaaaaaaaaaagggcggccgctctaaaggatccaagcttacgtacgcgtgcatgcgacgtcatagctcttctatagtgtcacctaaattcaatt

SEQ ID NO: 99727 - DNA, 553 bp, Zea mays
  unsure (1)..(553): unsure at all n locations
nnnnaagtggnnggctcctccttttatcnttttctgtagtgcttcaccggnncggaanncccgggtcgaccgacgcgtccgtaccgagctcaacctttcaactggtgactatatagtggtccgaaaggtgtcnaataagggaggggccgaaggtgaatgcagggggaaagctggttggttcccctacgactacatcgagaaacgggagcgtgtgcttgcaagtaaagtcgcccaagttttctaagtcttccgcggagccatgtagtatatccccggggttgtacaatgtgtgttggttatgcttgtcatcttcagagaatcagaggagatctgtaattttgctgaaagctgcctgttgggtggtttgtttcttgcttgccgcctgcatttgttcaaattcatgtggcacggaactgaatatattcattcttcagntatcctgtcaatacatattttttttntttttaaatgnnnnnnncnnccccnccnncnnnnnnnnnnnnnannaccaaccgcccccccnnnnnnnccccccccannaccaaacagaaaa

SEQ ID NO: 99728 - DNA, 529 bp, Zea mays
  unsure (1)..(529): unsure at all n locations
agcggtgtgcccaagttcccgangcacgncgaccggatggaatcccgggtcgacccacgcgtccgcggacgcgtgggcggacgcgtgggtttccatgcaggcaggtcggcgaggagggcagggagacggaagaccgagccgtgcgggggctcgtgacgggaactggacaggacctcaaaatctcagatccttcctgccctgccgcccgtgcacgtcgacgcgttattcttgccggccgggccccaccttacgcctctcctccttcagggggatcggatacgccacaggctgcacgatggtgctgtgggtcattggctacggctccctcatctggaaccccggcttcgacttcgacgacaaaattctcggcttcatcaagggctacaagcgcacctttaatctcgcttgcattgaccacagaggcacaccggagcatccggcgaggacctgcacgcttgaaaccgacgactaggccatatgctggggaattgcatattgtgtcaagggtggtccagaaaaagagctaaaa

SEQ ID NO: 99729 - DNA, 527 bp, Zea mays
  unsure (1)..(527): unsure at all n locations
accgtgctgtgtttcaatttctcgctacgtaccantcttcctgaattcccgggtcgacccacgcgtccgcggacgcgtgggccgcagttcccccgcgccttagacgcaaccccgcgccaggagtaagtgggttcgtttatcgatattatcgatatggcgagggaggagaatgtctacatggccaagctggctgagcaggccgaaaggtatgaagagatggttgagtatatggagaaggtggctaatactgtagatgtggaagagctcactgttgaggagcgtaacctcttgtcggtcgcatacaagaatgtgattggggctcgccgtgcttcatggcgcattgtctcttctattgaacagaacgaagagtcccgtaagaacgaagagcatgtgaaccttatcaaagaataccgtgcgaagatcgaggctgaactgagcaatatctgtgatggcatcctggaactgcttgactcccacctagtgccttttctactgctgctgaatcaaacgtcttctacctcaagagg

SEQ ID NO: 99730 - DNA, 527 bp, Zea mays
  unsure (1)..(527): unsure at all n locations
gaatggctcgctaatgctaagccatcatcnactgacgctaccggtcttgaattcccgggtcgacccacgcgtccgcccacgcgtccgacacacataattaaaagctcagaacctgcattcagtgttttggtgtcaaggttcttccttggggagacgtttccaattccagtatatctttctcttcttccaatcattggtggttgtgctctagctgctgtcacagagctgaactttaatatggttggatttatgggtgccatgatatccaaccttgcatttggtttccgcaacatcttctcgaaaaagggcatgaaagggaaagccgtcagtggcatgaattactacgcttgcctgtcaattatgtccctggtcatactgacttcctttgctatagctatggaagccctcaaatgtgggctgctggttggcaaaagctcttgcagaagttggacccaatgctgtctggtggattgctgcacagagcgtgttctaccacttatataaccangtgtcctacatgtctntcg

SEQ ID NO: 99731 - DNA, 540 bp, Zea mays
  unsure (1)..(540): unsure at all n locations
gttcggnnnnnaactgaatcaagagttagnagttacacaccggtctggaattcccggcccgacccacgcgtccggctgagtcaagaatatgccatggaatgaattggcattatcctcatgaaccattcatcacggagcttcagggtcggattacgaaagctgatgctgtattgagggacaaggaagaagaaaatgtgatgctgaaacagcaattggaacagtatgagagtcaatggtcagaatatgaggccaaaatgaaatctatggaagaggcatggaagagacagctctcttcactgcagctgagccttgttgctgctaagaagagcctagctgctgccgatgtggctactagaactgctcagactgattgtactccaacacatgcccagtacgactctgaagacacgttgtccactgggacccatacacccgaagtgacagaatcgaggcaccgtaaccacaaccacaaccctgaaactaaaagtttaacatgaaactcggataggcgagtaaacgctgtgaaccacctaacgaaag

SEQ ID NO: 99732 - DNA, 544 bp, Zea mays
  unsure (1)..(544): unsure at all n locations
aggtngtnnntttcgccccagctccttcgctacactcaacnggnccggaanncccgggccgacccacgcgtccgctcgctaccggcaggccacccccatacggctagtcgttcgtctcctcctcaaccgcaggtcggcagcgcccgagctctgcgtgcgatggactactcgggcaccaaggagtcgcctccctccggggcttggtggtcgagggagacggtggccgtcgtgaccggcgcgaaccgcggcatcggccacgcgctcgccgcgcgcctggccgagcacggcctcaccgtggtgctcaccgcgcgggacggcgagcgcggggaggccgccgcggccccgctcctggcgcgcgggctcgccgtcgtcttccgcaggctcgacgtctccgacgccgcctccgtcgccgagttcgccgcctggctccgcgacgccgtcgggggcctcgacatnctggtgaacaacgccgccgtgtcgttcaacgagatcgacaccaactcggtggaacacgccgagactggtctcaggaccaacttctacg

SEQ ID NO: 99733 - DNA, 526 bp, Zea mays
  unsure (1)..(526): unsure at all n locations
agagtccaaactgaaannttccaaggggtcccgncanngncgccacnggtnnttggaattcccgggcgcgacgccacgcgtctcgccgcactcctnncnatgcggtctcatcagctatcggcaccaccgtccaaagatggtganattgctcaagcccggcaaggccgtggtcctccntccaggccggttcgccggccggaaggccgtgatcgtgcgcgttttcgaggagggcacccgtgatcgtccctacgggcactgcctcgtcgcgggcctcgccaagtaccccaagaaggtgatccgcaaggactccgccaagaagacggccaagaagtcccgcgtcaagtgcttcatcaagctcgtcaacttcacgcacctcatgcccacccgctacaccctcgacgtcgactttaangacgtcgcatcgggcgggcccgacgcgctctccacccgggacaagattgtcgaagcctgcatggccgccatagcgcgcctcgaggagaggttcaagaccggcaagaacagtggt

SEQ ID NO: 99734 - DNA, 530 bp, Zea mays
  unsure (1)..(530): unsure at all n locations
agggaggtgncgcnnnnagaggcctccagcgccttccagctgtactgnacgnccgcaccggntcggaattcccgggtcgacgcacgcgttcgcccactcgttcgcccactcgttcgtgggtaggacaagcttgtcgtatcaagttcctgcgcgctcatgcacaccgctgtggatcttgttaacgagactaagcttgacagcgagattaagtcttggcttgcttttgctgcccagaaggttgttgaggttgatgctcttgctaaagcattggctggtcaaaaggatgaggcttacttcgcagcaaatgctgctgctcaggcctcgaggaaatcctcaccccgtgtgaccaatgaaaaagtccagaaggctgctgctgctctcaagggctctgaccaccgccgtgggaccaacgttagtgctagattggatgcccagcagaaagagcttatacctcccatccttcccaccactacaatcggttcgttcccacataccgttgagctcatgaaggtccgccgtgagtacaaagn

SEQ ID NO: 99735 - DNA, 502 bp, Zea mays
  unsure (1)..(502): unsure at all n locations
aggtatnccattnnggccctttggcagnannncnnnnnnntttggnggangcgggcggtggcaagatcgaggctgaactgagcaatatctgtgattgcatcttgaagctgcttgagtcccacctgttgccttcttctactgctggggaatcaaaggtcttctacctcaagatgaagggtgactatcacaggtatcttgcggaatttaagactggtgctgagaggaaggaatctgctgagagcacaatggtggcctataaggctgctcatgacattgctctggctgagctggcacctacccatccgataaggctgggacttgctcttaatttttcagtgttctattatgagattctgaactccccagacaaagcttgcaacctggcaaagcaggcgtttgatgaagctatctctgagttagacagccttggtgaggagtcatacaaagatagcactctgatcatgcaactccttgaggataaacttgcccctttggacatccg

SEQ ID NO: 99736 - DNA, 513 bp, Zea mays
  unsure (1)..(513): unsure at all n locations
tggggctaactgagatnnnnnggacttttngnnangttcnnnccgtntntgaattacnggcccgacgcactcgtccgcccactcttccnaccactcttacnagttaaggacaacccggncanatcaacttcctgagctctcattcacacctcgttggatcttnctaacnanactaatcttcacaccaaaattaaatcttggcttgcttttgctgcccacaacgctgttgaagtccatgctcttgctaatgcattggctgctcaaaaagatcaagcttacttcacaccaaatgcttctgctcatgcctcgagcaaatcctcaccccgtgtgaccaatgtaaaaatccataacgctactgatcctatcaaagacctctaccacctccatgtgaccaacattaatgctagattggatgccccacagaagattcttaaccttcccattattgccaacactatcatcggctccttcccacaaaccgatgagctcatgaagatccgccagtaatacaag

SEQ ID NO: 99737 - DNA, 516 bp, Zea mays
  unsure (1)..(516): unsure at all n locations
aggaggggcgcnnnnaggggatccagcctctcccacccctccnannncnnnntntttttggaggnagcgtncgcagagcaagccatgtggaggaaggctttatcgatggtcctgttcatggctggcgccgggctgctcggcggggctgtcggcgccggcgcgcatcatttcgtgtggagcatcatcacccggcccatgttccagagcatgctgagccaccgcggcgacagcgggtgccagggcgccttctacacctacgacgccttcatcgaggccgccagcaagttccccggcttcggcaccaccggcgacgagcagacgcgcaggcgggagctcgccgccttcttcggccagacgtcccacgaaaccaccggtggatgggcgactgctccggatggaccgttttgcctgggatactgccgggtgaaggaacagaaacagacggacccaccctactatggacgaggacccatacagcttactcataagtacaactacaagctcggcggggcagcg

SEQ ID NO: 99738 - DNA, 516 bp, Zea mays
  unsure (1)..(516): unsure at all n locations
gggagggcgcnnnnaggccttcagcctttcccgaccgtcctgcacnncncnnnnnnttnnggangcacgcgtncgnacgcgcttnnggcttcttngcgagagatctaggccttatctaaggtctggtggccgaggtgtctaggccggctaggaagcgccttatgcctaacttcaagcgccttcagcaggacccgcccgccggcatcatcggcgcgccgtacgacaacaatatcatgctctggaacgccgtcatattcgggccggatgacacgccgtgggatggaggcacgttcaagctgactctgcaatttacagaagattaccccaacaaacctccaactgttcggtttgtttcgaggatgtttcatccaaacatctatgcggatggaagcatctgtttggacatcctacacaaccagtggagccctatatatgatgttgcggcaatattgacctctattcagtccctgctgtgtgacccaaacccaaattcttctgctaactcttgaacagnca

SEQ ID NO: 99739 - DNA, 518 bp, Zea mays
  unsure (1)..(518): unsure at all n locations
aggtggtcgccccnagagcctccaagcctctcaacctgttactcgcannccgcaantnnttgnngganccacgcgtncgcccacgcgtncggccacncntncgcggtctcgtgggtaaagatagaatgcattttgtgagtggtgagtcgttaattgaatgcgctactattgcttacaagtgtgcaaaagttggtgcagtcgggataaattgcacacctccaagatttattcatggactgatactctccattcgaaaggtcacagacaagcctattctgatatatcccaacagtggtgaaagatatgatggtgaaaaaaaggagtgggtggaatccactggtgtgtcaaatggtgattttgtttcgtacgtaaatgaatggtgcaaagatggggctgcgcttatcgngggctgctgcaggacaactccaaacactatcagggccatacacagaactcttaccaatgctgtcacaagcatcagttacctgtaagctgtatcatagatctgttgctcactn

SEQ ID NO: 99740 - DNA, 510 bp, Zea mays
  unsure (1)..(510): unsure at all n locations
natgcctttacgagantnttnncctnntgtngtactgntcgcaccggtttcggaattcccggctggacccacgcgtccgggatgaaaaaaatgtatatgttgttatttaattatgcaaaggangtgaactgctggacgaaattttggctagaggtgggaaatattctgagggcgatgctaaagttattattcaccaaattctaagtgttgcttcattttgtcatcttcaaggtgttgttcaccgggatctgaaaccagagaattttcttttcatgtcaaaggatgagaattctgccttgaaagtcattgactttggtttgtctgactttgttaaaccagatgacagacttaatgacattgttggaagtgcatattatgttgctcctgaagttctccatcgatcttatggcacataggctgatatgtggagcattggagtaattgcatatantttgctttgtggaagccgccctttctgggcacgaactgagtcaggaatttttcgagctg

SEQ ID NO: 99741 - DNA, 530 bp, Zea mays
  unsure (1)..(530): unsure at all n locations
agggagttgaccgccccnnaggtgntttccaatngtgcccatctngcctnngccannncnccnnnnnnnggngagngagcatatgtgtgtgtngtcccttcccttcccttggatccatacaatacgtcaggaacccannatgaccgcggcggctggggcgagaagagatggccgacggcaacancaactcatcggcgtcggtggccatgggacaagaggtgcaggctttcgttgagaacaagtatggtggaatggtgcctaagaagcctctgatttcaaaggatcaagagcgcgcctattttgattctgcagactgggtccttggcaagcaagctgcaaacagcggcaccgcacgggctgcgactgctatcgaattcttgaagccaaagctaaagaggacgccccatcaccagcttccccctcgcaagccgacctgtgcgttcagctgagctcaaaacagtgcgaaaattcaaagggccaggcttacaaaaactcccttgctgggagagaccaccaagagcgttatcaag

SEQ ID NO: 99742 - DNA, 507 bp, Zea mays
  unsure (1)..(507): unsure at all n locations
agttgtggccccccnaagggaatccagtttgtccatnngtccgnannncccnnnnnttnnggaggnagcgtcgagcgaacaaaggatcnnattctcttcatttcttttagactcnatacccccccgagttttagttccttctttcggtcgagagagccattctggtggcaatggcgaaaagcgagggtccggcgatcgggatcgacctctgcaccacctactcgtgcgtcggcgtgtggcatcacgaccgggtggagattatcgccaacgaccaagggaaccgcaccacgccgtcctatgtcggcttcaccgacaccgagcggctcatcggcgacgctgccaagaaccaggtcgccatgaaccccaccaacaccgtcttcgatgccaagcggttgatcggcaggaggttctctgatccgtcagtgcagagtgacatgaagctattgcctttcaaagtcatcccaggtcctggtgacaagcccatgaatgttgtcaacttcaatggcc

SEQ ID NO: 99743 - DNA, 558 bp, Zea mays
  unsure (1)..(558): unsure at all n locations
ggatggtgnttctggaaaatttcccaaatngtccctgcanngncgncaccggtttcggaattcccgggtgcgagccacgcgtnncgccgncccgcctccacagcccagtcgctacgtcgtctcttccttaccaggattcccatggcgccctcggagcgagctcgtcacagtgccctcttgcgacatccaatncaagtgttacaacccatgttcggtggccctcccgcccctttggnggtctcctctcctattcggccggttgggacaaagcaccacgtgtttccaagctctatcatgagcgtacccatctggcaatctacgtgcgggtgggaaggccgccgctgttggggccaacagccaggccgcgcagtccatgctcaagcaggactacaaggacgccttgacccgcgaggaggccgtcggtctcgcgctcaaagtccctcacaagaccatggactccaccaacttgactgncgagaagcttgaagctgcccgaggtttttttgcagcccgacacgggcgatgtacagtaccatgtgtgctctcctgaggcgctgg

SEQ ID NO: 99744 - DNA, 514 bp, Zea mays
  unsure (1)..(514): unsure at all n locations
aggatgggcgcnntnngggcnctcagccactcccgcacgtactgcacnccgcnnnntttgggngaggaagcgtgcgcccacgcgtncggaccanttcccctctcttgatcgttctgttcctcacancacacggtggctgggcgacctgagaagcatgcggcccccgcggcacatgagacggccgtgcacatcgtgtacgttgaccgccccgaggacgccgaccctgaggagttccacattcgcaccctcacccccgtcctcggcagcgaacagaaggccagggacgcagtgctctaccactacaagaacgccgccagcggcttctccgcgaagctcaccccccagcaggtcaaggatctcaaggagcaaccaggtgttctccaggttgtgccgagccagacttaccagctacatggtcctgggtctggcactcaccagggcacgacacacaccttgggccttatgtgaaagcgtatgagaatcaagaagattgtgtttagtatggctgtatggg

SEQ ID NO: 99745 - DNA, 520 bp, Zea mays
  unsure (1)..(520): unsure at all n locations
aggatggcncnnntagggccttaacgatccctccaattgtactgnnannncgcnccggttcgaattcccggctcgacccacgcgtccgctgcaacaacctgccggtccccttcctcctctcctggcagggaattcaggagcggaggagctcatggcaggacggcgtgtaccgcaccaactgcccgatccctccgggcggcaatttcacttacaacatgcagttcaaggaccagatcgggagctactactacttcccttcccttctgtttcacaaggcagctggcggttacggtgccatcagggttctcagccggccgaggatccctgtcccgtttgacccgcctgccggggatttcaccatattggcgggtgactggttcaagctcaaccacaccgacctgaaaggcattctggacagtggcaatgacctgccgtttcctgacggccttcttatcaatggccaaggttggaatggcaacagattcacggtggaccaagggaaaaacgtatcgttccgggt

SEQ ID NO: 99746 - DNA, 502 bp, Zea mays
  unsure (1)..(502): unsure at all n locations
agagtccatccagctnttgccagttagtttgnannacccannnnngnnggagcacgcgtgcgccgactctttccaaatcaccgccggctcggctcttcatcttcgcgccaacaccgggtcttcgaggcccgcacgaagcaaacggctcncaaatcgactggcggcaaggcgccccgcaagcagctggccaccaatgcggcgcgcaagtcggcgccggcaaccggtggcgtgaagaagcctcaccgctttcgccccggcaccgtcgcgctccgggagattcgcaagtaccagaagagcacggagctgctcatccgcaagctgcccttccagcgcctcgtccgtgagatcgcgcaagatttcaagaccgacctccgctttcagtcctccgctgtcgccgcgcttcangatgccgccgaagcctacctcgtggggctcttcgaggacaccaacctttgcgccattcacgccaagcgcgtnaccatcattgccaaagacattcaag

SEQ ID NO: 99747 - DNA, 524 bp, Zea mays
  unsure (1)..(524): unsure at all n locations
aggatggtcgcnnnnnnncnnctcccgccattaccccgaccatcgtcatgctcccnccggtttggaattcccgggccgacccacgcgtccgggaggtgcanctgcaaaacctggggttttggatcctggacctnggctaccgctcccaggaggaagcctgggctgctggtggcaaccncnttctgctcaagaccacaaacggaaggaagagctggatgcgcgacaaagctgccgacaacatcgccgccaatctctactccgtcaagttccttgatgacaagaaaagcttcgtgctgggcaacgacggcgtgttgcttcggtatcttggctgacattctatgtatatgtgtgtacagcgaacggcatgtgctgctgctactactactgtaaaaggctgcttactgtgcttgcgttctctcttctgcaacccaaattgagtgtaaagatgcatgtgctgcttgctaggaactngaaaacctngtatacccgtatctactatctatatatatgctacctttgtgcaa

SEQ ID NO: 99748 - DNA, 366 bp, Zea mays
  unsure (1)..(366): unsure at all n locations
caaggagcccgaggcggcggcgagaggaggacttanccgatgacaaggccgtcatccggcgggctacccggcgccgccggcgccgccggccgacgactccaaggccctggccatcgtcgagaaagttgcagatgaacctgctcccgagaagcctgcccctgcgaagcaagggggctccaatgacagggatctcgctcttgcaagggtggaaacagagaagaggaactctttgatcaaagcttgggaagagaatgagaagacaaaagctgagaacaaggctgctaagaaagtatccgctattctttcatgggaaaacacanagaaagcaaacatagaagctgaactgaagaagattgangaacaact

SEQ ID NO: 99749 - DNA, 407 bp, Zea mays
  unsure (1)..(407): unsure at all n locations
acggaccgctccatgctcctgcccgactgcgtcttccgcatgggcggccgcgcatgggatgggaacaccgcgggcggaggcgcgcggttccggctcgcccgcgtcgtgcgcacggtggcctccgcgcgggacgccgcctaccggtgcgtgttccaggtggaggacgaggagagcaacacggggatccggctctccaaggacctcgtgcccactgccgcccagaccctgaaaagcaacatcgtcgccttcgggcccctggtcctgcctgcctcggagaagctcctcgtcgctctgtccatcctgaggcggaggctagtacggagcggccgggggagggtgtaccgnccggacttccgcaccgcgttcgagcacttctgcatccacgccggcgggcgcggggtcatcga

SEQ ID NO: 99750 - DNA, 322 bp, Zea mays
gctctaccggtccggaattcccggggcgaccggcgcgtacgggctgtcggcggacccggagaccttcgcgaagaaccgcgagctggaggtgatccagcggccggtgggccatgctcggcgcgctcgggtgcgtgttcccggagctgctcgcccgcaacggcgtcaagttcggcgaggcggtgtggttcaaggcgggctcccagatcttcagcgagggcgggctggactacctcggcaacccgagcctggtccacgcgcatagcatcctggccatctgggcgttccaggtggtgctcatgggcgccgtcgaggggtaccgcgt

SEQ ID NO: 99751 - DNA, 363 bp, Zea mays
  unsure (1)..(363): unsure at all n locations
ggggggggagttatgctgtaccggtccggaattcccgggtcggcgggcgcgtccgcgatggcacgctgcccggcgactatggggtcnacccgctgggcctctcggacccggaggggagcggtggcttcatggaggccaagtggctggcctatggcgaggtgatcaacggccgctacgccatgctgggcgcggtgggcgccatcgccccggagatcttcggcaagatgggcatcatccccccggagaccgcgctgccgtggttcaagacgggcgtcatcccgcccgcgggcacctacaactactgggccgactcctacacgctcttcgtcttcaacatggcgctcatgggcttcgccgagcacc

SEQ ID NO: 99752 - DNA, 295 bp, Zea mays
  unsure (1)..(295): unsure at all n locations
gcagaccttggtccagtgatcagccgaggggcaaaggatcggatctgtaaattagtccaaagtggtgttgacagtggtgctcgtatattgcttgatggaagaaagatagtggttcctcgctatgaagatggaaattttgttggcccaaccattctggctgatgttaaaagtgacatggagtgttacaaggaggaaatatttggtccagtgcttctcttaatgaaagcggagagcctagatgatgccatccaaattatanacagcaacaagtatggcaatggtgcttccatattta

SEQ ID NO: 99753 - DNA, 385 bp, Zea mays
  unsure (1)..(385): unsure at all n locations
cggaattcccgggtcgaccgacgcgtgcgcccacgcgtccggggtctcaagtccgccgccagcgtccccgtggcccgccgcagcaccaggagcctgggcaacgtgagcaacggcggaaggatccggtgcatgcaggtgtggccggcctacggcaacaagaagttcgagacgctgtcgtacctgccgccgctgtcgacggacgacctgctgaagcaggtggactacctgctgcgcaacggctggataccctgcctcgagttcagcaagctcgggttcgtgtaccgcgagaactccacctncccgtgctactacgacggccgctactggaccatgtggaagctgcccatgttcggctgcaccgacgccacgcaagtgtacaaggagc

SEQ ID NO: 99754 - DNA, 431 bp, Zea mays
caccggtccggaattccgggggcgaccgacgcgtacgggcgtcgctgtcgtgcgcctccacgctggcctggacgcccggctcctacccgcggcgctcggcggagcgctgccgcacggcctctcgccgggctccgtcgctggtcatcgtcgcccaggggaaggtcaagaagtaccgccaggtcatattgacagacgacatagaagaggtggggaagaaaggggatacactgaaggtgcgagctggattctaccgcaacttcctccttcccaagggcaaggctacacttctgaccccagaagtcctcaaggaaatgcagctggagcaggagagaatagaagctgaaaagaagcgggtaaaagaagacgcgcaacaacttgctcgagtttttgaaaccattggcgctttcaaactccctcgcaaaggtggaaaa

SEQ ID NO: 99755 - DNA, 201 bp, Zea mays
  unsure (1)..(201): unsure at all n locations
attcgcaagttgaggacttctacctcatcacntatacttcccccaatgaacacatnttccaaatgcccaccaacctctccagcatcattctagatggccccatccttcttaaagcttgcactcaaataccatttcctgtctctccgcaccatattactctccaagtacaagatcacctaccagttctaccccgtcttcccc

SEQ ID NO: 99756 - DNA, 458 bp, Zea mays
  unsure (1)..(458): unsure at all n locations
caatactcaggtaatctatcctttgggtgagacggcagcggctatacgaggggaaaatgagctatggcttgctatggttcttaggaacaaggtcctcttggatctaaagccatctcaactggcagcagtttgtggaagtttagtttccgaagggatcaaacttcgtccttggaaaaatagcagctatgtatatgaaccttcttctgttgttactggtgttataagttatttagaagagcagagaaattcgctaatcgatctccaagagagacatagtgttaagataccttgcgaaatagatgcccagtttgctgngatggttgaagcctgngcttcangactgacttgganggagataatgatggactctgcaatggacgatggagaattagcccgtctactcangcgctctatagatttactagctcagattcccaaactgccagacattgatcccg

SEQ ID NO: 99757 - DNA, 241 bp, Zea mays
cccacgcgtccgcgaaacggtcgacatggctcgcacgcaatctgccgtagcggtcgccgtggtggccgcggtgctgctgctggcagcggcggcgacgacctcggaagcccgcatcaacttgcggcaagttaacctccgcattgcgcccttgcttttctaacccccgggcaccgggtcccgccccttccggttctgcttgaaccgcctcaaggaacctaaaaagcgccgccagaaccgccgc

SEQ ID NO: 99758 - DNA, 344 bp, Zea mays
tgaattcccgggtcgaccgacgcgtccgcaccaacatgtatacttacatctcaatggtcgctctaattggtggcattccacctgcataggtctttgaaaatccgaagctaatgcactatgtatatattgataccattgcaaaagttggattgacaaagtatgtcagcgacctattcttgattggactgatctaccatctgtataaccagattgctacaaacaccttacaacgagtgtctcctcttacacatgctgaccgcaatgcgattaaacgcgtttataccatctgtttctcaatcattgatactggcaacagaattagcacacaaactggaattggcacg

SEQ ID NO: 99759 - DNA, 377 bp, Zea mays
  unsure (1)..(377): unsure at all n locations
tccggaattcccgggtcgaccgacgcggacgcccacgcgtccgctctcctgatcgtcctgttcctgacagcagcagccatggcggccgagccgganaagcangcgggccccgcggcacaggagacggccgtgcacatcgtgtacgttgaccgccccgaggacgccgaccctgaggagttccacatccgcaccctcacccccgtcctcggcagcgaacagaaggccagggacgcagtgctctaccactacaagaacgccgncagcggcttctccgcgaagctcaccccccagcaggtcaaggatctcaaggagcaaccaggtgttctccaggttgtgccgagccagacttaccagctacatggtcctgggtctggcac

SEQ ID NO: 99760 - DNA, 419 bp, Zea mays
  unsure (1)..(419): unsure at all n locations
acggggggggtcgcctgagatcacagcgacgatggtgaaggcaggtgctgtcctcgccgggacggatgtcaagggcaggatgttcttttcacaggacggggatggtccgaccaccgtgactggaagtatctctggcctcaagccagtgctccatgggttccatgtgcacgcgcttggcgacaccaccaacggctgcatgtcgactgggccacacttcaatcctgttggcaaggagcatggcgcaccggaagatgaggaccgccatgccggtgatcttgggaatgtgacagcgggagaagatggtgttgttaatgtcaatattactgacagccagatacctcttgctggaccccactcgatcattggccgagctgttgntgtccatgctgatccggatgaccttggcaaaagtggacatg

SEQ ID NO: 99761 - DNA, 404 bp, Zea mays
  unsure (1)..(404): unsure at all n locations
acgcccacgcgtccgcccacgcgtccgtcgaggagtacaagttgaagggccatatccgggggatgtctnctcagatgagccgcgtccgcaacggggagctgtaccgctacatttgcgatacgaagggcgcattcgtgcagcctgcgttctacgaagcgttcggcctgactgtgatcgagtccatgacgtgcggtctgccaacgatcgcgacctgccatggtggccctgctgagatcatcgtggacggggtatctggcctgcacattgacccttaccacagcgacaaggccgcggatatcctggtcaacttctttgacaaatgcaagggagatccgagctactgggacaagatctcacagggcggcctgcagagaatctatgagaagtacacctggaagctctac

SEQ ID NO: 99762 - DNA, 311 bp, Zea mays
cggacgcgtgggcggacgcgtgggtgctgggccaacatgtgggagtacagcgtgtgtagcggtaataagaaacacgcaacttgttgtggcaaatgctggtgattcccgatgtgttatttcaaggggtgggaaggcatacaatttatcgagggaccacaaaccagagcttgcagctgagagagaaaggataatgaaagcagggggcttcatccatatgggacgagtaaatggaagtttaaacttgtcaagggcaattggagacgtggaattgaaacagaacaaattcctgccttccgagaagcaaattgtga

SEQ ID NO: 99763 - DNA, 421 bp, Zea mays
tcggtccggaattctccgggtcgacacgcgcgtccgggagtccgttgcttcgctcggtttataggcgagattgaaaatctgcaggggacaaatagatgcactattcatactggtgctggaaagatcgttcctgaaatacaaagtgatgggcaggtaaaggttgatatgggcgagcctatcctttctggactagacatccccacaaaactgctagctaccaagaacaaagctgttgttcaagctgaattggcagttgagggcttaacatggcatgtcacatgtgttagcatgggaaaccctcactgtgtcacatttggtgcaaatgagttaaaggtattgcaggtcgacgatttaaaacttagcgaaattgggcctaaatttgagcatcatgaaatgtttcctgctcgcacatacacagaat

SEQ ID NO: 99764 - DNA, 355 bp, Zea mays
acccgtccggaattcccgggtcgaccgacgcgtgcgcggacgcgtgggcgaggcccagtcccgcggcggccgtggaggcggcggcggtgggtacgggggtgggcgtggaggcggcggctacggcggtggcgggcgccgtgatggcggtggcggctacggcggtggcggcggctacggtggcggcggcggctatggtggtggtggcggcggctacggcggtggcaaccgtggcggcggctacggcaactccgacgggaactggaggaactgagcggtggggcccgcgcggccaagttatcctgttcgctaccgtgatgtttaccctagtccagagggtttatcttcgttcgtgtcg

SEQ ID NO: 99765 - DNA, 352 bp, Zea mays
  unsure (1)..(352): unsure at all n locations
gaattcccgggtcgacgggcgcggacggngcangagaggtatcatagcttggcccgcatgtattatangggtgcagccgccgccattggtgtcgatgacatcgcaggtccggcctccttcacccgtgccaagaaatgggttcaagaacttcaagctcaaggaaatccgaatacaatagtggctcttgctggtaacaaggttgatatgctagatgcgaggcacgtggcagtagaggaagcaaagacgtatgcccaggagaacggtctcttcttcatggagacatctgctaaaactgcaatcaatgtgaatgacatattttatgagattgcaaagagattgcttcaagggcaag

SEQ ID NO: 99766 - DNA, 314 bp, Zea mays
cccgtccggaattcccgggtcgaccgacgcggacgggctgtccgccgaccccgagaccttcgcgaagaaccgcgagctggaggtgatccactcccggtggggcatgctcggcgcgctcggctgcgtcttccccgagctgctctcccgcaacggcgtcaagttcggcgaggccgtctggttcaaggccggctcccagatcttcagcgagggcgggctggactacctcggcaaccccagcctgatccacgcgcagagcatcctcgccatctgggcctgccaggtcgtgctcatgggtgccgtcgagggctaccgca

SEQ ID NO: 99767 - DNA, 413 bp, Zea mays
ggccatactatcctggtccatgctgctgctggtggtgtcggctcactcctttgtcagtggggaaacgcccttggggccactgtcatcgggactgtttccaatcaagaaaaagccgctcaggcagctcaggatggatgccaccatcccataatttacactagcgaggatgtcgtcgcaagagtcaaggatattacatcaggaaaaggtgtcaatgtcgtctatgattctgttggaaaggatacatacaaggcttccctggagtgcttggcgtcccgcggcttcctggtgtcgtttgggcagtcgtcaggcaaacctgacccaatcccaacgagcgacctggcttccaagtccttgttcctcactcgtcctagcctcatgcattacactgctacccgtgatgagctgctggagtc

SEQ ID NO: 99768 - DNA, 455 bp, Zea mays
  unsure (1)..(455): unsure at all n locations
cgttcggcatccggcgtaacgagaagagcgcctgctacgtcacggtcaggggcgacaaggcgatgcagctgcttgagagcggcctcaaggtcaaggagtacgagctgctcaggaggaacttcagcgacaccggctgcttcgggttcggcatccaggagcacatcgaccttggtatcaagtatgatccatcaacaggcatctatgggatggacttctacgtcgtgcttgagcgtgctggctaccgcgtcgcgcgccgcaagaggtgcaagtcccgtgttgggattcagcatagggtgaccaaggaggactccatgaagtggttccaggtcaagtatgaaggtgtcatcctcaacaaggctcangccagcacgatttaaacctcacctgtggggcaaaacagctctcgcttcatctccatgtgaacgcaggatcaccttccaaggtttttgtttgag

SEQ ID NO: 99769 - DNA, 386 bp, Zea mays
  unsure (1)..(386): unsure at all n locations
cccgtccggaattcccgggtcgaccgacgcggccgcccacgcgtccgcggcggtcggcgcgaaggtggcggcggcggctacggaggcggtggcggcgacnggggtcggcgcgagggtggcggtggcggctacggcggcggtggcggcggcggctggagggactgatgtgtgggcccatcctggcttcggccgagttatcttatctatctatagtatcgtgttaccgttcgcttctgtcaccgtgttagtgtccgttctacctttggattangtgttggtaccctgttgttcgctttgggtgctcccgctatgaaacgagacgagagaagaatgagcagggttttgttcgcagctatttttgtccaatgatattgatatattggtcc

SEQ ID NO: 99770 - DNA, 390 bp, Zea mays
  unsure (1)..(390): unsure at all n locations
acccgtccggaattcccgggtcgaccgacgcgtgcgctatgatgttaattctatgaaatcgtttgataatcttcacagctggcgtgaagagtttctagttcaggcgagcccgtcagatcctgacaatttcccttttgttctgttgggtaacaaagttgatgtagatggtgggaacagccgtgtggtgtcggagaaaaaggcaaaggcatggtgcgcctctaaagggaacatcccgtactttgagacgtctgctaaggatggaacgaacgtggaagatgccttccagtgtattgtaaagaatgctctgaagaatgaaccggaggaagaattgtatgtgccagataccgtggatgtggtangtggcaaccgggctcagagatcatctggctt

SEQ ID NO: 99771 - DNA, 464 bp, Zea mays
  unsure (1)..(464): unsure at all n locations
cgaggtaaagtccgtcgtttgaagtacacctggaaatctgcaggttacaatttcaagaggaggaccnaaaggaaggatcagccttgtcgacaatataatccttgtggttgtcaatctacatgcggaaagcagtgtccatgtctttcaaatgggacatgttgtgagaaatactgtgggtgtccaaaaatttgcaagaatcgttttcgaggatgtcactgtgcaaagagccagtgtcgcagccgccaatgtccatgttttgcagctgacagggaatgcgatccggatgtttgcagaaactgttgggttgggtgtggtgatggtacattgggagttccaaaccagagaggagataattatgaatgcncgaacatgaaactgcttcttaaacaacaacaaanggtcttactttgaagatcagatgtctctggctggngagcattcctcaagaatagtgttagcaaaca

SEQ ID NO: 99772 - DNA, 437 bp, Zea mays
  unsure (1)..(437): unsure at all n locations
cggacgcgtgggcaacatggcgctcatgggcttcgccgagcaccgccgcctccaggactggtacaacccgggctccatgggcaagcagtacttcctcggcctcgagaagttcctcgccggctccggcgacccgtcctaccccggcgggcccctcttcaacccgctcggcttcggcaagaccgagaaggagatgaatgagctcaagctcaaggagatcaagaacggcaggctcgccatgctcgccatcctcggttacttcatccaggggctcgtcaccggcgtcggcccgttccagaacctgctcgaccacctcgccgaccccgtcaacaacaacgtgctcaccagcctcaagttccactagaacgtggtgcatcagcatacctgctgctgccgccgncgncgccagttgtttgctgtggaaagctagatgcatgcgt

SEQ ID NO: 99773 - DNA, 421 bp, Zea mays
cacatacatagtttcttctactacacgacgacaaacatggggaagcctgcgaagatcggagggtggggtggatacgccggcgatcgtcgggatctgagggctactccggaccggctgatcgaggtgaaggtcacggcggacaacagcagctgcatccgctccatctccttcatctacatcggagccgatggcaaaccgtacgaggaggggccatggggtttcggccacgctggcacggagtacaagattgatctgtgcaggttcgacgagagcttgacggagatctccgggaccacgggcccagcctacaacattgacaatctggtcaagtctctcaaattcgtcaccaacaaacgcgcttacggaccgtacggcagggactagggcaccccgttcgtgtcaggtgatgaacaacggcacg

SEQ ID NO: 99774 - DNA, 362 bp, Zea mays
cggacgcgtggggtccgcgcctccatctacaatgccatgccgctcgccggcgtggagaagcgggtcgccttcatgagggacttccaagccaggaacccttgattgccttgtgcttatggtcatttggtattgctactcagtctttcttcctagcataagtgggctcgtgcaagagctgtctcgcgttgcgcactgggatctatctgtagtattagtaccataacgtaacggctactgtattttgcaatgttttttttctctctcgcttttgttaggtgttcatggaatttcatttctatggatcaccattgcagttgtaatgtgtttttgctggaaataaggaataaggtagagattcggtt

SEQ ID NO: 99775 - DNA, 438 bp, Zea mays
  unsure (1)..(438): unsure at all n locations
cccacgcgtccgggcacgtgtccttctgctacgcgcgggcggtgcagaacacctggctcgggacctgnggcggcgagggggacaaggtcaaggcggcgcaggacgcgctgctgctgcgcgccaaggccaactccctggcgcagctcggcaaggacacctccgacggcgaggccgccgaggccaaggagggaatgttcgtcaagaactacagctactaattaatcgcccggccatcacccgggataccggcgcccctccgagagatacgtgtgtactgatcatgggtaagcacgtactccgatccattcccatcccatgaagccatgataatgatgatatgatccatggaccatgcatggtgctctggtcgatgccgtacgtgtgtccctgatacaatactattttagtactgatgctagtcatcatatatatcgatcg

SEQ ID NO: 99776 - DNA, 379 bp, Zea mays
accggtccggaattcccgggtcgaccgacgcggccgcccacgcgtccgcccacgcgtccgcccacgcgtccgcccacgcgtccgcggacgcgtgggtgcgcgcgagctgaggacgggacagcggcacagaggtgcgacgtacgacgacgacgacgcaggcgccacacatggcatcccagctctccgccgccgtgccccggttccacggcctccggggctacgccgcgcccaggtccgcggtggcagcgctgccgtccgtgagggtgggcaggaagaggtcgtcgtcgcagggcatccgctgcgactacatcggctccgccaccaacctgatcatggtgacgacgacgacgctgatgctgttcgcggggcggttcgggct

SEQ ID NO: 99777 - DNA, 273 bp, Zea mays
  unsure (1)..(273): unsure at all n locations
gaattcccgggtcgaccgacgcgtacgcgcccaagctcgacccgtcgcaggtggtggaggtgttcgtccgtgtgaccggctgctaggtgggcgcagcntcttggctggcccccaagatcggcccgctcggtctttcccccaagaagatcggacaggacatcgccaaggagactgccaaggactggaagggcctccacgtcaccgtcaagctcaccgtccataaccggcaggccaaggtctccgtcgtcccctccgacgctgcgctcgtcatca

SEQ ID NO: 99778 - DNA, 340 bp, Zea mays
gcggagcagaccttcatcatgatcaagcccggcggcgtccagcggggcctgatcggggacatcagcagtcgcttcgagaggagggggttctacctcaaggggatgaagttcatgaacgtggagaggtccttcgcgcagcagcactacgctgacctttccgacaagcctttcttccccgggttggtggagtacatcatttccggccccgtggtggcgatggtgtgggaggggaaggacgtcgtgttgactggccgcaggatcattggggccaccaggccttgggaggcagcccccggtaccattcgtggggactacgccgtggaagtcggcaagaatgtca

SEQ ID NO: 99779 - DNA, 380 bp, Zea mays
  unsure (1)..(380): unsure at all n locations
tgctctaccggtccggaattcccggggcgacggcgcgtccgcacacacagagagagacaagtggtttccgaagccaagtgtggactagcagtctagcgaccaggtagctcgggcgggagcaggcagccatcatgtcggaggagaagcaccaccacttcttcaaccaccacaagaaggacgaggagcagcccgccggcgagtacgggtactccgagaccgaagtggtcaccggcaccggcgagggcgagtacgagaggtacaagaaggaggagaaggagcacaagcacaagcagcacctcggcgaggccggcgccatcgncgacggcgccttcgcactctacgagaagcacgangcgaaaaaagacctcgagcacgcgcac

SEQ ID NO: 99780 - DNA, 315 bp, Zea mays
  unsure (1)..(315): unsure at all n locations
taccggtccggaattcccggggcgaccgccgcgtccgcggacgcgtgggcgctgctgcttactgggggtctttggatctttggangcatgctgaatggggatncnggttctggggcaattcttggcctagcagtcctcttaatctcaagggttgtcacattgaaagaagtgtttggcaaaatctgtggcctgggatacccttacatggtttgcaacacttataacaatggcttgctacctcaacaaattcggctgatctcttggtcagtgagacttgtgtgaagttttgttgaaggcttggcatgtcatggcaac

SEQ ID NO: 99781 - DNA, 458 bp, Zea mays
  unsure (1)..(458): unsure at all n locations
acgggcaacgctgtctacgccgccgtcaaggggggttaccgacatatcgattgtgccagagtttgcgggcaacgaaaaggagattggtttggcgctgaagaagctatttgaagagggtgtagtgaagcgagaagatctgtttatcacctctaagctatggaatgatcatcatgctcctgaagatgtgcctgaggcactaaatgacagcctgaatgatttgcatcttgagtacctggatctttatcttatgcattggccatttagagtcaagacgggaacaaataccaaccctgaaaattttgttacacctgacttacctgctacttggggggcaatgcgaaacagttatatgatgctggcaaagctcgcgctattggtgtgagtaacttctnctcaaagaaattgggtgacttgcttgctgtagctcgtgtacctgcagctgttgatcaggtggaatg

SEQ ID NO: 99782 - DNA, 462 bp, Zea mays
  unsure (1)..(462): unsure at all n locations
tgctgtaccggtccggaattcccggtcgacggcgcgtccgggaataccctgggaccgaagaagagaagatgcgagctgctgttggcaggtttggcctatcgggaaaggcgcaggtgatgccaatgaggaatctttctgatgggcaaaggagccgtgtcatctttgcatggttggcatataggcagccgcaactgctactgctcgatgagccgacaaatcatttggacattgagaccattgactccctggcggaggcactgaatgagtgggatggtggtttggtcttggtgagccatgatttcaggctgatcaaccaagttgctcaagagatttgggtgtgtgagaatcangcggtgacaagggtgggaaggtgatatcatggatttcaaggcacacttgaagagcaaggctggtttatctgattagaggggcttttncagcaaccatgagctttttaactct

SEQ ID NO: 99783 - DNA, 304 bp, Zea mays
gcaaatccccaattcctccgagttcgagcgaccatgtcggggcgtggcaagggcgggaagggtctgggcaaaggcggcgccaagcgtcaccgcaaggttctccgcgacaacatccagggcatcacgaagccggcgatccggacgctggcgaggaggggcggcgtgaagcgcatctcggggctcatctacgaggagacccgcggcgtgctcaagatcttcctcgagaacgtcatccgcgacgccgtaacctacactgagcacgcccgccggaagaccgtcaccgccatggacgtcgtctacgccc

SEQ ID NO: 99784 - DNA, 376 bp, Zea mays
accggtccggaattcccgggtcgagacgcgcgtccgcccacgcgtccgattcgtttctcgcgagccatcgcttctggatccggaagaaatggccaagggggaagaaccacacggcgcacaaccagtcgttcaaggcgcacaagaacggcattaagaaacccaagcgccaccgccagacctccaccaaggggatggaccccaagttcctgatgaacctgaggtattctaggaagggcaacaaaaagagtggtgaggctgaagctgaggagtacgaaggaaagcatggctttgtttcctctggttttagctcagttccacctttatgaacctgggttttgctaaagatggaacttaaatggtgttactgtatgatggc

SEQ ID NO: 99785 - DNA, 335 bp, Zea mays
aattcccgggtcgaccgacgcgtacggttccatcgtgctactcctggtggtactggtggtgtgaagaccataggaaattatgcttcggtgttgatggcacggaaaggtgcaaaggaaaagggttattctgatgtcctctacttggacgctgttcacaagaagtaccttgaagaagtttcttcatgcaatgtttttgttgtcaaggacaatgttatttctaccccagcaataaaaggaacaatattacctggtatcacaaggaaaagtataattgacgttgctttgagtaaaggcttccaggttgaggagcggcttgtttcagtggatgaactgct

SEQ ID NO: 99786 - DNA, 392 bp, Zea mays
  unsure (1)..(392): unsure at all n locations
gaattcccggntggaccgacgcgtccggaaattgatagagttgtccatgaggagacaattgctagaggtggatacccatctccggtgagttaccatttgttgggcaagtcatgttgcacgtctgtcaatgaagtcatttgccatggaattccagatgccaggaaacttgaagatggtgacattgtaaatgttgatgtaactgtatactataaaagtgttcatggtgatttaaatgagacatattttgttggaaatgtcgatgaagcttccaaacagcttgtacgttgtacctatgagtgctttgagaaagctattgcaataattaaacctggagatcggttcctagaggtctcggaaatcataaatagacatgcttccatgtcagggttatc

SEQ ID NO: 99787 - DNA, 382 bp, Zea mays
agatgatgtgctttcatctctgaatgacatgctcgcatgtgatgctgcggtccctgcatcacgacccttgtcatggcccacaccaggagagctagatgatctatttgccatctacctgaagagcattcctaagcctgagaagctatcaaggttgcagtacctgctcggcattagcaacgagaaggctaacgagatgcaggacgcagcctcggagggatcgctgccggttgcagctgaagagaaagaggagttggcgttctaggaaggggtacagttttgttagggtagccaccggagttgaggtcccttgccaaggaacgaacgaacttggtgccttgtgcggacagctgctattgtagctaggcgcatacatgttttggga

SEQ ID NO: 99788 - DNA, 309 bp, Zea mays
ccggtccggaattcccgggtcgacgggcgcgtccgctcgcccgcaacggcgtcaagttcggcgaggccgtgtggttcaaggccgggtcgcagatctgcagcgagggtgggctggactacctcggcaacccgagcctgatccacgcgcagagcatcctcgccatctgggcctgccaggtcgtgctcatgggcgccatcgaggggtaccgcgtcgccggcggcccgctcggagaggtcgtcgacccgctctaccccggcggcagcttcgacccgctcggcctcgccgacgaccctgaggccttcgcggagc

SEQ ID NO: 99789 - DNA, 233 bp, Zea mays
ctcacgcgtacggccacgcatccgcccacgcgtccgtccacgcatgcgcccacgcgtacgtgcacgcatgctgcgcgtgcaatgagtccaaggcgttcgccttttgcaagaacaactcgatcaagaagcttaccgcttccatgaagaactactcgcccgacagcacccgtacgctcgccatcaacgccaccatcgagaagaccaagcaccggttctagaactacggcaagttc

SEQ ID NO: 99790 - DNA, 345 bp, Zea mays
  unsure (1)..(345): unsure at all n locations
gcggcgtgtgcgtcccctcatgtgtgatgatgccagatgaatacaacaacgtccccggtccgggaggcaaaccaggcaccagtcccaccaccaccaccctctgtcttcgcctccgctgccgattcgaaagcacccgtcctgtcccctcgcaaaaccctagctccagccaccatgaagggcaaggctgacacctccaagaaagacgagggcaagctccgggcgggcggcgccgccggaaagcgcaagaaggccgccgcgagcggcaagcccaagcgcccggccttcggcttcttcgtcttcatgtctgaattcangcangagtatcangcgctgcaccctggcaac

SEQ ID NO: 99791 - DNA, 460 bp, Zea mays
  unsure (1)..(460): unsure at all n locations
gaattcccgnggcgaccgacgcgtacggctggccaaggtcactgtccagcacttgcatggaaacaatgtggaccttggaactggctggggtaaatactttcgggtgtgctgcctcagcattattgatcctggtgattctgatatcatcaagactacaccgggtgagcagtaaagaagcccctgcagtagggggatcttactgcatttgttcttctgtcttgttaaacagcatttacctgctagtaaactgagttattcggaacattgtcttgaattgaatttttgctccggtgttttgacacttaaatagagctttagcttataccgntgttcaagtcgcagctgtatgttgtcactatcaaaccgtcaaacgaatgctccaccaatggaggtatctcctataataaagattcattggttgtagtaattggatgatatctncggtacgatcctttttcac

SEQ ID NO: 99792 - DNA, 299 bp, Zea mays
ggaacatttcaaaataaaatattctccagtgtggttaaatggtggtgggcactgcgacctcgagctatatccagagtacattaagcacttgaagcagtttgtgtcaagcgttagcaaaaaaacatcaaagccggaccagaaagagataatggcaaaggatggcactaccagtaaagaaagagaggaagcatactcggagaaacctcagccggcagctaagtgctcacagtcacagatctcacgtaagagcatagatagccgagttgggaaatccaaaacagtggatgttcctgataaat

SEQ ID NO: 99793 - DNA, 419 bp, Zea mays
ggcggtggcgcctcagggcctgccgcccctcggccgccgcgcctcctccttcggcgtcgtctgctccaagaagaagatcaagaccgacaagccctacgggattgggggtggcctgaccgtcgacgtcgacgccaacgggagaaagggcaagggcaagggcgtgtaccagttcgtcgacaagtacggcgcgaacgtcgacggatacagcccaatctacaacgaggatgactggtctcccaccggcgacgtctacgtcggtggaaccactgggcttctgatctgggccgtcaccctcgctgggatcctcggcggcggcgccctactcgtctacaacaccagcgccctctccggctaaggatatccaatgcatgcgcttcttgcgattcgtcatgtaaaatcagggtgtctgtctataatct

SEQ ID NO: 99794 - DNA, 411 bp, Zea mays
  unsure (1)..(411): unsure at all n locations
ccggtccggaattcccgggtcggaccaagccgtccaatcaaggtggaggccatggatgggccctttgtgccaaacatcacaattggaccctggggtgttgatgctctgcgtccagtgactgatcttccgttggatgtacatctgatgattgtggaacctgagcagcgagtccctgattttatcaaggcaggtgctgatattgctagtgtccactgtgaacagacatcgaccttcatttgcaccgaacagtcaatcagattaaaagtctaggagcanaggcagggattgttntgaatccagcgactccactcactgcaattgattacgttcttgatgttgttgacctggtgctgattatgtctgtgaatcctgggtttgttggcagagctttatcgagagtcaagtaaggaa

SEQ ID NO: 99795 - DNA, 442 bp, Zea mays
tactcgcgccggaatctggtcgaaccaagccttccggaataatcaaagacagtacctaaattagctgaaaatggcaaggttgctataaggaacataagaagagatgcaatcaaagcttatgataaactagagaaggaaaagaagctttctgaggacaatgtgaaagatttatcagctgatctacaaaaagtcacagatgagtacatgaaaaagatcgaatccatccagaagcagaaggaacaggaactgatgaaaatttagacctcaagctgactgtatggctggtgaggagtaaccgtcttcgtgaagcatggacccctgcatatgttggtgtttctgaagcaatttgtttggttcatggctttggcgtctcggcgctgcgccagggatgcacgttttgaatcaggcgctttgctggaacttttgggtgcacacaagttga

SEQ ID NO: 99796 - DNA, 310 bp, Zea mays
agccttccggccttttaatgcatgggggcggcgtacgggacagccaaaagtggcgttggcgtggcgtccatgggtgtcatgcgcccagagctcgtcatgaagtccatcgtgcccgtggtcatggctggtgtgctcggtatctacggactcatcatcgccgtcatcatcagcactgggatcaaccccaaggccaagccatactacctctttgacggctatgcccacctgtcgtctggccttgcctgtggtcttgctgggcttgctgcaggcatggccattggcatcgatggtgatgctggtgtcagggcca

SEQ ID NO: 99797 - DNA, 419 bp, Zea mays
acatcgtgggcctcggcctgggcgacgagcgcgacatcactgtgcgggggctcgatgccgtacgcagctgctccaaggtatacatggaggcatacacatccctcctctccctcggcctcgacccggccgcgctcgccaacctggagaagctgtacgggaaggagataacggtcgccgatcgggagatggtggaggagcgtgtcgaccaggtgctaagcgaggctgccgacactgacgtcgccttccttgttgttggcgacccgttcggggcaactacacatactgatctggttgttcgtgccaagaaaatgggagtagaagtgaaggtgatccacaatgcatctgtcatgaatgcaattggagtttgtgggctacaactttaccgctatggagaaactatctcaataccattcttcaca

SEQ ID NO: 99798 - DNA, 355 bp, Zea mays
ctgggcgtaccagcgccaggaggcggagcgcgcgtccgcgtcggacttcaagaacgaccagctgcctctggcccggatcaagaagatcatgaaggccgacgaggacgtgcgcatgatctccgccgaggcgcccgtgctgttcgccaaggcctgcgagctcttcatcctcgagctcactatccgctcctggctccacgccgaggagaacaagcgccgcaccctgcagcgcaacgacgtcgccgcggccatcgcgcgcaccgacgtcttcgatttcctcgtagacatcgtgccccgcgaggaggccaaggaggagcccggcagcgccctcggcttcgcggcgcctgggaccggcgtc

SEQ ID NO: 99799 - DNA, 479 bp, Zea mays
  unsure (1)..(479): unsure at all n locations
cggcggctgaggaggacgagcaggaggtgaagagggaggagctcaagcggtgcctggtggagacggtgtacggctccgacctcggcttccgggcgtccacggaggtcagaggtgaggtcgtcgagctagtcacccagctcgaggcggttaaccctactactgctcccgtcgagtcgccggatctcctcgacggcaactggatcctcatatatacagcatattctgagcttctgcctattctagctgctggggcaacacctttggtcaaagtaaagcagatatcccaagaaattgactccaaaatcatgacgatagtcaatgcttcgacccttacgactccattcgcttcattttcattcagcgcaaccgcctctttcgaggttcaaagcccatcaaggatagaggtccaatttaaggaggggagctttcagcctncgacaatatcatcatccgtggatctacctcaacaagttgatata

SEQ ID NO: 99800 - DNA, 455 bp, Zea mays
cccacgcgtccgctgctccaagaagaagatcaagaccgacaagccctacgggattgggggtggcctgaccgtcgacgtcgacgccaacgggagaaagggcaagggcaagggcgtgtaccagttcgtcgacaagtacggcgcgaacgtctacggatacagcccaatctacaacgaggatgactggtctcccaccggcgacgtctacgtcggtggaaccactgggcttctgatctgggccgtcaccctcgctgggatcctcggcggcggcgccctcctcgtctacaacaccagcgccctctccggctaaggatatccaatgcatgcgcttcttgcgattcgtcatgtaaaatcagggtgtctgtctataatctagcctccatggatgctcaaccttcgtcatgtaacaataatcagtgctactcttcattacataaatttgatgctatatatatata

SEQ ID NO: 99801 - DNA, 404 bp, Zea mays
gtatctctaaggatggccagacccgtgagcatgctctccttgctttcacccttggggtcaagcagatgatttgctgctgcaacaagatggatgcgaccactcccaagtattccaaggcccgttacgatgagattgtgaaggaagtttcatcctacctcaagaaggttggatacaaccctgacaagattgcctttgtccctatctctggttttgagggtgacaacatgattgagaggtccaccaaccttgactggtacaagggtccaaccctgcttgaggctcttgaccagatcaccgagcccaagaggccttcagacaagcccctgcgtctgcccctccaggatgtgtacaagattggtggtattggaactgttccggttggtcgtgtggagactggtgtcatc

SEQ ID NO: 99802 - DNA, 466 bp, Zea mays
  unsure (1)..(466): unsure at all n locations
gcttctcatctactgcatcctgcccgccatctgtctgctcaccggaaagttcatcattccagagatcagcaacttcgccagcatctggttcatctccctcttcatctcgatcttcgccacgggcatcctggagatgaggtggagcggggtgggcatcgacgagtggtggaggaacgagcagttctgggtgatcgggggcatctccgcgcacctcttcgccgtgttccagggcctgctcaaggtgctggccggcatcgacaccaacttcaccgtcacctncaaggcctcggacgaggacggcgacttcgcggagctgtacatgttcaagtggacgacgctcctgatcccgcccaccaccatcctgatcatcaacctggtcggcgtcgtcgccggcatctnctacgccatcaacagcgggtaccagtcgtggggcccgctcttccgcaagctcttcttcgccttctgg

SEQ ID NO: 99803 - DNA, 374 bp, Zea mays
atctcgagctagctagctgctgtaagccgttgccatggccaaaatggtgttgctctgcgtgctcgtctccttcctcctgatgcccttggcctccctagccctgacgcaggacttctgcgtcgccgacctgacctgcagcgacacgccggcggggtacccgtgcaagtccagcgtcaccgccaacgacttctacttccacggcctggccggccagggcaaaataaacccactcatcaaggccgccgtgaccccggccttcgtgggccagttcccgggcgtcaacgggcttggcatctctgcggccaggctcgacatcgaggtgggcggcgtcgtgccgctgcacacccacccggcgggctcagagctcctcttcg

SEQ ID NO: 99804 - DNA, 406 bp, Zea mays
cgcgcggcgaccacccgattcgaagcgtgcggagagaccgaagaagcgggagagatggctcgtaccaagcagactgctcgcaagtccacgggagggaaggctcccaggaagcagcttgccaccaaggctgcccgtaagtctgcccccaccactggtggagtgaagaagcctcaccgttaccgtcctggaactgttgccctccgtgagatccgcaagtatcagaagagcactgagctgctgatcaagaagctgcccttccagaggctcgtcagggaaattgcacaggacttcaaaactgatttgcgtttccagagccatgcggtgcttgcccttcaggaggctgctgaggcataccttgttggcctgtttgaggacaccaacctgtgcgccattcatgctaagcgtg

SEQ ID NO: 99805 - DNA, 416 bp, Zea mays
gtcgcctggtacgacaacgagtgggggtacagccaacgcgtggttgatctggcgcggctggtggcggccaagtggcccggcgccgcggcggccggcagcggcgaccctctggaggacttctgcaaggacaaccccgagaccgacgagtgcaaggtgtacgaagcatgaggccagggttctttccacgacgaaacgtacagcacgggcgcgagggttctttccatagagaataatatacagattattcgcccaaagagacgtatgttatatatatgagttgtatgcagtcaccgaactggtacaggcttccgctttccatttcctgttgggagtcgtgtagtgtaatcctggggtgtgtatttggttcatcaatcatgccagccgatttgaatctcgtttcaccagcatgatctgat

SEQ ID NO: 99806 - DNA, 471 bp, Zea mays
cctcgttcctctagccgtctcgcgcagccacagcctccatttctcctccgacggcggtgcggctagctcaaccatggcggactccaaggccacctcggcggtcacccttcgcactcgcaagttcatgaccaaccgcctgctggcccgcaaacaatttgtgcttgaggttatccaccccggccgcgccaacgtctccaaggcggagttgaaggagaggcttgccaagatgtacgaggtgaaggaccccaacaccatcttcgtcttcaagttccgcacccacttcggtggaggcaagtccactggcttcggcctcatctacgataacctcgagtctgccaagaagttcgagcccaaataccgtctcatcaggaatggtcttgctactaaggttgagaagtcccgcaagcaaatgaaagagcggaagaacagggccaagatgatccgtggtgtcaagaagaccaaggcttgtga

SEQ ID NO: 99807 - DNA, 444 bp, Zea mays
cccacgcgttcgggagcaaggagcacgactcgatgggccactccaacgtttggaactcgcagcctaataactacggccctggctcccgcgtctgccgggtctgcgcgaaccctcacggtctgatcaggaagtacgggctcatgtgctgcaagcagtgctttcgcagcaacgccaaggacattggtttcatcaagtaccgttgaagaggccactgtgctgctgcggagaacttgctacatcagagaaatgggtccttcattagaaggcctaatttatgcgctttagctatttgttcagaacttgagactcatgtgttaaactcgacttgttaaagttttgatggctactttgtgcttgctggaccagctatcatcagaagattgagactttctcactcaacagagagatccagaccttcgaaagggcggtcgttctagaggatcc

SEQ ID NO: 99808 - DNA, 456 bp, Zea mays
  unsure (1)..(456): unsure at all n locations
cgccggagggggaggtggagctgcaggtgcccgacgacgtctacatcctggacttcgccgaggaggaaggcatcgacctgcccttctcctgccgtgcggggtcctgctcctcctgcgccggcaaggtcgtctctggctccgtcgaccagtccgaccagagcttcctcaacgacaaccaggtcgccgacggttgggtgctcacctgcgctgcgtaccccacctccgacgtcgtcatcgagacgcacaaggaggatgacctcctataattctagctagctatacaccgtcagggcccgtcgtcttgtgccaccacatgcagtaccgcccgcgcaggagatgagacgtgtcgtctcaataattctagctatatatatatatatgcatgcatgcatgtacttntccctgttccaaactgagtatattctaaaatacaagatttaatcacatggtttagag

SEQ ID NO: 99809 - DNA, 455 bp, Zea mays
ccggtccggaattcccgggtcggcgcaagccgtccggttccttctgcagaaggaactcgactaccttgtcggagctgtttcaagccctaaacgcgcttttgctgccatcgtgggtggttcaaaggtgtcatccaagatcggggttattgagtccctgttggagaagtgtgatatccttctcttgggtggtggtatgatcttcacgttttacaaggcacaaggtctccctgttggtgcttcattggtcgaggaagacaaactcgagcttgcaacgtctctacttgcaaaggctaaggaaaagggtgtctcccttatgctgccaaccgatgttgtcattgctgacaagtttgcccctgatgctaacagccagattgttccagcatctgcaattcctgatggttggatgggcctggatattggcccagattctgtcgcttcattcaacgcagccctgg

SEQ ID NO: 99810 - DNA, 405 bp, Zea mays
  unsure (1)..(405): unsure at all n locations
cggacgcgtgggcggacgcgtgggtagagattgctggtcgagaagaagagatgttgacatatataataactactgtaggcagcggcatctcctgctgggacgaagattcaagaagctagctaagagagaagggcataacgagataataagcagcgcgcgaagatgcaagactgggcgccggtgttcgtctcgctggtgctcttcatcctgctgtcgccgggcctgctgttccagatgccgggcaagtgccggatcatcgagttcggcaacttccagaccagcgccatctccatcctcgtccacgccatcctcttcttcgccctcgccgncatcttcctcgtcgccgtcggggtgcacatgtacctcggctcctaggcggcggcgcggtgcgccgtaccttctctc

SEQ ID NO: 99811 - DNA, 413 bp, Zea mays
cccacgcgtccgcccacgcgtccgcgaagatcggagagtggggtggatacgccggggatcgtcgggatctgagggctactccggaccggctgatcgaggtgaaggtcacggcggacaacagcagctgcatccgctccatctccttcatctacatcggagccgatggcaaaccgtacgaggaggggccatggggtttcggccatgctggcacggagtacaagattgatctgtgcaggttcgacgagagcttgacggagatctccgggaccacgggcccagcctacaacattgacaatctggtcaagtctctcaaattcgtcaccaacaaacgcgcttacggaccgtacggcaaggacgagggcaccccgttccgtgtcaaggtgatgaacaacggccacgtcgctggcttcttt

SEQ ID NO: 99812 - DNA, 413 bp, Zea mays
ccgaggcacggctccctcggcttccttcccaggaagcgctcctcccgccaccgcggcaaggtgaagtcatttcccagggatgaccccaagaagccttgccatctcactgccttccttggctacaaggctggcatgactcacattgtccgtgaggttgagaagccaggatccaaactccataagaaggaaacttgtgaggctgttaccatcattgaaacccctactcttgtcattgttgggctcgtggcatatgtgaagactcctcgtggcctccgcacactcaactctgtttgggcccaacatcttagcgaagaagtgaggagaaggttctacaagaactggtgcaagagcaagacgaaggctttcacaaagtatgctctcaaatatgaaaatgatgctggcaagaaggaaat

SEQ ID NO: 99813 - DNA, 368 bp, Zea mays
cccacgcgtccgcccacgcgtccggtgcaggacggcgacccgaccaagaccatcggggtgcccgagggcttcgactacgagctctacaaccgcaacgacatcaaccgcatcctcgggcccaaggcctcctgcatctccttcaaggactccgcctgccgctgcttcggctacatggtctccaagaagaagtacatctacaccatcgacgacgactgcttcgttgccaaggacccatctggcaaggatatcaatgctcttgagcagcacatcaagaacctactcagcccatccaccccgttcttcttcaacaccctgtacgacccctaccgtgagggtgctgactttgtgcgtggataccccttcagcct

SEQ ID NO: 99814 - DNA, 383 bp, Zea mays
aattcccgggtcgaccgacgcgtccgccaccagctgccattgccatctactgacctgtgacctccgcattttcaaacagcccgagccgtctagatcgagcatagcggcaggcacctccctactcaaggaacatggcccgcacgcagcagttggcagtagtggcgaccgccgcggtggccttggtgctgatggccgcagctacctccgaggcggccatcaactgcgggcatgtggcgttggccatggcgccctgcatctcctacgcgcgccgacagggctcggggccctgcgccggctgctgcaaccgcgtcaggagcctcaacaacgccgtccgcaccaccgactaccgtcgcgccgtctgcaactggctcaagaacgccgtc

SEQ ID NO: 99815 - DNA, 467 bp, Zea mays
  unsure (1)..(467): unsure at all n locations
agtacctccgcttcctccgcaagcggatgaacaccaagccgtcccacgggcccatccacttgggcgcccccgccaagatcctgtggcgcaccatccgcgggatgattccgcacaagaccaagaggggggaggcggctctggcgaggctcaagacgtacgatggcgtcccgccgccgtacgacaagaccaagcgtatggtcatccctgacgctcttaaggttctgaggctacagcctggacacaagtactgcctnctcggcgagctctctaaggaggtcgggtggaactaccatgacaccatcagggaacttgaggagaagaggaaggagaaggccaaggttgcctacgagaggaagaagcaattggccaagctgcgtgtcaaggccgagaaggcagccgaggagaagttgcagtctcagatggagattcttgtccctatcaagtactgaggagctgtgctttgtcat

SEQ ID NO: 99816 - DNA, 464 bp, Zea mays
  unsure (1)..(464): unsure at all n locations
cccacgcgtccgcggacgcgtgggcttgccgccgccactgcccgatccaggtgtgcagacggctccctcctcctctccgctccgaatggcccgcacgaagcagacggcgcgcaagtcgaccggcggcaaggcgccgcggaagcagctggccaccaaggcggcgcgcaagtcggccccggccacgggcggcgtgaagaagccgcaccgcttccgccccggcaccgtcgcgctccgcgagatccgcaagtaccagaagagcacggagctgctcatccgcaagctccccttccagcgcctcgtccgcgagatcgcgcaggacttcaagacggacctgcggttccagtcctcggccgtggcggcgctgcatgaggccgcggaggcgtacctggtggggctcttcgaggacaccaacctctgcgccatccacgccaagagggtcaccatcatgcccaaggacatncagc

SEQ ID NO: 99817 - DNA, 277 bp, Zea mays
gtccggaatttccgggttggcccaacgcttccgaaccaacttcgtccccggcaactaagctcaacggctatgctatgcaacttcattgtcgttcggatcggagagggtgtacgtacgtggattgattgatgctgcgagatgcatgtgtgtcttttgtttcacgttgcattgcataggcaagtcgagatgatgagttggcgttgtacactaagatgaaccatgtttgtgcaatagtggtggtttttgtttcctgctggttaattgttgatatccaaaa

SEQ ID NO: 99818 - DNA, 451 bp, Zea mays
ccggtccggaattcccgggtcggcccaagccttcggaacctccaagcctcccagcgtcgtcccaggcggtgatctggccaaggtgcagcggggcgtgtgtatgatctccaactccaccagtgttgtggaggtcttctcccgcattgaccacaagttcgacctcatgtacgccaagcgcgccttcgtgcactggtacgtcggtgagggtatggaggagggcgagttctccgaggctcgtgaggatctggcggcgcttgagaaggactacgaggaggtcggtgctgagtttgacgagggtgaggacggcgactagggtgacgagtactagacgctctactggcgcggcgtcgtcgggcttgtgtgccactgctatcctgtgatctgccctgagtggctcctatcgtgttatgtttctgtcggttcttatctatctgtcgttgtgtggtttaca

SEQ ID NO: 99819 - DNA, 413 bp, Zea mays
gtcaccccgggcctgctcttcctctacatcgccgggtggatcgggtgggtcggcgggagctacctcatcgccatcagcggcgagaagaagcccgccatgagggagatcatcatcgacgtcgagctcgccacccgcctcctccccagggggttcatctggcccgtcgcggcctaccgcgagctcatcaacggagacctcgtcgtcgacgacaaggacatcggctactactagctgctgcacctgtgcttgcacatcgctgctggcgagttgggcagtcgtcgtacgtgggaaacatggcttttggtgtaggaggaaggaatggaagtggtctgttgtacttaaagaaactagatgaagaagtcttgtataactgaaacttcacccctctcttgtgtatgatgtattcaccttcg

SEQ ID NO: 99820 - DNA, 414 bp, Zea mays
gtgttcggcaagcccaaggcgagcacggagtacatcgcgtacagcggcgacggctggaagctgctgatcccgtccaagtggaaccccagcaaggagcgggagttccccgggcaggtgctccgctacgaggacaacttcgacgccaacagcaacgtgtccgtcatcatccagcccacgtccaagaagaccatcgccgactacggctctcccgaggagttcctctcccaggtcgactacctgctcggcaggcaggcctacggcggcaagaccgactccgagggcgggttcgagaccggcgccgtggccaccgtcaacgtcctggagagctccacccccgtgatcgacggcaagcagtactacgccgtgtccgtgctcaccaggacggcggacggcgacgagggcggcaagcaccac

SEQ ID NO: 99821 - DNA, 443 bp, Zea mays
gccgggaaaagatcggctacagacagatgaggctctgtctccggcaagcggcggccaccaggtcacccctcgcagctaccctccgcggcaagacttctacgagcaccctcgccccccatggccggctcagcttcagccacaccacgtcgctgcagactgcgcccgggcaccgcgggctccgagcagggtgggcggtgcgcgtgctcccgctgacggaggagaacgtggagaaggtgctggacgaggtgcggccgagcctgatggctgacggcggcaacgtggcgctgcacgagatcgacggcctcgtcgtcgtgctcaagctgcatggcgcgtgcggctcctgccccagcttcaccatgacgctcaagatgggcatcgagacgcgccttcgcgacaagatccccgacatcctcgaggtcgagcagatcgtcgacaccgagacc

SEQ ID NO: 99822 - DNA, 448 bp, Zea mays
gggacttccacttcgacatcaatgaaaaaggcatcatcaacaacaaatattgctgatgacgggtctgcgatatttggaggagctcctacatcagaagaatttcaagaagtagatggggagagcgaataaagaagactcgctaggatggaacggcatcaaagaactcgtgaacgagcgtcaaaggctttggctgagaagaatgaacgcgacatgcagcatcaaagagagcatgctgaaagacataggcttgcggaaacactggactttgagattaagcgctgggctgctggaaaagaaggcaatttgcgtgcattgctatcaactttacaatatgttctttggccagaatgtgggtggcaacctgtatccctcactgatttgatcactgctgctgctgttaaaaaagtgtacagaaaagcaacactgtgtatccatcctgacaaggtgc

SEQ ID NO: 99823 - DNA, 447 bp, Zea mays
ccggtccggaattcccgggtcggaccaatgcgtccgctctcctgatcgtcctgttcctcacagcagcagccatggcggccgagccggataagggggctgtccccgcggcacaggagacggccgtgcacatcgtgtacgttgaccgccccgaggacgccgaccctgaggagttccacatccgcaccctcacccacgtcctcggcagcgaacagaatgccagggacgcagtgctctaccactacaagaacgccgacagcggcttctccgctaagctcaccctccagcaggtcaaggatctcaaggagcaaccatgtgttcttcaggttgtgccgagccatacttaccagctacatggtcctgtgtctggcactcaccagtgcacgacacacaccttgtgccttatgtgaaggcttatgagaatcaagaagactgtgtttagtatggctg

SEQ ID NO: 99824 - DNA, 450 bp, Zea mays
gtccggaattcccgggtcgacccaagccttcggttgggtttatcgtaccctgaatggacagagatgcaagcccgggccatttttgaagctgctatagcaatgaccaaccagggtgttcaagtgttcccagagataatggttcctcttgttggaacaccacaggaactggggcatcaagtgactcttatccgccaagttgctgagaaagtgttcgccaatgtgggcaagactatcgggtacaaagttggaacaatgattgagatccccagggcagctctggtggctgatgagatagcggagcaggctgaattcttctccttcggaacgaacgacctgacgcagatgacctttgggtacagcagggatgatgtgggaaagttcattcccgtctatcttgctcagggcattctccaacatgaccccttcgaggtcctggaccagaggggagtg

SEQ ID NO: 99825 - DNA, 376 bp, Zea mays
ggaagtgatagtcctgataatggcaagcgtgaaattgaactgtggttcaaagaaggcgagctctgccaatgggaatcagttcaagcaccgtggcttatagaataactcttgctaatcatttccagagttgtattcaatgtttttttttgtgttcgtcttgattcaaggagccatgcaagagtgtatgagtttagttcggctaagtaattagctcatgagggcttgaattatcggttctttttgaggattgaggatttgtgcaactgaaacctttgatcagttgctcatgttgagaagctaatttcttgtcatatttacatgtaataaagtccctctactacagtaataaattagtatttcctatggtccaattaag

SEQ ID NO: 99826 - DNA, 403 bp, Zea mays
gcacaagccatggcgtccatgaccggcctctcgcagggcgttctgcccagcaggcgcgccgtcaacagggccaggacggccgccgtcgtcagggcgtccgccgaggcgcaggctcaggctcaggcggtccgtcgcgccgtgctcgggctggtggccactggcatcgtcggcggcgccttgtcgcaggcggtgcacgccgagaccgtcaagaccatcaagatcggagccccgtcgtcgcccttcggtggactccccgggactctgaactctgaccaggcgagggacttcgacctccccttgaaggagcggttctacctgcagccgctgccgtcggcggaggcggtggctagggtgaagacgtctgcgcatgacatcatcaacctcaagccactcatcgacaaga

SEQ ID NO: 99827 - DNA, 348 bp, Zea mays
gaacgacaagtccgttaaggaccttgtcatgctgctgttcgagacggctctgcgtggcttctggctttagcctcgacgatcccaacacctttggcagccgcatccaccgcatgctcaagctgggcctgagcatcgacgaggacgaggaggctccggaggctgacaccgacatgccccctctggaggatgacgctggcgagagcaagatggaggaggtcgactaagctgggtttattcttatggaggaaagagagagaacatcgggtctgttctgagggtcttaccacttatgctattatgcaatctgctgatggtatgctagtgctactattgtctgtgctggcttct

SEQ ID NO: 99828 - DNA, 469 bp, Zea mays
  unsure (1)..(469): unsure at all n locations
atcggacagttccaccacattctggcgccgccttcgtctgatcctggaggcaattggagcggctgcaagtcggatcctggtggatgcagcgcaacacagatcgcaaccctccaaggactgagaagtggaatgttgacatctctgagacagtctgaaagcaaaccgaaggcaggggtgttcatcaactcctgcttcgcgcattgctagagtgagctacaggacacatggttcgcaccaaattctccatccatatataacaagaaaattgcagaggtggtaggtgattggtactttgaaagaggagctgacgtggagattgactgcgcctatccctgtgattcacagtcttgtcgcaaccttataccaattgataaggaactgaggatgtattangagttcggcagacgattatactcaattatcatcataataaaaaacactcttctaaattgtgatgatgttatgttac

SEQ ID NO: 99829 - DNA, 468 bp, Zea mays
cgctggtcggcgactacgggttcgacccgttcggtctcgggaagcccgtggagtacctgcggttcgagttggactcgctggaccagaacctggccaagaatgaggccggcggcatcatcggcacccggttcgagtcctccgaagtcaagtccaccccgttgcagccctacagcgaggtgttcggcctccagcggttccgcgagtgcgagctcatccacggccgctgggccatgctcgccaccctcggcgccctctccgtcgagtggctcaccggcgtcacctggcaggacgccggcaaggtggagctggtggacgggtcctgctacctgggccagccgctgccgttctccatctcgacgctcatctggatcgaggtgctcgtgatcggctacatcgagttccagcgcaacgccgagctcgacccggagaagaggctgtaccccggcggctcctacttcgacccgctcg

SEQ ID NO: 99830 - DNA, 453 bp, Zea mays
ccggtccggaattcccgggtcggcccaagccttcggaccacccatagggggccaggtggtttccaaagccaagtgtgtactaccagtctagcgacgagctagctcgggcggcagcaggcagccatcatgtcggaggagaagcaccaccacttcttcaaccaccacaagaaggacgaggagcagcccgccggcgagtacgggtactccgagaccgaggtggtcaccgacaccggcgagggcgagtacgagaggtacaagaaggaggagaaggagcacaagcacaagcagcacctcggcgaggccggcgccatcgccgtcggcgccttcgcactctacgagaagcacgaggcgaagaaggaccccgagcacgcgcacaggcacaagatcacggaggaagtcgctgccgcggcggccgtcggcgccggcggctacgtattccacgagcaccacgag

SEQ ID NO: 99831 - DNA, 426 bp, Zea mays
cccacgcgtccgggcggcgcgggcggacaaggagcaggcggaggaggagttgtgcgaagccacaatgggtatctcgcgtgactcgatgcacaagcgccgagccaccggtggaaagcagaaggcctggaggaagaagcgaaagtatgagcttggtcgccagccagccaacaccaagttgtcaagcaataagacagtgaggagggtccgtgttcgtggaggtaatgtgaaatggagggctcttcgccttgatactggtaactactcatggggaagtgaagctgttacccgcaagacccgtatcctcgacgtggtctacaatgcatcaaacaatgagcttgtgaggacacatacccttgtgaagagtgccattgtgcaagttgatgctgccccattcaagcagtggtacctgactcactatggagttga

SEQ ID NO: 99832 - DNA, 407 bp, Zea mays
agcttttggagattgcccaagtacccgatgagcatgtatgttgctgtttctgtgtggcttaagtttcataatctgttccatgatttcaccaccagccttttgtagtaagagctacacaaccttttctaattttcttgtatctctatccaggtgaatgaatttaaatcaatcgagaagtttaagatattcaacactaacaacttgtgggtgaaccttaaagctatcaagagactcgtagaggctgaggcacttaagatggaaattattccaaaccccaaggaagttgatggtgtgaaagtccttcaactcgaaaccgcagctggtgcagctattcggttcttcgacaaagcgattggaattaatgttccccgctcaaagtttctcccagtgaaggctacatctgatct

SEQ ID NO: 99833 - DNA, 420 bp, Zea mays
cccacgcgtccgtgggaatggaaaaacaatgcttgccaaagctgttgcatcagagggtgaagcaacattttttaatgtttcggcttcttcattgacatcaaagtgggtaggagaagctgaaaaacttgtcaggacacttttcatggttgcaattgatagacaaccatctgttatttttatggacgagattgatagtgtcatgtctacaaggttagctaatgagaatgactctagcaggcgtctgaaatctgaatttcttatccagtttgatggggtgtcctcaaacccagatgatctagtaattgttataggggctactaataaacctcaagaattggatgatgctgttcttcgaaggctggtaaaaagaatatatgtgccactacctgatccaaatgtacgaaggttacttctgaaaaa

SEQ ID NO: 99834 - DNA, 470 bp, Zea mays
  unsure (1)..(470): unsure at all n locations
cgctcactccagccattacccgcagctagcaaacaaatggccaccgtcctgagcagccccggcgcgccggccttctccgtctggctccgcgccgcgccagcgcccactaccgtggccatgacccgtggcggtggcgccagcagcaggctgcgcgcgcaggccacctacaacgtgaagctcatcacgccggagggggaggtggagctgcaggtgcccgacgacgtctacatcctggactacgccgaggaggaaggcatcgacctgccctactcctgccgcgcggtgtcctgctcctcctgcgccggcaaggtcgtgtccggctccgtggaccagtccgaccagagctacctcgacgacggccagatcgccgtcggctgggtgctcacctgcgtggcgtaccccacctccgacgtcgtcatcgagacgcacaaggaggatgtacctatctnctaagcagattaataaagcac

SEQ ID NO: 99835 - DNA, 363 bp, Zea mays
  unsure (1)..(363): unsure at all n locations
cggtccggaattcccgggtcgaccgactcgtccgccgagaccttcgccaagaaccgcgagctggaggtgatccactcccgctgggccatgctncggtcgctcggctgcgtcttgcccgagctgctctcccgcaacggcgtcaagttcggcgaggccgtctggttcaaggccggctcccagatcttcagcgagggcgggctggactacctcggcaaccccagcctgatccacgcgcagagcatcctcgccatctgggcctgccaggtcgtgctcatgggtgccgtcgagggctaccgcattgactgctggccgctcggctaggtcgtcgacccgctgtaccctgtcggctgcttctacccgctc

SEQ ID NO: 99836 - DNA, 420 bp, Zea mays
cccacgcgtccggccagagagaagacactttctgatcagtttgaggccaagcgtgcaaagagcaaggcaagccgtgagaggaagattgctaggagggaggagaggctggcccagggcccaagagaaccaacagcacctgtcgcagccccagctccatctactggggtgccaaagaaagcaaagaagtgaagtatggaaacaaagctgtagctttttggtactatataagcatgactttggagcacctgaagtattttgctgttatatagatcgtgtctcaatattctgagtcttgtatctctaccgttctgttggataatgcatgccgtaagagttgtttatggagcttttgttgttacaggacccctaaaaatgtttgtttgacggatgtttggaattgtggtcatgtttatgaaaaac

SEQ ID NO: 99837 - DNA, 403 bp, Zea mays
accggtccggaattcccgggtcggaccaagccttccgcggacccttggccggacccgtggggtttttggagacttgcaaagtgcaacaatatggatttacatcaaatcaagtggcgccttctcttgactgggagcaatatgtgtctgaaatagcaactgatatacttacagaacaaagccctaaaaggctatttgctgtacgccagaaattctatgaattactcgtcaattggatcccacccgaaagtattttgaagaagttgttggcagaattactgaggaagttagatgcggatctgaaacatgagatctgtcactgggccggacattatgaacacaagatgcgcctcggatcaaaagctatttttcatctaaaagctttcggggccaaattcatgagcgt

SEQ ID NO: 99838 - DNA, 373 bp, Zea mays
agccttccgcatggctgttgatgtccttgaagggaggcattatcgcttacaacacccctgggttggaattgtcaatcgctcacaagctgatatcaccaagaatgtcaatatgctctcaacaggacgcaaggaaaaggagtactttgagaatagtcctgaatatggtcacttggcacaataaatgggtgcaaaatatcttgccaagcttttgtcacagcatttaaaggctgtgatcaaggcaaaaattccaagtattatagctatgattaacaaaacaattgatgaaatagaaacccaattggatcgacttggtaagccaattggaagtgacgcttgggctcaattgtacacaatcttggatatgtgtcgggca

SEQ ID NO: 99839 - DNA, 448 bp, Zea mays
accggtccggaattcccggggggaaaatgatttcttaaaaaagaggagtgacccggtctaccggagcgtacggtgccgatcccgtcgccggcgctacccctcaatcgcgagcaacttcttccggattcgcaccaagctctccacaattctatcgctatgctgcggaaggccgtcgtcgccttcatcgcctgcaccgccttcttcctcgccttctctgcctactcccgtcgccagggcgttgcagaggttcaattaccagcagttactcacagggtctacctagatgtagaaattgatggccaacacataggtagaattgttattggtctctatggggaggtcgttccaaaaacagttgaaaactttagggctctttgtacaggtgaaaaaagtgtcgggtccaatggcaaacctcttcactataaaggaacaccattccatcgtatta

SEQ ID NO: 99840 - DNA, 426 bp, Zea mays
cccgtctcccttcgggccgctgtcacaggtggcccacggctcgcctcccgtctgcgggtccaccgcgtcggcgccgccgtcgcccagcttcccaccacgaatccggaggtagcttctggggagaagaagatcagatggtcatcaagggctgtgcggtcttttgcgatggcagagctggaggcccggaagatgaggtaccctaccacaggcaccgaggggctcctcatgggcattcttgttgaaggaactagtggcgcagcaaaacttttgcgtgctaatggaaccacacttctcaaagtgcgtgaggaggcagcgaatgttcttgggaaatcagaaatgttttactttagtcccatgcatccaccattgacagaagctgcacaacgagcccttgattgggctgtcaatgaaaaattgaaatcaggt

SEQ ID NO: 99841 - DNA, 501 bp, Zea mays
cggtcccgaattcccgggtcgacccactcgtccgtaaatcttttcctgattctcattgcgaacagggactcaaacaagagtagtagcagcgcttgtggtaaaaggggttggtggacacccctgctattgacagctggggttgcctccgctaaatacttcctgcgtcacatagcatggaggaattctgtctcacaaacacgtcaaaacatctctcaacactatgatctgagtaatgaattcttctctcttttcctggatccatcgatgacttactcttgtgccatcttcaagacggaagatcaaagcttagaggcagcccagctacagaaagtttgcctcctaatcgataaggctaaagtggagcgagatcaccatgttcttgagattggctgtggttggggcagcttagcaatccaattggtgaagcacactggttgcaaatacactgggatcacattatcagtggagcaattgaaatatgcacagagaaaggtgaaagaa

SEQ ID NO: 99842 - DNA, 405 bp, Zea mays
gcggcgagcagcatctccgccgaccgcgtccccgacatggagaagcggaagctgatgaacctcctcctcctcggcgccatctcgttgcccaccgtcggcatggtcgtcccctacggcgccttcttcgtccctgccggctccgggaacgccggcggcgggacctacgcgaaggacaagctgggcaacgacatcacggtggaggcgtggctcaacacgcacggtcccaacgaccgcacgctcgcgcaggggctcaagggtgaccccacgtacctggtggtggagcaggacaagacgctggccacctacgggatcaacgccgtgtgcactcacctcggctgcgtcgtgccgtggaacggcgccgagaacaagttcatctgcccatgccacggatcccagtacaacaac

SEQ ID NO: 99843 - DNA, 329 bp, Zea mays
taccggtccggaattcctgggagccaccattccgctgggctttgcccccaaccaagctaagttattaaactctagacccccgctgtagcgtcgaggacaggatagggtacagtatgataaatgatgctgaacagaacggcttgattactccttgaacgagcgccagggttgtatcatccagccgggcaactggttcaactcctgtcaccataggttcgtggatcaaaggttcactggttccacgcttgacatgaccggtatcgtagttgaatccggggagtgggctattgtagggggcaccgttcagtttgtcatggcaaacggtgtca

SEQ ID NO: 99844 - DNA, 450 bp, Zea mays
  unsure (1)..(450): unsure at all n locations
cccacgcgtccgcgccgctcacctccaggggctcccagcagtaccgcgccctgacggtgccggagcttacccagcagatgtgggacgccaagaacatgatgtgcgccgcggacccgcgccacggccggtacctgacggcgtccgccatgttccgcggcaagatgagcaccaaggaggtggacgagcagatgctgaacgtgcagaacaagaactccttctacttcgtggagtggatccccaacaacgtcaagtcgacggtgtgcgacattccgcccacggtgctgaagatggcgtccaccttcatcggcaactccaccttcatccaggagatgttccggcgcgtgagcgagcagttcaccgccatgttccgcangaaggccttcttgcactggtacacggnggagggcatggacgagatggagttcaccgaggccgagagcaacatgaacg

SEQ ID NO: 99845 - DNA, 431 bp, Zea mays
gatgtgcagaagttatctgcagatgaactgctcgagcggcgtcaggagattaaggagttgatggagaagttaaagatgccatcagacgctgacttaatgaaaatcgcaattgatgacttaaataattcttccatttcactggaggatcgccaacgcgcactgcaggaacttttagttcttgttgagcccattgacaatgctaatgatcttgaaaaacttggagggctccttcctgtgattcaagagcttaataatgcaaatgaagaaatacggaccacctctgcatgggtccttggtacagccagtcagaataatgaacttgtacaaaaccagatccttggttatggagctttggcgaggttggtgaagatgggttattccacatctacagaagaagctgcaaaagcattgtatgctatatcatctttgat

SEQ ID NO: 99846 - DNA, 464 bp, Zea mays
  unsure (1)..(464): unsure at all n locations
ctcctaaagctgctcctgccaagaagggtgatgccaagacccaggccttgaaggttgccagaggctgtgaagtctggggcagtcaagaagaagaccaagaagatccgcacgtctgtgacatttcaccgtcccacgaccctgaagaaggctagggaccccaagtacccacgaatcagcactaccggaaggaacaagcttgatcagtaccaaattctcaagtacccccttaccacagaatcagcgatgaacaagattgaagataacaacactctggtcttcattgttgacctcaaggcagacaagaagaagatcaaggctgccgtcaagaagatgtatgacatccaggcaaagaatgtcaacaccttgatcaggcctgatgggaagaagaaggcttacgtgaagctgactcccgactatgatgctctngatgtggccaacaaaatcggaatcatctaagtgctgca

SEQ ID NO: 99847 - DNA, 428 bp, Zea mays
gggtcgagccacgcgtgcgctcggcgatgtcaagggcgcctccgaggaggtgaagcagctggaggaccaggcggcgggcatcatgaaggcggcgcgcgccgagatcgcggcggcgcttaacaagatgaagaaggagaccaccgcggagctggaggccaagctggacgaggggcgcagccgtgtggaggccgagctcgtagaggcgctcgccaacctcgaggcgcagaaggaggaggctgttaaggcgctcgacgcccagatcgcctcgctcagtgatgagatcgtcaagaaggtgctcccatccgcgtgatgaaaccaaaccggccctgccttatcctacgactatagttacatgaacatcataaattaatgataattttgaagaaattggccgatgactccgacactgtactcatgaaagattattg

SEQ ID NO: 99848 - DNA, 429 bp, Zea mays
ctgctggcaaaatttatgttgagatagagagagcaagattgatcaaaaggcttgcaaagatcaaagaggagcagggaaagattgacgaggctgctgatttgatgcaagaagttgctgtcgaaacatttggctccatggcaaagacggagaaaattgctttcattcttgagcaggtccggctatgcctagatcgtcaagattatgtccgagcacaaattttatcaaggaaaatcagtactagagtatttgacgcagatccatcaaaggaaaaaaagaaaccaaaggaaggtgacaacattgttcaggatgctcctgcagatattccttccctcctagaattgaagcgtatctactatgaactgatgattcgatattacttgcacaacaatgattacctggaaatctgtcgttgttacaaggctatttatg

SEQ ID NO: 99849 - DNA, 418 bp, Zea mays
cccacgcgtccgctgcccttcgccatcgccatggaggggcccaaggtgtgggcggcgggctggcagacagcagtcgccgagatcggtcccaacttcgtctggtgggtggcggcgcagagcgtgttctaccacctgtacaaccaggtgtcctacatgtccctggacgagatctcgccgctcaccttctccatcggcaacaccatgaagcgcatctccgtcatcgtcgcgtccatcatcatcttccagacgcccgtccagcccatcaacgcgctcggggccgccatcgccatcctcggaaccttcatctactcccaggccaagcagtagccggccttggcgcgcgcgtctggctctcaggcctcaggtcagttcaccggcgaatcagctcggcgctcgaagatataacagattatataac

SEQ ID NO: 99850 - DNA, 434 bp, Zea mays
  unsure (1)..(434): unsure at all n locations
cccacgcgtccgatccaagtggaaaaatcgtgtatgatgagtataaccatgagcgctacccacctggagaccccagcaagcgtgcatttgcctactttgtgctgagtggtgggaggttcatttacgcatctttgctgcgacttctcgtcttaaaatttgtcctaagcatgtcagcaagtaaggatgttctcgcgcttgcctcacttgaggttgacctctcaagcattgagcctggaaccacggtgacggtgaagtggcgtggcaagccggtcttcataaggcggaggacagaggatgatatcaagttggccaacagtgttgacgtcgcatccctccgncacccagagcaagatgcagagcgcgtcaagaaccccgaatggctggtcgtcattggggtctgcactcacctgggctgcatccccgctcctaatgca

SEQ ID NO: 99851 - DNA, 429 bp, Zea mays
gccgtgtgaaccagacctatgtcattgctacatcaaccaaagttgacatctctggtgttgatgtcgccaagtttgatgacaagtactttgccagggagaagaagcagaaggtgaagaagaccgagggcgaactttttgagacagaaaaggaggcatccaagtcactgcctgacttcaagaaggatgaccagaaggctgtggattctgctctgatcaaggctattgaggctgttccggagctgaaaacctatcttggcgcccggttctctctcagggatggtgacaagccccatgagatggtcttctaagctcttagttgtggagttcggaggaaagctgtttgtctgtgttcttgtacttctgagttttgtaccagtagcgaatgtttcattgtgttgaaagcttcctgccaaatattataagatctaa

SEQ ID NO: 99852 - DNA, 428 bp, Zea mays
cccacgcgtccgcggacgcgtgggcgaaccttagtcaggcagcgtgaggagggagagttgagggaccgaggcggcgtcgggcgagatgaagcttaacgtcaagaccctcaagggcaccaacttcgagatcgaggcgagccccgatgcatcggttgctgatgtgaagaggatcattgagaccactcaaggtcagagtacctaccgggcggaccagcaaatgctcatataccaagggaaaattctcaaggatgaaaccactttggaaagcaacggagttgctgagaacagcttccttgttataatgttgtccaaggctaaggcatcatcgagtggagcttctaccgctactactgcaaaagctcctgcaactctggcccaacctgctgcccctgtggcccctgctgcatcaggtgcaagaacaccaacac

SEQ ID NO: 99853 - DNA, 429 bp, Zea mays
gcgtgttcccggagctgctcgcccgcaacggcgtcaagttcggcgaggccgtgtggttggaggccgggtcccagatcttcagcgagggcgggcttgactacctcggcaacccgagcctgatccacgcgcagagcatcctgaccatctgggcgtgccaggtggtgctcatgggcgccgtcaaggggtaccgcatcgtcggtggcccgctcggagaggtggtcgacccgctgtaccccggctgcagattcgacccgctcgggctcgccgacgacccggaggcgttcgcggagctcaaggtcaaggagatcaagaacggtcgcctcgccatgtgctgcatgttcggcttgttcgtgcatgccatcgacaccggcaagggtcccgttgagaacctcgccgaccacctcgctgaccctgtcaacaacaacgcct

SEQ ID NO: 99854 - DNA, 400 bp, Zea mays
gacacgatcgcgagcgcacgcacgtaagcacgttgtcggaagctcaagttagaagaaggaccagtgactgagcgatggcggcccaggctctcctctccggccggcagctgctgggccgtcccgtgcagtcggacgtctctaggccgtccgctaggaaggcgcccttcgtcgtcagggccagctgcagccctccaaccaagcaaggtgccgacaggcagctgtggttcgcgtccaagccgtccctctgctacctcgatggcactctgcccggagactatggcttctacccactgggcctatcggacccggagggcaccggaggcttcatcgagcccaagtggctggcctaccgctaggtgatcaacggacgctaccccatgctaagcgcagtgggcgccat

SEQ ID NO: 99855 - DNA, 421 bp, Zea mays
cccacgcgtccgcaaacgcacaaccgcatcctctcatcagcttccttccacattcgtctggagatctcgccgcgtcgccatggacgcgatcgacagcgtggtggatccccttcgcgacttcgccaaggacagcgtccgcctcgtcaagcgctgccacaagcccgaccgcaaggagttcaccaaggtggcggcgcggacggcgatcgggttcgtcgtcatgggcttcgtcggcttcttcgttaagctcatcttcatccccatcaacaacatcatcgtcggttccggctaggcttacaggagtacagggcgactagcatgggagtagtgcaatacttttgggagcaatagataacgaggatcctggtctttcgaatagtattgttaatgaaatttttcgttcggttgcgtttctgatgtaatc

SEQ ID NO: 99856 - DNA, 432 bp, Zea mays
ggcgaagcaggcgctggacaccgccgagggcctgggcctgtcgcgcgaggaggcctgggacaacctcctcgtcgccaccaccttcaacagctacggcggcctcaaggtgctgttcccgggcctgctggccaacgtggccagcggcggcgagaagctccacgagcggctggtggccgagatccgcggcgccgtggccgacgccggcggcaaggtcaccctcgcggcggtggagaggatggagctggccaagtcggtggtgtgggagtcgctgcgcctggacccgcccgtcaagttccagtacgggcacgccaagaaggacctgctggtggagagccacgacgcggtgttccaggtgaggaagggcgagatgctgttcggctaccagccgtgcgccaccaaggacccccgcgtgttcggcgacaccgccgggga

SEQ ID NO: 99857 - DNA, 410 bp, Zea mays
gatgaggccaggctccgggccggcggcggcggcgccggaaagcgcaagaaggccgccgggagcggcaagcccaagcgccctccctccgccttcttcgtcttcatgtctgaattcaggcaggagtaccaggcgcagcaccctggcaacaagagcgttgcggccgtgagcaaggcagcaggggaaaagtggcgctctatgtcagagcaagagaagcaaccctatgtggaccaagctgggcagaagaagcaggactatgagaagactaaggcaaatattgagaaggagagcacaagctcaaagaaggctaagactgatgacgacgatggctcgaagtccgaggtcgatgatgaggatggcgggagtgacgaggataacgacgacgacgagtaaatagtatttccgctgttgtg

SEQ ID NO: 99858 - DNA, 246 bp, Zea mays
agaagacgaagtccgtcatgcgggtgacctgggaaacattgttgcagatgctgagggcggagccgaggcaaccattgttgatacccagattcctttgactggcccaaattcagttgttgggagagcatttgtggttcatgagcttgaagatgatttggggaaagggggccatgagctcagcctttttactggaaatgctggtggaagactggcatgtggggttgttggcctgactccattgtaggt

SEQ ID NO: 99859 - DNA, 431 bp, Zea mays
  unsure (1)..(431): unsure at all n locations
gacacttttaagatggataccaaaatagaagaccatacaaactttatcacagacataagaggcagaactaattcaactcagttggctacatcatcttctgacggaactgttcgactttggaatgctgctgatgaaagtggcgctttacaaacttttcatgggcataggtctcatgtaacatcagtagattttcacccaagattgacagaggttctttgctcttgcgacgacaatggagaaattctcttctggacagttggtcagactacatctactcatgttttgcgggtgaaacanggtggaactggaagagtcaagtttgaacctcgaagtgggcagctcctcgctgtggcagctggaagcatggtgaacatttttgatgttgaaaagcaatccagcttaccctgccctccaaagggtcacaatagtga

SEQ ID NO: 99860 - DNA, 370 bp, Zea mays
cagcgccactgtccagtgcgcgcgtcaagcttgcttagctagccgccatggccttcctggccgccgtctccgtgaagcccgtggccatcaagggtctcgccggcagctccatctccggaaggaagctcgccgtcgccaggccgtcggcccgctccatgcgcaagccccgcgcaggcgtcgtggtggccaagtacggcgacaagagcgtctactttgacctcgacgacatcggcaacaccaccggacagtgggacctctacggctctgacgcgccctcgccctacaacccgctacagagcaagttcttcgagacgttcgcggctccgttcaccaagagaggtctgctgctcaagttcctgctgctgggcgg

SEQ ID NO: 99861 - DNA, 377 bp, Zea mays
cccacgcgtccggcagccgctcgccgcgctcgtgccccgcgagcagcgcttcatgttcgagggagacgagcgctgcggccccgacatatggaatacaacctggtatcctaaggctgcagatcatgtaactaccgagaagacatggtatgttgttgatgcaacagacaagatcctaggcaggctagcattcaccattgcagtacatatcaggggaaagaatgaacccacttacactcccagtgtagacatgggagcttttggtattgtggtcaatgcagataaggttgctgtttctggtaaaaagcggtcacaaaggcttaataggaggcactccggaaggcctgaagggatgaaagaagaacctttgaaccaacttc

SEQ ID NO: 99862 - DNA, 421 bp, Zea mays
gtcccgagtggtcaatgtcggttctactccagggattactagatcaatgcatgaagtggggttagacaagagggtaaaggtgttggattgtgctggtgttgttatgctcaaatcttccaacagtggtgtgtctgtagcccttcgaaactgcaaaaaggttgagaaaatagaagatccagtcgctcctgttaaggagatcctaagtatttgcccacatgagaagttgctgtctctatacaaggttccaaactttggttcagttgatgatttccttcagaaagtagcaactgtacgtgggaaattgaaaaagggtggtgtagtggatgttgaagctgcagcgagaattgtgcttcatgactggaatgaaggtaaaataccatattttacactgccgcctaaaagagatgctggggaggactca

SEQ ID NO: 99863 - DNA, 419 bp, Zea mays
ctcaagtcgagcgggcgcaccggcgtgatcgcctcggaggaggaggacgtgcccgtagcggtggagcagagctactccggcaactacatcgtcgtgttcgaccctctcgacggctcctccaacatcgacgccgccgtctccactggctccatcttcggcatctacaaccccaacgacgagtgcctcgccgacgtcgacgacaatgacaccgtgagtgctaattaatctcatctcccttaccttctttctgttctgactggctcattacgtgacaattctatctccaacactacactacgtacgtacgcgcgcgcagcttgattcggtggagcagaggtgcatcgtgaacgtgtgccagccggggagcaacctgctggccgccggctactgcatgtactcgagctcggtgatcttcgtgc

SEQ ID NO: 99864 - DNA, 418 bp, Zea mays
gggaaaggaagggagttcttcctctacgccagcagcaggagaggttactacggagtgtggcaggagttcgagaagcagtaccctgacgccaatgtcctcctggtcaccgtgaccgacgaggagtcgaggcgcatcgagcagcagtcggacgagcagaccaaggcggagatcatgcaagtgctgcggaagatgttccccggcaaggacgtcccggacgccaccgacatccttgtcccgagatggtggtccgacaggttctacaagggcaccttctccaactggccagttggcgtcaaccgctacgaatacgaccagcttagggcaccggttgggagggtatacttcaccggtgagcacaccagcgagcactacaatggctatgtccatggagcctatctttcaggtatcgactccgctg

SEQ ID NO: 99865 - DNA, 408 bp, Zea mays
cccagccgcacgaaaccctaacgctgccgccgcttcacaggtaagccgccgccatggtggccggttccggcgtatgcgcgaagcgcatcgtggtggacgcgcgccaccacatgctgggccgcctgtcgtcgattatcgccaaggaactgctcaatgggcagaaggtggtcgtcgtccgctgcgaggagatctgtatgtcgggtgggctcgtacgccagaagatgaagtacctccgctttctccgcaagcggatgaacaccaagccatcccatggacccatgcacttccgcgccccgtccaagatcctgtggcgcaccatccgcgggatgattccgcacaagaccaagaggggggaggcggctctggcgaggctcaagacgtacgaaggcgtaccgccgccgtacgaca

SEQ ID NO: 99866 - DNA, 441 bp, Zea mays
  unsure (1)..(441): unsure at all n locations
cccacgcgtccgcccacgcgtccgcgacacgaaccaccaccaccaaccagcagccgcaggacgcacccagcgcaaagcgatggcgtcgctcaccatgatggcgtccttcgccgccgtggcggtggccgcgccctcgcgccgcggcaccttcgccgtggtcaggtccgccaaggtcgaccgctgccaggagcccgccacgctagcagcaaccgaggccaggcccgccgccgacggacgccgcgccgtcatgctcgcggctgctgcggcggccgtggcagccatcggcggcgccggcgccgccatggcgggccccaagaacgggacccccgaggcgaagaagaagtacgcggccatctgcgtcaccatgcccaccgncaaggtctgccacaactgagcacgcncgcgttgcagctgcagggccggngggtggtatataattaa

SEQ ID NO: 99867 - DNA, 423 bp, Zea mays
gcccaacccgggggtgcgcgaccccagcaccggcctcagctgcgaggacatgctgtacgcccagatcgacgccgtgtacgccgccatgaaggccatggggcacacggacgtgggcgtccggatctcggagaccgggtggccgtccaggggcgacgaggacgagaccggggccacggtgcagaacgccgtcgcgtacaacggcaacctcatgcagagggtcgccatgagccaggggacgccgctcaagcccaacgtgcccgtcgacgtctacgtgttcgcgctcttcaacgagaacatgaagccagggcccacgtcggagcgcaactacgggctgttctaccccaacggctcgccggtgtacgcgctcagcgccggctccggcggcggttcaggtcccggcgggtcgctcaacccgtactacac

SEQ ID NO: 99868 - DNA, 423 bp, Zea mays
cgcaaccatgtcgaggaggaagaccagggagcccaaggaggagaacgtcacccttggagccactgtccgtgaaggagagtatgtctttggtgtcgctcacatctttgcatccttcaatgacaccttcattcatatcactgatttgtctgggagggaaactctggttcggatcaccggtggcatgaaggtgaaggctgaccgtgacgagtcgtcaccttacgctgctatgcttgctgctcaagacgtcgcacagcgctgcaaggagcttggcattactgcactgcacattaagcttcgcgccaccggaggcaacaagaccaagacccctggacctggtgcccagtctgccctcaaggcgcttgctcgttccgggatgaaaatcggacgcattgaggacgttaccccggtccccactgacagcac

SEQ ID NO: 99869 - DNA, 338 bp, Zea mays
gattcccgggtcgacccactcgtccgtccacgcgtccggtgcacccctagccattcaagcctcctgctccagaagcagctcaatgatcttgcgaagaatcccgtggatggttactccgcagatcttgtaaacgattgcaacttccttaagtctcacttcaccatcatctgcccgttcaacaccaattattactgatacctcttctatgcattaatgtctttatcccattactataccatcttttcttcatcttcactaccaacttcagttatttagcatactattgtctattcagactgacgtctactcattaatatatgacatgcattattaatatt

SEQ ID NO: 99870 - DNA, 417 bp, Zea mays
gtttcagtggctctgttaagttgccccatatccctcgtcccaagatgaaggtgtgcatgcttggtgatgcccagcatgttgaggaggccgagaagatgggacttgactacatggatgttgaggctctcaagaaaatgaacaagaacaagaagcttgttaagaggcttgccaagaagtaccatgctttcttggcatcagaggccatcatcaagcagattccccgtctccttggtcctggtctcaacaaggcaggcaagttcccgaccctggttactcaccaggaatccctcgagtccaaggtgaacgagactaaggcaaccgtcaagttccagctcaagaaggtcctttgcatgggtgtcgccgtcggcaacttggcgatggaggagaagcagatccagcagaacatccagatgagcg

SEQ ID NO: 99871 - DNA, 329 bp, Zea mays
ttcaagaatggtgccctccactatattgatactattcagcaggcactacctgatattgcgatggggcaaacgaagccgtgtcatattggatgttggttgtggagttgccagctttggaggctacatgtttgatagagatgcgcttaccatgtcttttgctccaaaagatgagcatgaagctcaagtacaatttgcattataaaggggaatttcagcaatatcagctgtgatgggcaccaagagactttcgtaccccaccagagtctttgatgtcattcattgcgctcgcttgaaggtcccttggcacattgaaggtggcatgcttttgc

SEQ ID NO: 99872 - DNA, 429 bp, Zea mays
gtcacaaaacctgaccgatggcggcccggtgctccacagctgcctccgtggtcagaacggggtcgcgagacctctcccgctccttttccttcacagccgcggcgctcccatcggcgcgtctgaggccggtaggagcgtgggtccgcggtggagggtacacctgcaggctccgcgccgtccgcgccatgggctccgcgccgtcgtcgtcccaatccccgtcgccgcacacgccttcaggacaaacccaagggaaagcagattataaatcactgagtgaagaggagtggaagaagcgcctgactgaagagcagtattatgttactcggcagaagggcactgaaagagcattcactgtggaatactggaatactaaaaccccaggcatttatcagtgtgtctgctgcgacacccctctgtttcagtcatcaa

SEQ ID NO: 99873 - DNA, 466 bp, Zea mays
  unsure (1)..(466): unsure at all n locations
actcggtctcggaattgggtcgaccgacgcgtccgattttggtttgttaatatgttttgggcaagcagtgctatgagatggagatgatggtgaggcgtgatctttctataggttaaatgaacagattatccaacagctgatggaacctgcattagagatattatgttgatgtcacagatttagttgatgctcatgtgaaagcgctcaacaaggcagacactagaaaagtcagtatttacaacgttggaacaggaagagatagagaggcccgcacatagttaatctgggacaacatatctctgtactggccatagaggacaacataaaaaatcaaaagttgaagaatcaccaacggtgcctnctttgcacccttcagctcaagaacctgggcccgagccagttcaacaagtcatgctcacagctgaagtgctgaaccaacagaattactgtatggaatcaatgaatc

SEQ ID NO: 99874 - DNA, 122 bp, Zea mays
gcaagatcgatcctttgttaatggagatctcgttaattaggagagctaccgctgggacttggtggtttgtgatatatgatccaaccagtgatgaatcaatgcattcacttgtgtacacaaaa

SEQ ID NO: 99875 - DNA, 428 bp, Zea mays
cccacgcgtccgcagacgcgtgggcggtctcgtggggttcatgaaaggcgttgaacaggtgccgcatattggcgactagcaattcaaaaagatcttgcgctacattaggtatggtgttgacggtggagctacccttgtgacgggtggtgataggttgggtgacaagggtttctacatccagccaacgattttctcagatgtccagtacggtatgaagattgctcaggaggagatatttgggcctgtgcaatcgatcctcaagttcaaagacctcaatgaggttatcaagagggcaaacgcgagccagtatggattggccgacggcgtgttcaccaacagcctggacacggccaacaccctgactcgcgcgctcagggccgggactgtctgggtgaactgcttcgacgtcttcgatgctgcgattccgt

SEQ ID NO: 99876 - DNA, 197 bp, Zea mays
atcaccttcaagaacaacgccggcttcccgcacaacgtcgtgttcgacgaagacgaggtgccgagcggcgtcgacgcctccaagatctcgcaggaggagtacctcaacgcgccaggcgagacctactccgtcaccctaaccgtgccgggcacttacggcttctactgcgagccgaaccaaggaccaggattggtcgg

SEQ ID NO: 99877 - DNA, 364 bp, Zea mays
cgtccggatagttcacctcggaccaggcgctgtacagcgacggcgcgtcgcaaccggcggtgagggacttcgctaagaaccagacccgcttcttcgaggcgttcaaggacgccatggtcaagctgggcagtgttggggtgaataccggccggcacggggagatcaggagtgactgcaccggattcaactagtagatcgaccacccattcttttgaagaaaaaaataacagtcgcgtacctgagcgaactcaaccacgttcacgtgacagcacagaactcaatccttagagctaggatgaaaactgacgaaatcgggctaaaaaaccgctcttccggtttatctttatatggtatctcacgatag

SEQ ID NO: 99878 - DNA, 432 bp, Zea mays
cggacgcgtgggcggacgcgtgggtgcgaattagtgaccagacatctgcaatcaagctggctatatgtgaggatattggagaaaggtcatacgattttgctgatgtggcggcgattcttgtgcagatgttgataagacatcctgcagtaggttctgaagcatttcgaagacgatataagattgatgtagatagtgagtgcggtaaaacgtttgtcacaaagctctctgttcacttgttcaatggagacacaagccaggcagctttccgcatattgtctgactacaggaaaggcaaatttggatgggtagcgctggagagacctccaacatgaacaagcgggatatcatagatccttagataaaagacatgtgcttgttcatgtagtatcacacaatttagtgtcgttcattggaccactctcgacagttttc

SEQ ID NO: 99879 - DNA, 420 bp, Zea mays
aacgaagtgcgagcgacccacgtccacacgacacgaaccaccaccaccaaccagcaggggcaccacgcacccagcgcaaagcgatggcgtcgctcaccatgatggcgtccttcgccgccgtggcggtggccgcgccctcgcgccgcggcaccttcgccgtggtcaggtccgccaaggtcgaccgctgccaggagcccgccacgctagcagcaaccgaggccaggcccgccgccgacggacgccgcgccgtcatgctcgcggctgctgcggcggccgtggcagccatcggcggcgccggcgccgccatggcgggccccaagaacgggacccccgaggcgaagaagaagtacgcggccatctgcgtcaccatgcccaccgccaaggtctgccacaactgagcacgcccgcgttgcatgcagc

SEQ ID NO: 99880 - DNA, 421 bp, Zea mays
ccgccggcaaggaaggcggtgttgacaagaaggggcggaagaaggccaagaagagcgtggagacgtacaagatctacatcttcaaggtgctgaagcaggtgcacccggacatcggcatctcctccaaggccatgtccatcatgaactccttcatcaacgacatcttcgagaagctcgccggcgaggcggccaagctcgcccgttacaacaagaagcccaccatcacctcccgggagatccagacctccgtccgcctcgttctacccggcgagctcgccaagcacgccgtctcggagggcaccaaggccgtcaccaagttcacctcgtcctaagctcctttcgagtaggtccttaagcgccgtggcgccttttgactgtatggaatgtttgtcatctgaaagttgatctgagcagtgcaata

SEQ ID NO: 99881 - DNA, 327 bp, Zea mays
  unsure (1)..(327): unsure at all n locations
ttcccgggtcgacgcacgcgtccggcaagtacagctaccgtggcgtcgacctagatgcgcttctcgacatgtccactgacgaccggcntccagctcatcgccgcgcgcgccaggagtttgttcagaggggtctgaagaggaagcccatggcgctcatcaagaaactgcgcaaggcgaaaaaggatgctcctgctggtgagaagcctgagccagtcaagacacatctccgtaacatgagcatagtccctgagatgatcggaagcattcgtggcgcctactatggcgagacctaccaccaggctgagatctagcctgtgacgaacgggg

SEQ ID NO: 99882 - DNA, 424 bp, Zea mays
gcagttcctaggactcgacaagatgctacccaagtccggcgacccgtgctaccccggcgggcccctcttgggcccgctcggcttcggcaagaccgagaaggagatgaatgagcttaagctcaccgagatcacgaacgggacgctcgacatgctcgccatcctcgggtacttcatacaggggctcgtcaccggcgtcggcccgttccagaacctgctcgaccacctggccgaccccgtcaacaacaacctgctcaccagcctcaagttccactagaacgtggtgcatcaacatacctgctgctgccgccgtcgccgacagttgttcgctgtggaaagctagatgcatgcgtgctgtaaaggaacctgaagcgctgcatcggtcatgattcatgcctggccagcctgctgactgtaacaacaaact

SEQ ID NO: 99883 - DNA, 433 bp, Zea mays
ctgcgggttgcttcaagattgagaagtttggtgatctgatactgaatgcaactgaaccacagggggttctttatgggtatatgatgattggttgaaaagtatctcatcatacacagcattctctcacattgtgcttattctacgtgcacttcatgtgaataatgataaggcaaagatgttgctcaaacctgacaaaacaattgttactgaaccacattatatatggccaactctgaatgatgaacagtggatgaaggttgaatgtgcactaatggacctcattctttccgattatgctaagaaaaacaatgttaatacttctgcactcacacaatctgaaatgcgagatatcatccttggtgctgaaattgctccaccatcacagcagaggcaacagattgctgaaattgagaaacagtcaagagagacgact

SEQ ID NO: 99884 - DNA, 362 bp, Zea mays
  unsure (1)..(362): unsure at all n locations
cccacgcgtccggtcgagtgccacttcgaggccgtgtcggggcttccggtcgtcgacagcgggctcagatgcgtcggggtgatcgtcaagaacgaccgggcaagagcctatcatgggtccaagacgaagatatcggaagtgatgacatctccagctatcacactatcgtctgacataaccgtgatggatgctgctgttctcatgctcaagaagaagatccacagattaccagttgtaaaccaggacgaanaagtaataggtatagttacccgcgctgatgttcttcgcgtgtttgaaggcatgttgaagatttacgagcgcagatacccatgctcagaagccacaatcttttggaaatatgt

SEQ ID NO: 99885 - DNA, 344 bp, Zea mays
gcttgagaacgtaagattctacaaggaagaggagaagaatgacccagagtttgcacaggggcttgcctccctagcagatctttatgttaacgatgcatttggaacagcccacagggcgcatgcatcgaccgagggagttaccaagtttttgcagccttctgttgcagggttccttctgcagaaggaactcgactaccttgtcggagctgtttcaagccctaaacgcccttttgctgccatcgtgggtggttcaaaggtgtcatccaagatcggggttattgagtccctgttggagaagtgtgatatccttctcttgggtggtggtatgatcttcacgttttaca

SEQ ID NO: 99886 - DNA, 396 bp, Zea mays
  unsure (1)..(396): unsure at all n locations
cccacgcgtccgcccacgcgtccgctgccgtgtagggaccgtagactcagcgactgcgagaganggataaggngatggccgggatcggaccgatcaagcaggactgggagccggtcgttgtgcggaagaaggcacccaccgtcgtcgccaagaaggatgagaaggccgtcaacgccgcgcgccgcgccggtgcggagatcgataccatgaagaagtacaacgctggtacgaacaaagcggcatccagcggtacatacctcaacaccaagcgcctcgacgacgacaccgaaaacctcgcccatgagcgagttccaagtgatctgaagaagaatctcatgcaagcaaggctcgataagaagctgacacaggcacaacttgctcagatgataaatgaga

SEQ ID NO: 99887 - DNA, 422 bp, Zea mays
tatccttctatccccattcccatcccgagacaggagaaggcaaggatgctgctcctgagctcccccttcgtgtccgtgtcgccgccgccgccgccgctcagctcccatggcgctcgcccggcgctgcggatcgaggcggccaggcagctgacggggcgggtggtgacgaccaaggcggacaagacggtcggggtggaggtggtgcgcctggctccacaccccaagtacaagcgccgggagcgcatcaagaagaagtaccaggcgcacgaccccgacaaccagttcaaggtcggcgacgtcgtcgagctccaaccctcccgtcccatctccaagaccaagcacttcctcgccatcccgctcccgccccgcgacactcgccgcaagtctcagctcctaccgccgctccagtccgacgacgacca

SEQ ID NO: 99888 - DNA, 418 bp, Zea mays
ggatgatatcattaagctcaaggattattttgatcgaaggaacgaggcaaagagtcaagtaccattgacaaaggctactgtaacaaaggtcgaggttgttggtatgggtgatcgcgtttgtgtggatctttgcagtatcatgcgacctggtgaaggccttctggttggatcctatgcgagaggaatgtttcttgtgcattctgaatgcttggagactaattacattgcaagcaggcctttcagagtcaatgcagggcctgtacatgcatatgtcaccgttcctggtggcaagacaagctacctctcagagttggggtcaggaaaggaagtcatcgtgatcaatcagagtgggctatggcgtactgcaattgtcggtcgtgtgaagatcgaatcaaggcctctgatccttgtagaagcg

SEQ ID NO: 99889 - DNA, 374 bp, Zea mays
tttcatatatgcttaaaacacttccgtaccacaattttggaaggttggatttaacacttgattccaaccaaataattgccaatgttggtcttattggaagaggcaagagcactataatcaatttactacttagattatacgaacctacaaatgggcaaatactaattgatggtgtcccgctcactgagcttgatatcagatggttcagggaaagaattggtttcgtcggacaggaaccacgcttattccgaatggatatcatctctaatattaaatatggttgcccaagagaagtcagtcatgaagaagtgatatgggctgcgaaacatgcctatgctcatgactttttaatggctttgcctgatggttataac

SEQ ID NO: 99890 - DNA, 423 bp, Zea mays
accgggaattcccgggtcgacccacgcgtgcgcaggagtcatggccaccgtcagcgccgccgtggtgaccaccatcgttgcccgctccggggtggccaggcccaatgctctagggctgcctgcgctgagggcgaggagcgagagggtgcggtgcagctacgccaaggacgcggccccagtcagcaccaagggcgcatgcgcgtcgctgctcgccgcagcgggcgcggtgaccgcgtcagcggggcccgcgctggcgctcgtggacgagcgcatgtccacggagggcaccgggctgagccttgggctcagcaacaacctgctggggtggatcctcctgagggtcttcgggctcatctggtccctctacaccatctacacctctgacctggacgaggacgaggagtccggtggcctctcgctcta

SEQ ID NO: 99891 - DNA, 404 bp, Zea mays
  unsure (1)..(404): unsure at all n locations
aacgccttcagcacctacggcgaggtcctcgagtccaagatcatcctcgatcgggagacgcagaggtcccgcggcttcggcttcgtcaccttctccacggaggaggcgatgcggaacgccatcgagggcatgaacggcaaggagctggacggccgcaacatcaccgtcaacgaggcccagtcccgcggcggccgtggaggcggcggcggtgggtacggtggtggccgtggaggcggcggctacggcggtggcgggcgccgtgatggcggtggcggctacggcggtggcggcggctacggtggcggcggcggctacggtggtggtggcggcggctacggcggtggcaaccgtggcggcggctacggcaactncgacgggaactggaggaactgancggtggggcc

SEQ ID NO: 99892 - DNA, 395 bp, Zea mays
cccacgcgtccggtggccgtggaggcggcggctacggcggtggcgggcgccgtgatggcggtggcggctacggcggtggcggcggctacggtggcggcggcggctacggtggtggtggcggcggctacggcggtggcaaccgtggcggcggctacggcaactccgacgggaactggaggaactgagcggtggggcccgcgcggccaagttatcctgttcgctaccgtgatgtttaccctagtccagagggtttatcttcgttcgtgtcgtgtttgttgttgcccatctgtgtttttgattgcaaggtcgctctgtgtcagttgttagtgctgtgttcatcctcggtttcagcagacccatgcatcaaacagcatggactgcggatcgatggatgc

SEQ ID NO: 99893 - DNA, 412 bp, Zea mays
  unsure (1)..(412): unsure at all n locations
cgctctcgccccgcttcctcgccctatcctctccgaagccggccgcgcccgcggcctgggccttcctccccttcacgctgccgctgcgcgctgtgtcggcgccggcgccagcgaggcgggtcttcgagcccgtagccgtcgcggtgtcgtccgagtacgggaccgaaggcgcggagcagcaggacggggagttctccgaggacctcaagctgttcgtcggtaacctgccgttcagcgtcgacagtgcgcagctggccgggctcttcgagcaggctggctccgtcgagatggtcgaggttgtatacgatagaatgactgggcggagtcgtggatttggattcgtgacaatgtcttcagctgaagaagccggngctgctgtcgagcaattcaacggttatacatttcaagggag

SEQ ID NO: 99894 - DNA, 364 bp, Zea mays
gccgtcgctccgttccaggggctcaagtccaccgtcagcctccccgtcgcccgtcgcgcctggagaagcctcggcaacgtcagcaacggcggaaggatccggtgcatgcaggtgtggccggcctacggcaacaagaagttcgagacgctgtcgtacctgccgccgctgtcgacggacgacctgctgaagcaggtggactacctgctgcgcaacggctggataccctgcctcgagttcagcaaggtcggcttcgtgtaccgcgagaactccacctccccgtgctactacgacggccgatactggaccatgtggaagctgcccatgttcggctgcaacgacgccacccaggtgtacaaggagctgc

SEQ ID NO: 99895 - DNA, 383 bp, Zea mays
cggacgcgtgggtttggtttcctctgcttctcattctcccgtgcacttccagttcctgcccagctgcagggctgctccaatggccaccttgtccgccatctctgccaacgtcggctactgcaaggcaccaaccctgagctggaagggaagcggagtaccaggccggattgtggtctccatgtccaccacccgaagaggcctcgtctccctaagacgacgatcccctcggtttcgcgtctacgcggcgaaggcggagacggtgagcaaggtgatggacatcgtgaagcagcagctggcgctggccgcggacgtggggctgacggcggagaccaagttcacggacctcggcgccgactcgctggacacggtggagatcgtcatga

SEQ ID NO: 99896 - DNA, 396 bp, Zea mays
tcgcaaccttgttgaccacctccaggagcggctcggcgtcacagctgcggccttcgcgccggccgtcgtcgtcgcagcgcctggggcgggcggcggggccgcggccgaagaggaagcccccgttgagaagacggagttcgacgtagtaattgaagaagtgcccagcagcgcgcgtatcggcactatcaaagtggtgcgcgtgctcaccagcctcgcgctcaaagaggccaaggaccttatcgagggccttcccaagaagcttaaggaggccgtcagcaaggacgaggccgaggatgccaagaagcagctcgaggaggtcggcgccaaggtgtctatcgtgtgacactaggtatactgactcctttttttttcttcttttttttttaaatttctttc

SEQ ID NO: 99897 - DNA, 385 bp, Zea mays
acgcgccaggcgagacctactccgtcaccctcaccgtgccgggaacctacggcttgtgctgcgagccgcatcaaggagccggaatggtcggcaagatcaccgtcaactaattaagctagctatcgatcgatatccattcatgtattagctgttgcttcctgctttgtactccgccgatctgtccatctctacatgttttcgtcttcacacaacaacctctgctacgactacgtatatatgcatgctactagctgattgattttaacgcgaccaggccgaccccgaaagctagcttggaccaagttttgtacccattaattctaccgatgcatctctcagtttagactcccataatcatacaaactgctagctttcatctgcaaaa

SEQ ID NO: 99898 - DNA, 370 bp, Zea mays
gagatgctgacgaggaaatggcgaacgctgttgaaagacgagagcttactgaactggagcttatggtcatgtggaatcgacttgatattgataggcgtgacgatgagcgggatgccatcataagccttgatctcttgtatagaagggtctagacagagattctgaagagtgaagcaactgctgccatgagattgctcaatgatcttcttaatcttcatgatggatgcgacaatgagaagcggtgtaaagaaactgataaagcgcatgcttgaagtctttacaagaaaggacccattcaatgtggtcttgtctgctgggatcaacatggagaatcgtgaagggcgaactgagctaccggctcaagatgatg

SEQ ID NO: 99899 - DNA, 391 bp, Zea mays
ataccagatatttttgggtaggaccagtagaacaggtctggcctgatcaaaagataggattcgaacttaaggctgtatggatggatgctgctggattctacacatattccatatttgcacttatgttttgggaaacaaggcgttcagactttggagtgtcaatgtcacatcatgttgctactgtcgtcctgattgttctatcttacgtgttcagatttgctagagttggctctatagtattggcaattcatgatgcatgtgatgttttcctggaagtatggaagatgtccaagtacagtcattgtgattggcttgccaatgtttcgtttctgtgttctgttatttcatgggttcttcttcggcttacttattttccattctggattctgag

SEQ ID NO: 99900 - DNA, 407 bp, Zea mays
cccacgcgtccgctacctcaagaaagttgggtacaaccctgataagattgccttcgtgcccatttctggttttgagggcgacaacatgattgagaggtccaccaaccttgactggtacaaaggcccaaccctgcttgaggctcttgaccagatcaccgagcccaagaggccttcggacaagcccctgcgtctgcccctccaggatgtgtacaagattggtggtattggaactgtaccggttggtcgtgtggagactggtgtcatcaagcctggtatggtagtcacctttggtccaactggcctgactactgaggtgaagtctgttgagatgcaccatgaggcgcttcaggaggctcttccgggcgacaatgttggcttcaacgtgaagaacgttgctgtcaaggatc

SEQ ID NO: 99901 - DNA, 353 bp, Zea mays
gccttcctgtatgatatcttctgggtgtttatctccaagagatggtttcatgagagcgtgatgattgtggttgcgcgtggcgacaagaccgacgaggatggtgtgcccatgctgctaaaaatcccgcgaatgtttgatccatggggtggatacagcatcattggctttggtgatatccttcttcctggtcttttagttgctttctcgctaagatacgatttttctgcaaagaagggcttacggtctggttactttttgtgggcaatggtggcctatggctctggacttctaatcacatatgttgcgctgaacctgatggatgggcatggacaacctgcccttttgtacatcgt

SEQ ID NO: 99902 - DNA, 391 bp, Zea mays
  unsure (1)..(391): unsure at all n locations
gcgcacgttcgaggtggcgcagaaggtgtgggccgaaaccttctacgccatggcggagggcaacgtcatgttcgagggcgtcctgctgaagccgtccatggtgacgcccggcgcggaggccaaggacagggccaccccggagcaggtggccgcgtacaccctcaagctcctccaccgccggatccccccctccgtgcccgggatcatgttcctctccggcgggcagtcggaggtggaggcgacgcagaacctcaacgccatgaaccaggggcccaacccgtggcacgtgtccttctcctacgcgcgggcgctgcagaacacctgcctcaagacctggggcggccagccggacaaggtcaaggcggcgcangacgcgctgctgctgcgcgcc

SEQ ID NO: 99903 - DNA, 419 bp, Zea mays
cggaattgccggctcgacgcacgcgtccgctgacgcgtggagctgacgacggtacatcggctcagaggtgcgacgtacgacgacgaggacgggggcgccacacatggcatcggagctctccgccgccgtgccccggttccacggcctccggggctacgccgcgcccaggtccgcggtggcagcgctgccgtccgtgagggtgggcaggaagaggtcgtcgtcgcagggcatccgctgcgactacatcggctccgacaccaacctgatcatggtgacgacgacgacgctgatgctgttcgcggggcggttcgggctggcgccgtcggcgaaccgcaaggcgacggcggtgctgaagctggaggcgcgcgactccggcctgcagacgggtgaccccgtcgggttcaccctcgccgacacgc

SEQ ID NO: 99904 - DNA, 397 bp, Zea mays
  unsure (1)..(397): unsure at all n locations
ggccccgcagctggaccccagcacgccgtccccgatcttcggcggcagcacgggcgggctggtccgcaaggcgcaggtggaggagttctacgtcatcacgtggacgtcccccaaggagcaggtgttcgagatgcccaccggcggcgccgccatcatgcgggagggccccaacctcttgaagctggcgcgcaaggagcagtgcctggcgctcggcaccaggttgcgctccaagtacaagatcacctaccagttctaccgcgtcttccccaacggcgaggtgcagtaccttcaccccaaggacggcgtctacccggagaaggtcaaccccggcagggagggcgtctgccagaacttncgcagcatcggcaagaacgtcaaccccatcgacgtcaaagtc

SEQ ID NO: 99905 - DNA, 394 bp, Zea mays
  unsure (1)..(394): unsure at all n locations
taagcactttgaagtttgctgaaagggtttctggagttgagttaagtgctgcaagaaggaacaaagagggtaaagatataaaagagctggtagaacaagtttcatatctgaaagacacaatatcacggaaagatatggaaatcgatcaacttctgaaggacaaagccaagtcaccaagttcatcaacagatataaatgacagtagccaacagatccgacgactatcatgggctgctggatcaggcgaggccgaatgcgaagataacatgtctgatgatggctgctcagtggcaggaaccgangtgtctgtangtggtgcttcagaggcgacagcagaacgaatgcagaaggccccatcaaggatagngcaggctgttctcacatagaatgggca

SEQ ID NO: 99906 - DNA, 398 bp, Zea mays
  unsure (1)..(398): unsure at all n locations
tcgcgactcgctaccggaaggggcaggaacgggaattccgttgccatcgtcgattggggaggatggggagcagcttgcacccaagcagaagatcagaatcaagctgcggtcctactgggtgccgttgatagaggactcgtgcaagaagataatcgaagctgccaaaacaaccaacgcatagaccatgggtcccgttcctctgcccactaagaggagagtctattgtgtgcttaactctcctcacgtgcacaaggactcacggttccatttcgagatccggacgcatcagcggctgattgatatcatgtatccaactgcccaaacaattgattcgttgatgcaactncagctccctgccggtgtggatgttgaggttaagctatgattctgttggagct

SEQ ID NO: 99907 - DNA, 410 bp, Zea mays
gtcaccttccgcgtgcagcacggctccaaccccatgtacctggccgtgctcatcgaggacgcgaacatggacggcgacgtggtgcatgccgacatcatgcagaacaactccgggtactgggagcccttgcacgagtcctggggcgccgtctggcggatcgaccccagccgcccgctctgcggccccttctcggtgcgcatcaccaacgagtccggcaagcagctggtggcccagaacgtcatcccggccaactacatcgccgacgtcgactaccgctccttcgtccagtatacgaattaacccgaccggccgggcggtgcgcccactgcatgagctagctcgatcggtcacctctgcgaccgtcgtacgtccgagatagctcgttgcttaagtgttcgtgtttagtggct

SEQ ID NO: 99908 - DNA, 420 bp, Zea mays
caccgtcaaaggcaccaggctgagcaacccctctctctctccctcttatccccaaggcgaggagcggagcggagaggagggcccttctgcttgtttctccgctttgcaagatgtcgtccccgagcaagcgccgcgagatggaccttatgaagctgatgatgagcgactacaaggtggagatggtgaacgacgggatgcaggaattcttcgtcgaattcaagggcccggccgaaagtatctaccaaggtggtgtctggaaggttcgggtagaactgcctgatgcatacccttacaaatccccgtccatcggcttcatcaacaagatttatcacccgaatgtcgatgagatgtctggctctgtctgtttggatgtcataaaccagacatggagcccaatgtttgatctagtaaatgtttttg

SEQ ID NO: 99909 - DNA, 411 bp, Zea mays
tgctgctcatcggctccgctcagaacttcctcggctacggctggctctggctcatcggcaccaggcaggcgccggcgctgcccctctggatgatgtgtgttcttatctatgttgggaccaactgcgagacattcttcaacacatccgcacttgttacatgcatacagaacttacccaagagctgaggtcatacagtgggtattatgaaaggatttgcgggccttagcagtgcaatcttgacgcagctgtatgcagtaatgcacacaccagaccatgcaacacttgtcttcatggttgcagttggtccatcgttggttgctcttggcctgatgtttattattaggcctgttggaggtcaccgtcagtccaagatttcatgcatctgagcgacaatgtgaggctctccttttt

SEQ ID NO: 99910 - DNA, 380 bp, Zea mays
ggagatgttcattgggttgattggaatccccttgatgttaactatatcttaactgggggggccgataactctgtccgaatgtgggatcgtcggaatctgggttcaggacgagctggttctccaattcacaaatttgaaggccataaagctgctgttctttgtgttcagtggtcacctgacagagcatctgtttttggaagttctgcagaagatggtttcttaaacgtgtgggatcatgagaaggtggggaagaagaaaaattctaatgtcccagccgggcttttctttcagcacgctggtcatagggataagattgtagacttccactggaattcgtcagatccttggacaattgtcagtgtctctgatgatggcgagag

SEQ ID NO: 99911 - DNA, 217 bp, Zea mays
caggcatgcccataagcactagatggtcacccgagattaagcaggaaatcaaacagagccgggtcaatgttacatcaaaggtggtgaagtacattaaccatgctggaaacgctgatactcgaccctcagtgtttgtgagcgcaacagccattggctattatggtaccagcgaaatccatagctttgatgaatcaagtccctcgggcaatgactacct

SEQ ID NO: 99912 - DNA, 403 bp, Zea mays
cggacgcgtgggcgaaccctgacgcagaagcgctcaggaagaacagccatggctactgtgcgcagccagcttgcgtcgagccgtcctgcgtcgtccaaccgtcatgcgcagccccgaccacctgctttggcccgcgcctgttctcctccaagtccaagaaagaacggaagccaagacctgaagctgccaccccggtcaacccttggcctgagctcatagcagagcccagcgacgcacggtcgatgtcgttcgttgggacgcacgagtacctggcccccgagatcatcaaaggcgagggccatggcagcgccgtcgactggtggaccttcggggtattcttgtacgagctgctgttcgggaagacgcctttcaagggatccagcaaccgggccacgctgttcaa

SEQ ID NO: 99913 - DNA, 353 bp, Zea mays
gtctcattctctgcctcaaggctgcaatgcaagaacctgtcatccctacagagccctgggagcgtgactgctacttgcgcttctttcgccgagaagaggtcggctcctgtccatgccacggctgaggggtctgaggctggtgcggcggagcagccagaagaaccgaaacctgcgaccaagatcgaggaaatgccgctcgagtcgaagcagaagatgatcatggagcagagggcgcggatgaagcttgccaagaaactgagacagcggcgcaagcggctcgtccgcaagaggaagcttaggaagaagggcaagtggccaccgtccaagatgaagaagctcaagaatgtatgaac

SEQ ID NO: 99914 - DNA, 347 bp, Zea mays
gtggcgtcagcacgccccgcgggcaggagggtgaggctgctgagcgtgaggtgcgagcagggagccaagggcggtggcgggctggacgtgtggctgagccgcggggcgatgctgggcttcgtcggagcggtggccgtggagctgaccaccgggaaaggcgtgcttcagaatgtgggattgaccgcgccggtgccgacgctggcgctggcgctcaccggcgcggtcggcgtcctcacggccttcctcatcttccagtccgggacgcgggactgatgggtgaattgtcaaagctcccaaaaggacatgcataaagtctgtcagagtcttgtgctgtgtatgtctatgct

SEQ ID NO: 99915 - DNA, 399 bp, Zea mays
cctccctctccgaaatcaaggtagcatacaccgctgcagtttctagagccctctctggcactcgtgatcccactagtcacgatgcctgccctcgccaagcccgcctcccgcaccgccaagcccgccgcggctccgaagccgaagcctgccgccgccaagccgaaggcggccaccgctggtgcctcccacccgccttacttcgagatgatcaaggaggctatcacggcgctaaaggagaggaccggctccagctcgcaagcgatcgccaagtatgtgggggacaagcacggcgcgtctctgccggccaacttcaagaagatgctttccatccagctccgtgggtccgcagccaagggcaagctcgtgaaggtcaaggcttcgtacaagctctcggacgcc

SEQ ID NO: 99916 - DNA, 380 bp, Zea mays
catcaactgcagcatgatcgtgctcctacgcctgctacaaggttgcacggaggagtagagggacatctggatgggggcggtgcatgtgcacgacgccgccatggcgcatatcctggtgttcgagagcccggcagcgtccgggaggcacatctgcgcccagtccatctcccactggagcgacttcgcggccaaggtcgccgagctgtaccctgagtacaaggtgcccaagttccccaaggatacccagcctgggctggtgcgacagggagccgaggaggggtccaagaagctcgtcgcgttggggctgcacttcagccctctggagaagatcatcagggacgctgtggaggccctcaagagcagaggctacatttcgtagc

SEQ ID NO: 99917 - DNA, 327 bp, Zea mays
ctcgttgcccaccgtcggcatggtcgtcccctacggcgccttcttcgtccctgccggggccgggaacgccggcggcgggacctacgcgaaggacaagctgggcaacgacatcacggtggaggcgtggctcaacacgcacggtcccaacgaccgcacgctcgcgcaggggctcaagggtgaccccacgtacctggtggtggagcaggacaagacgctggccacctacgggatcaacgccgtgtgcactcacctcggctgcgtcgtgccgtggaacggcgccgagaacaagttcatctgcccatgccacggatcccagtacaacaacca

SEQ ID NO: 99918 - DNA, 420 bp, Zea mays
  unsure (1)..(420): unsure at all n locations
gggcgtgccaggtggtgctcatgggcgccgtcgaggggtaccgcatcgccggtggccggctcggggaggtggtcgacccgctgtaccccggcggcagcttcgacccgctcgggctcgccgacgacccggaggcgttcgcggagctcaaggtcaaggagatcaagaacggccgcctcgccatgttctccatgttcggcttcttcgtgcaggccatcgtcaccggcaagggtcccgttgagaacctcgccgaccacctcgctgaccctgtcaacaacaacgcctgggcctacgctaccaacttcgtccccggcaagtgagcgagggcatatacatacttgtatgcgtgtaccgtagacatacgtattcgtatatgtactgcangagatgtaccagtatttgtgaagaagggagcatgggctc

SEQ ID NO: 99919 - DNA, 343 bp, Zea mays
gcgacccgttcatcggcagcctggagacgcccgtcacctccagcccgctcatcgcgtggtacctctccaacctgccgggctaccgcaccgccgtgagcccgctgctgcggggcgtcgaggtcggcctcgcccacggctacctcctcgtcgggcccttcgcgctcaccggcccgctccgcaacacgcccgtgcacggccaggcgggcgcgctcggcgccgtcggcctcgtcgccatcctcagcgtctgcctcaccatgtacggcgtcgccttcttcaacgagggcgacccgtccacggcgcccacgctcacgctcaccggccggaagaaggaggccgacaagct

SEQ ID NO: 99920 - DNA, 378 bp, Zea mays
ctggatttgaactccgcgtgcacccaaatgaagatccctagctagcacttgtcctggggtcgactatgcaaacaaaaccagcaacgccagaggctattgcaaaaaaggctgcctaagatacatctaataccgaaagcatcaatgcctaaagctcaaacagcgatactgttatcgctgaatcataacttgcctgaaatgctgctgctgttgacaagcaagaacagtcatacgatgatgactatgtactacagcaggcactagcaatgtcaatggacggcggtgctgtatgatctgcaactgcgactgactccgctatggcacaagctggtgcatctgaccctgacttagcgttggctcttcaaatgtctgtccaggatg

SEQ ID NO: 99921 - DNA, 391 bp, Zea mays
gcgagagacagactcgtatacccaggcttctgttgacgaggaggacaataatactagggatatggcttcctgcgcgtacgcctcatggtccaagctagtggatccgtccctaggtgtacccgatgttcgtgccgatggacgtggccctgagtatctgctagtaccagcttgagcgcaacatcacaacctacctcaaagtccggttgaccaaacaaatgatggcagtcgtcgtacatgacatccacaactagggcgacacttactccatgcacggactcaggaacttcgtcatctggcacgaagccctgagatcatgtattgcatcaactgcttcttctgagactctcttaaggacgattaatctagagtccgtcatggatggatgcatatg

SEQ ID NO: 99922 - DNA, 408 bp, Zea mays
tgcatttttgctacgagcatcctagaaatgagatggagtggtggtggaattgatgactggtggaggaatgagcagttctgggtcattggaggtgtgtcctcacacctctttgctgtgttccagggacttctcaaggtcatagctggtgttgatacaagcttcaccgtgacatcaaagggtggagatgatgaggagttctcagagctatatacattcaaatggactaccttattgataccttctaccaccttgcttctattgaacttcattggtgtggtcgctggcgtttcaaatgcgatcaataacggatatgagtcatggggccccctctttgggaagctattctttgcattttgggtgacttgccatctttatccctttctcaaaggtttggttggaaggcaaaac

SEQ ID NO: 99923 - DNA, 440 bp, Zea mays
gctgcatggagtggcaacaatgtgcaatgatcctcagctgacagacttcatcgagagtgagttcctcgaggagcaggtggaagccataaacaagatctccaagtatgtcgcccagctgaggagagtgggcaaggggcacggggtgtggcacttcgatcagatgctgcttgaggaagaggcctaaaaagaagaacggacagatgaatgaaggaaacaagtgtgtaatgttgatcaggcggaggaataataatgggtcaactgacaactctgggtcggtggatttgtagttggtttgggttttttagttgtagaacggtgttgccctcctagagagggatgaacacattatgcatgcgatgtgtcagttcggtcggtgctatgctcgttgggatttgattgtcggaaataaaacatgggtgatgaatgtgtaccctccctaa

SEQ ID NO: 99924 - DNA, 421 bp, Zea mays
caaccatctaccagcgactcagcgagcgagagcagcacacactgcacgcagctagctaggagcagcagcagcggcggcgatggcggcctccatgatctcctcgtcagctctggcggtggcgcctcagggcctgccgcccctcggccgccgcgcctcctccttcgccgtcgtctgctccaagaagaagatcaagaccgacaagccctacgggattgggggtggcctgaccgtcgacgtcgacgccaacgggagaaagggcaagggcaagggcgtgtaccagttcgtcgacaagtacggcgcgaacgtcgacggatacagcccaatctacaacgaggatgactggtctcccaccggcgacgtctacgtcggtggaaccactgggcttctgatctgggccgtcaccctcgctgggatcctcggc

SEQ ID NO: 99925 - DNA, 314 bp, Zea mays
cccacgcgtccgcggacgcttgagcggattcatggtcacacacgtggggggctcttagggcgcctcccaggtgtacaaggagctgcatgaggccatcaaatcctacccggacgccttccaccgcgtcatcgacttaaacaacatcaagcatacacactgcgtcagcttcatcacctacaagcccccggtcagcgactataccgagctcgtcggccgtcctcctgcggctagctagctagctagctcctgcgtgagctaatagctagtgccatgcgtagtctatgacgatcggttttgcttcaagtcaccgtgta

SEQ ID NO: 99926 - DNA, 428 bp, Zea mays
  unsure (1)..(428): unsure at all n locations
gcagacagcgaggtggctcccgtgcagcgaccttgccacctcgtcgtcttcggcacccgcttcccctccccgctcgctggcgccttcggctccccccaagaaggcgttgattggtgcttctactggttctaccggaattgcgacgagcagtggtgctggtgcagcgatgagcaggagcaactggctgtcgaggtgggtcagctcctgctccgatgacgccaagacggcgtttgcggctgtgaccgtgccacttctctacgggtcgtccctggccgagccgaagtccatcccgtccaagtccatgtacccgaccttcgatgtcggtgatcggatactngctgagaaggtctcatacatattccgggatccagaaatttcggacatcgtgatcttccgggctcccccaggacttcaggtttatggctaca

SEQ ID NO: 99927 - DNA, 444 bp, Zea mays
  unsure (1)..(444): unsure at all n locations
ccgaggacatctggttccatgtagataagatgtcctctgcacatgtgtatgtgagattggataaaggtgaatcaatggatgacatgagtgagggtttgctggaagactgtgcgcagcttgtcaaagctaattccattcaaggtaataaagtcaataacattgatgtagtttatactccatggtacaatttgaagaagacgccttcaatggatgtgggccaagttggttttcacaaccctaaattggttcgcactattaaagtggaaaagaggatcaatgagattgtgaaccgcttgaataagacaaaggtggaacggaaacctgatttaaaggctgaaagagaggctattagtgctgctgaaaaggcagaaagaaaggcacagcttagagacaagaaacgtanggaagagatggagaggcttgagaaagagaagcaagctgata

SEQ ID NO: 99928 - DNA, 261 bp, Zea mays
cgcgcgcggagctgagcccgtcgctggtgatcagcctgagcacgggcgtgtcgctcggcctgggccgcttcgtcttcttcaacttccagcgggagaacgtggcgaagcaggtgcccgagcagaacggcaagacgcacttcgacgccggcgacgagcgcgccaaggagttctcgggcctgctcaagtccaacgaccccgtgggcttcaacctcgtcgacgtcctcgcctggggctcgctcggccacatcgtcggctactaca

SEQ ID NO: 99929 - DNA, 389 bp, Zea mays
gccgcgggcagagagaagtttgcttcagtcccatgtggcggcggcggtgtggctgttgcggcaggtgcacctgctgctggcggagctgctcctgcagctgaggcaaagaaagaagagaaggtggaagagaaggaagaaagcgatgatgatatgggcttcagcctcttcgactaggttgcacagtcatcacagtattgtttcgggcagtgaaatcaaagggaaaccagagtcatgtttagattttaaccttattttatgttggaaagtactgcaaagactgctaattgtctctgtatttggtaattcagctgtagattgctatgatggttgggatttactcgtgaaccagagtttttctatcttatatcctgaattggttatcccaaaaa

SEQ ID NO: 99930 - DNA, 428 bp, Zea mays
ggaggtggagccctccggcggggacttctggaagcttgaccccattatcgacctgatgaatcgcggcgccgtcggggtgatccctactgacaccgtctactccgtcgtctgtgacctgagtaacaatgaatcgattgagcgccttcgcagactgaaaggcattggagactccaagcctctcagcatcctgtgtcgctcattacgtgacatcgatacctacacaacaggatttcctcaaggcactaaccaagggcaagctaacatttttcgtgttgtcaagcgtgcaatacctgggccttacacatttattttacctgcaagcaagcagtttcctaaacaatgtataaagcatggttcttccacaaggtatgcaaaaaggaggcaggttggcgtccgaattccagatgatcccatctgccaggcaatat

SEQ ID NO: 99931 - DNA, 229 bp, Zea mays
accggttcggaattcccggctggacgccacgcgtccgccgagaatgattaccaagatagaaggcctttgtaatggtatcaagacaggggttgttaagatggtttacatagcaaaagcgcttgccaggccagcttcctacacaaccaagtactttggatgttagcttggtgcacagtccaaatttgatgagaagacagggatttactatgttaatgtgactcatgatact

SEQ ID NO: 99932 - DNA, 282 bp, Zea mays
cagctctgcaggatggtgacttgtacctcttcgaatcacgagcaatctgcaagtacgctgctcgcaaaagacagccagaactggtgaaggaaggaaacctcgaagaggcagcaatggtggatgtttggatcgaggtggaggctaaccagtacaccgctgcactgaaccccattctcttccaggtcctcatcagtccgatgcttgggggatccaccgaccagaaagttgtggatgagaaccttgagaagctgaaaaaggtgctagaggtgtacgaggcacgcc

SEQ ID NO: 99933 - DNA, 429 bp, Zea mays
gacacgcgtacgctcacgcgttcggctcaaggagctggtccccggctgcagtaaggtatggtgaacaggattggtgctagatgagatcatcaatcatgttcagtctctccaaaggcaagttgagtacttgtcaatgaggctcgcagctgtaaacccaagggtcgattttggtgggctagacagctttctgaccacagagtgtggaaggatagcaggcttcaactgcaagaacggaatcgacttggagcaggtaacctggccagaaatgggtgttcatggagcaaggcagctgatgcaacttcaacagcagttctggcatggccatttaacacatccacaccaagtggcttcacagtgggaaaagcttggcgatggccattctcccgtctttagcaactgcagtccctctatcttccgctatgatctaac

SEQ ID NO: 99934 - DNA, 277 bp, Zea mays
cccacgcgtccgagaacagcaagcgtctcatccacttctccacgtgcgaagtctatggcgggaccatcggcagcttcctccccaaagaccacccgctccgcaagggacctgaattttatggtctgaaagaagatgagtcaccctgtatttttggtccaatcgtgaaacaacgatggtcctatgcttgcgcgaagcaacttattgagaggcttatatttgctgaaggtgcaaaaaatggccttgaattcaacatcgtgagaccttttaattggattgg

SEQ ID NO: 99935 - DNA, 411 bp, Zea mays
agcaacttcaatgctgtcattctcaagaggctcttcatgagcaaaaccaatcggccagcaatctccatgcgccgccttgtcaagttcatggaaggaaaggagaagaacattgctgtgattgttggcacagtcacagatgacaagaggatccaagaggttccagcaatgaaggttactgccctgaggttcaccgagacggcaagggccaggattgtcaatgctggtggggagtgcctcacatttgaccagcttgctctccgtgctccacttggcgagaacacagtcctcttgaggggccccaagaatgcccgtgaggcggtgaggcacttcggcaaggctcctggagtgccgcacagccacaccaagccatatgtgcgctccaagggaaggaagttcgagaaagctcgtggc

SEQ ID NO: 99936 - DNA, 427 bp, Zea mays
gtcgcaccgtaagttcgagcacccgaggcacggctccctcggcttccttcccaggaagcgctcctcccgtcaccgcggcaaggtgaagtcattccctagggatgaccccaagaagccttgccatctcactgccttccttggctacaaggctggcatgactcacattgtccgtgaggttgagaagccaggatccaaactccataagaaggaaacttgtgaggctgttaccatcattgaaacccctcctcttgtcattgttgggctcgtggcatatgtgaagactcctcgtggcctccgcacactcaactctgtttgggcccaacatcttagcgaagaagtgaggagaaggttctacaagaactggtgcaagagcaagaagaaggctttcacaaagtatgctctcaaatatgaaaatgatgctggcaag

SEQ ID NO: 99937 - DNA, 428 bp, Zea mays
cccacgcgtccgggccaagaatgaggccggcggcatcatcggcacccggttcgagtcgtccgaagtcaagtccaccccgttgcagccctacagcgaggtgttcggcctccagcggttccgcgagtgcgagctcatccacggccgctgggccatgctcgccaccctcggcgccctctccgtcgagtggctcaccggcgtcacctggcaggacgccggcaaggtggagctggtggacgggtcctcctacctgggccagccgctgccgttctccatctcgacgctcatctggatcgaggtgctcgtgatcggctacatcgagttccagcgcaacgccgagctcgacccggagaagaggctgtaccccggcggctcctacttcgacccgctcggcctggcggccgaccctgagaagaaagagcggctgcagc

SEQ ID NO: 99938 - DNA, 438 bp, Zea mays
  unsure (1)..(438): unsure at all n locations
gaccccgagaccttcgccaagaaccgcgagctggaggtgatccactcccgctgggccatgctcggcgcgctcggctgcgtcttccccgagctgctctcccgcaacggcgtcaagttcggcgaggccgtctggttcaaggccggctcccagatcttcagcgagggcgggctggactacctcggcaaccccagcctgatccacgcgcagagcatcctcgccatctgggcctgccaggtcgtgctcatgggtgccgtcgagggctaccgcattgccggcgggccgctcggcgaggtcgtcgacccgctgtaccctggcggcagcttcgaccccctcggcctggccgacgaccccgaggccttcgccgagctcaaggtgaaggagctcaagaacggccgnctngccatggtttccatgttcggcttcttcgtccaggccatc

SEQ ID NO: 99939 - DNA, 433 bp, Zea mays
atctcacgatccactcgagcaccaagccgagggaaggtgaggagcgatggcgcgcggcgtggtgtcggcgaagggcggcgcggtcgcgggcaagaagaaggggtcggtttccttcacgatcgactgcaccaagccagtggaggacaagatcatggaggtcgcctcgctcgagaagttcctgcaggagcgcatcaaggtcgccggcggcaaggctggcaacctcggcgactccgtcaccatctctcgcgagaagaccaaggtcaccgtcacctctgacggacccttctccaagaggtacctgaagtacttgaccaagaagtacttgaagaagcacaacgtgcgggattggctacgcgtggttgctgccaacaaggaccgaaacgtctatgagctccgctacttcaacattgctgagaacgagggcgaggaagaa

SEQ ID NO: 99940 - DNA, 441 bp, Zea mays
  unsure (1)..(441): unsure at all n locations
ggccaccgccgtcgctccgttccaggggctcaagtccaccgccagcctccccatcgcccgccgctcctgcagaagcctcggcaacgtcagcaacggcggaaggatccggtgcatgcaggtgtggccggcctacggcaacaagaagttcgagacgctgtcgtacctgccgccgctgtcgacggacgacctgctgaagcaggtggactacctgctgcgcaacggctggataccctgcctcgagttcagcaaggtcggcttcgtgtaccgcgagaactccacctncccgtgctactacgacggccgctactggaccatgtggaagctgcccatgttcggctgcaacgacgccacccaggtgtacaaggagctgcangaggccatcaaatcctacccggacgccttccaccgcgtcatcggcttcgacaacatcaagcagacgca

SEQ ID NO: 99941 - DNA, 426 bp, Zea mays
cggacgcgtgggcggacgcgtgggctgggacaccgcggggctgtccgccgacccggagactttcgccaagaaccgcgagctggaggtgatccactgccgctgggccatgctgggcgcgctcgggtgcgtgttcccggagctgctcgcccgcaacggcgtcaagttcggcgaggccgtgtggttcaaggccgggtcccagatcttcagcgagggcgggcttgactacctcggcaacccgagcctgatccacgcgcagagcatcctggccatctgggcgtgccaggtggtgctcatgggcgccgtcgaggggtaccgcatcgccggtggcccgctcggggaggtggtcgacccgctgtaccccggcggcagcttcgacccgctcgggctcgccgacgacccggaggcgttcgcggagctcaaggtcaa

SEQ ID NO: 99942 - DNA, 206 bp, Zea mays
ctcaacagccagatcctccgtgccctgcaggagtcgctcgccagctagctcgccgcccggatgagcgccatgagcagcgccaccgacaactccatcgagctccgcaagaacctctccatcgcctacaaccgacagcgccaggccaagatcaccggggagatcctcgagatcgtcaccggtgccgacgccctcgctggctgagcctg

SEQ ID NO: 99943 - DNA, 380 bp, Zea mays
cccacgcgtccggtggttattggtcttggaggggttggcagtcatgcagcatcaatgctgctgagatctggtgttggcaggttgcttcttgtggattttgatcaggtatcactctcatcactaaatcggcatgctgtggcaaccagagatgacgttggaacttcaaaagcgttgtgcctcaagaagcatttttcaatgatatacccagagtgccaaatagatgcaaaagtgcaattgtatgatgcatcgtctgaggaggaaattctttctggacagcctgactttgttcttgattgcatagataacattgataccaaggtgtcactccttgcagcttgcgtgcgcaaaagtttgaaagtactttctgcaatgggggcttg

SEQ ID NO: 99944 - DNA, 430 bp, Zea mays
atttgcttcagcggcgaccatgacatgtgtgtaccttacaccgggactgaagcatggagtgcgtctttaggctacgccgtcgttgatccgtggcgacagtggattgtcgacgaacaagttgccgggtatgtatctggattctgaacacaagcatatatgcattgaccctttatttcctcctaagatctttgaaccgtttagtcgatcctagatcgatgttgagtaattgctagctcttggacgatatgaattcactactataatcaacaaaaactttggcattatttatatatttcacgaaatattcagctcgatgatttgttatcatgttccatttgttccagtcaaatgtttgtatttttgctcccaggtacacccaaggatatgaaaagggccttacttttgccactattaagggtgctgggcacac

SEQ ID NO: 99945 - DNA, 417 bp, Zea mays
cccacgcgtccgcccacgcgtccgcacggtgtacgccacggcggtggacccgaagaagggcagcctgggcaccatcgcccccattgccatcggcttcatcgtgggggccaacatcctggtgggcggcgccttcgacggcgcgtccatgaaccccgccgtgtccttcggccccgccctcgtcagctgggagtggggctaccagtgggtgtactgggtcgggcccctcatcggcggcggcctcgccggcgtcatctacgagctgctcttcatctcccacacccacgagcagctcccctccaccgactactaaaagccgaagccgaccgacccaggggtgcgcagctagcatccagctctctctccccgctcgccgtcgatcgtttagtttctctcgtgcacgtgcatgcatcgtcgact

SEQ ID NO: 99946 - DNA, 442 bp, Zea mays
attccctttcgacccacgcggtcggccacgcgtccgcggacgcgtccgcacggtgtacgcgacttcggtggacccgaagaagggcagcctaagcaccatcgcccccattgccatcggcttcatcgtgggggccaacatcctggtgggcggcgccttcgacggcgcgtccatgaaccccgccgtgtccttcggccccgccctcgtcagctgggagtggggctaccagtgggtgtactgggtcgggcccctcatcggcggcggcactcgccggcgtcatctacaagctgctcttcatctcccacacccacgagcagctccccttcaccgactactaaaagccgtaaccgaccgacccaggggtgcgcagctagcatccagctctctctacccgctcgccgtcgatcgtttagtttctctcgggcacgtgcatgcatcgtcgact

SEQ ID NO: 99947 - DNA, 420 bp, Zea mays
cccacgcgtccgccccactcccgactccccgacgcacgagctcccaggagttagccagggcctccaccaccctctcctccgccttcagcctcctctcccgcccctccacctccccgtgccccgccgtctcgctcccgaggtcctccttccccgtgcctgacagccgccggagacgccgcgccgtcaccgtcgcgtccaccgccaccgagtcccccaaggtcttggagctcggggacaccattgccgggctcactctcgaggaggcccgcaaccttgttgaccacctccaggagcggctcggcgtcacagctgcggccttcgcgccggccgccgtcgtcgcagcgcctggggcgggcggcggggccgcggccgaggaggaggcccccgttgagaagacggagttcgacgtagtaattgaag

SEQ ID NO: 99948 - DNA, 369 bp, Zea mays
gcaggcgacggcgggctcgtcttcgagcccagccagttcaccgtcaaggccggggacggcatcaccttcaagaacaacgccggcttcccgcacaacgtcgtgttcgacgaagacgaggtgccgagcggcgtcgacgcctccaagatctcgcaggaggagtacctcaacgcgccaggcgagacctactccgtcaccctcaccgtgccgggcacctacggcttctactgcgagccgcaccaaggagcaggaatggtcggcaagatcacagtcaactaaagctagctatccattccatgcatctcgatctgtatgtactccgcccgtcgatggatgatgcatccatctctacttgttttcctcacatgtaca

SEQ ID NO: 99949 - DNA, 261 bp, Zea mays
cccacgcgtccgcggacgcttgggcttcaaacggctctcacttactgacgtcaagattggcatcaaacgcgttcccaagaagtcaaccctgatcaaggctatggaggaagctgatgtgaagacgaagtgggaaaacagctcatggggcatgaagctgattgtccagaagaggagggctgcactcagtgactttgacaggttcaaggtcatgctggcatggatcaagaggagtggtgctatcaggcaagatcttgccaatgc

SEQ ID NO: 99950 - DNA, 363 bp, Zea mays
  unsure (1)..(363): unsure at all n locations
ccctgggccaccagttcgccacccgtatgggcaacgtgttcaccatcgggaagggtaataagccgtgggtgagcctgcccaagggcaagggaatcaagctgagcatcatagaagagcaaaggaagcgggatgccgctgcccaggctgctgccaacgcataaatcctctgaatgtgctgtgttgagagttttttctagttgctctgcaaggatatagaacaatgttctaagactaccatgtttttaagtctgcctgatgcttataattcatgaacgatttttgcagctagctgtaatgtgactatnntatctatctgctngttcaaccctgttgtcgtgtgttgattctctggttcatgggcta

SEQ ID NO: 99951 - DNA, 435 bp, Zea mays
cgtctgaggacagaacaccaagtttatgaactgccagattcacaccctcttctggaagggttcgaacagagagaaccagatgatccctgtccatatcttctttccatatggaccccaggtgaaactgcacaatcgatcgatgcccccaagacattctgtgattcaggggagacgggtagactatgtggaagttcaacatgctttagttgcaacaatatacgagaaatgcaggctcagaaagtcagaggaacacttttgataccatgccgaacagcaatgagaggaagcttcccacttaatgggacgtattttcaagttaatgaggtatttgctgaccattgctcaagtcaaaatccaattgatgtcccacgaagttggatttgggaccttccaagacgaactgtttactttggaactctaattcctacaatattc

SEQ ID NO: 99952 - DNA, 373 bp, Zea mays
  unsure (1)..(373): unsure at all n locations
cccacgcatccgttatcatcgcttccagccgcctctcctcccagtgccttttgcangtgtcctacgccatcagcgtgcctgagcccctgtccgtgttcgtcgactcctacggcaccgggaccatccccgacaaggagatcctaaagatcgtcaatgagaacttcgacttcaggccagggatgatcaccatcaacctcgacctcaagaagggcggcaacaggttcatcaagaccgtcgcatacggccactttggccgtgacgactccgacttcacctgtgaagtggtcaagcccctaaagaaggcatcctcttaaaaatgtattgngaagttcaatggacattatgttcatctttctctggttcttctgatacc

SEQ ID NO: 99953 - DNA, 418 bp, Zea mays
cggacgcgtgggcggacgcgtgggcggacgcgtgggcgagaccttcgccaagaaccgggagctggaggtgatccactcccgctgggccatgctcggcgcgctcggctgcgtcttccccgagctgctctcccgcaacggcgtcaagttcggcgaggccgtctggttcaaggccggctcccagatcttcagcgagggcgggctggactacctcggcaaccccagcctgatccacgcgcagagcatcctcgccatctgggcctgccaggtcgtgctcatgggtgccgtcgagggctaccgcattgccggcgggccgctcggcgaggtcgtcgacccgctgtaccctggcggcagcttcgaccccctcggcctggccgacgaccccgaggccttcgccgagctcaaggtgaaggagctcaag

SEQ ID NO: 99954 - DNA, 420 bp, Zea mays
ggctgtccgcatcatcaagcataccctggagatcatccacctgctcaccgatgccaaccccatccaggtcgtcgtcgacgcgatcatcaacagtggaccccgtgaggatgccacccgtattggttccgctggtgttgtgaggaggcaggccgtggatatctcacccctgaggagggtgaaccaggccatctacctcctcaccactggtgccagggagagtgctttccggaacatcaaaaccattgccgagtgccttgcagatgagctgatcaacgctgccaagggctcatccaacagttacgccatcaagaagaaggacgagattgagcgtgttgccaaggccaaccgttgaactgagcttgtatcctggtgcactctgcgctggaaacttttatgtcgctggcagtcgtatcggttctt

SEQ ID NO: 99955 - DNA, 427 bp, Zea mays
  unsure (1)..(427): unsure at all n locations
ctagcagccgctcactccagcctttacccgcagctagcaaacaaatggccaccgtcctgagcagcccccgcgcgccggccttctccttctccctccgcgccgcgccagcgcccactaccgtggccatgacccgtggcggtggcgccagcagcaggctgcgcgcgcaggccacctacaacgtgaagctcatcacgccggagggggaggtggagctgcaggtgcccgacgacgtctacatcctggactacgccgaggaggaaggcatcgacctgccctactcctgccgcgcggggtcctgctcctcctgcgccggcaaggtcgtctccggctccgtggaccagtccgaccagagctacctcgacgacggccagatcgccgncggctgggtgctcacctgcgtggcgtaccccacctncgacgtcgtcat

SEQ ID NO: 99956 - DNA, 279 bp, Zea mays
  unsure (1)..(279): unsure at all n locations
gacccacgcgtccgcccactcgtccgctcagcaacaacctgctggcgtggatcctccggggggtcttcagcctcatctggtccctctacaccatctacacctctgacctcgacgaggacgaggagtccggtggcctctcgctctagatccaccctctcctgttaatgatctgaatgtaaacatggtggcggtcatcggtgtaaatttagacatggctatttgcatctaagatccatcctctcctgttaataatgtntggagactacgtacgcctgaact

SEQ ID NO: 99957 - DNA, 416 bp, Zea mays
  unsure (1)..(416): unsure at all n locations
tgatccactcccgctgggccangtgttgcgcgctcggctgcgtcttcccggagcttggctcccgcaacggcgtcaagttcggcgaggccgtgtggttcaaggccggctcccagatcttcagcgagggcgggctggactacctcgggaacccgagcctcatccacgcgcagagcatccttgccatctgggcctgccaggtcgtgctcatgggcgccgtcgagggctaccgcatcgccggcggcccgctcggcgaggtcgtcgacccgctctaccccggcggcagcttcgacccgctcggcctcgccgacgaccccgaggccttcgccgagctcaaggtcaaggagctcaagaacggtcgtctcgccatgttctccatgttcggattcttcgtccaggccatcgtcaccgggaagggc

SEQ ID NO: 99958 - DNA, 301 bp, Zea mays
cccacgcgtccgcccacgcgtccgcccacgcgtccgcgacatcacggtggaggagtgggtcaacacgcacggtcccaacgaccgcacgctcgcgcaggggctcaagggtgaccccacgtacctggtggtggagcaggacaagacgctggccacctacgggatcaacgccgtgtgcacccacctcggctgcgtcgtgccgtggaacggcgccgagaacaagttcatctgcccctgccatggatcccagtacaacaaccagggcaaggtggtccgcggaccggcgcctctgtcgctggctctg

SEQ ID NO: 99959 - DNA, 448 bp, Zea mays
  unsure (1)..(448): unsure at all n locations
cccacgcgtccgcccacgcgtccggcatcagcctcgcccgccgccgtcgccgccatggggaggggaaagttcaaggggaagcccacaggccgccgcaacttctccacacccgaggagatcgctgctggtacttcaggtcggccacgcacctttaagaagaaggaggaagaggaagatgaggaagaggtagaaagagaagagtctgaggaagaatctgaagaggattctgatgaaaagactaaacataaaggcactgagggtattattcagattgaaaatccaaacttggtgaaagccaagaatataaaggccaaggaagttgattttggcaagacaactgaactctcaaggcgtgaaagagaggagcttgagaaacanaaagctcatgaacgttatatgaagcttcaggagcaaggaaaaacagaacaagcacgnaaagatttggaac

SEQ ID NO: 99960 - DNA, 172 bp, Zea mays
gcagaagtccgactacccgtcccggcggcttatcatcctcgggtccatcaccggcaacagcaacacgctggccgggaacatcccgcccaaggccgggctgggcgaccttcgcgggctcgcggcggggctgcgcggccagaacggctctgccatgatcgacggcttcgagagc

SEQ ID NO: 99961 - DNA, 418 bp, Zea mays
ccaagatcatcctcgatcgggagacgcagaggtcccgcggcttcggcttcgtcacctgctccacggaggaggcgatgcggaacgccatcgagggcatgaacggcaaggagctggacggccgcaacatcaccgtcaacgaggcccagtcccgcggcggccgtggaggcggcggcggtgggtacggtggtggccgtggaggcggcggctacggcggtggcgggcgccgtgatggcggtggcggctacggcggtggcggcggctacggtggcggcggcggctacggtggtggtggcggcggctacggcggtggcaaccgtggcggcggctacggcaactccgacgggaactggaggaactgagcggtggggcccgcgcggccaagttatcctgttcgctaccgtgatgtttaccctagtcc

SEQ ID NO: 99962 - DNA, 413 bp, Zea mays
cccacgcgtccgcccacgcgtccggggcaggctgcgcgcgcaggccacctacgacgtgaagctgatcacgccggagggggaggtggagctgcaggtgcccgacgacgtgtacatcctggaccaggccgaggaggacggcatcgacctgccctactcctgccgcgcggggtcctgctcctcctgcgccggcaaggtcgtctccggctccgtggaccagtccgaccagagctacctcgacgacggccagatcgccgccggctgggtgctcacctgccacgcctaccccacctctgacgtcgtcatcgagacgcacaaggaggaggagctcaccggcgcataatcattcatgcccatccatctctatctctgtgggtcgtcgttgtgtgtaatttgagtacgcgcgtacacgtact

SEQ ID NO: 99963 - DNA, 444 bp, Zea mays
  unsure (1)..(444): unsure at all n locations
ccccgctccgcttctgcaggccacggctgggcgacaccctgatggcgtcgcctcctcccgtggcgaccgcggggcctcacagcgtcttcgtgtacggcacgctgatggaagaggaggtggtgcgtgtgctcctgggccgcgccccgccctcctcctcccccgcgctcctccccgaccaccgcaggttcagcctcaggggccgcgtctacccggccatcctccccgcccgcgcccacgcggtgagcggaaaggttatccaggggctcaccgacagggaactccatgtgttcgacatgttcgaggacgaggagtatgtgaagacaaccgtcgaggtctcactgactgatgcatcggagaaatcactcgcctacgcctacatatggggtaaccagggtgatcctgacctctacggngaatgggattttgaggagtggaggaaggtgc

SEQ ID NO: 99964 - DNA, 439 bp, Zea mays
cccacgcgtccggattcttgaagagatcgagcttcttttgcaccacaagggcgaggatgtcttgcaactgcggatcaagctgcggctgcggctcaagctgcaagtgcggcaagaagtaccctgacctggaggagacgagcaccgccgcgcaggccaccgtcgtcctcggcgtggccccggagaagaaggccgcgcccgagttcgtcgaggccgcggcggagtccggcgaggccgcccacggctgcagctgcggtggcaactgcaagtgcgacccctgcaactgctgatcacatcgatcgacgaccatggatatgattattatctatctagcttgtggtggtggttgaacaataataagcgaggccgagctggctgccatacataggtattgtgtggtgtgtgtgagagagagagaaacagagttcttcagtttgctatc

SEQ ID NO: 99965 - DNA, 232 bp, Zea mays
gacccacgcgttcgctagaacgcgatctacaagtagctggtctgaatgtaaaccaagtccttacaaggtgtcttttcgctggactgtgtttccatgcataccaacaggtgtcttacatgattttggcgatggtgtctcctgtcactcattctgtgggcaactgtgttaaacgtgttgtggtcattggaacatcagtgctgttcttcaggacacctgtttctcctatcaactc

SEQ ID NO: 99966 - DNA, 445 bp, Zea mays
ctccgccctctgcgaggccaccggcgcgaatgtgactgaggtggcttacgccgtgggcaaggacacgaggattggccccaagttcctgaacgccagtgttgggttcggtgggtcttgcttccagaaggacatcctgaacctggtgtacatctgcgagtgcaatggccttgccgaggtggccaactactggaagcaggtgatcaagatcaacgactaccagaagagccggttcgtgaaccgcgtcgtgtcgtccatgttcaacaccgttgccggcaagaagatcgccgtcctcggcttcgccttcaagaaagacaccggcgacaccagggagaccccggccatcgatgtctgcaaaggcctgctgggtgacaaggcccagatcagcatctacgacccccaggtgacggaggaccagatccagcgggacctagccatgaacaagttc

SEQ ID NO: 99967 - DNA, 299 bp, Zea mays
gctggtctttatgtaaaccaagtccttacaaggtgtcgggtcgctggactgtgtttccatgcataccaacaggtgtcttacatgattttggcgatggtgtctcctgtcactcattctgtgggcaactgtgttaaacgtgttgtggtcattgtaacatcagtgctgttcttcaggacacctgtttctcctatcaactctctcggtactgcgattgcacttgccggagttttcctgtactcacagctcaagcgacttaagcccaagccgaagaccggttaaataagggattgtattttcca

SEQ ID NO: 99968 - DNA, 426 bp, Zea mays
ggtatggcagctaccctcgccggtgtatgcaaggtgcctctgacatctgtcctactaggttttgagcttacacaagactatcgtatagttctacctttgctcggggctgttgggttatcatcctggattgcttctcctcaaaggttctctaaaagaattaggagtaagctggattcttgggaggataaatcgagtattcctcagcaagcaaacgacatgctcactgaaaacaaagaggccacttccatggatgcagctgatttgtcgttagaattatataaaattgaaagctccctttgtgtctatgatgccaacgacagcaatatgttcaaaaatcttactgttggtgaggccatgaaaactaactacttctctgtctcaatgacaaccccattaattgaggcactagatcttatgcttgccgag

SEQ ID NO: 99969 - DNA, 464 bp, Zea mays
taccggtccggattcccgggtcgactcacgcgtccgcccacgcgtccgcccacgcgtccgagacaagtggtttccaaagccaagtgtgtgctagcagtctagcaaccagctagctcgggcggcagcaggcagccatcatgtcggaggagaagcaccaccacttcttcaaccaccacaagaaggacgaggagcagcccgccggcgagtacgggtactccgagaccgaggtggtcaccgtcaccggcgagggcgagtacgagaggtacaagaaggaggagaaggagcacaagcacaagcagcacctcggcgaggccggcgccatcgccgccggcgccttcgcactctacgagaagcacgaggcgaagaaggaccccgagcacgcgcacaggcacaagatcacggaggaggtcgctgccgcggcggccgtcggcgccggcggctacgtattccacgagcaccacgag

SEQ ID NO: 99970 - DNA, 431 bp, Zea mays
tccgtcttgaggcgaagcgtaggtgcttacgagtctgccatggccagcgagaatgaggtatttaggttcgaggaagtcgccaagcacaacgtcaccaaggactgctggatcatcatcgccggcaaggtgtatgatgtcactccttttatggatgagcatcctggtggagatgaggttttgctagctgtaactgggaaagatgctacagctgattttgaagatattggccacagcgattccgcaagggacatgatggagaagtaccacatcgggcagatagatgcttcaacaatcccagcaaagcgaacttatgtgcacccccagcaagcgcccaggcactcagacaagaataatgatctcctcatcaagatcctgcagctccttgtgcccattatgatcctgggccttgcatttggtatacgtcagtacac

SEQ ID NO: 99971 - DNA, 127 bp, Zea mays
gtgacatctggagttggaagaacattcacaaaagaaatcattgaggccatgtcttcctgtgacgagaggcctatcatcttttcactgtcaaacccaacctcgcattctgaatgcactgcttaacaag

SEQ ID NO: 99972 - DNA, 136 bp, Zea mays
  unsure (1)..(136): unsure at all n locations
gcggccaaggtgggcatcatgggccgtagcgccagcagcaggggcaggctgcgcgcgcaggccacctacaacgtgaagctgatcacgccgganggggaggtggagctgcaggtgcccgacgacgtgtacattctgg

SEQ ID NO: 99973 - DNA, 311 bp, Zea mays
  unsure (1)..(311): unsure at all n locations
acccacgcggtccncgaccccttggccgaccccttggttgtaaaagtggctttaacagttaccaaggatttgggccactacaaatctggatggtccaaccccataaccggtggcattttgggtggccatgccgtcaagttgattggatggggaaccagtgatgctggagaagattactggcttctggcaaatcagtggaatagaggctggggcgatgatggatacttcaagatcataaggggcaaaaatgaatgtggcatcgaggagggcgtttgtgctggaatgccatccacaaagaatatggttccaaa

SEQ ID NO: 99974 - DNA, 480 bp, Zea mays
cccacgcgtccgcccacgcgtccgcgaagccgcccgcacccatggcctccggtgggctggcctgcacctacgccggcctcatcctcagcgacgacggcatcgccatcaccgccgagaagatcgccaccatcgtgaaggcggccaacatcaaggtcgagtcctactggccggcgctcttcgctaagctcctggagaagcgcagtgttgaggatctaatcctctccgttggatctggtggtggcgctgctccagttgctgctgccgccccagctggaggtgctgcagctgctgctgcccctgctgcagaggagaagaaggaagagcccaaggaggagtctgatgacgacatgggcttcagcctgttcgactgaggaggccctcgctacccagccattagcaaattcccttatgctgtccaagacttatcttacgctatgtctgtagccttttggtattacaagtactcaagttttgagtttt

SEQ ID NO: 99975 - DNA, 403 bp, Zea mays
  unsure (1)..(403): unsure at all n locations
gcagatcttcagcgagggtgggctggactacctcggcaacccgagcctgagccacgcgcggagcatcctcgccatctgggcctgccaggtcgtgctcatgggcgccatcgaggggtaccgcgtcgccggcggcccgctcggagaggtcgtcgacccgctctaccccggcggcagcttcgacccgctcggcctcgccgacgaccctgaggccttcgcggagctcaaggtgaaggagctcaagaacggccgnctcgccatgttctccatgttcgggttcttcgtccaggccatcgtcaccggcaagggcccgctcgagaacctcgccgaccacctcgccgaccccgtcaacaacaacgcatgggcctatgccaccaactttgtgcccggcaagtgagggggtgga

SEQ ID NO: 99976 - DNA, 431 bp, Zea mays
  unsure (1)..(431): unsure at all n locations
cggacgcgtgggttggaccagtggaatggctgaaaccgtacactgatgagacagtgatggagcttgggcagaaaggggtaaagagcctgcttgctgttcccattagttttgttagcgaacacattgaaactttggaagaaatcgatgtggagtacaaagagttggctttggaatctggcatcaagcactggggacgggttccagcactaggttgcgaacccacattcatttcggatcttgctgatgctgttattgaaagcctaccttatgttggcgcaatggcagtttccaatcttgaggctcggcagtctctcgtacccctcgggagcgtggaggagctgctagcagcatacgactcgaagcgcgatgagctccctccaccggtaatcgtgtgggagtggngctggacaaagagcgcggagacctggaat

SEQ ID NO: 99977 - DNA, 82 bp, Zea mays
actacgcgtacgaccacgcgtaccgccgtttacccttggcggaggtttcaaccccttgggggtggcctacaaccccaaggcc

SEQ ID NO: 99978 - DNA, 425 bp, Zea mays
cccacgcgtccgcccacgcgtccggtccttgctgagggtcgcctgatgaaccttgggtgggctactggccatcctagctttgtcatgtcctgctcattcactaaccaggtcattgcccaacttgaactgtggaaggagaagagctctggcaagtatgagaagaaggtgtatgtgctccccaagcaccttgatgagaaggttgctgctctccacttgggcaagcttggtgccaagctgaccaagctcaccaagtctcaggccgactacatcagcgtgccgatcgagggtccctacaagcctgcccactaccggtactaggcacacggcttgcagctcactcgggccgttgtgtgctatgaagttcgctacactggcctgtcagttatcttttgcatgcatatgcattatcatatacgcagtcgcgt

SEQ ID NO: 99979 - DNA, 176 bp, Zea mays
ccaaggcttccgaacccggggttatctggacttcagagacactgtccagtgcgtgaagcgggcattagccaacccagccaaacctggcgagttcagagtcttcaaccagttcaccgagcagttctctgtcaatgagctagccaaactggtgactgcggcaggagcgaaacttgggc

SEQ ID NO: 99980 - DNA, 462 bp, Zea mays
  unsure (1)..(462): unsure at all n locations
cccacgcgtccgcaaggccaacctattgaccctgagaagatgcaggagcattttgaggagttctatgaggacatctatgaggagttggggaagtttggtgagattgagaatctgaatgtttgtgataaccttgctgaccacatgattgggaatgtctatgtccagttcagggaggaagagcaagcagccgcagcatacaatgctcttcaggggcgcttttactctggccgccctataattgttgagtattctcctgtgaccgacttccgtgaagcaacctgtaggcagtttgaggagaacagctgcaaccgtggtggctactgtaatttcatgcatgtgaagcaaattggcagggatctcangaggaagctgtatgggcgttctgcttccaggaggtaccatgggagaagccggagccgaagcccgncaccacaaaggaggggccaccgtgaccgtgatgac

SEQ ID NO: 99981 - DNA, 87 bp, Zea mays
gatggtattgctgggctttaccgtggatttaacatctcctgtgttggaatcattgtttatcgtggtctgtactttgggctctatgat

SEQ ID NO: 99982 - DNA, 415 bp, Zea mays
  unsure (1)..(415): unsure at all n locations
cccacgcgtccgtcaagccaagccagttaaccgtcaaggccggcgacaccataacattggggaccaacgccggcttcccgaacaacgtcgtcttcgacgaagacgaggtgccgagcggcgtcgacgccaccaagatctcgcaggaggagtacctcaacgcgccaggcgagacctactccgtcaccctcaccgtgccgggaacctacggcttctactgcgagccgcatcaaggagccggaatggtcggcaagatcaccgtcaactaattaagctagctatcgatcgatatccattcatgtattagctgntgcttcctgctttgtactccgncgatctgtccatctctacatgttttcgtcttcacacaacaacctctgctacgactacgtatatatgcatgctactagcttgatga

SEQ ID NO: 99983 - DNA, 257 bp, Zea mays
  unsure (1)..(257): unsure at all n locations
atcaccgtgttcgtaaccctgaacctgttcttgaagctcctttactacacgcccatgggggtgctcgcctccataatcctgtcggctcttccgggactgatcgacatcaaggaggcctgcagcatatggaagatcgacaagatggatttcctcacctgcctcggtgccgttgttggcgtcctgntttggtcggtggagattgggcttgcaagtgcacttggcattttctttcgcaaagatcatcatacagtcgcttc

SEQ ID NO: 99984 - DNA, 303 bp, Zea mays
  unsure (1)..(303): unsure at all n locations
aaaagctttcagaagtaaacccgatgcttgtcttccgtgggtgcaggcttggtatatcgtgccctgaattgacagagatgcaagcccgggccatttttgaagctgctatagcaatgaccaaccagggtgttcaagtgttcccagagataatggttcctcttgttggaacaccacaggaactggggcatcaagtgactcttatccgccaagttgctgagaaagtgttcgccaatgtgggcaagactatcgggtacaaagttggaacaatgatngagatccccagggcaagctctgtggctgatg

SEQ ID NO: 99985 - DNA, 353 bp, Zea mays
acgcactctcctccgccgccgcccgaggcaagatggttctccagaacgacatcgaccttgtgaacccgccggcagagctcgagaaactcaagcacaagaagaagcgcctcgtccaatcccccaactccttcttcatggatgtcaagtgccagggatgcttcagcataaccacggttttcagccactcccagactgttgttgtgtgcccaggctgccaaactgttctctgccagcccacgggaggaaaggcgaggctcacggagggatgctctttccgccggaagggagactagagtggagtctgttattagtactggatcggttgtcaatctccagtatgtggattcaaattt

SEQ ID NO: 99986 - DNA, 436 bp, Zea mays
ctgaaaactcgaaggctggttgtcaaagtgtgcgacatcgtcacccggagagctgcccggctagccgccgctggtattgtcgggatactgaaaaagctcggccgtgatgggagcggtgttgcttcaagcgggagaacgggagggcagatgaggcggacggtggttgccatcgagggtgggctgtacgagggctacccggtgttcagggagtacctagacgaagccctggtggagatcttgggggaggaggtggcgcggacggtggcgctgagggtgacagtggatgggtctggggccggcgctgccctccttgccgccgtacattcgtcgaatagacagcaaggttccatatagggagaagggaagatggtgatacagccccctctgtgcaaatgtaaaaaggaacattatttgatatctatattcatatatatat

SEQ ID NO: 99987 - DNA, 483 bp, Zea mays
  unsure (1)..(483): unsure at all n locations
caggcagaggcagcgtagcagcagccaactccatccatcctctttcccctcctcgcttggcttcctcggcggattcctgctccctcgaccgtccccgtccccgtccccttccggcgcgcgagctcgcccgagatggcaaacgctagatcgggtgtcgctgtgaatgacgagtgcatgctcaagttcggcgagctgcagtcgaagaggctgcaccgcttcctaactttcaagatggacgacaagttcaaggagatcgttgtggaccaggtcggggatcgcgctaccagctacgaggacttcacaaacagtctncccgagaatgactgccgatacgcgatctatgatttcgactttgtcactgcagaagatgtccagaagagcaagatcttctatatcctatggtccccatccttcgncaaagtgaagagcaagatgctntatgcaagctcaaaccaaaaattcaagagtgggctcaatggcatt

SEQ ID NO: 99988 - DNA, 422 bp, Zea mays
ccaaggtctcactcatccggattgggacgcgtgggagtcctctggctcttgcacaagccgatgaaactcgggaaaaactgaaagccgcacactctgagttagctgaggagggggctattgagatcgtcatcataaagaccacaggagacatgatcttggacaaaccccttgcagatattggaggcaagggtttattcaccaaggagatagatgatgcactcttgcagggaaggattgatatagctgtgcactctatgaaagatgttccaacatatctacctgaaggcacaatattgccctgtaacctcccacgagaagatgtaagagatgcattcatatgcttgactgcaaattcgctcgcggagcttcctgctggcagtgttgttggaagtgcttccttgcggagacaatctcagattctc

SEQ ID NO: 99989 - DNA, 272 bp, Zea mays
ttcccgggtcgacccacgcgttccgaaaaaggcattctgaggttacccgtttcatttaaaagtcccttgacagatttccagtgatggttaaaagggctgaaaggagggatattcctgacttcgccaggaaaaggtacctcgtccttgcagatcttacagtcgggcagttcgggtatgttgttaggaagagaatcaagctcagtgctgagaaggctatcttcatatttgtgaaaaacacccttccaccaacagctgctctgatgtcttcaatc

SEQ ID NO: 99990 - DNA, 311 bp, Zea mays
cccacgcgtccggaagcctttcatgtgtgatgctcctaagcaggaacccgagcctttagcgtacttagccgaaaagaatcacataaattatgacattcctcttgaagtctcgattaagccgaaagatcaaaatgacgcatcaattgtcacgaaaactaatttcaagcatctgtattggacgctgacacagcagctagcacaccacaccatcaacggatgcaacatgaggccgggggatatatttgcgactggcacactgagtggacctgaaccggactccctcgggtgtctgctggagctgacatggaacg

SEQ ID NO: 99991 - DNA, 292 bp, Zea mays
  unsure (1)..(292): unsure at all n locations
ggtagctatagcagcctagcacacaccacttccaacaaccacggggccacaaacttgcgggaagtgtgctgtgcttcgttaatcgaccgaccgatcgatctcggcatggcggactgggggccggtgctgatcgggctggtgctcttcatcctgctctccccgggcctgctctttcagatccccggcaagggccggatcatcgagttcggcaacttncagaccagcggcctctccatcctcatccacgccgtcatctactttgccctcctcgccatcttcctactcgccgtcg

SEQ ID NO: 99992 - DNA, 349 bp, Zea mays
  unsure (1)..(349): unsure at all n locations
gtcctcagttcctcacctagcggtagcgtgcgcgcgggagacgtagatggcggcttcggaggcggcagcggcggcggcaacaccggtgacgccgacagaggggacggtgatcgcgatccacagcctggaggagtggagcatccagatcgaggaggccaacagcgccaagaagctggtggtgattgacttcactgcaacatggtgtcctccgtgccgcgccatggctccaatttttgctgatatggccaagaagtccccaaatgttgttttcctgaaagttgatgtcgatgaaatgaagaccattgctgagcaattcagcgtagaggccatgccaacattnctgttcatg

SEQ ID NO: 99993 - DNA, 419 bp, Zea mays
  unsure (1)..(419): unsure at all n locations
cggacgcgtgggtcttctgtcttccgatggggagaagcttaattctatgaatctgttggggtacatggctccaatcgctgttatcttcttgcttcctgcaactatctttatggaggataatgttgtcggcgttacaattgagcttgcaaagaaggatttcacgattgtttggttgcttttgttcaattcttgcttgtcgtattttgtcaatttgaccaatttcttggtgaccaagcatactagtgcactgactctacaggttctcggaaatgcaaagggtgcggtggcagttgtcgtctcgattatgatattcaggaatccagtgtccataacaggaatgctcggttatactctcacagtttttggcctcattctttacagtgaatccaanaagcgcaacaacaagccatgaataccct

SEQ ID NO: 99994 - DNA, 338 bp, Zea mays
gccttccacccagctagcgcatccagagcaagcgatcgagcgagctctctcggcttggtggctagctccattatatataacatcgatcgcttgatagtttttggtagctagaaagaagagagagaaagagcagctagctagtacagggatggagaagatgaacgtggttgcgagcaggaagcagcagggcggcgactggatctgccggtcgtgccagtacgtgaacttctgcaagcgcgacgcgtgccagcgctgcggcgaggcgaagctgggcgtggagcggacggactacggcgcgctgggcggcgactgggacgtgaagccccgcgactggtact

SEQ ID NO: 99995 - DNA, 425 bp, Zea mays
  unsure (1)..(425): unsure at all n locations
gcgggcgccgggcgcgtcgtctggttccccgcggcggcgcgccgcggcggcggcagcgggcggttggtcgccgtgcggtccagcgggccggccacgccgccggagatctccgacaaggtgtctgagagcatcaagcaggcggaggagacgtgcgcggacgaccagaagggcgacgccgagtgcgcggcggcgtgggacgaggtggaggagctcagcgccacggtcagccacgcccgcgacagcctcaaggagaccaacgccaacgacccgctcgagaagtactgcaaggagaacccggactccgaggagtgccgcatctacgacaactagctatagtcgtagctatatagggcgtggaatgatactctcgatcggcgcgtcatacgtggaatgaactngtatgaagctatacctcaatgcttctc

SEQ ID NO: 99996 - DNA, 430 bp, Zea mays
  unsure (1)..(430): unsure at all n locations
gctctacgtggtgagcatcggcaccaacgacttcctggagaactacttcctgctggtgacggngcggttcgcggagctcacggtgggcgagtacgaggacttcctggtggcgcaggcggagcggttcctgggcgagatccaccggctgggcgcgcgccgggtcaccttcgccgggctcagccccatgggctgcctgccgctggagcgcacgctcaacgcgctccgcggcggctgcgtcgacgagtacaaccaggtggcccgcgactacaacgccaagctgctcgccatgctccgccgncttcaggcggcgcgcccggggctcaaggtagcttacgtcgacgtgtaccagaacatgctcgacctcatcaccaacccttccacgctgggtagagagagagagagagagagagagagagagagagagagagat

SEQ ID NO: 99997 - DNA, 436 bp, Zea mays
ccaaggccaagaaggacgctgcgccgtttgaccgcccaatccttggacgcttttcctccgacctcaagatcgggatcgttgggttgccaaatgttggcaaatcaacttttttcaacatagtaacaaagttggctatcccagctgagaattttcctttctgtaccatcgaaccaaatgaagcacgggtgaatgttccagatgaacggtttgattggctctgcaaactttacaagccaaagagtgaggtgcctgcatatcttgaagtaactgacatagctgggcttattagaggtgctcatgctggggatggtctgggcaatgcattcctctcacatatacgtgctgttgatggaatcttccatgtcctaagagcatttgaagacgcagaaattactcatgttgacgatacagtagatcctgttagagacatggaaac

SEQ ID NO: 99998 - DNA, 240 bp, Zea mays
gggagcatgagagattattgagtccacggtgaatgaagcatgcaataaattacatgatgattgtggagattaagctattacaagattgatgttgtgacgctagcagctaacgtagcagctaggcagcagcctcacttcacaactacaaatcacacaggatcatggggtccttgagcagactggccttactcatttcacctcgaggatctcgtccaaggcgtaattgttggtagacactcc

SEQ ID NO: 99999 - DNA, 128 bp, Zea mays
ctgacgcgtggtcgcgtgcgaaccaagcagtaccacaacaagaagaagcgtagtcgtcgccgtaaggaaaggcgcggagcatgatgtcgtggcaggcgtacgtcgacgagcacctgatgtgcgagatc

SEQ ID NO: 100000 - DNA, 413 bp, Zea mays
acgcgtccgcccacgcgtccgcccacgcgttcggcgacacctgctgcccgctgctctccggcgtggccgacctcgacgccgcgctctggctctgcaccaccatcaaggccaaggcgctcagcgtcagcctcgtgctccccgtcgccatctcggtgctcgttaacgagtgcggcaagcatgtgccctccagcttccagtgcccgtaatcacatcagctgcatatatgtgctactatgatgtatcaccaccactaatctatatccgcatgcatgcatcaatgcatgggtgattaagggtttatacgcggtcaaagttatacacgcatatatatgtagcttcatacatggagctgtgggttgtgcattcattttcaaatcatgtaccagtattatattgtagtatcataaaccagt

SEQ ID NO: 100001 - DNA, 444 bp, Zea mays
ccacgcgtccgcccacgcgtccgccaacgcttccgttggagctggacttgtcgagtctcaacactgtaaacgacggtgtttgcagctctttttagtaagcttggtgtgccaattaaaacaactgtttcagctacagttttagaggaggcattgaatggttcggttatggtttctcaactccagctaggaaactcagtgcagagaaaggtggaaaagcaatcggcccatttctattctgtggatataactgaaaaacaagctaaaatggggctagtttgtcgtgttcactcaaacgataaaagcaaattcaagttgctatattttgagcttgaagaaaatggcgggcttagtcttgcactacaggaagacagtgtgaaggttgggaaagttactgctgcagggatgtatttccttggttttcctgtgtaccgttttgaacaaaat

SEQ ID NO: 100002 - DNA, 505 bp, Zea mays
gaattcccggctggacgcacgcgtccgcccgcgcgtccgcccacgcgtccgcccatgcgtccgcccacgcgtccgaaggagccgagatcgtgaggtgcctgctcaggaccaggatcaccggcgaccaagcgcccggggagacgtggcacatggtcttcagcacagaaggcgaggtcccctacagagagggccagtccatcggcgtcatcgcggatggcgaggacatgaacggcaagccgcacaagctcaggctctactccatcgccagcagcgccctcggagatttcggcgactccaagacggtgtcgctgtgcgtgaagaggctggtctacaccaacgatcagggggaggtcgtcaaaggagtctgctcgaacttcctctgtgacttgaagccaggcgctgaggtgaagatcacagggccagtgggcaaggagatgctcatgctcaaagaccccaacgcaacaatcatcatgctcgcaacgggtacccggatcgctccgttccg

SEQ ID NO: 100003 - DNA, 322 bp, Zea mays
cgctgcttcgtcggcggcctcgcctgggccacggacgaccactccctccacaacggctgagcacctacggcgaggtcctcgagtccaagatcatcctcgatcgggagacgcagaggtcctgcggcttctgcttcgtcaccttctccacggaggaggcgatgcggaacgccatcgagggcatgatcggctaggagctggacggccgcaacatcaccgtctacgaggcccagtcctgcggcggtcgttgatgcggcgtcagtgggtacggtggtggccgtagatgcggtgtctacggcattggtaggcgccgtgatggcggtgg

SEQ ID NO: 100004 - DNA, 390 bp, Zea mays
cgcggagctggaggccaagctggacgaggggcgcagccgtgtggaggccgagctcgtggaggcgctcgccaacctcgaggcgcagaaggaggaggctgttaaggcgctcgacgcccagatcgcctcgctcagtgatgagatcgtcaagaaggtgctcccatccgcgtgatgaaaccaaaccggccctgccttatcctacgactatagttacatgaacatcataaattaatgataattttgaagaaattggccgatgactccgacactgtactcatgaaagattattggatgggttgtgtccaccgtctgtgttgggtgtggattgttgtagacttccagtgatctttctcgataagcttggacaggtcaatacatacagaccccccattg

SEQ ID NO: 100005 - DNA, 265 bp, Zea mays
gcggaggacttcgacaagcgcgggtccgggaagcaggataccatcgccgacgtggtgctgtcgccggaggagatggagatgtacgtcgacctgcaccccttcaccaacacgttgccgtacacggtggtcgagaccatgtcgctggccaaggcgctcgtgctcttccgggaggtcggcctgcgccaccttctcgtcgtgcccaaggcctgcgataggtcgccggtggtcggcatcttgacgaggcatgacttcatgccagagcaca

SEQ ID NO: 100006 - DNA, 447 bp, Zea mays
taccggttcggaattcgaggcacgcgtcacgcttgtttcattgattcttgaagagatcgagcttcttttgcaccacaaggtcgaggatgtcttgcaactgcggatcaagctgcggctgcggctcaagctgcaagtgcggcaagaagtaccctgacctggaggagacgagcaccgccgcgcaggccaccgtcgtcctcggcgtggccccggagaagaaggccgcgcccgagttcgtcgaggccgcggctgagtccggcgaggccgtccacggctgcagctgcggtggcaactgcaagtgcgacccctgcaactgctgatcacatcgatcgacgaccatggatatgattattatctatctagcttgtggtggtggttgaacaataataagcgaggccgagctggctgccatacataagtattgtgtggtgtgtgtgagagagagagaaa

SEQ ID NO: 100007 - DNA, 268 bp, Zea mays
caagcagctggaggatggccgcaccctggcggattacaacatccagaaggagagcactctccacctggtgctccgcctcaggggtggcatgcagatttttgtgaagacattgactggcaagactatcatcttggaggtggagagctctgacaccattgacaatgtgaaggccaagatccaggacaaggagggcattcccccagaccagcagcgtctgatctttgcgggcaagcagctggaagatggccgcactctcgcggactacaac

SEQ ID NO: 100008 - DNA, 345 bp, Zea mays
gttcaaggaacacttgctcttcaggttcttaatgatactgatgggttcatccatttgcagattgaaagccaagatatgcctgggcttagcttcaaaacacacccaaatatcaataaggatttgtttaacagtcagcaaattttgggagcaaaagatccaaacaggccctttccgagtggtcaaaatgaaactcctctggtgaaatggagaatccaggggatggatgagtcgtctttacctctgtcagtcaattgctggccgtcagtatctggaaatgaaacctatgtgaacattgaatatgaagcttctgagatgtttgatctgcacaacgttgtcatatctata

SEQ ID NO: 100009 - DNA, 446 bp, Zea mays
gcgtcgccgaggcgctaaatgaaacagtctgtctcgataagcaatgtgaaggactcatgatacaaggaaaatactatgtcaaaatagacccacaaggagaaggagctcggtggcgtcggacatttggccaggaaatatactcccctctccttcttgctttcacagagcaggatggaggcaactgggcgaattcacatgttgcaaaattctctgcgatggattcaacttacagcttgcctgataatgttgcaatgcttacccttcaggagcttgaagatggaagtgttctccttcggtttgctcatctatatgaggccggggaggacaaggatctttcatctttagcgagtatcgacctcaagagagtgttcccggagaagaagattggcaaggtcatcgagacaagcttatcggctaaccaaaaacgcgcaatcatgggagaagaa

SEQ ID NO: 100010 - DNA, 397 bp, Zea mays
cgcactcgcgtctctttcctattcgcgccgccgtcgctgctgcaagcgccagctcgccgtcgtccgaatagtacactctaacgccgccatggggcgtatgcacagccgcgggaagggtatctcgtcgtcggcgctgccgtacaagaggacgcctcctacctggctgaagaccgtcgcctccgacgtggaggagatgatcacaaaggcagcgaagaagggacagatgccgtcgcagatcggcgtcctgctccgtgaccagcacggtatcccccttgtcaagagtgtcaccggcagcaaaatcctccgcatcctcaaggcccatgggctggcacccgaaatcccggaggacctgtacttcctcatcaagaaggcggtggcgataaagaagcaccttgag

SEQ ID NO: 100011 - DNA, 389 bp, Zea mays
gccacgcgttcgcccacgcgtccggcgagagcggatagagagagtgagggaggcgccgacgccgggtcctttcttcatcctgcatctgccgctgtttccgacaggatgtttctcacgaggacggagtacgaccgtggggtgaacaccttctctccggaggggcggctgttccaggtcgagtacgccatcgaggccatcaagcggcggcatgcttgccagccaataccttttttcaaagcactttggcatttcttgatgcctctacggatttgaaggtgtaccaattcttggcgtagttgcagtactacggtggcggctgcatggcctcttcctgctgtgctgcagctgctcttggagtatagctgtagccccttcgtactgttcggatc

SEQ ID NO: 100012 - DNA, 304 bp, Zea mays
gtccaaccgcgtcgccggaggccggaaccatgaagcctgtcagtgtcgccgaacacaagagccaccagcctcgcctgcactcccccacgccggcgtcggcgaccaagatctcgatccccatctcttcgagcgaggcggcgctgttcgggaagggtaggtacaaggtgtgggccctcgcggccatcgcgctcctagcgctctggtccatgttcgccgcctccgtcacgctgcgcttgtcctccgtcgatctcgccaccacgttcggggacgcgagcgaaccgctcaatcgcgaacttgatcccct

SEQ ID NO: 100013 - DNA, 361 bp, Zea mays
ggaaacaccgccgtcgccgcgccttccattccagtactcgcggaggaaaggaacaccagccagcgccatggtcacgtcgacgaccgccgccgtcgtgctgtccccgccgtccgtggccgggcttcgcctggcgccgtctccccgggcgcgcgtggcgttccgcgcggcgccggcgcggcggtccgtggcggcgcgcgcggagctgagcccgtcgctggtgatcagcctgagcacgggcgtgtcgctcttcctgggccgcttcgtcttcttcaacttccagcgggagaacgtggcgaagcaggtgcccgagcagaacggcaagacgcacttcgacgccggcgacgagcgcgccaaggagttc

SEQ ID NO: 100014 - DNA, 421 bp, Zea mays
  unsure (1)..(421): unsure at all n locations
ccgccacatcaagacctaggactatatatcagagtattcaattatccgatccacttacctccagctcatgggaaaggtgcaaaaatttgtggaggcaattcaaagctaaaactgaatatacagttgctcaagcgataactgctcaggaagcaaataagaggaacaacaactggctgccaccttcatgggcacttattgcaatgtctatccttggattcaacgagtttatgacactattgaggaatccactntacgtgtttgccatattttgtgatttatcttgttggaaaagccctttgggtgcaatcaaaaattggcagggaattccaacatggatttcttcctaccattctttcactggtcatgaaatttggtccctctataatgaacattctgaagagattaactgacctgggtcaag

SEQ ID NO: 100015 - DNA, 417 bp, Zea mays
ccacgcgtccgtgcacgcgtccgcccacgcgtccgatggatattgaagattctggtctggagattgaaggcttacggtccttggggggcaccagcctgaagttcaaagtccactcctttgagattcgtgagtgcattctgtggctcagtatagtgttcgtcacaatactgtgcacaccacaactaacggttatcaggtggtctccgaacccaccggtgtcagccgatgtcttgcatcagtggaaaggattctgtgctctaatcgcgaacgcttactatgtcaaaggaatggcatggttgccagtgaaaaccttgcagctggaacagatggctgtcacaggaagttcagagaaaccatcagtcgttgctagccgcatgcagttagttttcagcacattataagtagtcagcccacagt

SEQ ID NO: 100016 - DNA, 406 bp, Zea mays
cggacgcgtgggcgcagagcatcctggccatctgggcgtgccaggtggtgctcatgggcgccgtcgaggggtaccgcgtcgccggcggcccgctcggggaggtggtcgacccgctgtaccctggcggcagcttcgacccgctcgggctcgccgacgacccggaggcgttcgccgagctcaaggtgaaggagatcaagaacggccgtctcgccatgttctccatgttcggcttcttcgtgcaggctatcgtcaccggcaagggccccctcgagaacctcgccgaccacatcgccgaccccgtcaacaacaacgcctgggcttacgccaccaacttcgtccccggcaagtgagcgagggcatgatgcttgcatgcgtgtaccgtatacgtaccgtattcctacgtact

SEQ ID NO: 100017 - DNA, 424 bp, Zea mays
gtccgagtcgtcgcatcaggtcccctcgattcgccggcggcgccaccaaccaagctcatacatctgaattgactagtcaaactcagtgatctctttggggactaatcaaactcaagaactaagtttcatgtctgatctcgacgtccagcttccatctgcttttgatccgtttgcagaggcaaatgctgaggactccagtgctggtgctggatcaaaggactatgtgcacgtgcgtattcagcagcgcaacggaaggaagagtctgacaactgttcagggcttgaagaaagagtacagctacaacaagatcctcaaggatctcaaaaaagagttctgctgcaatggtactgtagtccaggatccagagctaggccaggtcattcaactgcaaggtgatcagcgtaaaaatgtcgctacttttcta

SEQ ID NO: 100018 - DNA, 283 bp, Zea mays
cgcattcgttccaactcctgagcactttctcctcgtcccagacaagccaatcgaagccgagatacgaccatggactccaccggcaccggagcagggggtaaggggaagaagggagcggccgggcgcaaggtcggcgggccaaggaagaagtcggtgtcgaggtccgtgaaggccggtctccagttccccgtcggccgcatcgggcgctacttgaagaagggccgctacgcgcagcgtgtcggcaccggcgcccccgtctacctcgccgctgtcctcgaatacc

SEQ ID NO: 100019 - DNA, 360 bp, Zea mays
cccacgcgtccggctctgcaagcggaccctcaagctcgtgcgacgagcctccgaggcgaagtgcctcaagcgcggagtcaaagaggtagtcaagagcattcgccgcgggaacaaaggattgtgtgtgatcgctggaaatatttctcctattgatgtgattacacatgttccgatactatgtgaggaagctaatgttccttacgtatatgttccatcaaaagaggatcttgcgaccgcaggaaccactaagaggccgacttgttgcgtcttggttctgaccaaaccaaacaagggggagctcagtggagaggtgaaggataaactgaagtcggactatgaccaagttgtaacggaagtcgc

SEQ ID NO: 100020 - DNA, 334 bp, Zea mays
cccacgcgtccgcccacgcgtccgcccacgcgtccgcggacgcgtgggctgatgaagatatagaaaatctgcagcttgctgaagatcttgccaaaacatgtgttgagatgtacttcgtgacctctaccggccttgctcctgaaatagcttatttccacattgagggtgatacagaaggggggcctgatggtgggaataaaagctccaaatatatcaatgatatcgtaataaaaccacttgaccgtcacaatcttctacgcccagagactgtggaatcactatttgttttgtatagaatcacagaagattccaagtataaggagtggggttggca

SEQ ID NO: 100021 - DNA, 348 bp, Zea mays
cccacgcgtccggaggatgcccccatggaaattgtggatgaggaagccaccaagcctgagggatggttggatgatgaacccgaggagattgatgatcctgaggcagccaagcccgaggactgggactatgaagaggatggtgaatgggaggcaccaaagattgacaaccccaagtgtgaagaggcacctggatgtggcgagtggaagaggccgatgaagcagaatcctgcttacaaaggcaagtggcatgcacctatgattgacaaccccaactacaagggaatctggaagcctcaggagatacccaaccctgagtactttgagcttgacaggcctgattttgatcca

SEQ ID NO: 100022 - DNA, 452 bp, Zea mays
ccggtctcggaattcccgggtcgacccactcgtcctcccactcgtccggtttctacagaggaagcagtatatttgacaaaaggtgctcgacatgggcatttactagttagaaaggatcaactacctgcttccaaagctatgcacgacaggttgataattgcgaatgtttcatagttctaaacgaccttaacatatcaccatactgcattacacttgccttttatgataatgacaatgtctacagtcagacttttgacgctgatcttattagctgcgacacgtgcatgacctaatctgcaacaaaggatgccttacaccttcgcatccgagttcaccccttccatgtgcttcgtatcaacaagatgctttcgtgtgctggtgctgattagctccatactggaatgatgggtgcctttggcaagccttatggcacctgttcttaggttgacatt

SEQ ID NO: 100023 - DNA, 316 bp, Zea mays
gccgcctctcctgctcctaccgcagctctccctcaggtttagtgttcgcaatggcggccttcaacaagcttggtggccttctaaggcacagtgctctggtgagcggtatcactggtggctcttctcctgcagtgttcaatgctgcacggctcatgtctaccaagctatttattggtggtcttgactggggtgttgatgacgtgaaactaagagaagcatttagcagctttggagaggttactgaagcgagggtgatcacagacagggagactgggaggtcaagaagctttggctttgtgaactacttcgacagtga

SEQ ID NO: 100024 - DNA, 362 bp, Zea mays
cagaaggtaaaatgtgtaatggttatgatatcatcctgatggctgagactgtttacgcggtatcttgtcttccaaatctctacaggctcatcaagaagtgcttgcgctaccctgggggtgtggtttacatggcagggaagaagcattactttggagtaggtggtggcacaaggcagtttctgcgcttggttgaaaaagacggcgccatgcatcctgagcggctcaatgatgttgctgatggatcatccaatgttagggaggtttggaaattctcattcaaatagattagcactgcccctgcgattgtcgggagaactggaaacatgtactggactccatattgggtgatagggaagtcttat

SEQ ID NO: 100025 - DNA, 392 bp, Zea mays
cccacgcgtccgtccacgcgtccggcctggtcacgtgccgccaacggtcgcccctcaggaaatacgggagcaccagagcttcgcttgcagtgcgatgacgggcatgtgatctcgaagattacatttgcgagttacgggacccctacaggaggttgccagaacttctctgtagggaattgccatgcatcgactactctagacttggtggtagaggcctgcgaaggcatgaacagatgcgcgatcagtgttaccaacgaagtattcggagatccatgccgcaaagtcgtcaaggatttggcagttgaagccgagtgcttcccgccatcggttaacccagaacctcgatacgatgtatgatcacgggtccggaatggggtgcctaagtcttggaa

SEQ ID NO: 100026 - DNA, 421 bp, Zea mays
cagtgttgcatctgttgtcacagctgcagataagggaggtgcaacacatgttgacatagcatgtgacaaggacttagtaaagcttgccatggatcttaccaaccttccgatctgtgtctcatctgtagatccttcagcgttccattctgcagtacaagcaggagctaaaatggttgagattggaaactatgattctttttatgagatgggcattgagttctcctctgagcagatactgaaactaacaagggaaacatggaagatgcttccagacatcaccttatcagtaacagttcctcacacacttagtttgccagatcagatgagactagcagagctactcgaagaggaaggagctgatataatccaaactgagggtgggaaatgttctagcccgacaaaacctggagtgcttggattg

SEQ ID NO: 100027 - DNA, 430 bp, Zea mays
agactgttttaactgcttgccagtgtcagcattgatagatgaaaagattctctgtatgcatggtggtctatctccggagttgaacaagcttgagcaaatactcaacctgaatcgccccacagacgtgcctgatactggattgctctgtgatcttctttggtctgatccttccaatgaagcaacaggctgggccatcaatgatcgtggtgtttcattcacatttggtcctgataaagtttctgaatttcttgagaagcatgatttggaccttatctgccgagcacatcaggttgtcgaagatggatacgagtttttcgctagccgtcaactcgtaacaatattttcagcccctaactactgtggagaattcgacaacgctggtgccatgatgagtgtagatgatacattgatgtgctcgttccaaatattg

SEQ ID NO: 100028 - DNA, 410 bp, Zea mays
cgttcaagaaaccaaggcgtccttatgagaaggagcgtcttgatgctgaactgaagctggtcggtgagtatgggctgaggtgcaagcgtgagctttggagggtccagtatgcactgagcaggatccgtaatgctgcaaggcacttgctcacccttgacgagaagaacccccgtcgtatctttgagggtgaggcgcttcttcgccgcatgaaccgctatgggctgcttgctgagggtcagaacaagcttgattatgttcttgccctcaccgctgagaacttcctcgcaaggcggcttcaaacacttgtcttcaaggctggcatggccaagtccattcaccatgctcgtgtctggatcaagcagcgtcacatcagggttggcaggcaaattgtcaacgtcccatcattcatg

SEQ ID NO: 100029 - DNA, 317 bp, Zea mays
gagttcttagcaaagtcaaatgtatcaaggtgtgttgacttcaaggagactgccgatggtattgcgaagcttggcttcaaaatgttcttgggcgtgactgcaaccgtgaccaattgggatgctgagggtacaagttgcagccttgtcctggaagacaaccctcttgttgatttcgttgagctccctgacacttgccaaggccttcagtattgcaatttgttaagtggagttattaggggggcattggaaatggtgtctatgaaggctgaagtgacatgggtgcgtgacatgcttcgcggtgactattcctatgatat

SEQ ID NO: 100030 - DNA, 242 bp, Zea mays
gccgtcactctgaatccgcgggcgctgcggcggcgcgcttcctcgggcagcggctgccacaggagcagcccccagcagccactgatgagcgacctgctacccccggctaccgtcgcctgccgagctcgctctcagtctgcttcctcgtctaatgtgaactctgggagaggggatgacgacgacaagttgctcgaggatttgctcaaacagcatggcgaggcggtgtacagctccggtggacc

SEQ ID NO: 100031 - DNA, 379 bp, Zea mays
gggaggtgcattcactggtgaaattagtgctgagatgctcgtcaaccttggcgttccctgggtcattcttggacactctgaaaggagagctctgctgggagaatcaaatgagtttgttggagacaaggttgcttttgctctgtctcagggactaaaggtcattgcatgtgttggtgagacccttgaggagagggaggctggttcaaccatggatgttgttgctgcacaaacaaaagcaattgctgagaagatcaaggactggagcaacgttgttcttgcctatgaaccagtctgggctattggaactggcaaagtcgccaccccagctcaggctcaggaagtgcacgccttcctgagggattgggtaaagatcaatgtc

SEQ ID NO: 100032 - DNA, 191 bp, Zea mays
  unsure (1)..(191): unsure at all n locations
taccggttccggaattcccgggntctacccacgtcgtctcgtgatgtgtcaactggtttggctttggattggtcgtgcttcaatggggtgtcatttttacgttgcgtggctgggactaaaggggtaacgaaggtactttggcatgtccaaatgtcgtaggattatcgnaatccatcagtccatttcaggtg

SEQ ID NO: 100033 - DNA, 340 bp, Zea mays
cggacgcgtgggcggacgcgtgggctagtagtgggtgtcgtatactgcctcatcagctggagtgtcggtctccccaagcgagcgcctatcaatggcacgctcctcaagcttctctttccagtcgccctgtgccatggtattggtcacatcactagcaatgtgtccttcgctgctgttgcagtctcatttgctcacactatcaaagctctggagcccttcttcagcgcagcggctactcagtttatccttggacagcaagttcccttctctctggggctttctcttgcccctggggtcattggtggttcaatggcattccttactgagctttcattcaact

SEQ ID NO: 100034 - DNA, 421 bp, Zea mays
aattcccgggtcgacccactcgtccgtgcacgcgtccgcccacgcgttcgtcgacccactcgtccgatcaccgatgaacctgcgggtgctgcttcacacggaataagtgataggctgtacgaataccatctaagggatggcaaccggtagtgaagcctcgaaagcagctgaagctgtggttgactggcataaacacgacagcaagaggatgctacatgctgcttaccgtgatggggatctgaaccgcacaatcaagtactacacggaatgctttgggatgaaactgctgaagaaaagggatgttcctgatgagaagtacaccaatgccttccttggctttcggccagataacaccaactgttcagttgaattgacttacaactatggcgttgacaagtatgacattggaacaggctttggg

SEQ ID NO: 100035 - DNA, 383 bp, Zea mays
ctaccagcgactcagcgagcgagagcagcacacacgcagctagctaggagcagcagcagcggcggcggcgatggcggcctccatgatctcctcgtcagctctggcggtggcgcctcagggcctgccgcccctcggccgccgcgcctcctccttcgccgtcgtctgctccaagaagaagatcaagaccgacaagccctacgggattgggggtggcctgaccgtcgacgtcgacgccaacgggagaaagggcaagggcaagggcgtgtaccagttcgtcgacaagtacggcgcgaacgtcgacggatacagcccaatctacaacgaggatgactggtctcccaccggcgacgtctacgtcggtggaaccactgggcttctgatct

SEQ ID NO: 100036 - DNA, 405 bp, Zea mays
tgccaaggaggctgccagcttcacctcccaggtcatcatcatgaaccaccctgggcagagtggcaacggctatgccccagtgctggactgccacacctcccacatcgccgtcaagtttgctgagctcattaccaagatcgacaggcgatctggcaaggagctcgagaaggagcccaagttcctgaagaacggtgatgctggtatggtgaagatgattcccaccaagcctatggtggtggagacattctccgcgtatcctcccctgggtaggtttgccgtccgcgacatgaggcagacggttgctggtggagtcatcaagagtgtggagaagaaggacccaaccggcgccaaggtgaccaaggcggccgccaagaagaaatgatgcgatcccgtgtctgcttttgc

SEQ ID NO: 100037 - DNA, 369 bp, Zea mays
caaacaccatagttctatctgggcttagtggcagtggcaaaaccactatttactaccagcttcgggatggatcatcacatcaaggaactgttacttcaatggaagaaaacagtgatacttttgtgctgcattcggagcaagaaaggaaagacaaagtaaaacctgtgcatattattgatgttcctggtcatgctaggctcaaacccaaacttgatgaagtcctgcctaaagctgctgcggttgtctttgttgttgatgctcaagatttcttgtctagcatgcaagctgctgcagagtacctttatgacattctgacaaaagcaactgtagtgaagaaaaaagtccctgtgcttatattctgcaacaaga

SEQ ID NO: 100038 - DNA, 373 bp, Zea mays
cccacgcgtccggacatttttttcgctgtcaaggcatttgcagccggtgtcatcctggccacgggcatggtccacattctgccagcagcatttgatgggctgacatccccatgcctctacaaaggtggcagtggtgggaacattttcccctttgcaggactcattgcaatgtctgctgcaatggccactatggtgatagactcactagctgctgggtactaccgccggtctcacttcaagaaggcacggccaatcgacatcctagagatccatgaacaaccaggagatgaagaaaggtctgggcatgcacaacatgtgcatgtgcacacccatgcaacacatgggcattcacacggaaaggtggatgtcatca

SEQ ID NO: 100039 - DNA, 430 bp, Zea mays
gcggcggcggtgtgcgacatgagcaacgagcagttcatgtcgtgccagcccgcggcggccaagacgacggacccgccggccgcgccgtcgcaggcgtgctgcgacgcgctggcggtggcggacctcaagtgcctgtgcggctacaagaactcgccgtggatgggcgtctacaacatcgaccccaagcgcgccatggagcttccggccaagtgcggcctcgccacgccgtccgactgctagcagtgtgctagccaagccaagccaagcaggaaggcccccggcattgctagctgtacgtgtctgtgtgtgcatctgcagcagggtgcaggcaggggcccgtacgtacgtgtctctttctctctctcatcttgtcaccgtacctatctagagtgtgtgtggtcgtactaattaaaatggtcctggcgtcgtc

SEQ ID NO: 100040 - DNA, 417 bp, Zea mays
cgcgctgccgtggttcaagacgggcgtcatcccgcccgcgggcacgtacaactactgggccgactcctacacgctcttcgtcttcaacatggcgctcatgggcttcgccgagcaccgtcggctccaggactggtacaacccgggctccatgggcaagcagtacttcctcggcctcgagaagttcctcgccggctccggcgacccgtcctaccccggcgggcccctcttcaacccgctcggcttcggcaagaccgagaaggagatgaatgagctcaagctcaaggagatcaagaacggcaggctcgccatgctcgccatcctcggttacttcatccaggggctcgtcaccggcgtcggcccgttccagaacctgctcgaccacctcgccgaccccgtcaacaacaacgtgctcaccag

SEQ ID NO: 100041 - DNA, 315 bp, Zea mays
ctttgctgttgagccatggactaagggctttagcacgtcgtgtgcggcaccatattcggctggagccacagagcatcaattatcgatcgatgagaaggtggataactccaccgttgcatctgattctgatgggaagtcaccagtttctgaaaaattgaagtttctctctggttcatgttacttgcctcaccctgataaggaggctactggtggtgaggatgcacatttcattagcattgatgagcatgtgattggtgtagcagatggtgttggtggttgggcaaatgttggtatcgaagctggactatattccaa

SEQ ID NO: 100042 - DNA, 403 bp, Zea mays
  unsure (1)..(403): unsure at all n locations
ggcaagcagtacttcctcggcctcgagaagttcctcgccggctccggcgacccgtcctgccccggcgggcccctcttcaacccgctcggcttcggcaagaccgagaaggagatgaatgagctcaagctcaaggagatcaagaacggcaggctcgccatgctcgccatcctcggttacttcatccaggggctcgtcaccggcgtcggcccgttccagaacctgctcgaccacctcgccgaccccgtcaacaacaacgtgctcaccagcctcaagttccactagaacgtggtgcatcagcatacctgctgctgccgtcgncgtcgncagttgtttgctgtggaaagctagatgcatgcgtgttgtaaaggaacctgaagcgttgcatcggtcatgattcatgcat

SEQ ID NO: 100043 - DNA, 406 bp, Zea mays
  unsure (1)..(406): unsure at all n locations
acgaaaggcgctggtagccccatggatgttctctgtcaggttggtctggatggaattgggatgcttgatcccaacactggtaggacactaagaatatatccccttgaaactgtaactagatgtgatgtattagattcctctatttttgccttttggtccaagagttcagtagatgttgaaggaaaaagaataaggctgaaatcaaacagctatacatccaacaccattcttgacactgtcacagctgcgactgtgcaattcaaggagattggtgaaagcagcatttcaagaagtatagcaattgctgatgcatccaagcccgctgagcagccaaatgagaggaagaaaaatgtccttgattggaggaatttaatgaagcctatgaatgangaagaagatcactggg

SEQ ID NO: 100044 - DNA, 422 bp, Zea mays
  unsure (1)..(422): unsure at all n locations
cccacgcgtccgtccacgcgtccgtccacgcgttcgcccacgcgtccgcccacgcgtgcgctggaaaccctagccgccatatctcacgatccactcgagcaccaagccgagggaaggtgaggagcgatggcgcgcggcgtggtgtcggcgaagggcggcgcggtcgcgggcaagaagaaggggtcggtttccttcacgatcgactgcaccaagccagtggaggacaagatcatggaggtcgcctcgctcgagaagttcctgcaggagcgcatcaaggtcgccggcggcaaggctggcaacctcggcgactccgtcaccatctctcgcgagaagaccaaggtcaccgtcacctctgacggacccttctncaagaggtacctgaagtacttgaccaagaagtacttgaagaagcacaacgtgcg

SEQ ID NO: 100045 - DNA, 217 bp, Zea mays
tcccaagccagtaccgagtcctacgagcagtcgcacgcaagtgtcaagagacgaaacggtcgacatggctcgcacgcaatctgccgtagcggtcgccgtggtggccgcggtgctgctgctggcagcggcggcgacgacctcggaggccgccatcacctgcgggcaggtgagctccgccatcgcgccctgcctctcctacgcccgcggcacggggtcc

SEQ ID NO: 100046 - DNA, 274 bp, Zea mays
tggaaagccagtacctagtcctacgagcagtcgaacgcaagtgtcaagagacgaatcggtcgacatggctcgcacgctatctatcgtatcggtcgccgtggtggccgaggtgctgctgctggcatccgcggcgacgacctcggaagccgccatcacatgctggcaggtgagcttcggcatcgcgccctgcctatcctacgcccgctgcacggggtccgcccaatcctcgtcctgctgtaacgtcgtcaggaacctgaagagcgccttcagcacc

SEQ ID NO: 100047 - DNA, 271 bp, Zea mays
gggttcgtgggtgagcggatcgagatggcggcgtcggatgttgagtaccgctgcttcgtcggcggcctcgcctgggccacggacgaccactccctccacaacgccttcagcacctacggcgaggtcctcgagtccaagatcatcctcgatcgggagacgcagaggtcccgcggcttcggcttcgtcaccttctccacggaggaggcgatgcggaacgccatcgagggcatgaacggcaaggagctggacggccgcaacatcaccgtcaacg

SEQ ID NO: 100048 - DNA, 328 bp, Zea mays
gccactcgtccgcccacgcgtgcgcccacgcgtccgctcggacgacgaactaataaagcgcgcgcgcgcactcggagaggctcggagagctgaatgagatggcacaggccatggcgtgcatgaccggcctatcgcagggcgttctgtccagcaggcgcgccgccaacagggccaggacggccgacgtcgatagggcgtacggcgaggcgcaggcgcaggcgcaggcgggccggcgagccatgctcggactggtggccactggcatcgtcggcggcgccttgtcgcatgcggtgcacgccgagaccgtcaagaccatcaagatcggagc

SEQ ID NO: 100049 - DNA, 289 bp, Zea mays
cacaaactggaattggcacgtccattgccatagctggtgttgctatgtactcttacatgaaggctaagattgaagaggagaaaaggaaaaagagcgcatgactgctgtgaataatattatcgggaccttcctcggacacaacatcgtcgacaatcacgacctacttctataccttgttttggtttcatcttgagtcagtcggtccattgtttgttcccagtctggtgattaaaagtctgcaaattctgtttgtggaattggcagcgatacaaatttggcttctttaagt

SEQ ID NO: 100050 - DNA, 328 bp, Zea mays
taccggtgctcggaattcccgggtcgagccactcgtccgcacaaactggaatttgcacgtccattgccatagctggtgttgctaggtactcttacatgaaggctaggattgaagaggagaaaaggaaaaagagcgcatgactgctgtgaataatattatcgggaccttcctcggacacaacatcgtcgacaatcacgacctacttctataccttgttttgttttcatcttgagtcagtcggtccattgtttgttcccagtctggtgattaaaagtctgcaaattctgtttgtggaattggcagcgatacaaatttggcttctttaagt

SEQ ID NO: 100051 - DNA, 395 bp, Zea mays
gtagtacctattactcaagcaaatttccttctactttctaaggttgatcgatgctctggaactgatgaggcatggagtgaagcgctttcttgttcgcaagagtgggagctggaaaggcattaccaagagattttcagtgctttataatggtaagtggctgaagaacatggaatcaacatctccaagtgcagccagcagcagcagcacgcagctatccccacgttctggttctgcagaaaagttctgctgcctatcaagggaagatgttctccggtttctcattggatgccttggtgctcttgctcccatcccgctgactcagatatcttcccttggagccatcaatccgcagtacagttacgtggaagcatctgcgcctgcgatggaagcaattc

SEQ ID NO: 100052 - DNA, 335 bp, Zea mays
ggtttgttgataagttcaatatcatcatgcgcaaatctttgggcaatcattatggatgcaggaactggcttctcagctcaagtttatgagctatcttcacactttcttcataaggagtggatcatggaacaatgggataaaagtttctacatcagttctgttgctggctccaacaatggaagttctattgtagtgatgtcaaaaggcacaccatatacacagcaatcttataaagtcagtgattcctttccatttaagtggataaacaagaaatggaaagaaaggtttcatgggactgcaatggcaacatcaggcaatcgatgggctatagtcat

SEQ ID NO: 100053 - DNA, 310 bp, Zea mays
gccgccaccggcaaggggccactcaacaactgggccacccaccttagcgacccactccgtaccggcatcttcgacgttcggaggatcctcttaagcccgccattgatccgctccgtccatcgatcgaaacgtggtcttgaattaactatgatagatctctatgagcctggagatggatcaacccgtcgtgcgtagtttcattttgtgatgaatgggagagagggtatgggacaagattgatcaacccgtcgtgcttacgttttggtaattaggagagctaccgctcggatttggagaattggaatatatg

SEQ ID NO: 100054 - DNA, 378 bp, Zea mays
agatcacctaccagttctaccgcgtcttccccaacggcgaggtgcagtacctccaccccaaggacggcgtctacccggagaaggtcaaccccggcagggagggcgtcggccagaacttccgcagcatcggcaagaacgtcaaccccatcgacgtcaagttcaccggcaaggccaccttcgactaatcacacttcacgtacgccgcacgccccagccgggatccaaattaaagaacttcttcttctattaattacagtatattggaatttggctgctggtacggtggtggcatgatttgagatgggcatgatgatccctggggaattttattaccaagtcttttcttatatttacatggtcatttgcttgcttcttgcg

SEQ ID NO: 100055 - DNA, 438 bp, Zea mays
  unsure (1)..(438): unsure at all n locations
cgcacaccaagagatagagattgctggtcgagaagaagagatgttacatatataataactactgtaggcagcggcatctcctgctgggacgaaggttcaagaagctagctaagagagaagggcataacgagataataagcagcgcgcgaagatgcaagactgggcgccggtgttcgtctcgctggtgctcttcatcctgctgtcgccgggcctgctgttccagatgccgggcaagtgccggatcatcgagttcggcaacttccagaccagcgccatctccatcctcgtccacgccatcctcttcttcgccctcgccgncatcttcctcgtcgccgtcggggtgcacatgtacctcggctcctaggcggcggcgcggngcgccgtaccttctctctctcgccgngcgcgccattcgtctcttcttttatggtctctctc

SEQ ID NO: 100056 - DNA, 273 bp, Zea mays
gccacgttggtgtcggcgtgggaaaggccaaggaggtcacggaggccatcaccaaggccgccatgaacggccggcgcaaccttgtcacagtgccgctaactaagtactccacattcccgcacagagctgatgcggactatggagcagccaaggtgatgctgaggcctgcttgccctggatctggtgtcattgctggtggagccgtgagggttgtgctggagatggctggtgttgaaaatgctctgggcaagcaactgcgcagcaaggaccccc

SEQ ID NO: 100057 - DNA, 475 bp, Zea mays
accggtccggaattccagggacgacccacgcgtgcgatcacgggcgacgccaacacgctggccggtgacatctcgcccaaggccgggctgggcgacctccgcggcctcgcggcggggctgcgcggccagaacggctctgccatgatcgacggctccgagagcttcgacggcgccaaggcgtacaaggacagcaagatctgcaacatgctcaccatgcaggagctgcaccggcggtaccacgaggagacgggcatcacgttcgcgtcgctctacccggggtgcatcgccaccacggggctgttccgcgagcacatcccgctgttccgcctgctcttcccgcctttccagaagttcgtcaccaagggcttcgtgtcggaggcggagtccggcaagaggctggcgcatgtggtcagcgaccccagccttaccaaagtcggggtgtactggagctggaacaggggactcgcgtcgttcg

SEQ ID NO: 100058 - DNA, 429 bp, Zea mays
  unsure (1)..(429): unsure at all n locations
acgccattcaacgacacactgtggcggacatgggttaacgatgagaaattcctcatcgacaccgactcctccaactacatggtgtggtcgtccagtggccggattgcttatcccaagggtagcaagcagatgacaagagaagtggctcctgacaatgtctacaactctgcaagatccgtgaggccaggggtgaatgtgacttggggtttccctgtgcctgctagcagccggtaccttgtgcgtatgcacttctgtgacattgctagcaaggctctgtatgagctctacttcaatatctacgtcaatggtgatcttgcagtcaaggatttcgatctctccagtgcaactggattcttggcctatccttattacattgactntatcgtcgatgtgaaggatgaggggatactgaaattggcgattggtggc

SEQ ID NO: 100059 - DNA, 398 bp, Zea mays
ccgattggaaaggccaagctcaaaaatggtttttatttaggcttactggaaatgacgatgagattaaccttaatggtgatggatctgagaagccagagtttggtgaatggacatggatgacacccaaggaagttatcgaaaaggcagttgatttcaagaaacctgtatatgaggaagcattgaaacactttgccccctacctgcagtcagatccagccgcttcatcatagaagatttggccaatttgcttgcatccctgctgtatctggacccccaataatttgacacgacgcaatgtagccatgaggtgtgctatacaatttgatagtgtgtggcctgtttgagtgaattatatatgccagcattggatcctcgccctctacttagtcacataagta

SEQ ID NO: 100060 - DNA, 443 bp, Zea mays
cccacgcgtccggggacgcacgggacagcgcgtcaggctctacgtccggggcaccatcgtgggatacaagaggtccaagtcgaaccagtacgagaccacgtcgctcattcagatcgagggggtgaacaccaaggaggacgtcgcgtggtacgctggcaagcgcatggcgtacatctacaaggctaagaccaagagcagcgagacccgctacaggtgcatctggggcaaggtcacccgcccgcacggcaactcgggcgtcgtccgcgccaagttcaagtccaaccttccgcctgagtccatggggcgcaaggtcagagtgttcatgtacccgagcagcatctaaggttaggtttttgttggagtaaaggtggactctaaatggccatgcttagttcttctctctgagcttaaaatgccatgtgttggcaacttagattgttcat

SEQ ID NO: 100061 - DNA, 374 bp, Zea mays
cgcggaactggggccagaactggcagttcagcgccatcctcgtcggccaggcgctcgcgttccgcgtcaccggcagcgaccgccgcacctccacctcctggaacgccgccccgcgggactggcgcttcggacagaccttcgagggcaagaacttcagggtctgagctcaggccgcgagtggcggcgagaagaagccagcgctcaaggccttcttccgccgtactattatatataccgtgattactgctactagtagtcggtataaagcgcgtgttagggtggtgggaatgtacgtgaatgcccgtttagggtcacgccgtctcgccctggttcaagtactctctgaaaaaaaaggagcctttttcttctgaaaa

SEQ ID NO: 100062 - DNA, 437 bp, Zea mays
ggggatatctggacatcagagacactgtacagtgcgtggagctagcaatagccaacggagccaaacctggcgagttcagagtcttcaaccagttcaccgagcagttctctgtcaatgagctagccaaactggtgactgcggcaggagcgaagcttgggctagaagtggagaccaaatcgatacccaacccacgagtcgaggctgatgagcactactacaacgccaagcacacgaagcttattgagctcggcctggtgccccacctgctctcggactccctgctcgactcgcttctcaattttgccattcaatacaaggatcgggtcgacacggcacagatcatgcccagtgtgtcgtggaagaagatgggtgccaagccacggacagtctctgtttagagggtgattcaactttccctggggtataatatcaaccat

SEQ ID NO: 100063 - DNA, 459 bp, Zea mays
aaacccgggtggagccacgcgtgcgcgcgcagtcgcccaccagatcactagctttactttgttgaggggtgatggcgcgtcgtggcgaaacctcagctacgaggcagggcttaaaaagcttgatgagtaccttctcactcgcagctacatcactggctaccaagcttccaaggatgacttggctgtctacacttcgttttcgtctgctccctcgtccaagtatatcaacgtagcaaggtggtttaatcacattgatgcgctcgtgaggctgagcggaattactgcagagggccaaggtgtgaaggttgaatcgtcagcagttccttcagccccaactccagatgttgctgaagcacaggccccagttgctgaagaggacgacgacgatgatgttgacctttttggtgaggagaccgaagatgagaagaaagctgctgaaaagcgtgctgcaactggcca

SEQ ID NO: 100064 - DNA, 408 bp, Zea mays
atgaacttcatgcacagggacgaagaggtgaactacttcccttcgaggtttgatcccggccgtcacgcggagaaggtccccattcctccccgtgttctaacaggctgtcgtgagaagtgcatcattcagaaggagaacaacttcaagcaggctggcgagagatatcgttccttcgaccctgcaaggcaagaccggttcatccagcgatgggttgacgcactgacagaccctcgcgtgacccatgaacaccgtaccatttggatctcctactggtcccagtgcgacgccgctcttggccagaagctggcttctaggctgaacctgaagccgagcatgtaagatcgacgaggaagaaagcaggcaccggtggccaaggatgcaacgcaacatggagcgtgtgatgtttac

SEQ ID NO: 100065 - DNA, 405 bp, Zea mays
gagaggaagaggttcccggcgcctccactaccatgtcgtcgatgatgaacgcgctggcgaactggctggcgaacccgcgccgcaacccgctggcgcgcctccacatgcacgccgtctcctcgcgcctcaggaaatacggactgaggtacgacgacctctacgacccctacttcgatctggacatcaaggaggcgctcggtaggctgcctagggaggtggtcgacgcccgcatccagcgcctcaagcgtgccatggacctctccatgaagcaccagtacctcccggaggacctccaggcacagcaggttccattcagaggatatttgggtgacatgttggcgttggtgaaaaaggaaagcgccgagcgtcagtcactgggagccctttcactataccagaagacac

SEQ ID NO: 100066 - DNA, 413 bp, Zea mays
ctcctaccccgcagccgccgcgcaggtagtcctagcacccgcgacgagcaggatctgcccaggtgctctttgagtagttgccccaactgtcaccatgcataacgaggagggtaagactgtggacctctatgtccctaggaagtgctcggccacaaacaggatcatcactgccaaggaccatgcctctgtccagatcaacattggccacttggatgcgaatggcctgtatgatggtcacttcacaacgtttgctctctctgggtttgtccgtgctcagggcgacgcagacagctccttggacaggctgtggcagaagaagaaagctgatatcaagcagtagattttacatctagtttaccaagatatggacactgccttagctatgttttgaattcatgtcactatatgcaatg

SEQ ID NO: 100067 - DNA, 378 bp, Zea mays
cccgcagtcgcccaccagatcacttgttaaactttgttgaggggtgatggcggtttctggcgcaaacctcagctccgaggcagggcttaaaaagcttgatgagtaccttctcactcgcagctacatcactggctaccaagcttccaaggatgacttggctgtctacacttcgttttcgtctgctccctcgtccaagtatatcaacgtagcaaggtggtttaatcacattgatgcgctcgtgaggctgagcggaattactgcagagggccaaggtgtgaaggttgaatcgtcagcagttccttcagccccaactccagatgttgctgaagcacaggccccagttgctgaggaggacgacgacgatgatgttgacctttt

SEQ ID NO: 100068 - DNA, 439 bp, Zea mays
cggacgcgtgggcgttgatggtcctaatgatgagggtgaaatgttcacccgccctggtgaactcagcgatcgctttccacagccttatgcaaatgagcaagcagcccgatttgctaatggtggcgcctacccgccggaccttagtcttatcacaaaggcaaggcacaatggtcagaactatgttttcgctcttcttactggataccgtgatccacctgctggtgttcagattcgtgagggtctgcactacaacccctacttccctggtggtgccatagccatgcccaagatgctcaatgatggagctgttgagtatgaggatggtactcctgcaactgaagcccagatgggtaaggatgttgtatcattcctttcatgggcagctgagcctgagatgggagagagaaagctgatgggagtgaaatggatccttctacta

SEQ ID NO: 100069 - DNA, 421 bp, Zea mays
  unsure (1)..(421): unsure at all n locations
gtggtgggtcgcgcgctgccgaccccaaccgatgagcaccccaagatctaccgcatgagagctctgggccaccaacgaggttcgcgccaagtccaagttctggtacttcctgagaaagctcaagaaggtgaagaagagcaatggccagatgcttgccatcaacgagatctttgagcgcaacccgaccaccatcaagaactatggcatctggctgcgctaccagagcaggactggttaccacaacatgtacaaggagtaccgcgacaccaccctgaacggcgcagtggagcagatgtacaacgagatggcctnccgccaccgcgtgaggtccccctgcatacagatcatcaagacagcgacggtccacttcaagctgtgcaagagggacaacaccaaacagttccacaacttcgagatcaag

SEQ ID NO: 100070 - DNA, 392 bp, Zea mays
cccacgcgtccgtttaaaacctgtgctcatcgagcttattgggggaaagacaaaggagcacaaagaaacccttgaggttgacgcagcccttatagctacaggaagggcgccattcaccaaagggcttggcttggaaaacatcaatgttgctacacaacgtggttttgtgcctgttgatgaacggatgcgagtcatggatgcaggtggcaatgtggtacccaatttatattgcattggagatgccaatggcaagctcatgcttgcccatgctgccagtgcacaaggaatttcagttgttgaacaaatctctggaaaggatcacatgctaaatcatttaagcatcccagcagcatgttttacccatccagagattagtatggttggattgacag

SEQ ID NO: 100071 - DNA, 434 bp, Zea mays
  unsure (1)..(434): unsure at all n locations
gcactttctcctcgtcccagacaagccaatcgaagccgagatacgaccatggactcgagcggcaccggagcagggggtaaggggaagaagggagcggccgggcgcaaggtcggcgggccaaggaagaagtcggtgtcgaggtccgtgaaggccggtctccagttccccgtcggccgcatcgggcgctacttgaagaagggccgctacgcgcagcgtgtcggcaccggcgcccccgtctacctcgccgctgtcctcgaatacctcgccgctgaggttctggagctcgccggtaatgctgccagggacaacaagaagactcgcattattccgcgccacgtgcttctggcgatccggaacgacgaggagcttgngaagctgttgggcggcgtgaccatcgctcacggcggtgtgctccccaatatcaaccctgttct

SEQ ID NO: 100072 - DNA, 312 bp, Zea mays
gtgatgatgcattgactgcgccaaattatgaggcacaaggaattggattatgccgtgcagagcacatgttctttgctggagacgatacgattaaggctgtcaggcaaatgattatggctcccacgtttgagctgaagcatcatgcgctcgaccgtctcttgccgtatcagaagtctgacttcgaaggcattttcactgctatggatggactacctgttaccatccgactcctggaccctctcctctacgagttcctttcagaagggaacatcgtagacattgtcagtgaattctgtgctgagactgtagcca

SEQ ID NO: 100073 - DNA, 426 bp, Zea mays
cgcagaagcagtatgctgatgctgtgattgaagttctgccgacccagttgattcccgaggagcgacgaaggaaaggtgctgcgtgttaagctcatcatgaaagaaggggtgaagaacttcaacccggtttatctctttgacgaaggatcgaccatcagctgggtgccttgtggaagaaagctcacatgctcttaccctggcatcaaattttcctatggcccggacacttacttcggaaacgaggtatctgttctggagatggatgggcaattcgacagactagatgagctcatctacgtggagagccatctaagcaacctttcaaccaagttctacggagaggtgacacaacaaatgctaaagcatgcagactttccaggtagcaacaacgggacaggtctctttcagaccatcattggactgaag

SEQ ID NO: 100074 - DNA, 442 bp, Zea mays
aggcctacctccgccaggtcgggctcgacgtcaactccgcgctcgcttttctccagggaaggttgcagcagtacaaaatagtggagatgaagcttctagcacaacaaagggatcttcaggcaaagattcctgatatagagaagtgcttggatattgttgcaacattacaagctaaaaaggatttgggtgaggcactcatagctgatttcgaattgtccgaggggatctactcccgtgcgaaaattgaggatactgactcggtgtgcctgtggttgggtgcaaatgtgatgctggagtactcttgcgatgaggccaatgccctcttgaagaaaaacttggaaaatgccaaggccagcttagaagtccttgttgctgatctccatttcctgcgagaccagcaaaccatcactcaggttacaatttctcgggtattcaactggga

SEQ ID NO: 100075 - DNA, 439 bp, Zea mays
  unsure (1)..(439): unsure at all n locations
ggnccggaattcccgggtcgacgcacgcgtccgaccacgcgttcgcccacgcgtccggttgtgttatcttttgaggttgtcaactgcaatggcggtgaggtccaatgggagggtacgtcaccgaccatatcaattgacaacacatctggatgtcaattatacttaatcaaaaattcactgggagcttcaattacttctgctaaatctaatgaaatcaatgtgatggctccaagtggcagtactgactgtgattgggatgagcatgcattgcctaagcagtacatccataatttcaaagattggcaattcaccactataccaagctcacactctggggcgtaaataccaattgttactgatgtgtttgctttttatttcacgtttgccttgtttttgaaaatgaacgtttgatgaggtttgtaacagctttgggtctctc

SEQ ID NO: 100076 - DNA, 435 bp, Zea mays
  unsure (1)..(435): unsure at all n locations
ggcggggatgacgagcccaatggtggccaccccggtccagttccacacaaccggccgcgtcagcttctgctccttttcctttcccagcgcatcagggaggcggcgattcgcggcggtgagggcgtccgcggagacgatggcgacggagaagctgggcatcaaggtggagcgcaacccgcccgagtcccgtctctccgagctcggcgtccgccagtggcccaagtgggggtgcgagaagagcaagttcccgtggacctactccgccaaggagacgtgctacctgctgcaggggaaggtgaaggtgtaccccgaaggccacggngaggagttcgtggagatcggcgcgggagaccttgtcgtcttccccaagggcatgagctgcacctgggacgtcgccgaggccgtcgacaagcactacaacttcgagtagccgcc

SEQ ID NO: 100077 - DNA, 477 bp, Zea mays
  unsure (1)..(477): unsure at all n locations
cgtactcggtctcggnaattcccgggntcgactccacgtccgtctcgggagcacccaagcacaagtncagcacctcggtctaggccntgtgcgccatcnngccgctcggcgccttgcgctnactctacganngaagcacgaggggcgaagaagggactctccgagctacgtcgctatcaggcacatatgatcacggagggagggtcgctgcnctgcggcggcccggtcggcgctcggcgtgctaccgtnnattccacgagcactcacgaagaagggaagaaggggacctacaaggacccgccgaaggagggctagcngtgtcgagaagaaagcactctatccaccttcttcgggctgaaaccgtaagtaccggccccggcgcgccgactncgagctaagctaagctccgggcgcacaaacataccacacaacctggtttaaaattctgtactggcatgccgtgtgtaaatttggatg

SEQ ID NO: 100078 - DNA, 453 bp, Zea mays
  unsure (1)..(453): unsure at all n locations
attcccgggtgcgacgccagcgccgtccgcgccgaaataaccttnntaggttttgttgatttattgtcgcgatgattttatntgaaaaagatcgggggtcgcggtatncttgttcactcaggactgggtatccatgccaggtgttataccggtggcttctgggggtattcatgtttggcatatgccagctctgaccgaaatctttggagatgattccgtattacaatttggtggaggaactttaggacatccttggggaaatgcacctggtgcagcagctaatcgtgtggctttagaagcctgtgtacaagctcgtaacgaagggcgcgatcttgctcgtgaaggtaatgaaattatcaaagcagcttgcaaatggagtgctgaactagccgcagcttgtgaaatatggaaggagatcacatntgatggtttcaaagcgatggataccattat

SEQ ID NO: 100079 - DNA, 402 bp, Zea mays
cccacgcgttcgatgcaccacacctcttcttcttcttcctcctcctcctagcacagctagcggctgctccccttcgcctgtgatcatgtcttgcaccaacggcaagtgcgactgtggctccagctgctcctgcggcagctcatgcaactgcatgtcccctaatgtggagaccgccgccgccagcagcatcaagaccacggtcctcgccgcgccgaccaccaaggccagcgcctgcggcttcgaggcggacaccgagggcggcggctgcgactgcaacacctgcaactgcggcaccagctgcggctgctcctgctgcagctgcaactgaaccggtcaagcgatggcccacgagagtcgagaggactacgaccagtcgtataaatataatagcggcgtctaaat

SEQ ID NO: 100080 - DNA, 416 bp, Zea mays
ccgcgcgcagcgttagggtgcggggtccgtgttcaagtcccagacccaccaccgcaagggccccgcccgcttccgctccctcgacttcggcgagcgcaacgggtacctcaagggcgtcgtcaccgacgtcatccacgaccccggccgtggcgcgccgctcgccaaggtcactttccgccacccattcaggtacaagcaccagaaggagctctttgtcgcagccgagggcatgtacacgggccagttcgtctactgcggtcgccgcgccaccctctccatcggcaacgtgctgccccttcgcgggatccctgagggtgccgtcgtctgcaacgtcgagcatcacgtcggtgaccgcggtgtcttcgccagggcctctggggactacgccattgtgatcagccacaaaccctgacaac

SEQ ID NO: 100081 - DNA, 372 bp, Zea mays
cggacgcgtggggcgagctcatccacggttgctgggccatgctcgccaccctcggcgcgctctccgtcgagtggctcaccggcgtcacctggcaggacgccggcaaggtggagctggtggacgggtcctcctacctgggccagccgctgccgttctccatctcgacgctcatctggatcgaggtgctcgtgatcggctacatcgagttccagcgcaacgccgagctcgacccggagaagaggctgtaccccggcggctcctacttcgacccgctcggcctggcggccgaccctgagaagaaggagcggctgcagctggcggagatcaagcacgcgcgcctcgccatggtcgccttcctcggcttcgccgtgc

SEQ ID NO: 100082 - DNA, 354 bp, Zea mays
cccacgcgtccgcccacgcgtccgggtttttgtggagaacacggtggagagccttcgtgtgtggccttcttcgcgaaggctgggctggattacgtttcttgctcccctttcagggttccgattgctaggctagctgcagctcaggtgcttgtctgaggctgcctcctcgttggcaaccggattgcctgctgctggtggatgtggtgatcaacagtattattacagagccatgctatgtgaacattactagtagcagtgctcataaaagctacaatcccatctcccttttttttccagtcatgtaaaacttccaaactgctccatggttcaaaactctgttcttcaatacaaaaa

SEQ ID NO: 100083 - DNA, 347 bp, Zea mays
tgacctgggctaaggcgtcacaatcgacagcacgaacagtaccagcgaacggtgatttagactgcagaaggcgggtgcataccagcctgcagtgtcgcaattgaggctgctggcacagcatttcagctctacagctcgggtatcttcactggaagctgtggaacagcgctggaccatggtgtcacggccgccggctacgggacagagaacggcaaggactactgcatcgtgaagaactcatggggcagcagctgtagcgagtccgggtacgtgaggatggagcgcaacatcaaggcgtccagcggcaagtgcggcatcgcggctgagccgacatacgccgatgaagg

SEQ ID NO: 100084 - DNA, 351 bp, Zea mays
  unsure (1)..(351): unsure at all n locations
ccgaaaagannnagtaaataataaaacatgagtctctttttcataattctcaaataaagntgttttttttaatattactcctgactaagatgtatatattaatcatcctattttaatatatattaatcatcctattttaattaggttctaatccaattaatactaactattttcttttttatttaataaccatctgactatcatataataaagggtagaacaattctttcttctacagattctacaaaaactgaaacaaaatgcatcgaaaaaattttctttgtataaaaattatctctatatcatatctaaataaaaaggaaatcaaaaagaacggaagttgggattaca

SEQ ID NO: 100085 - DNA, 436 bp, Zea mays
ccaacaagttctcggagcgccagcccatcggcacggcggcgcagggcacggacgacaaggactacaaggagcccccgccggcgccgctcttcgagcccggggagctcaagtcctggtccttctaccgcgccggcatcgccgagttcgtcgccaccttcctcttcctctacatctccatcctcaccgtcatgggcgtctccaagtccacctccaagtgcgccaccgtcggcatccagggcatcgcctggtccttcggcggcatgatcttcgccctcgtctactgcaccgccggcatctccggcgggcacatcaacccggcggtgaccttcgggctgttcctggcgaggaagttgtccctcaccagggcggtgttttacatcatcatgcagtgcctgggcgccatctgcggcgcgggcgtcgtcaaggggttccagca

SEQ ID NO: 100086 - DNA, 428 bp, Zea mays
taccggttcggaattcccggggcgacccacgcgtgcgcccacgcgtccgatacccctgatgatgctttgactgcgcgaaacaatggggcacaaggagtcggattatgccggacagagcacatgttctttgcttcagacgagaggattaaggctgtcacgcagatgattatggctgccacgcttgagctgacgcagcaagcgctcgaccgtgtcttgccgcatcataggtctgacttcgaacgcattttccgtgctacagatggactcccggtgaccatgcgactgctggaccctgcgctgcaccagttccttccagaagggaacatcgcggacattgcacgtgaatcatgtgctgagacggcagccaaccaggacgatgccctcgcgcgaattgaacagctctcagaagcaaacccgacgcttggctt

SEQ ID NO: 100087 - DNA, 293 bp, Zea mays
cggacgcgtgggctaccaatgggtgcatatttacaggaccacattttaatccaaacaatgggacacacggtgcaccagaagacgaaatccgtcatgcgggtgacctgggaaacattgttgcaaatgctgagggcatatccgaggcaaccattgttgatacccagatttctttgactgggccaaattcaaatgttgggagagcgtttgggggtcatgagctttgaaatgatttggggaaaaggggccatgagctcagactctctactgggaatgctggtggaagactggcatgt

SEQ ID NO: 100088 - DNA, 479 bp, Zea mays
accggttcggaattcccggctggacccacgcgtccgcggacgcgtggcagattcaagatgatgatttaagagctaagaaatgagctacaaagtcggaactctcggatttgcttgacaactaatctttggacctcaaatcagaagttgggttatctttgcttgacagcccactacattaatgcagactttatcttgaaaaaaaagattattgcgttcaaatatttgaaatatccacatacaggcctagcaatcaaagaaggaattacagagtgtctcaaagagtgggggataaaagagaagatgtttactatcacattagataatgtttctaacaatctgtcagtgcgtgaccttcgagaaagtgggctatttggaggcgatcttcgtattgtccaatgttgtgcacacatattgattctcttagttcaagatggaatggcaattgctcatggagcaatctataagattcgtgagctggt

SEQ ID NO: 100089 - DNA, 423 bp, Zea mays
ggaattaccggccggacgcgcacgcgtccgaattgactgccttcacaatagtgctgttatttagcttatgagaggactgataaatcaggttgcggaacttataactgggttgggtgcacaagaccttgatccaatgagcttgagattgtcccacagcttgtctaggtataagctgaagttcacccctcagaaggttgatacaatgatcattcaagccattggattattggatgatcttgacaaggagcttaacacttatgccatgagagttcttgaatggtatggctggcacttttcagagctcaccaaaatagttacagataatatacagtatgccaaacttgtgaacatgatgggcaacacagttaatgcactcaaccttgacttctctgagatattgtcacatgaatagctaaacacaca

SEQ ID NO: 100090 - DNA, 406 bp, Zea mays
  unsure (1)..(406): unsure at all n locations
cggaattcccgggtcgaggcacgcgtccggcctgcaccaccatcatctggatcgcgtttgtgctccacgcggccgtcaacttcnggcggggcccgtacgccgggtacctcccgaaccgcccgtccgtcagccggaagccgatgccgacgccgggcagcgacgagtacgcggagctggagcgcaagccggagaaggtgttcgtgcgcaccatcaccagccagttccaggccctcgtcggcatctcgctgctggagatcctgtccagccactcctccgacgaggtgtacctcggccagcgcgacaccaaggagtggacgtcggacgccaaggcgcaggaggcgttcaagcggttcggcgcgcggctgaccgagatcgagaaacgcgtcgtcaccatgaacgcggaccc

SEQ ID NO: 100091 - DNA, 442 bp, Zea mays
  unsure (1)..(442): unsure at all n locations
gtctatcagaacctacctctgggtctatttgcattcagaagtatgatgatactgggaagcctattggcttgcctgaactgctaacttctcaacgagttggaattgtatttcagtttcctgagaggtatttcttagcggatactgtacttgaagaagttacttttggatggcctaggcaaaaggcagacctcctattaaaagaacagctcgctttaaatcttcaaaatgcttttaactcggttggtctgacaaccatctcattagatgaaaatccgcaagctctaagtggtggatttaagaggcgacttgctttggcaattcaactggttcaaattcctgatctgttgctgcttgatgagccacttgctggtctagattggaaggctcgagctgatgttgtgaatctnctaaaggacctgaagaaacatcatactatactggt

SEQ ID NO: 100092 - DNA, 443 bp, Zea mays
gctgtgcctcgtaccatttcgatccaatggcgccgacgtcgaagctgtcgacgggcatcaagcgcgcttcgcggtcgcacgcgtaccatcgccgtgggctgtgggccatcaaggccaagaacggcggcgccttccccaaggccgacaaggccgccgccgccgtggaacccaagttctaccctgccgacgacgtcaagccccgcgttcccagcacccgcaagcctaagcctaccaagctcaggtcgagcatcacgcctgggacggtgctgatcctcctcgcagggcgcttcatggggaagagagtggtgtttctcaagcagctcaagtccggcctgctccttatctctgggcctttcaagatcaatggagtaccgatccgccgtgtgaaccagacctatgtcattgctacatcaaccaaaagtgacatctctggtggtgatgtc

SEQ ID NO: 100093 - DNA, 292 bp, Zea mays
cactttaataaacactctcctaactatttcaacacattcttcaaccacccccccctcaagcacaagctccgcatctttcttcaaaaaaaaactctgaaaatattcccccgcccgacttcttgtcctctaccccccattgttcaattccagactttaaagtacaacattaagtcaatggcttggagaagctttaccctttaggaacttaaagctgcttgcatcccaaagaaacttgctccaaccatttgtatttctgttgatcacccccgcaaaaacaaattcctttaaggac

SEQ ID NO: 100094 - DNA, 403 bp, Zea mays
cccacgcgtccgcccacgcgtccgggctgtatcagcagcatttgttgtttggatagctattgtgggcaatgcagactggaagcctttgcagttcctatgttttgctttcttctacagaatactacagaagctaagagctactgaaccaccaattactccaatatacaatgaatatggtgaggtcgaaggacgagggataagaatggcaaaaagagtagtccgtgctttgggtttgatatttggatgtgtgttcgctgcatccctgggttatacagcagctattaacttgatcgagctttcaatgcagtacactccccgccttgtttattactaccaagagctgattgttacggcggctacctccgttcttctgtgcatcacagcctcatactaccgatgaaca

SEQ ID NO: 100095 - DNA, 390 bp, Zea mays
  unsure (1)..(390): unsure at all n locations
ggctggcggagtggttcaagagggacgttttcacgtcaccgttcgaggagctgcacggggcgactctgttccacgagagcatggggagcctcgacgcagatttccacgacatggcgagcgaggccttggacgcccacgacaacttcggcatcgagatagctatgcgggagttcagggacttgttcgaggggatccagtccatgacctactgctgcggtaacttcggtgatgacaagggtgccagggccattgtcaaagccttcccacacataaaatgcactgtgctggccccttccaagatcattgccaccaaaccgggcgatggagcgatgatnaactatgtcgaaagtgacatgttcagtttcattccacctgctcaaactgtcgtgc

SEQ ID NO: 100096 - DNA, 436 bp, Zea mays
  unsure (1)..(436): unsure at all n locations
cccacgcgtccggcttctcgcccgcaacttcgtcaagttcggcgaggccgtgtggttgagggccggctcccagatcttcagcgagggcgggctggactacctcgggaacccgagcctcatccacgcgcagagcatccttgccatctgggcctgccaggtcgtgctcatgggcgccgtcgagggctaccgcatcgccggcggcccgctcggcgaggtcgtcgacccgctctaccccggcggcagcttcgacccgctcggcctcgccgacgaccccgaggccttcgccgagctcaaggtcaaggagctcaagaacggccgcctcgccatgttctccatgttcggattcttcgtccaggccatcgtcaccgggaagggcccgctcgagaacctngctgaccacattgccgaccccgtcaacaacaacgcttgggcctac

SEQ ID NO: 100097 - DNA, 445 bp, Zea mays
ctttcctaccttcttccctccgtctcccatctcgcgcaggcaggcgacacagcgacgctgagaaccctagagcgaggaggcgtgccaggccagcggtttgcgatgacggcaccggcggacaaggggaagaaggccaagaccgatgccgacggcggcgaggagaacgagcaaatcgacggcgcccttgtcttctccatcgagaagctccaggagattcaggacgagctcgagaaggttaatgaggaagcaagtgacaaggttatggaggtggagcagaaatacagtgagattcgcagacctgtctatctcaagaggggtgacattatcaagaccatcccggacttttggctcacagcgtttttgagccatcctctactaagtgagcttctgactgaagaggatcagaagatattcaagtacttggactccattgatgtcgatgatt

SEQ ID NO: 100098 - DNA, 368 bp, Zea mays
ccgagaccttcgccaagaaccgcgagctgtaggtgatccactcccgctgggccatgctcggcgcgctcggctgcgtcttccccgagctgctctcccgcaacggcgtcaagttcggcgaggccgtctggttcaaggccggctcccagatcttcagcgagggcgggctggactacctcggcaaccccagcctgatccacgcgcagagcatcctcgccatctgggcctgccaggtcgtgctcatgggtgccgtcgagggctaccgcattgccggcgggccgctcggcgaggtcgtcgacccgctgtaccctggcggcagcttcgaccccctcggcctggccgacgaccccgaggccttcgccgagctcaag

SEQ ID NO: 100099 - DNA, 413 bp, Zea mays
gcctcgaggaggcgttcaacataaccgtcgacgaaacaagcgcacaggacatcgcgacggtgcaggacgctgcagacctcatcgagaagctcatgctggaggcgcctccaaaggtcgtctagatcgatccatcagccttgtgatcggcgacttggcattttatgttaaattgttcatgttacccaatttgttctttattgatggttcaagatgagatttttgtatggatgttgctgaggtataaattagatgctccaaaggctgcatggagcagatgaagacgatgtattccacttcccatttgcatgttgtactaccatagagagatcaatgaactgttatgaagagtcactgcaactatggcttttgatctttgggaagtcaaaaaaaaaaaattaaaaaaaagggcgggc

SEQ ID NO: 100100 - DNA, 373 bp, Zea mays
cgacgatgcgctcgccggacggcaagaagctggacatgctagcggaggaggacctcgggagcatgccctacctcaaggcgaccatcaaggagacgctgcgcctgcacccgccggcgccgttcctcctcccgcactactccaccgccgactccgagatcgacggctacttcgtcccagccgggacgcgcgtcctcgtcaacgcctgggcgctcgggagggaccgcacgacgtgggagaagccggaggagttcatgccggagcggttcgtgcaggaaccgggcgccgtggacgttcacatgaagggcaaggacctcaggttcatcccgttcggctccggccggaggatctgccccgggatgaacttcggattcgc

SEQ ID NO: 100101 - DNA, 475 bp, Zea mays
taccggttcggaattcccgggtggacgcacgcgtccgcgggagtctccgcagggctcaccgggaccgcgggtccacgatggccgccaacttctgggcgtcgtcgcactgcaagcaggtgctggaccccgaggacgtggacctggtgccggcggcggaccgggagcgaggcatcacgccggaagagttccgcctcatcaagatccatatgtcgttccatatctggaggctagcacagcaggttaaagttaggcaaagagttgtagctacagcaatagcttacttcaggcgtgtgtatacaaggaagagcatgtcagactatgatcctcgtttggttgcacctacttgtttgtatttggcatctaaggtggaggagagtacagtgcaagccagacttcttgtattttatataaaaaagatgtgtggttccgatgataagtatcggtttgaaaataaggatattcttgaaatgaaatg

SEQ ID NO: 100102 - DNA, 361 bp, Zea mays
  unsure (1)..(361): unsure at all n locations
ccccaagctacctgaccggcgagttccccggcgactacggctgggacaccgcggggctgtgcgccgacccggagactttcgccaagaaccgcgagctggaggtgatccactgccgctgggccatgctgggcgcgctcgggtgcgtgttcccggagctgctcgcccgcaacggcgtcaagttcggcgaggccgtgtggttcaaggccgggtcccagatcttcagcgagggcgggcttgactacctcggcaacccgagcctgatccacgcgcagagcatcctggccatctgggcgtgccaggtggtgctcatgggcgccgtcgaggggtaccgcatcgncggtggcccgctcggggaggtggt

SEQ ID NO: 100103 - DNA, 439 bp, Zea mays
cccacgcgtccggcggtggcgggcgccgtgatggcggcggcggctacggcggtggcgggggctacggtggcggcggcggctacggtggtggtggcggcggctacggcggtggcaaccgtggcggcggctacggcaactccgacgggaactggaggaactgagcggtggggcccgcgcggccaagttatcctgttcgctgccgtgatgtttaccctagtccagagggtttatcttcgttcgtctcgtgtttgttgttgcccatctgtgtttttgattgcaaggtcgctctgtgtcagttgttagtgctgtgttcatcctcggctccagcagacccatgcatcaaacagcatggactgcggatcgatggatgctgttacccccgtcaggctttattctaagttaatcttaaggaaaaaatggtgcttcttggtgctgcaaa

SEQ ID NO: 100104 - DNA, 268 bp, Zea mays
cacgcatacggactactacttcctccggtttctctctgcttgcgcactgtcacctgcccgcgccatcttcaaccgggaccgagatgaacattgatagcctcatgaagatacacccttgactctgcacacggagcatggtcaccatgctcacgagaaaaaaaggtgtactcataacaatcaccacgctcgacaataccactaacttcactctcaaaagattaagggtcaacaccatccctgcaatcaaagacttgaacatattcaagga

SEQ ID NO: 100105 - DNA, 408 bp, Zea mays
  unsure (1)..(408): unsure at all n locations
cttaacaaggatgatgatgtacgcaagtacgtgaacacataccgcaggacattcactagcaagaacggcaagaaggtcagcaaggcacctaagatccaacggcttgtgacacccttgaccctccagaggaagcgtgctagaatcgctgacaagaagaagaggataactaagaagaagtctgaggctgctgagtaccagaagcttcttgcccagaggctgaaggaacagagagaccgccggagcgagagcttggccaagaggaggtccaagctttctgccgncgccaaggcttctgctgccacctctgcttaagaatgttcagtgttttgggatctttgtaaggtctatcttgtaacggcaaaagtgttttgggatctttgtaagctccatagttcacatcacttaagt

SEQ ID NO: 100106 - DNA, 453 bp, Zea mays
  unsure (1)..(453): unsure at all n locations
cccacgcgtccgagtgaaatgtctaaggtgtacagaccatcccatgcagatgcaacctgtgacttcaagtatggagttagagctgtgcagggaggtggaaggtcatcagccagagaaaccattggcagggtggctgcaggagctcttgcaaagaaaattctaaagctcaaatcaggagtggagatcttggcatttgtttctaaagtgcaccaagtcgtacttccagaagatgcagttgattatgagactgtaaccttggaacatatagagagcaacatcgttagatgtcctgatccagaatatgcagagaagatgattgctgccattgatacggtacgagttagaggagattcaattggtggggtcgtcacatgcattgcangaaatgttcctcgtggtcttggctctcctgtttttgacaaacttgaagctgaactgggcaaagccatgctt

SEQ ID NO: 100107 - DNA, 435 bp, Zea mays
ggccatccttccgccgccgcggactgcgtctaatcttccttctccagcagccgggcgtgcccgtcgtcctcgatcgtcccctggactggatcgcaacggagatccagccggacctgcggtggtcccttccttttctcgatagcataatgagctcgccaatggagaggtgattcgtcaggctggtatcaagttcctagtccatggtgcctggatgagcagtagagatgctactggccgtggaaggaggagggttcttctcgtcttcagctacaggttacagccatggcctcgccctcttgctgcttggacgcaaagctgaggagaagcccgtaaaggtctcgccgtggaaccagtaccggctagtcgaccgggagaccgagcaggtgtaccacctgcccttcgccaaggaccaggcttctgggaaatgtgctccct

SEQ ID NO: 100108 - DNA, 435 bp, Zea mays
aaaagaaagagtaaataataaaacaggatattctgtttcataattctgaaatagaggtgttttttttagtattactcctcattaggatgtatatattaatcatcctattttaatatatattaatcatcctattttaattaggttctaatccaattagtagtaagtattttcttttttatttaatagtctctgactatcattaaataaagggtagagcaattcttttttctagagattctagagaaagtgagacaaagtgaagcgaaagagttttctttgtataagaattaggtctatatcatatctaaatagaagggaaatcaaaaagaagggaagtggggattacattggatgaatccttaaggaagacatatcacaaaagaaataaaggctaaagtaagcgctccttgcctttggtttgagcaaaacagattc

SEQ ID NO: 100109 - DNA, 442 bp, Zea mays
cacaacccatggcggcggatatggcgtacgcgccgccgatgaaggctggcaaggccgggttcgaggctggcatgatggatccacagcacaggatccgcatcacgctctcctccaagagcgtcaagaacctcgagaaagtctgcggggatctggtgaagggcgccaagggtaaggagctcaaggtcaagggccccgtgcggatgcctaccaaggtgctccacatcaccaccaggaagtctccctgtggagaaggtaccaacacctgggatcgctttgagatgaggattcacaagagggtgatcgatctcgtcagtacaccagacgttgtcaagcagatcacctcaatcaccattgaaccaggtgtcgaggttgaggtgactatcagtgacgcttaatatggtagccttatcatttcaaaaggcttctagtgaacaggatattt

SEQ ID NO: 100110 - DNA, 375 bp, Zea mays
attcccggggggagccaggcgtccgcaagaccgccgcattgctcgaggcctcggttgtgattggggcgatcatcggaggcggcgctgacgagcagatcgagagggtgtggaagtacgcgaggtcgatcgggctgctgttccaggtggtcgacgacatactcgatgtcaccaagtcgtcagaggagctcggcaagacagcggggaaggacctggcaagcgacaaaacgacgtaccctaagctgctggggctagaaaagtcgcgggagttcgcggaggagttgctctctgatgccgtatagcagcttgcttgcttcgacaaggagaaggcagcgcctctgttgcatctggccaactatatcgtccatatgcacaact

SEQ ID NO: 100111 - DNA, 345 bp, Zea mays
cgccgctgccgcatctcctctacaggtaagaaggagagaaagagggcgaaatggtgaaggacaacaacgtcatccccaacgggcacttcaagaagcactggcagaactatgtcaagacatggttcaaccagcccgcccgcaagcagaggcgccgcatcgcacgtcaaaagaaggctgtgaagatattcccacgaccaactgctggccctcttcgtcccattgttcaatgccagactctcaagtacaacatgaagtcaagggctgggagaggctttacccttgaggagttgaaggctgcgggcattccaaaaaggcttgctccaaccattggcatttctggggatc

SEQ ID NO: 100112 - DNA, 427 bp, Zea mays
ggttcaccctcaaggaaggctccccgtaccggctcaagttcaccttctccgtcagcagcgacatcgtctccgggctccgctacaccaacaccgtctggaagacggggctcaaagttgacagagccaaggagatgctcggcacgttcagcccccagctggagccctacacgtacgtgacgccggaggacaccaccccgtcgggaatgtttgcccgggggtcctactctgccaggaccaagttcctcgacgacgaccgcaagtgctacctggagatcaactacaccttcgacatccgccgggagtggccgtcgacgagctgaccatccttccctacctccatcggtggcctgagcagaccagtcgtttcgttctgtgttcttccttttctatgttgcctcgttctgtcctgtcactaggttttttggtt

SEQ ID NO: 100113 - DNA, 439 bp, Zea mays
cgactcagcgagcgagagcagcacacactcagctagctaggagcagcagcagcggcgggggcgatggcggcctccatgatctcctcgtcagctctggcggtggcgcctcagggcctgccgcccctcggccgccgcgcctcctccttcgccgtcgtctgctccaagaagaagatcaagaccgacaagccctacgggattgggggtggcctgaccgtcgacgtcgacgccaacgggagaaagggcaagggcaagggcgtgtaccagttcgtcgacaagtacggcgcgaacgtcgacggatacagcccaatctacaacgaggatgactggtctcccaccggcgacgtctacgtcggtggaaccactgggcttctgatctgggccgtcaccctcgctgggatcctcggcggcggcgccctcctcgtctacaacaccagcgccc

SEQ ID NO: 100114 - DNA, 532 bp, Zea mays
  unsure (1)..(532): unsure at all n locations
accggttcggaattncccgggtgcgacgccacgtccgtccgaaccctattgcaaaagaaatttgtttgtatttcctaaatttaatgtgtgnnatgatatcatattgtgggtgctgactaacaagatcgtaatgtgtggagatagtttacgtagggaatcattatatacagnnaaattcgagaatgctcttatgatgcgnngggagctctgaagtnnatttccttaggagtttcaaggtgcaagcaacttccaagaatggcgaccttcatcatgccaaacaanaatacatacaangacataccttaccaagttntggaataaanggatgccaaancccatcaagacacctcatgggaaccaatgtgcatctcgacctcgacacgggagattatatattctacaggtgcataaaggttcaacacaaaccaataaaagattgaagttagggatcaaattcaaaggagcaaagaaaccgagtatgccctagtctggcgcaccggactgttcggtgtgccacccgacattgttcggt

SEQ ID NO: 100115 - DNA, 387 bp, Zea mays
cggttcggaattcccgggtcgacgccacgcgtccgcccacgcgtccgcccacgcgtccgcccacgcgtccgcccacgcgtccggcggatcgagagggcggcgtcggatgttgagtaccgctgcttcgtcggcggcctcgcctgggccacggacgaccactccctccacaacgccttcagcacctacggcgaggtcctcgagtccaagatcatcctcgatcgggagacgcagaggtcccgcggcttcggcttcgtcaccttctccacggaggaggcgatgcggaacgccatcgagggcatgaacggcaaggagctggacggccgcaacatcaccgtcaacgaggcccagtcccgcggccgccgtggaggctgcggccgtgggtacggt

SEQ ID NO: 100116 - DNA, 380 bp, Zea mays
cggacgcgtgggggctcatcggcgtcaaccacgactggtgtgaggcgttctcgacatagcggcgcacctatgacctgttgcatcttgatggcctgttcacagcagagtctcacaggtgcgagatgaagtacgtgctccttgagatggaccgtatccttcgtcccacgggctacgccataatccgggagagcacctacttcctcgattctgtggcacccattgccaaagggatgcgatggagctgcgagaagcacagcagcgagaacaaggccgacaaggacaagatcctcgtctgccagaaaaagctttgggcaggaaagcagtgacgagagaggatcatccttcttccttccgagtataaaaaagtaggcattcagatc

SEQ ID NO: 100117 - DNA, 475 bp, Zea mays
  unsure (1)..(475): unsure at all n locations
cggtctcggtaattcccgggtgcgagcgccacgccgtccgtnngatggcatgtaaaatgggactcgttaatagttgtctgnaattttggtgtatgcacgtgttaacagcgcgagatctggagttatgggactgcgagaagnactggtgacttatccgttggaatgggcgcccagaaggtgcatttgagcanctaaacccttatgatcactaagggcttgatgtgttttaaagttttggaaattttcgatgtcgggaaacttnactcacagggaacgaattccttaatgagtaccctgacttccacttacaaagccgctgttcggtgtgagtgcagaaaggggattacggcctacnaattccaagagcataactttcacgcaaagcttnnntccgaagcttcttcaagaaaatgcttggcaagcaaggactcctatcccaaaagaccaagacnnttctncnngaaatattagaaac

SEQ ID NO: 100118 - DNA, 437 bp, Zea mays
ggcatcgactacgccgccgtcaccgtgcagctcccggggggcgagcgcgtgccgtgcgcttcaccgtcaagcagctcgtcgccaccggcaagcccgagagcttcggcgggcccttcctcgtgcccagctaccgtggctcctccttcctcgaccccaagggccgcggcggctccaccggctacgacaacgccgtcgcgctccccgccgggggcagaggtgacgaggaggagctccagaaggagaacatcaagaacgccgcctcctccaccggcaacatcacgttgagcgtcaccaagagcaacccggagaccggcgaggtcatcggcgtcttcgagagcgtgcagccgtccgacaccgacctcggggccaaggcgcccaaggatgtcaagatccagggggtctggtacgctcagctcgagtgattcgagtgtctaact

SEQ ID NO: 100119 - DNA, 483 bp, Zea mays
taccggttcggaattcccggggggacccacgcgtccggcagacttatttgttccttggtgctggggaggctggaactggtattgcagaacttattgctcttgagatttcgaaacagacgaatgctccaattgaagagtgccgcaagaaggtttggctggtggactcaaagggtttgattgttgactctcgtaaaggctctcttcagccattcaagaaaccttgggcgcatgagcacgagcccttgaaaaccttgtatgatgctgttcagtccatcaaacctacagttctgatcgggacatctggagttggaagaacattcacaaaagaaatcattgaggccatgtcttccttcaacgagaggcctatcatcttttcactgtcaaacccaacctcgcattctgaatgcactgcttaacaagcatatacatggagtcaaggccgttcaatctttgtcagtggcagtccatttgcccccgtggagt

SEQ ID NO: 100120 - DNA, 316 bp, Zea mays
gcagaagaaagtccccttcatcagcgactacctcgagattgagtgcgaggggaaggaggggttcaagtgcggctccaacgttttctggaagtggtgaagcagctagcagcagcgtctgatgggaatggaggagatcatcacctgtcttgtcgaccctagatatgtccaaactgcagggaaattaaatcttcatgtgtaattgtgctcattctgtttcaatcatctcaacatccgatcatgaacctcttgcattattaactggctcgatcgtcttctcagtttaagacgttggaggctgctttatttgttccaaaaa

SEQ ID NO: 100121 - DNA, 439 bp, Zea mays
ggagaacccctttcagcacactaccagaatattctcaaatcacttctgaaagaattgcgaggtcgattttgggagggaaaagatgctattctggatgcattggcttcattgtgtgcttgctgtcatgttgctataactgcagaagactcctgcttgccaagtgttatactaaattgtgtttgtgctgcatgcagtaggaaatcaaaattgtaccgtgaagcagctttcttgtgtttacacaaagtgattacggcattcagagatccaggatttttcaatagtgtgtttccaatgctgttcgaggtttctaaccaatctgccatctcgaagacaaagggctctgctgaactagatgaaagtgaaggtgcttctgtttctctggataaagtgctcaattgtgcaacatcttgcatcagtgttgcttttccacaggatatta

SEQ ID NO: 100122 - DNA, 447 bp, Zea mays
cggttcggaattcccggggggagccacgcgtccggcttcacgtccgctacagaccggcgaggagacgaaaggagggagttttgagaagctcagatggctcctaaagccggtcctgccaagaagggtgatgccaaggcccaggccttgaaggtggccaaggctgtgaagtctggggcaggcaagaagaagaccaagaagattcgcacatctgtaacatttcaccagcccaagaccctgaagaaggccagggacccgaagtacccaagaatcagcactactggaagaaacaagcttgatcagtaccaaattctcaagtaccccctcaccacagaatctgcaatgaagaagattgaagataacaacactctggtctttattggtgacctcaaagcagacaagaaaaagatcaaggctgcggtcaagaagatgtatgacattcaagcaaag

SEQ ID NO: 100123 - DNA, 435 bp, Zea mays
taccggttcggaattcccgggtggagccacgcgtccgcccacgcgtccgagaccatcaaacaagtgccagcgccctctcgcagtcgccgcaatggggagcaccttcatcatgatcaagcctgacggcgtccagaggggcctcattggtgagatcatcagccgttttgagaagaagggcttctacctcaaggccttgaagcttgtgaacgtggagaggtcgtttgctgagaagcactacgccgatctcgcctccaagcccttcttccagggcctcgtggactacatcatctctggccctgtggtggccatggtctgggaaggcaagagcgtcgtcacaactggccgcaagatcattggcgccaccaaccccctggcttctgagcccggcaccatccgtggcgactttgctgtcgacatttggcagaatgtcattca

SEQ ID NO: 100124 - DNA, 439 bp, Zea mays
cttcccttccaagaagcgcagcgcccatggccatggccacgcaagcctccgccgccacgcgccacctgctggcgcggcggctgggcgccggcggcgaagccgcggcagctgagctcgcagctcgcgctgccgtcgtcgtcctcccgcgggccggccccgctccgcgcgtccaccgaggaggcggtggaggcgcccaaggggttcgtggccccgcagctggaccccagcacgccgtccccgatcttcggcggcagcacgggcgggctgctccgcaaggcgcaggtggaggagttctacgtcatcacgtggacgtcccccaaggagcaggtgttcgagatgcccaccggcggcgccgccatcatgcgggagggccccaacctcttgaagctggcgcgcaaggagcagtgcctggcgctcggcaccaggttgcgctccaagt

SEQ ID NO: 100125 - DNA, 430 bp, Zea mays
cctcgcgccgccgccgcgtctcctcctgtacaggtaaggagaggaagagggcgaaatggggaagcacaacaacgtcatccccaacgggcacttcaagaagcactggcagaactatgtcaagacatggttcaaccagcccgcccgcaagcagaggcgccgcatcgctcgtcaaaagaaggctgtgaagatattcccccgcccgactgctggtcctctacgccccattgttcaatgccagactttaaagtacaacatgaagtcaagggctgggagaggctttacccttgaggagctgaaggctgctggcatcccaaagaagcttgctccaaccattggtatttctgttgatcaccgccgcaagaacaaatcccttgagggactgcaggccaatgtccagaggcttaagacatacaaggccaagctggttatc

SEQ ID NO: 100126 - DNA, 459 bp, Zea mays
aattcccggctggagccacgcgtccggtagaagcgaagcaagcaggcttcgtgatcaagactgcagggggagggggaggaccaagcgaaatgtgaactagagcgaagatgggcggcgcactgctgcttgcgctcctcctcgtctctgctgctgccgcccctcaggtacttggagttggcaatggagacaatcacatgagaatcatccaggaggacatcatcgagacagtcaacaaccatcccagtgctgggtggacagcctcacgtaatccttacttttcaaactataccattgcgcaatttaagcacatacttggagtgaaaccagcaccacagaatgcactaagcaatgttcctgtcaaaacttattcaagatcactggaacttccaaaagagtttgacgcttgatctgaatgggcccgttgcatcacaatttggaacatactatatcaaggtcact

SEQ ID NO: 100127 - DNA, 432 bp, Zea mays
taccggttcggaattcccggggggacccacgcgtccgcccacgcgtccgcccacgcgtccgcgactcactagtactcagccgccgcaatcaggggggcaggtagctcgagcgcgcgctccacctgcgccgacgcgatgcgggccaagtggaagaagaagaggatgcggaggctcaagaggaagcgccggaaaatgaggcagagatctaagtaggcgcatcttgtgaccgaggatggcgagcttctcctgcaccatggctgtgacgcgttgggatgattgtctccctttgtagacgtgctttgctgtagacgtaggcgatgtaaaccgtcctttttgattaattctagtatgttctgagactgggtttatattgtaatttgaggataaatatatgatgctctaaggttattgataatactggcactcgaatat

SEQ ID NO: 100128 - DNA, 477 bp, Zea mays
accggttcggaattcccgggtggacgcacgcgtccgcccacgcgtccggacccacgcgtccggctagggcgggctcgactacctcggcaacccgggcctggtccacgcgcagagcgtcctggccatctgggcgtgccaggtggtgctcatgggcgccgtcgaggggtaccgcgtcgccggcggcccgctcggggaggtggtcgacccgctgtaccctggcggcagcttcgacccgctcgggctcgccgacgacccggaggcgttcgccgagctcaaggtgaaggagatcaagaacggccgcctcgccatgttctccatgttcggcttcttcgtgcaggctatcgtcaccggcaagggccccctcgagaacctcgccgaccacatcgccgaccccgtcaacaacaacgcctgggcttacgccaccaacttcgtccccggcaagtgagcgagggcatgatgcttgcatgcgtgtaccgg

SEQ ID NO: 100129 - DNA, 413 bp, Zea mays
cccacgcgtccgcccacgcgtccggtcgtcgcaggaggcggcggcggcggcgggaggggctcggctctcgagacgggcgccaagctctacatctccaacctggactttggggtttcgaacgaggatattaaggagcttttctctgagctaggtgatttgaagcgtttttcgataaattatgatcgaagtgggaggtctaagggaacagctgaagttgtatttgcaaggcgttctgatgctgtagcggcggttaagaaatatgacaatgtccaacttgatggtaagcccatgaagatagagatagttggtaccaatactccagctgcagcagctgctcatccagtccctaatggtggtcatgctaggaatgctgcgaggagtgcaccaaaggatgctgctccagcaggtatgtc

SEQ ID NO: 100130 - DNA, 391 bp, Zea mays
cggacgcgtgggccgaccaggtgctcttctccgacgcccggtcgcagcccaccgtggtggcgtgggcgcagaacgccaccggcttcgagcaggccttcgtcgacgccatcaccaggctcggccgcgtcggcgtcaagaccgacccgtcgctcggggacgtccgccgcgactgcgccttcctcaactgaaaaggatggacatggagagctggtttatatctcacacaagtgttcatacacaatctagagtaaagtttttttgttgttgatattattatcatgtcaggtatgagcacaaggttgaattaatggttaatgcgattgatatactgtaagtggcacttgcattggtaggccaagaccgagatgtattccttttccttggtgatttt

SEQ ID NO: 100131 - DNA, 426 bp, Zea mays
ccggttcggaattcccgggtggacccacgcgtccgcccacgcgtccgcccacgcgtccggcaagatattcttggtattaccttgatcgttacaggcatccaaattgttagaatacctaaccttaaggtgggttcagccttcctgggttgtgccttcttatatgacatcttctgggtttttatctccaagatgttgttccatgaaagtgtgatgattgtggttgcacgtggtgacaagactgatgaggatggtgtacccatgctgttaaagattcctcggatgtttgatccatggggtggatacagcatcataggctttggtgatatccttcttcctgggctgttggttgcttttgcattaaggtatgattgggctgccaagaagaccttgcaatctggctactttttgtggtcaatggtggcatat

SEQ ID NO: 100132 - DNA, 273 bp, Zea mays
ggaagatgcaatatattggcgaactcgagctcaaggtgcaaaccctgcaaacagaagggacaacattgcagctcagctagcattgctgcagagagacaccactgggctaacaaccgagaatagtgagctgaagattcgcctgcagaccatggaacaacaagtccacttacaagatgctttgaatgacaccctgaaaacagaggtccagcggctgaaggtggcaacaggacaggtgggcaatggtggtggagggatgatgcctaaccttggggg

SEQ ID NO: 100133 - DNA, 407 bp, Zea mays
ctttgattgagaatacgatgaataagcttcggctatggtcaaattttttagcagcggagcagtgcaatagtaataaatggtgtggtaacttcacacctacccatctatttatatagtgctgcaggtgggaaggtgaatcgtcaagccgctcgcacacgctgaacagtcgcccgcacccactgaacggtggaccacaatgcacgagaaggtgaatcaccagatcgctcgtacccgccgtatggtgggaccacctcgcacttggaatatccaatcgtttctcgacaatgagctcacggaaggtgtttttcggaccttcggcgttctgaagcctaagagaatttttcacgggtcgagctcatcacgaaaaacgatctgggaccgtgaaggggctactgttgagggtttgc

SEQ ID NO: 100134 - DNA, 280 bp, Zea mays
ggccctaattgagaaaaagttgctttctctccgtccaggtgttcaaaggttaatcggggaagctttaggaaaggcagttaaagttgcagtgtgcagtacatcaaatgagaaagctgtttcagcgatagtgtcgtacttattggggcctgatagagctgataagattaccatatttgctggagatgtggttcctcacaaaaaacctgacccagcaatctacatattagcagcaactacacttggagttgatccacaaagctgtgttgttattgaagacagt

SEQ ID NO: 100135 - DNA, 394 bp, Zea mays
cccacgcgtccggcctaacgcgcgagaggttctggtagggctctacgagcgcacgctcaaagagatcaagggcgtcccggaagacgagggttaccgcaaggccgttgaatccttcaccggtcaccgcctccagatctgccaggaggaggaggactggaagcgcatcgaggaccgaatcggatgcgggcaggtcgaggagctcatcgaggaggccgaggacgagctcaagctcatcgctaaaatgattgaatgggatccatggggtgttcccgatgactacgaatgtgaggtgattgaagacgacaccccaattcctaagcatgttcctcagcaccggcctgttgctcttcctgaggagttcttcaaggcactagatgctgtcaaatctgatcct

SEQ ID NO: 100136 - DNA, 426 bp, Zea mays
gatgatttggcttggaataagggatatgataaatgagttcagaaagaaaaagttgaagctgcgtccagtaacatatctaagtggttctcagggttctggcaatgacatccctcatggatacatttggagtcctcatctagtcccgaaaccaaaagattggggtccaaagatcgatgttgttggattttgcttccttgatcttgcttccaattacgtgcctcctgaaccacttgtgaaatggcttcaagctggtgacaagcccatatatgttggttttggtagccttccagttcaagacccacaaaagatgactgaaattattgtcaaagcgctggaaattactggacagagaggtatcattaacaaaggctggggtggccttggaaccttggcagaaccaaaagattttgtatatctactagacaa

SEQ ID NO: 100137 - DNA, 323 bp, Zea mays
cggacgcgtgggggaaacaccgccgccgccgcgccttccattccagtactcgcggaggagaggaacaccagccagcgccatggtcacgtcgacgaccgccgccgccgtgctgtccccgccgtccgtggccgggcttcgcctggcgccgtctccccgggcgcgcgtggcgttccgcgcggcgccggcgcggcggtccgtggcggcgcgcgcggagcttaacccgtcgcttgtgatcaacctgagcaccggcctgtcggtttttcttggccggttcgtcttctttaactttcaacgggagaaccttgccaaaccaggtccccaac

SEQ ID NO: 100138 - DNA, 432 bp, Zea mays
cccacgcgtccgcccacgcgtccgcaacagttccctgtcagaatttgctggtttgggctttgaattgggttacttcattggaaaacccaaactcattggtcttatgggaagctcagtttggtgatttttcaaatggagctcaagtgatatttgatcagttcctgagtagtggggagtcaaaatggctccgccagactggccttgtcgtttgccttcctcatggatatgatggtcaggggcctgaacattctagtgcaagattggaacgctttcttcagatgagtgatgacaacccttatgttatacccgagatggatccaacactgcggaagcaaatccagcagtgcaattggcaggtcgttaatgtaacaactcctgcaaattatttccatgttctgcgtcgccagatacaccgggacttcaggaagcctt

SEQ ID NO: 100139 - DNA, 363 bp, Zea mays
  unsure (1)..(363): unsure at all n locations
gtgccggaggtggcgcgcgagctggcggccgaggcgcagcggtcgggcgtgaggggcgcagcccgtgcggcgctcgcgatgacggagccggtggcgcgggacgtgtacggccgcgtggagcccgtggccaaggacctctacgtgcggtacgagcccgcggcggagcacctggccgtctccgcctggcgctcgctgaacggcctgccggtgttcccgcacgtcgcggagatcgtcgtgcccaccgccgcgcactgggccgacaagtacaacagggcggtcgcagccgccgcggagcacggttacgcgggggccaagtacctcccggccatccncaccgaacgcatcgccaaggtgttttcgtcg

SEQ ID NO: 100140 - DNA, 443 bp, Zea mays
ccggcccatgttccagagcatgctgagccaccgcggcgacagcgggtgccagggcgccttgtacacctacgacgccttcatcgaggccgccagcaagttccccggcttcggcaccaccggcgacgagcagacgcgcaggcgggagctcgccgccttcttcggccagacgtcccacgaaaccaccggtggatgggcgactgctccggatggaccgtttgcctggggatactgccgggtgaaggaacagaaacagacggacccaccctactatggacgaggacccatacagctaactcataagtacaactacaggctcgccgggcaagcgctgaacctgaacctggtgggcgacccggacctggtggcgagagaccccgtggtagccttcaagacggccatctggttctggatgacgccgcagtcgcccaagccctcgtgccacg

SEQ ID NO: 100141 - DNA, 441 bp, Zea mays
cggacgcgtgggcggacgcgtggggacgaggaaatggaagacggaattcagtctgtcgataccatctcaagtactccaactggtgttgaaacacctgatgttatcgaccttcggaagctgcagaggaaggagactgacaagcaggcagaacggccgctgtaccaggttcttgaacaaaaggaagaaaggatcgcccctgggactctatatgggtcaagccatacgtatgtgttgggaacacaagataaatcatcagctccgaaaagggtggatctgcttaagaatcaaaagtcagacaaggtggacgtcaccatccaacccgaggaactggaagccatggatgatgttctggcagccaagtatgaagaagctcgagaggaagagaagcttcggaaccaaaaggaggacttcagtgacatggtggcagagaatgctcacaag

SEQ ID NO: 100142 - DNA, 408 bp, Zea mays
gttcgtgcgcaagcacaccgcccccggtgtgctctccatggccaacgccgggcccaagaccaacggctcccagttcttcatctgcaccgtcgcgaccccttggctcgacggcaagcacgtcgtcttcggccaggtcgtcgagggcatggacgtcgtcaaggccatcgagaaggtgggcacccgcaacggctccacctccaaggtggtcaaggtcgctgactgcggacagctctcctagatctctctgatctggtctgttcggccgccctccctccgtcatcgtcgactccccctgcgtccgttcctttggatctgaataagatggtggtgatctgagtggtggtcttagtttatcatgtatcgctcgcagtttaatttagcggtttaggtgtggatctgtgaacccca

SEQ ID NO: 100143 - DNA, 410 bp, Zea mays
cccacgcgtccgagggtatcaaaatctttggatgctgttgggatgttgagctactcggagaggccaatccaaactctgagtggtgggcagaaacagagagttgcaattgctggtgcgttagctgaagcatccaaagtattactgctggacgaactgaccacattcttagatgaacatgaccagataggcgtgataaatgcagtgagggactctgtggctgccgatggggaggtcgccgcattatgggtgactcatcggttggaagagctgaaatatgcagatggtgccatctatatggaagatggccagataatcgttcaaggcgacgtctctaccatatcaaaatttataaagaaaaaacaggcacgctactttggtcattttgaactctaaatccccaaagctttttg

SEQ ID NO: 100144 - DNA, 416 bp, Zea mays
cccaaggtcgtgcgcatccagcgccagcgtcgcatcctcaagcagcgcctcaaggtgcctccggcgctcaaccagttcacccgcaccctcgacaagaacctcgctaccaacctgttcaagatgcttcttaagtaccggcccgaagacaaggctgccaagaaggagaggcttctgaagagggcccaggctgagaatgaaggaaaaactgttgaatccaagaaaccaattgttgtgaagtatggccttaaccatgtgacttacctcattgagcagaacaaggctcagctcgttgtcatcgctcatgatgtggatccgattgaactggttgtttggcttccagccctgtgcaggaagatggaggtcccatactgcattgttaaaggaaaggctcgccttggatcgatcgttcacaagaa

SEQ ID NO: 100145 - DNA, 424 bp, Zea mays
agaggacgttgctattgcttatggattcaacaatgtgccaaaatcaaagccgaagtgtatgacaataggaggaaggcaaccattaaacagattctcagataaaattcgtgctgaggttgcaagagctggttatatggaggtgctcacatttatcttgtcttcacacgaagagaactttgacatgttaaacaggacagatgacaaaagtaaagcagtcattattgcaaaccctcgcacttctgaattcgaggttgttagaactagcctgatgtcgtgtttattaaaaacactgaaacataatatagaccatccaagacctataaagatttttgaagttggtgatgttgtgatgctggactcgtcacgtgatgttggtgcctctaataatcgcaggcttgcagctttgtactgcaatagggtttct

SEQ ID NO: 100146 - DNA, 375 bp, Zea mays
cccacgcgtccggaacaacgccggcttcccgcacaacgtcgtcttcgacgaagacgaggtgccgagcggcgtcgacgccaccaagatctcgcaggaggagtacctcaacgcgccaggcgagacctactccgtcaccctcaccgtgccgggaacctacggcttctactgcgagccgcatcaaggagccggaatggtcggcaagatcaccgtcaactaattaagctagctatcgatcgatatccattcatgtattagctgttgcttcctgctttgtactccgccgatctgtccatctctacatgttttcgtcttcacacaacaacctctgctacgactacgtatatatgcatgctactagctgattgattttaaaaa

SEQ ID NO: 100147 - DNA, 379 bp, Zea mays
attattactgcctcagattgtgaaggagctggggagcagttttacgtgactactttgctttcaaacagcgctgaaggtggttctctactcaaagatattcctgctaccaaggatggaagggttgattggtcacaggatttcttctgcaaaccagcatttctgacagtgtctggacagcttaatggtgaaacatatgcttcagctctatctgatatttacacatttggtccaacgtttagggctgaaaattcaaacacttcaaggcatctggctgaattttggatgattgaacctgagcttgcctttgcggatctgaacgatgacatggcttgtgcaactgcatatctccagtatgtagtaaagtatattctggagaact

SEQ ID NO: 100148 - DNA, 442 bp, Zea mays
  unsure (1)..(442): unsure at all n locations
ccgcatcggcaagcacaggaagcacccgggaggtcgcggtaacgccggtggcatgcgaccaccaccgtatcctcttcgacaagtaccatccgggctacttcggcaaggttggcatgcgttacttccataagctccgcaacaagttctactgccccgcggtcaacatcgagcgcctctggtcgatggtgcccgccgacaaggcggcggaggccggcctcgacaaggccccgcagatcgacgtcacgcagttcggctacttcaaggtgctcgggaagggggtgctgccgcccaagcccattgtcgtcaaggccaagctcatctccaaggtcgccgagaagaagatcaaggcagcaggcggngccgtcgtgctcaccgnctaggtttcagtccttgttcgcctcctgggtttgaaatctatatctgaactgatagtgctttcctg

SEQ ID NO: 100149 - DNA, 440 bp, Zea mays
cccacgcgtccggcttcaacagcatgcaccagtgagtggcacatccaaaggaaaggctaagctcaaagcaggtcagcctttgaagcgttccaccattggagcaaagaaaggggcaccttccgctgctggtggcggcggtggtcgtggtcgtcgtgaggccattgagcgcattattcagatttccgagtcatgtctcaatgcatctactccgttgcggcacttgcccctcaaggagcgtcttcgtgaggccaaacgtgaggaactgggtcttgtctccaaggagaggcaacgagagcttgatatagccaaagccaaatctaaagccaaatctaaaggtcctggtggagatgatggagaccgtgtgcttatgggtccaccgggccttgactatatcagtcttgggctagttgatgaggaggcaatccccaagtatgaactca

SEQ ID NO: 100150 - DNA, 433 bp, Zea mays
ccgcctctctcaatctgataccgcagatccgtcgtccggtgagtggaagccgcacgaacgcatggcctccggcgagcttgcctgcacctacgccgctctcatcctcagcgacgatggcatcgccatcaccgccgagaagatcgccacgatcgtgaaggcggccaacatcaaggtcgagtcctactggccggccctcttcgccaagctcctggagaagcgcaacgtcgaggacctcatcctctccgttggatctggtggcggagctgctccagttgctgctgccgcacctgctggtggtgctgcggctgctgctgccccggctgtcgaggagaagaaggaagaggccaaggaggagtctgatgacgacatgggcttcagcctgttcgactgaggagaccccctcacccagccattagcaaatttcacttgtgct

SEQ ID NO: 100151 - DNA, 433 bp, Zea mays
gcgagcgagagcagcacacacgcagctagctaggagcagcagcagcggcggcggcgatggcggcctccatgatctcctcgtcagctctggcggtggcgcctcagggcctgccgcccctcggccgccgcgcctcctccttcgccgtcgtctgctccaagaagaagatcaagaccgacaagccctacgggattgggggtggcctgaccgtcgacgtcgacgccaacgggagaaagggcaagggcaagggcgtgtaccagttcgtcgacaagtacggcgcgaacgtcgacggatacagcccaatctacaacgaggatgactggtctcccaccggcgacgtctacgtcggtggaaccactgggcttctgatctgggccgtcaccctcgctgggatcctcggcggcggcgccctcctcgtctacaacaccagcgccct

SEQ ID NO: 100152 - DNA, 436 bp, Zea mays
cccacgcgtccggcggtattgctgcaggccagggcgcgagctgcgggttcggtatgcgcgggcagaaatcgcgctcggggcccggcgtccggcgcgggttcgagggagggcagatgccgctctaccgccgtctccccaagctacggggcattgccggcgggatgcacattggcctgccgaagtatgtgccattcaatttaaaagacatagtgcgcggcggattcaaagatggtgacgaaatatcactggaaagcctgaaatcacggggtctgatcaatccatcaggcaaggaaaggaagctgccgctgaagatcttaagagatggggatgtatcagttaagttgaatatcaaggctggagcgttttcagcttcagctaaagagaagcttgaagcagctggttgttccctaactctgttacctaaacgaaagaaatg

SEQ ID NO: 100153 - DNA, 412 bp, Zea mays
gtttaaaatcaatttgtcgagtattaataggtgacaaaggaaggccttgcagcaagggtggtggatagacagcaagtttcaagaaccatctccaaagaagagatgctgcatctttttgaatttggtgaagaggaattaatggaacagaacgagaatggttctactatgattgagaagccatccacttctaacactattaaaacctctgtgcctgttcctgtcgacagtctcatgctgagcctgctcagtgagcaaactcggtggatttcaggttaccatgaacatgaagctctcctccaagaaaatgaagaagaaaagcttacaaaggaggagcaggacctggctttgtccgaatgggagtcattgaggaaagctgcatctgatcctgagagaaaatcaagcatgagcgcag

SEQ ID NO: 100154 - DNA, 400 bp, Zea mays
ccgcaagcaagtgacatctgcactgtcatgtacacgagtgggacaagcggacagcccgaaggtgtgatgctgacccatgaaagccacgccatgtatgtgaaaggggtggacctcttcatggaccagtttgatgataagatgacaacagatgatgtcttcctgtcgtttctcccgcttgctcacatccttgaccgcatgatcgaagagtatttctttcacaaaggggcctcaattggctactaccacggagatctgaatgccttgagggacgacattgtggagctgaagccgactctactggttggggtgccccgagtgtacgaaaggatttatgaaggtatcttgaaggccattgcggaactcagacctctaagaagggtcatctttaatgctttgtaca

SEQ ID NO: 100155 - DNA, 221 bp, Zea mays
gaaggtttctgggagctgacaagatggtgctgaagacagaactctgccgcttcagcggccagaagatttatcctgggaaaggcatccgatttatccgtgctgattctcaggttttcctttttgccaactcaaaatgcaagcgctacttccacaaccgcctgaagcctgcaaagcttacctggacagcaatgtacaggaagcagcacaagaaggatatccat

SEQ ID NO: 100156 - DNA, 428 bp, Zea mays
  unsure (1)..(428): unsure at all n locations
cccacgcgtccgcatcatcaagatcttgacaaattctctcgatgttctgaaatcaaattacgtgcgtcgtcagaatctcagaactgcagaaacatatacgcctctcttttttttctctctatctctctctctctctctttattagaacgcgcctgattccatcagggctggtcgcgttgcaggtgcctccgttcctgatctgcaagatgttcacgcaagtcttctcgtttatcaatgtgcagctttttaacagccttctgctgcggcgtgagtgctgctcgttcagtaacggagagtacgtgaaggctgggctggatgagctagagcattggtgcttttggctgactgaagagtacgcaggatctgcatgggacgagctgaagcatatcangcaagcagttaccctcttgatacttgacgacaagcat

SEQ ID NO: 100157 - DNA, 414 bp, Zea mays
cccacgcgtccgcccacgcgtccgcccacgcgtccgctacacacatacatagtttcttgtactacacgacgacaaacatggggaagcctgcgaagatcggagagtggggtggatacgccggcgatcgtcgggatctgagggctactccggaccggctgatcgaggtgaaggtcacggcggacaacagcagctgcatccgctccatctccttcatctacatcggagccgatggcaaaccgtacgaggaggggccatggggtttcggccatgctggcacggagtacaagattgatctgtgcaggttcgacgagagcttgacggagatctccgggaccacgggcccagcctacaacattgacaatctggtcaagtctctcaaattcgtcaccaacaaacgcgcttacggaccgtacg

SEQ ID NO: 100158 - DNA, 438 bp, Zea mays
  unsure (1)..(438): unsure at all n locations
gagcggaggcgtgcgtgctgcggcctgcggcctgcaggaccagagatcggggactgagctagggtctgggactgggaggcggagatgtcgacgccggcgaggaagcgcctgatgcgggacttcaagcggttgcagcaggacccgcccgccggcatcagcggcgcgccgcacgacaacaacatcatgctctggaacgccgtcatattcgggccggatgacacgccgtgggacggaggcacgttcaagctgactctgcaatttacagaagattaccccaacaaacctccgactgttcggtttgtttcgaggatgtttcacccaaacatttatgcggatggaagcatntgtttggacatcctacanaaccagtggagtcctatatacgatgttgcggcaatattgacctctattcagtccctgctgtgtgacccaaaccca

SEQ ID NO: 100159 - DNA, 436 bp, Zea mays
cccacgcgtccgaacgcctccatcaccaacgccaactccgccattgagatcagaaacttcctcggggagaagaaggtcaggaaggttgatatgcttgaaggtgtgaccatcttgcgttcagagaaggtcaaggatgagcttgttcttgaaggcaatgatgttgagcttgtctctcgctccgctgctctcataaaccagaaatgccatgtcaagaagaaggatatccggaagttcttggacggtatctatgtgagtgacaagggccccatctttgatgagcaatgagctgccctttgttcctggctagcaaaagccgtgttaggctgtggccagtagactgtttgcgtagtggatgtagttggaaataggagatgggatgagtaaggttgctggagataagagctttagcaagaatttatgagatggacctttattt

SEQ ID NO: 100160 - DNA, 437 bp, Zea mays
ctcgcctcttgactaggccagggttccatcccacccccgccgccatccgatccgatggagggcggcgactcgtccggcgccggcgccggctccggtggcgccgtggcggcggcggccaagtggcggagcgacgcgtcgcggtcgttccagtactacctggaccgctccacgcctcacgccacggggcggtggctcggcacgctcgccgccgcggcaatctacgcgctgcgggtctacatggcgcagggcttctacatcgtcacctacgggcttgggatctacctcctcaacctcctcatcggtttcctctcccccatggtcgaccccgagctcgacccctccgccgccgccgaggggccggcgctgcccacccgggggtctgacgagttcaagcccttcatcaggcgtctccccgagttcaagttctggtatgcaat

SEQ ID NO: 100161 - DNA, 427 bp, Zea mays
tcggaagcagccaacgtgttcggcaagcccaaggcgagcaccgagtacatcgtgtacagcggtgacggcttaaagctgctgatcccgtccaagtggaaccccagcaaggagcggaagttccccggacaggtgctacagtacaaggacaacttgaacgccaacagtaacgagtacgacatgatccagccgacgtccaagaagaccatcgtcgactacagctctaccgaggagttcctctaccaagtcgactacctgcttggcaggcaagcctacagcggtaagaccgactactaaggcggattcgagaccggagccgtggacaccgacaacgatctgcatagctccaatctcgtgatcgatggcgctcaatgctacgccgggtccgagctgaccatgacagttgactgctacgagagctgtaagcacc

SEQ ID NO: 100162 - DNA, 433 bp, Zea mays
  unsure (1)..(433): unsure at all n locations
agaaggcaacgtaccaggtggtgcagcccatcaacggcgaccccttcatcggcagcctggagacgccggtcacctcgagcccgctcgtggcgtggtacctctccaacctcccggcctaccgcaccgccgtgagcccgctgctgcggggcgtcgaggtcggcctcgcgcacggctacctcctcgtggggcccttcgcgctcacgggcccgctccgcagcacgcccgtgcacggccaggccggcgcgctcggcgccgccggcctcgtcgccatcctcagcgtctgcctcaccatgtacggcgtcgcctccttcaacgagggggacccgtccacggcgccctcgctcacgctcaccggcaggaagaaggaggccgacaagctgcagaccgncgacggctgggccaagttcaccggggggttcttcttcggcggcat

SEQ ID NO: 100163 - DNA, 401 bp, Zea mays
ggctgttcctgggcgtcccgaccagcgacaccctgctgtacaaggaggagctggagaagatgaaggagatggcgccggacaacttccggctggacttcgcggtgagccgggagcagacgaacgcggccggggagaagatgtacatccagacgcgcatggcggagtacaaggaggagctgtgggagctgctcaagaaggacaacacctacgtctacatgtgcgggcttaagggcatggagaagggcatcgacgacatcatgctcgacctcgcagccaaggacgggatcaactggttggactacaagaagcagctcaagaagagcgagcaatggaacgtcgaagtctactgatgatgatccttcattgtattgttcagctcaagcaatctggtggtgatgagt

SEQ ID NO: 100164 - DNA, 428 bp, Zea mays
cggacgcgtgggaaaaatgcccaactattcaagtgcgaccctgctggtcacttctttggacataaggcaactagtgccgggctcaaggagcaggaagcaataaattttctggagaagaaaatgaaggatgacccgaaattcacctatgacgaaactgtgcagattgcaatatctgcgttgcaatcagttctccaggaagatttcaaggccactgagatcgaagttggtgttgtgagaaaagatgaccgcgttttcagagctctcacgacagaggagatcgatcagcacctgacggcaattagtgaacgtgactgagatgtcatatgctgcacatttcagcgctgcacacactgcgccgtgccattgtgcttcggcagtcattaagtttcatagtcatcaaaggaactgagtgtaccatttcacgttta

SEQ ID NO: 100165 - DNA, 394 bp, Zea mays
caattccagtcgcccccatccgttcctcatctcaccagaagcgaagccggaggagggaggaaggagatcgcgagcagccggagccggaggccgagaggatgaagacgttcgacccgtggccggtcttcttccgccgggagtggaagcgcaactggccctttctcacggggttcgccatcaccggcttcatcatcaccaagatgacggccaacttcaccgaggaagacctcaagaactccaagttcgtccaggaacacaagaagcgctgaccaaccgggtggagtcgtccgaatcgcctgcggatgaaaaattagccccctatttttcttgtcttttttttatctagatgcgtgcactctattgtaataatgtaataagaggcaattggattgat

SEQ ID NO: 100166 - DNA, 445 bp, Zea mays
cggacgcgtggggtcgatgccgtcgaccccgacgacgccggtgacgccgtcgtcgtggtcgtcgtcgacgacgccgcgcggcgccggcaacgtgtggcgcagcgtcttccacccggggagcaacctggccaccaagggcatgggcgccaacctcttcgaccggccgcagcccaactcccccaccgtctacgactggctctacagcgacgagaccaggagcaaccaccgctagatcgggcgagatggatggacagtgaagaggccatgtttgctggtccttgtggttatctaaaacgcacgcatgctctattatagctagtcatcactatatatatacttgtgtttgtgtattggtgttcttgttctgctggtgtctccgccgtttaatttgacctatgttatggagtgagtgatatatgtgccgtcactcctagtatatagtagt

SEQ ID NO: 100167 - DNA, 371 bp, Zea mays
  unsure (1)..(371): unsure at all n locations
aacgaggcccagtcccgcggcggccgtggaggcggcggcggtgggtacggtggtggccgtggaggcggcggctacggcggtggcgggcgccgtgatggcggtggcggctacggcggtggcggcggctacggtggcggcggcggctacggtggtggtggcggcggctacggcggtggcaaccgtggcggcggctacggcaactccgacgggaactggaggaactgagcggtggggcccgcgcggccaagttatcctgttcgctaccgtgatgtttaccctagtccagagggtttatcttcgttcgtgtcgtgtttgttgttgcccatctgtgtttntgattgcaaggtcgctctgtgtcagttgttagtgct

SEQ ID NO: 100168 - DNA, 433 bp, Zea mays
atgaaggaaactgctcaaacagaaaggcagttactaatggagaatgggaggcaagttgtgaacgaacagaaggttgataaattcctttacacaatgtttaagttgaactccacgatactcaggtactccagaatggcagctgtagttcttgtgagccttcctccaccgccattataccatccttcatatttctacatggagtacatggatttgcttgtagagaatgtcccacgcatgttaatagttaggggatatacgagagatgttgtcacatttttcacatgattatacatacgaacttctcacctggagactctagtgccgtcaggctgttgtactatctcagcagagactggatacacaagagcgtggaatctaccactgaaatgacaagccctcaccttgaaggcaaccacgatgagatgtcagatgt

SEQ ID NO: 100169 - DNA, 439 bp, Zea mays
ctctcctcccctccccatctcgctcttgcggagatcgaagagaagctgaggcctagcgccgcacccgccgccgcatcagccatcagccatggcgatggccgctcgcctcgtctcgcgctcccgtcagctacattcggttcaagcagcttttgcgaatggaggtgccactcaagttcgctcctttgccaaggatgcagctccagctgaccgtcctcctgttggtggggatgatctcctgaagggcatattctttgaggtaaagaagaagtttgagacagctctcggcgtccttaaaaaggaaaagatcactattgatccagatgacccagcggcagtttctcaatatgctcaagtcatgaagactgtaagggaaaaggcggatcttctttctgattctcaaaggattaaatataccattgagaccttcaccaagggcatc

SEQ ID NO: 100170 - DNA, 406 bp, Zea mays
cggacgcgtgggtggagttggtcagcagctgttttatggtcagccacctccagccttcatcaaccctcaggctggatttgctttccagcaacctatgatgcctggtatgaggcctggtggtccaatgccgaactttatgatgcctatggttcagcagggacagcaaccgcaacgtcctgctggtaggcgtgctgggtctggtggaatgcagcagcccatgccaatgggtagtcagcaacagatattccctagaggtggtcgtggctaccgctatgctactggacgtggaatgcctgatcctggcatgcataatgttggtgctgtgatgccatctccatatgagatgggagggatggcaatgagagatgctggtgtctcacaacctgttccaattggggcactagcc

SEQ ID NO: 100171 - DNA, 386 bp, Zea mays
  unsure (1)..(386): unsure at all n locations
cccacgcgtccgctggggaggtcgtcgaggaggaggaggagctcgtgttcaggcccgaggaggtgaagcggatggagtacctncacgccgcgctctccgaggcgctccgcctctacccgtccgtccccgtcgaccacaaggaggtcgtggaggacgaggtgttcccggacgggacggtgctgaagaagggcaccaaggtgatctacgccatgtactccatggggcggatggagagcatctggggcgacgactgccgcgagtacaagccggagcggtggctccgggacggacgcttcgtgggcgagtccgcctacaagttcacggccttcaacggcggcccgcgcctgtgcctcggcaaggacttcgcctactaccagatgaagttc

SEQ ID NO: 100172 - DNA, 388 bp, Zea mays
  unsure (1)..(388): unsure at all n locations
gcaattttgtgtttcccgttctggaacctggtcgcgttcttcgcaactccgtctaccacacccgcactgttcggaggcggtctgttgggatatgtgatgtatgattgcactcactactacctgcaccatgggcaaccatccaaagacccagcaaaacatctcaagaggtatcacctcaaccatcacttcagaatccaggacaagggcttcggcatcacctcatcgctttgggacgctgtctttgggacattgcctccatccatgacgtctgggaagaactgacgcacgtaactcaattcttggcatgagagattctaggggacctgtaatatatattcaagctagggataatcctggatctgtcttcgtgcgatgggtngacatgttc

SEQ ID NO: 100173 - DNA, 404 bp, Zea mays
tgatcaatgatgaggctgcaatacctgaagtgattgagactgtcaaacagcaagttaaggatgctaaatttcctgatctagaggtcattcgcatgttgtgggatgtgctcatggaggctgttcagtggtctgggaagaaccagcaacagaattctaatgcagcacttcggcaggtgaaagcatgggctgagcttttgaatgctttttgcacgagtggcagactcgaactggaacttatatacaaagtacagacacagtgctatgaggatgctaagctgatgaagctgtttcctgaaatcataagaacactgtatgaccaagatgtcctagctgaagatactgtcctgctttggttccgtaaaggttcaaaccagaagggcaggcaatctttcgtgaaagctctg

SEQ ID NO: 100174 - DNA, 436 bp, Zea mays
ccacgcgtccgcagagccccagctactgcagtgcccctgaagatttcatcgtcgacaactgcaagaacatctactttgctgggcatgaaactacagcggtcactgccacctggtgcctgatgctccttgctgcacacccagactggcaggaccgtgctcgggctgagattcgagaagtgtgctgtggacagacagcgatggacatcgacgtccttcgtcagctgaaaatacttacaatggtgatacaagagactctccggctgtaccctccagcatcactgatcatgcgtgaggccctgacaggcatcaggctcggtggagtcgacgtccctcgcggcaccatcatccaagtagccatttcattgctgcaccttgacatggaagcctggggtccagacgctaacgagtttcgtccagaccggttcgcgaacggagc

SEQ ID NO: 100175 - DNA, 434 bp, Zea mays
ctcgtcctgacccctcgcaaaaccctagctccaaccaccatgaagggcaaggccaacgcctccaagaaggatgaggccaggctccgggccggcggcggcggcgccggaaagcgcaagaaggccgccgcgagcggcaagcccaagcgccctccctccgccttcttcgtcttcatgtctgaattcaggcaggagtaccaggcgcagcaccctggcaacaagagcgttgcggccgtgagcaaggcagcaggggaaaagtggcgctctatgtcagagcaagagaagcaaccctatgtggaccaagctgggcagaagaagcaggactatgagaagactaaggcaaatattgagaaggagagcacaagctcaaagaaggctaagactgatgacgacgatggctcgaagtccgaggtcgatgatgaggatggccgtagtga

SEQ ID NO: 100176 - DNA, 448 bp, Zea mays
gaaatatgctcacacacatttcccttcagtcaagtacatggaatacgctgttcaggttgagacctacaccttgtcaaaagccaacaatttggttatgaatgtcgatggtgcgatcgggtcccttttcttggatcttctatctggaagtggaatgttcaccaaacaggagatcgatgagattgtggagatcggttatctcaatgggctctttgtgcttgcacgatcaattggcctgatcgggcataccttcgaccagaagaggctcaagcagccactctaccgtcacccatgggaggatgtactttacaccaagtgagaaagccattctttgcaaggcataataaagtattattatcgcctagagcttccagttgcctgtacacttcattaaatcgagcacttgcaaaaaagaaagccagagagagaggaagacgaacatcactagtca

SEQ ID NO: 100177 - DNA, 397 bp, Zea mays
ccagggtatcgctctgagaggactgttcatcattgacaaggagggagtgattcagcactctaccattaacaaccttgccattggtcgcagtgtggacgagaccatgaggacccttcaggcattgcagtacgtccaggagaacccagacgaggtctgcccggccggttggaagccaggggagaggtccatgaagcccgaccccaagggaagcaaagagtacttcgcggccgtgtagactcgccgtctttgagaagctttgctacgtttttgtcatggtgcccgctaagccccccggcagtaggttggagttttgcggagctcgcgtttttacaaatctctgtgctctgaaccgagcgtagtagcccccctttgctggtgtgcatcccgattgagtgct

SEQ ID NO: 100178 - DNA, 418 bp, Zea mays
acagaggatagcgtctatgacgctgtcaaatctatgactcagcacaacgtgggagctttggtggttgtcaaacctggacagaataaatcaatcgctggcattgtcactgagagagattatctccggaaaatcatagtgcagggaaggtcttccaagtcaactaaggttggcgacatcatgactgaagagaacaaactgatcacagtgaatcccgacaccaaggtcctgcaggcaatgcagctcatgacagaaaaccgcgtcagacacatcccggtgatcgacggcacggggatgctggggatggtctccatcggcgacgtcgtgcgcgcggtggtggccgagcacagggaggagctgaaccggctcaatgactacatccagggaggctactaggacggcgtgtgcaccgacgacccct

SEQ ID NO: 100179 - DNA, 369 bp, Zea mays
cccacgcgtccgcccacgcgtccgcgggcgtgtcggtgtgggaggcgctggtgctggagatcgtgatgaccttcgggctggtgtacacggtgtacgcgacggcggtggacccgaagaagggcagcctgggcaccatcgcccccattgccatcggcttcatcgtgggggccaacatcctggtgggcggcgccttcgacggcgcgtccatgaaccccgccgtgtccttcggccccgccctcgtcagctgggagtggggctaccagtgggtgtactgggtcggccccctcatcggcggcggcctcgccggcgtcatctacgagctgctcttcatctcccacacccacgagcagctccccttcaccgactact

SEQ ID NO: 100180 - DNA, 401 bp, Zea mays
gcacagcaggtttggttgcggaaaatgggaggagccaagcctgtagtgagtgagggggataggaggataattacagcaggacgagcaaaacgctctaatgctcaaccagctggagaaaggtttaggcagctaaaagaagaggagagcatgagaaaagtcaacaaagcactcgctgcaggagactcaaatgcatcgtcatcaacgtatgacatggaggatgaagagtcggatgacgagaccacagaagagggagggcccgtggaggaagcatccagtactggcagtgacaagaagcctccaagttactcagggaagaagggcaaaagatccaagaggaagcgcatggtgcagtgatcgtcacagctcaatcggatgcgattttcgccacaactggttgattc

SEQ ID NO: 100181 - DNA, 433 bp, Zea mays
  unsure (1)..(433): unsure at all n locations
ggcgtgtggaagaacacggaggacgagatcctcaaggcggccgtgatgaagtacggcaagagaccagtgggcgcgcatctcgtcgctgctcgtccgcaagtccgccaagcagtgcaaggcccgctggtatgagtggctcgatccgtccatcaagaagaccgagtggacaagggaggaggatgagaaattacttcatcttgctaaactcatgcctactcagtggaggacaattgcacctattgtaggtcgaacaccatctcagtgtcttgaacgttatgaaaagctgcttgacgccgcatgtgcaaaggatgaaaattatgaggctaatgatgatcctaggaagctgcggcctggcgagattgacccaaaccctgagtcaaagcccgcacgtnctgatcctgttgatatggatgaagatgaaaaagaaatgctt

SEQ ID NO: 100182 - DNA, 438 bp, Zea mays
  unsure (1)..(438): unsure at all n locations
cccacgcgtccgcggacgcgtgggtgatgagatagcggagcaggctgaattcttctcctgcggaacggacgacctgacgcagatgacctttgggtacagcagggatgatgtgggaaagttcattcccgtctatcttgctcagggcatcctccaacatgaccccttcgaggtcctggaccagaggggagtgggcgagctggtgaagtttgctacagagaggggccgcaaagctaggcctaacttgaaggtgggcatttgtggagaacacggtggagagccttcgtctgtggccttcttcgcgaaggctgggctggattacgtttcttgctcccctttcagggttccgattgctaggctagctgcagctcaggtgcttgtctgaggctgcctnctcgttggcaaccggattgcctgctgctggtggatgtggtgatcaac

SEQ ID NO: 100183 - DNA, 433 bp, Zea mays
atccggtgcatgcaggtgtggccggcctacggcaacaagaagttcgagacgctgtcgtacctgccgcggctgtcgacggacgacctgctgaagcaggtggactacctgctgcgcaacggctggataccctgcctcgagttcagcaaggtcggcttcgtgtaccgcgagaactccacctccccgtgctactacgacggccgctactggaccatgtggaagctgcccatgttcggctgcaacgacgccacccaggtgtacaaggagctgcaggaggccatcaaatcctacccggacgccttccaccgcgtcatcggcttcgacaacatcaagcagacgcagtgcgtcagcttcatcgcctacaagcccccgggcagcgactagaccgcgcccgccggccgccccccgccggctagctagctagctagctcctgcg

SEQ ID NO: 100184 - DNA, 433 bp, Zea mays
  unsure (1)..(433): unsure at all n locations
cacgagccacagcccacaggcacaggcaggctctcgagctcagtccacccatcgcaggggatggcgtcgtcgttcgccgtggcaacggtcccgtcgctggcggccccggcggccaagaagcggtccggcggcgtcacgtacgtggagggcatgaacgcctacagcggcctcaaggggctcaacaaggtgaacatgctcggggtgcgcaagaccgccgactactccttcgccaaggtcgtggcgtcgctcagccccgcgggcaggaagcggcgcggcggcgcgttcggcgcccagatgaacgacgccgccgagatcttcaggatcgccgncaccatgaacggcctcgtgctcgtcggcgtcgccgtcgggttcgtgctgctccgggtggaggccgccgtcgaggagtccgagtaaggtgcgtgggcctgccact

SEQ ID NO: 100185 - DNA, 300 bp, Zea mays
gagatggcacaagccatggcgtccatgaccggcctctcgcagggcgttctgcccagcaggcgcgccgccaacagggccaggacggccgccgtcgtcagggcgtccgccgaggcgcaggcgcaggcgggccgccgcgccgtgctcgggctggtggccactggcatcgtcggcggcgccttgtcgcaggcggtgcacgccgagaccgtcaagaccatcaagatcggagccccgccgccgccctccggtggactccccgggactctgaactctgaccaggcgagggacttcgacctccccttg

SEQ ID NO: 100186 - DNA, 375 bp, Zea mays
  unsure (1)..(375): unsure at all n locations
cggacgcgtgggcgggccaaccggcgaccagagccacgtgtccaccagagtcatgggcacctacggatatgctgctccggaatatctcgcaacaggtcatctcacgccgaagagcgacgtctacagcttcggcgtcgtgctgctggagatgctgtcgggccgccgcgccatggacaagaaccgcccggccaccgagcacaacctcgtcgactgggcgcgcccctacctcagcagcaagcgccgcgtctcccgcatcctggacgaccgcctggccggccactacccgctgccggccgtccaaagggcggcagcgctggcgctgcagtgcctcttcgaggacttcaggaagaggccaaccatggaccangtcgtcgc

SEQ ID NO: 100187 - DNA, 336 bp, Zea mays
cttcgcgctcacgggcccgctccgcagcacgcccgtgcacggccaggccggcgcgctcggcgccgccggcctcgtcgccatcctcagcgtctgcctcaccatgtacggcgtcgcctccttcaacgagggggacccgtccacggcgccctcgctcacgctcaccggcaggaagaaggaggccgacaagctgcagacctccgacggctgggccaagttcaccgggggattcttcttcggcggcatctccggcgtgctctgggcctactttctcctctacgtgctcgacctcccctacttcttcaagtagaaatcatcaaagatgcgtatatatatagc

SEQ ID NO: 100188 - DNA, 346 bp, Zea mays
cccacgcgtccggaaccagcttccagatctccaccaactgctggttgaggctgcgaagctcttgaacaccgaagctcctgacttgtacataaggcagaatcctgttccaaatgcctacaccttagcaatcaacggcaaaaaaccattcattgtcgttcacacaagccttgtggagctgcttactccaagggaattgcaggctgttttggctcatgagctgggtcacctcaagtgcgatcatggtgtttggctcacttttgccaatatactcacaatgggagcatacactgtccctggttttggcatggttgctggcttcctggaagagcagctatacagatggcta

SEQ ID NO: 100189 - DNA, 344 bp, Zea mays
ggtttccaaagccaagtgtgtactagcagtctagcaaccagctagctcgggcggcagcaggcagccatcatgtcggaggagaagcaccaccacttcttcaaccaccacaagaaggacgaggagcagcccgccggcgagtacgggtactccgagaccgaggtggtcaccgccaccggcgagggcgagtacgagaggtacaagaaggaggagaaggagcacaagcacaagcagcacctcggcgaggccggcgccatcgccgccggcgccttcgcactctacgagaagcacgaggcgaagaaggaccccgagcacgcgcacaggcacaagatcacggaagaggtcgc

SEQ ID NO: 100190 - DNA, 425 bp, Zea mays
cccacgcgtccgcccacgcgtccgggagtgggaagcggagctgaatcgccgactgaaggaggccgaggagatggaggagttggagcgcaccgccgagcagctgcaaagccaggccgccgccgaggcccccgaggagtcggaggaggagaagcgcgagcgtgtccgccgcgagctccagaaggtagcgaaggagcaagcggagaggagggagacggcgaagcaaatgtttgagttgggtcaaaaggcgtacgggaaaggaatgtatggacgatcaattgaattcttggaggctgcgctcactatcatacgtccctcctctctactcggtggcgagatccaaatttggcttgcaatggcatatgaagccaataggaggcacaaggattgcattgcattgtacaaagagttggagagtagccacccca

SEQ ID NO: 100191 - DNA, 429 bp, Zea mays
taaagcttcaaatttgggatactgctggacaagagcgcttcaggacaatcactagcagctactaccgcggagctcacggaatcattattgtatatgacgtgacagaccaagaaagcttcaataatgtgaagcaatggttaaacgagattgaccgttatgcaagtgacaatgttaacaagctccttgttgggaacaagagcgatctaactgctaacaaagttgtggcaaccgagacagcaaaggcgtttgctgatgagatgggcatcccattcatggagacgagtgccaaaaacgccatcaatgtggagcaggccttcatggctatggctgcatccatcaaggacaggatggccagccaaccagctgcggctaacgcaaggccagcgaccgtgcagatccgcggtcaacccgtcaaccagaagacgtctt

SEQ ID NO: 100192 - DNA, 422 bp, Zea mays
cgacatcgtcccttcgtccccacgagcaaccgataatccgccggcgttgagatgttggtttatcaggatctcctatctggcgacgagctcctgtcggattcattcacctacaaggagctcgagaacggcgtcctgtgggaggtcgagggaaagtgggtcacccaaggtcctgttgatgtggacattggtgccaatccatccgccgagggtggtgaggacgaaagcgttgatgacacagctgtgaaggtggttgatattgttgacacattccgtctacaggagcaacctccttttgacaagaaatcatttgtgtcttacatcataaaatacatcaagaatctcactgctgtgttggagccagagaaagcggatgagttcaaaaagggtgtcgagggtgcaaccaagtttctccttagcaagct

SEQ ID NO: 100193 - DNA, 351 bp, Zea mays
taccggtccggaattcccggggtggtttccaaagccaagtgtgtgtactagcaaccagctagctcgggcggcagcaggcagccatcatgtcggaggagaagcaccaccacttcttcaaccaccacaagaaggacgaggagcagcccgccggcgagtacgggtactccgagaccgaggtggtcaccgccaccggcgagggcgagtacgagaggtacaagaaggaggagaaggagcacaagcacaagcagcacctcggcgaggccggcgccatcgccgccggcgccttcgcactctacgagaagcacgaggcgaagaaggaccccgagcacgcgcacaggcacaagatcacgg

SEQ ID NO: 100194 - DNA, 413 bp, Zea mays
cagcttactaaccttgggattgtgtcctggatgtcgaattgtgttgccaaggttcttcaatctttctcattgagctggcctgcagcatttgttgtccttcaggcctcgtacttctttattcactatatatttgcaagccaaactgcacatgttggagctttatactcagcatttcttgcgatgcatttagcagctggtgtgccagctctaatgtcggcacttgctttggcatacaatgcaaacctctttggagcactaacacactatagtagcgggcaatctgcagtatactttggagcggggtatgttgaccttccggatgtattcaagctgggttttataacagccgcaatcaatgctgtaatttggggagttgctggtgcattatggtggaaatttttgggtctttattg

SEQ ID NO: 100195 - DNA, 435 bp, Zea mays
ggcaagtccgggaagccgctccactacaagggctccaccttccaccgcgtcatccccgagttcatgtgccagggcggcgacttcacccgcggcaacggcaccggcggcgagtccatctacggcgagaagttccccgacgagaagttcgtgcgcaagcacaccgcccccggtgtgctctccatggccaacgccgggcccaacaccaacggctcccagttcttcatctgcaccgtcgcgaccccttggctcgacggcaagcacgtcgtcttcggccaggtcgtcgagggcatggacgtcgtcaaggccatcgagaaggtgggcacccgcaacggctccacctccaaggtggtcaaggtcgctgactgcggacagctctcctagatctctctgatctggtctgttcggcccgcctccctccgtcatcgtcgactcccc

SEQ ID NO: 100196 - DNA, 425 bp, Zea mays
cccacgcgtccggaaatcttccgttctcaaaccaacctaggcaattcgccggagcctctcaccctcgcgagtcccgacctcccgcagccgccgcacagatggcacccaaggcggagaagaagccggcggccaagaagcccgcggaggaggagcccgcgacagagaaggtggagaaggctccggcggggaagaagcccaaggccgagaagcgcctcccggcgggcaagtccaaggagggcggcgagggcaagaaggggaaaaagaaggcgaagaagtccgtggagacctacaagatctacatcttcaaggtgctgaagcaggtgcaccccgacatcggcatctcgtccaaggccatgtccatcatgaactccttcatcaacgacatcttcgagaagctcgcggccgagtccgccaagctggcgcgc

SEQ ID NO: 100197 - DNA, 381 bp, Zea mays
cggacgcgtgggctcggcttcgccgtgcaggccgccgccaccggcaaggggccactcaacaactgggccacccaccttagcgacccactccataccaccatcttcgacacgttcggaggatcctcttaagcccgccattgatccgctccgtccatcgatcgaaacgtggtcttgaattaactatgatagatctctatgagcctggagatggatcaacccgtcgtgcgttgtttcattttgtgatgaatgggagagagggtatgggacaagattgatcaacccgtcgtgcttacgtctcgttaattaggagagctaccgctcggatttggtgatttgtaatatatgaaccagtgatgaataaatgcattcacttgtacaaaa

SEQ ID NO: 100198 - DNA, 401 bp, Zea mays
cccacgcgtccgcggcgatctacatgcccctggacaacgtgggcatgtggaacgtccggtcggagaactgggccaggcagtacctggggcagcagttctacctccgcgtctggacgccgtccacgtcgttgcgcgacgagtaccccatccccaagaacgcgctcctgtgcggccgggcggccgggcgccggaccaggccgctgtgagagtgagactgccgccggatcattcacagcttttgtcatgagaggatgacacggtattggtttggtctttggagaagagcagggacatacacaagtttatataccctcaactgaaaggaggttcagaggaacgaaagtgttgcttgccgattttttttcattttagtttttttttcctttaaaatttcatattta

SEQ ID NO: 100199 - DNA, 358 bp, Zea mays
catgcttgatggcgtgaccatcctccggtccgagaaggtcaaggatgagctcatccttgacggagacgacgtcgagctcgtatctcgctccgccgccctcatcaaccagaaatgccatgtgaagaagaaggatatccgaaagtttttggacggtatctatgtgagcgacaagggcgtcatcgaagaggagcagtgagcgacagagtagccgaaatgccaggagatgaatatgaatgtcgtttgagttgcaattttgtgagactgaatgtgaaccatttttctcattccttaaatagttgactgccggtgttcgtggtttcaaacggaatttagtcttattaactgaatttgcgtattc

SEQ ID NO: 100200 - DNA, 434 bp, Zea mays
ccctgcggtgcgggtgctttctccagcgacagcgacagcgagaggggaggggaaccagcgggctcctcctcctctacccctcgcctcggcggtgccaacaggcaggcaggcaggtcgtccgcgccagatctatctgtcccttcctcttgtagttgcaggcagacgcgccatgcggatgcgggtgcttcccgcgtcctggtcatcttcctccgccaagcatagcagcggcagctccgagtcgcaggagcacccttcttcctcctctgctacggccgcggtgtacctcaacatctacgacatctcccccctcaaccactacctctactggttcggactcggcatcttccactccgggatccaagtccatggcatggagtatggctttggagctcatgaataccccaccagcggagtcttccaagtagaacccaaaa

SEQ ID NO: 100201 - DNA, 331 bp, Zea mays
  unsure (1)..(331): unsure at all n locations
gctcaagttcgaggagaaggacggcatcgactacgccgccgtcaccgtgcagctcccggggggcgagcgcgtgccgttcctcttcaccgtcaagcagctcgtcgccaccggcaagcccgagagcttcggcgggcccttcctcgtgcccagctaccgtggctcctccttcctcgaccccaagggccgcggcggctccaccggctacgacaacgccgtcgcgctccccgccgggggcagaggtgacgaggaggagctccagaaggagaacatcaagaacgccgncttctncaccggcaacatcacgttgagcgtcaccaagagcaacccggag

SEQ ID NO: 100202 - DNA, 362 bp, Zea mays
cccacgcgtccggggtttagtcgcgccgccgccgccgccgaaacagcacatcgctctctcgatctcagccatggcggaggtggagcagccccaggacgcggtgaagctcttcaaccgctggaccttcgacgatgtccaggtgaacgatatctcgctgaacgactacctggctgtgactgcggcgaagcacgcgacattcctgccgcactccgcggggcgctactccaagaagcggttccgcaaggcgcagtgcgccatcgtcgagcgcctcaccaactcgctcatgatgcacgggcgcaacaacggcaagaaggtcatggccgtccgcatcatgaagcacaccctggagatcattcacctgg

SEQ ID NO: 100203 - DNA, 349 bp, Zea mays
cccacgcgtccgcccgcacgacacgacaccaagtcgaggagctcgagggcaccaatcatggccggcgtgaactccagcgtcgtcgggctcaagcccgccgcggcagtgccgcaggccgccgccgcctcatcgccggcgaagcgggtgcagctggccgcgcccgagggccgccgcgccgctctgctcggcctggcggccgtcttcgccgtcacggccaccaccgggtcggccaaggccacgatcttcgatgagtacctcgagaagagcaaggccaacaaggagctgaacgacaagaagaggctggccaccagtggcgccaactttgcgcgcgcctacaccgtggagttcg

SEQ ID NO: 100204 - DNA, 421 bp, Zea mays
gaggtatgagctgtttatggaggccttcgatcacatatctaaaggcatcgacaaaatctataagcagctgacaaaaagccatacacatccactcggaggaacagcatatttaaatctagaaaatgaagacgaaccgtttctacatggaatcaagtacacagctatgccacctaccaagcggtttagagatatggaacagttatccggtggggagaagactgttgcagcactggctttgctctttgccattcacagttttaggccatcaccgttcttcatattggacgaagtagatgctgctctggacaatttaaatgtggccaaggttgccgggtttatcagatcaaaatcatgtgaacgtgttggtgatgaacaaggcagcgatggcgaaagtggttttcagagcataggtatatctctg

SEQ ID NO: 100205 - DNA, 416 bp, Zea mays
cccacgcgtccgcccacgcgtccggctcgacatgttcatttactagttagaaaggagcagctacgggcttccaaagctatgcaggacagagtactcaacaaccccaacataacagtacatttcaatacagaagccatggatgttgttagcaatgacaaagggcagatgtctggcgttcatctgaagagaagagatacaggagaagaatcagttcttactgtgaaaggtctattttatggcataggacatactccaaacagtcagctgttgcagggccaaatcgaacttgatagtgctggctatattttagttaaagagggctcagccaaaacttcagttgatggtgtattcgctgctggtgatgttcaagatcatgaatggagaccagctattactggagctggatctggatgcat

SEQ ID NO: 100206 - DNA, 427 bp, Zea mays
ggttcaccctcaaggaaggctccccgtaccggctcaagttcaccttctccgggagcaacgacatcgtctccggcctccgctacaccaacaccgtctggaagacggggctcaaagttgacagagccaaggagatgctcggcacgttcagcccccagctggagccctacacgtacgtgacgccggaggacaccaccccgtcgggaatgtttgcccgggggtcctactctgccaggaccaagttcctcgacgacgaccgcaagtgctacctggagatcaactacaccttcgacatccgccgggagtggccgtcgacgagctgaccatccttccctccctccatcggtggcctgagcagaccagtcgtttcgttctgtgttcttccttttctatgttgcctcgtcctgtcctgtcactaggttttttgttt

SEQ ID NO: 100207 - DNA, 429 bp, Zea mays
  unsure (1)..(429): unsure at all n locations
ctcatgcagagggcaccacccacacgctggaaggcacccacacgctcggatgggcatgggtcgcaggatgcctcatcatgttcgccaactgcatttgcttgtctgcgtggatggttctgcaggtcccggttctgaagaaatacccagctaagctgtcgtctttcgccatcactctggcgttgggtttcgtccagctcgctgtcgtcgcgccgtttttcgagagcgaccttgagaggtggaagatcagctccggaggcgagcttttcaccatcctgtatgctggcgttgtggtgcttggaatcgcctggtatctcatgatctggtgcataaacaaaggaaggcctcacttcgtttccgtcttccagccactgcaaaccgtcatggtcgccatcatggccgncatcttccttggcgacacactctacattg

SEQ ID NO: 100208 - DNA, 428 bp, Zea mays
gcttgctccaggacgtacgtacgtacgtagatcgatccatcgatcgctagctagctgacgaccatggcgtccctctcctctgccgccatcaccgccccttccttcacggccgcgcccgctcgcgcagtggtcagcaggaggtccttcaccgtgcgtgcctctctccgcaaggccactgccaccgccgccgtggccgttgccgccagcgtcctgcttgccggcggcggcgccatggcccaggaggtgctgctgggcgcaggcgacggcgggctcgtcttcgagcccagccagttcaccgtcaaggccggcgacaccatcaccttcaagaacaacgccggcttcccgcacaacgtcgtgttcgacgaagacgaggtgccgagcggcgtcgacgcctccaagatctcgcaggaggagtacctcaacgcgcc

SEQ ID NO: 100209 - DNA, 423 bp, Zea mays
cccacgcgtccgagacagtacatagtgatgccgggcaggtatatatacacacagagactgaaaggtgccaatgtcaatgatcagatcatattaaacaaggtgctactggtgtcaactagagaaaaagcttacattgggatgccagtggtgaccaatgctgctgttcacgcagtggttgaagaacagggacgggatgataaagttatagtgttcaagtacaagaagaagaagaagtaccagaggaaacttggtcacagacagccaaacacaaggttaagaatcacaggcataagtggatacgaagagtaccctgctgacccaatacttgaccctgctgcagctttaaattaaactgtaagttatgtagttacaaaacggctggtagtagaatagcatgctagatttcttggttctttccttttt

SEQ ID NO: 100210 - DNA, 372 bp, Zea mays
ctcccaacccctacactcccggcggcggcgcaggagcagcagcacccgaggatggtgaagttcctcaagcccggcaaggccgtgatcctcctgcagggccggttcgccggcaggaaggcggtgatcgtgcgcgtgttcgaggagggcacccgcgaccgcccctacggccactgcctcgtcgccggcctggccaagtaccccaagaaggtggtccgcagggactcggccaagaagacggcgaagaagtcgcgcgtcaagtgcttcatcaagctcgtcaacttcacccacctcatgcccacccgctacaccctcgacgtcgacttcaaggacgtggccaccggcgggcccgacgcgctcttcaaccgcgacaag

SEQ ID NO: 100211 - DNA, 401 bp, Zea mays
ggagaagtgggtgcgcgtggacttcaaggagcccgtgtggttcaaggccggcgcgcagatcttctcggagggcgggctggactacctgggcaaccccaacctggtgcacgcgcagagcatcctggccgtgctcggcttccaggtcatcctcatgggcctcgtcgagggcttccgcatcaacggcctcgacggcgtcggcgagggcaacaacctctaccccggcggccagtacttcgacccgctgggcctcgccgacgaccccgtcaccttcgccgagctcaaggtcaaggagatcaagaacggccgcctcgccatgttctccatgttcggcttcttcgtccaggccatcgtcaccggcaaggggccccttgagaacctgctcgaccaccttgacgaccccg

SEQ ID NO: 100212 - DNA, 307 bp, Zea mays
ctgcgctacgacctcaagaccgtcatcgcttccaagcccaaggaggagaagaagagcctcaaggagctcaccggcaagctcttcagcaccatcgacgatcttgaccatgccgcgaagatcaagagcaccccagaggccgagaaatacttcgcagcaaccaaagatgctcttggcgatgttctcgccaagctaggctagacgcaagggctaataatggccatgtaatttcggacttgtgtttgttcatatggacccggcaaggcaatgtaccattttctgttgatattgtatcaggaagcacttaact

SEQ ID NO: 100213 - DNA, 384 bp, Zea mays
cccacgcgtccgcccacgcgtccgggaaaggcaaggggaagggcgggggcgcgtcgcctgagaagggcagctctggggcgccctccggtgaggacgactccaggagcagtgacagcggcagcgatgagtcgtcagagacgagagatgatgacactgaccataagggttcatctgcgcccaagaaaaggaaatctggtaacacgtcggctgaaggtgaaccgtctcaagctgctgttgtgcgctatgctacggttgagtcgccatatcccgcaaagggaaggtctgcctcaaagcttccagtgtctgcacctggcagggcagcgcttcctagtgccaccccgaatctgaacattgggatggacatttggaatacttcttctggct

SEQ ID NO: 100214 - DNA, 418 bp, Zea mays
cccacgcgtccgcttgcatagggtttatcttctcccctcctctgcccccatctcgcttcgggcacacggcagccggattccgaagcgcgccccctcggccccagccaaaagcatcgcagtttctaatcgtttggagagcacacaagaatgtcgttcgtgcagctctctggtgctggagtcgctgcagtggccttcacgaacaagagcctagtctctcggcacgcagcgctacgggtctgctcgtcgaggcgctcgatccgtagcctggtcgttaaggctgcaactgtcgtcaccccaaagtacacttcactgaagcctctgggagatagggtgcttgtgaagcttggtgccgcagaggagaagacagttggtggcattttgcttccatctactgcccagactaaaccacaaggaggtg

SEQ ID NO: 100215 - DNA, 431 bp, Zea mays
cggacgcgtgggcgcccaatctccacttctttatcttctccgaggtgagagagcccaggcgatccaattccaccctcgttctcaggcactgtcacacagacacagctgacctgccactgccaggaaagtaggtcgaggatgccccgcagcggcttctcggggtccttcaggtcgcccaagatcgacgtcgtcatcgacatgggaaaccccttcctcaaccgcaccgtcgacggcttcctcaagatcggcgccgtcggcgcctgcaaggtggctgccgaggagaccttcgagtgcctccacaggggggatgtttcgaagcacaaggttgagcatgccctgaggaagatgtgcaaggagggcgcatattggggcactgttgctggagtttatgtgggcatggtgtacggcgtggaaagggtccgtggccgcag

SEQ ID NO: 100216 - DNA, 429 bp, Zea mays
cccacgcgtccgcccacgcgtccgcaaggctaccattaacatgcttcgcagggttgagccttatgttgcatatgggtacccgaacttgaagagtgtcagggagttgatctacaagaggggctacggaaaactgaacaagcagaggatccctctgtctaacaaccaagtcatcgaggaaggcttgggcaagcacaacatcatttgcattggagatcttggtcattaaaaccttaattgtcggccaaaatttaaaggaggcgaacaacttccttgggccatttaagctgaaggcaccgttggaaggcctgaaaaggagaaggaccccttttttgaaggttgtgaatcccgtgaccgtgagaattacattaacgagctcattaaaaggatgaattaggttcacgatcaagctctattgtgttctaagaaact

SEQ ID NO: 100217 - DNA, 338 bp, Zea mays
ggcaatgcagcaccttgagggaaaatatgaattcatgacatctgatcactcatatgtatcacggaagcatgaggaggataaggtgatcatctttgagagaggagatttggtcttcgtgttcaacttccactggagcaatagctattttgactatcgcgttggttgtttcaagcctgggaagtacaagatcgttttagattctgacgatggccttttcggtggatttagtcggcttgatcatgatgccgagtacttcactgctgactggccgcatgacaacaggccgtgttctttctcggtctatgcacccagcagaacagccgtcgtatatgcacctg

SEQ ID NO: 100218 - DNA, 403 bp, Zea mays
cggacgcgtgggcggacgcgtgggaaaggtgtcatccaagatcggggttattgagtccctgttggagaagtgtgatatccttctcttgggtggtggtatgatcttcacgttttacaaggcacaaggtctccctgttggtgcttcattggtcgaggaagacaaactcgagcttgcaacgtctctacttgcaaaggctaaggaaaagggtgtctcccttatgctgccaaccgatgttgtcattgctgacaagtttgcccctgatgctaacagccagattgttccagcatctgcaattcctgatggttggatgggcctggatattggcccagattctgtcgcttcattcaacgcaagcctggatacaaccaagacggtcatctggaacgggcccatgggtggcttc

SEQ ID NO: 100219 - DNA, 369 bp, Zea mays
aacccaaccaaacccgcacgacacgacaccaagtcgaggagctcgagggcaccaatcatggccggcgtgaactccagcgtcgtcgggctcaagcccgccgcggcagtgccgcaggccgccgccgcctcatcgccggcgaagcgggtgcagctggccgcgcccgagggccgccgcgccgctctgctcggcctggcggccgtcttcgccgtcacggccaccaccgggtcggccaaggccacgatcttcgatgagtacctcgagaagagcaaggccaacaaggagctgaacgacaagaagaggctggccaccagtggcgccaactttgcgcgcgcctacaccgtggagttcggcagctggcagttcccctac

SEQ ID NO: 100220 - DNA, 428 bp, Zea mays
cggtgaatttgcccaagggaacaggccagtcggtgaagattgcggttctcacacaaggtgagaagatagatgaagctagagctgccggagctgatatcgtaggtggagaagatttgattgaacaaataaaaggaggatttatggagtttgacaaattgattgcatcacctgatatgatgcctaaggttgcgggcttaggtaagattctaggaccaagaggactgatgcctaaccccaaagctggcactgtttcttcaaatattactcaggctatagaagagttcaagaaagggaaggttgaatacagggttgataaatcaggaattgttcatattccatttggcaaggttgactttccagaggaagatctcattgcaaacttcatgtctgttgttcgctctgttgagaggaacaagccatctggtgct

SEQ ID NO: 100221 - DNA, 396 bp, Zea mays
tttttccccaactctatcaatacagctcagatggtcaagatacaggccaaaatttcctgaagcgaagaggtacacaaaagataccacacggtctcacttctgcatatcggtttacatgcttcggcactgacaaacgaatgtggtgcagtacatatgggaactagtagaagagacccgaagttggccatgcgcccaagttacaaccccagctccgagaggagattgcgccaccttggcgtctcctcgtcgaatatgtaggtcagctttgttaccaagactccactgccaccaattgatctcagttgttggatagatttgtaaagcaacttctgtggaacaaccacattaatggcatagtattccacatcaacttttccatcacgtctgcgatagaca

SEQ ID NO: 100222 - DNA, 363 bp, Zea mays
cccacgcgtccggctgaggttttcaagaaagctggaacttatgatcccaagcggcttcttggagtgacaacactcgatgttgcgagggctaacacctttgtggccgaagtgcttggagttgatccaagagatgtcagtgttcctgttgttggagggcatgctgggataactatattgcccctcctctcccaggttacacctccgagctcattcactcaggatgaaaccagatatttgacagaccgcatacagaatggtggcacagaagttgtggaggcaaaggctggatcaggctccgcgactctgtcaatggcttttgctgctgctaaattcgctgacgcatgcttgcgagctatgcggggc

SEQ ID NO: 100223 - DNA, 427 bp, Zea mays
cgagtggccattcttcagggtcaccctggacctgttggagatggttttcgcgaagggagaccccggcattgccggcttgtatgacgagctgcttgtggcggaagaactcaagccctttgggaagcagctcagggacaaatacgtggagacacagcagcttctcctccagatcgctgggcacaaggatattcttgaaggcgatccattcctgaagcaggggctggtgctgcgcaacccctacatcaccaccctgaacgtgttccaggcctacacgctgaagcggataagggaccccaacttcaaggtgacgccccagccgccgctgtccaaggagttcgccgacgagaacaagcccgccggactggtcaagctgaacccggcgagcgagtacccgcccggcctggaagacacgctcatcctcaccatg

SEQ ID NO: 100224 - DNA, 428 bp, Zea mays
ctcctcctcctccttcccggccgccgcgcgagcttggtgggttagtgtctctgcttcgcggagacctgtgagaggagccatcatcatggccgccgttgagactgttgtcctcaaggttgctatgtcatgcgagggttgcgcgggggcggtcagaagagtgctctccaagatggaaggagttgaaaccttcgacatagacctcaaggagcagaaggtgacagtcaaaggcaatgtcaagcctgaggacgtcttccagacggtttccaagtcggggaagaggacctcctactgggagggcgaagccacggccccggacgctgcggcggcttctggagccgaagcagctcccggcaccgcggcagaagcgcctcctgctgctgctccggcggcgccagagatcaccccagccaaagctgacgcctgatcgt

SEQ ID NO: 100225 - DNA, 436 bp, Zea mays
gctagatgctggaatgaaggagctcgcctcttcgctgatcgactcagagtcgctcctcgtgttcggaaggggttacaactacgccaccgcgctggagggcgccctgaaggtcaaggaggtggcgctgatgcacagcgaaggcatgctcgctggcgagatgaagcacgggccgctggccctcgtggacgagaacctccccatcattgtcattgcgactcgcgacgcgtgcttcagcaagcagcagtcggtgatccagcagctcctctcgcgtagggggcgcctgatagtgatgtgctccaggggagatgcctcggctgtgtgccctagcggtgggtcgtgcagagtcattgaagttccacaggttgcagactgtctccagccagtgatcaacataattccattacagttgctcgcgtaccatctgactgttctccgg

SEQ ID NO: 100226 - DNA, 371 bp, Zea mays
cccacgcgtccggcggcgttccgcaaggccgccgccggcccgctgcagggcatcctggaggtctgcgacgtgccgctcgtgtccgtcgacttcaggtgctccgacgtgtcctgcaccatcgacgcgtcgctcagcatggtcatgggcgacgacatggtcaaggtcgtcgcctggtacgacaacgagtgggggtacagccaacgcgtggttgatctggcgcacctggtggcggccaagtggcccggcgcggcggcggccggcagcggcgaccctctggaggacttctgcaaggacaaccccgagaccgacgagtgcaaggtgtacgaagcatgaggccagggttctttccacgacgaaacgtacaacacggg

SEQ ID NO: 100227 - DNA, 345 bp, Zea mays
cccacgcgtccgcccacgcgtccggtcagagtgaagttcttggatgaccagaaccgtctcatcatgaggaacgtcaagggccctgttcgtgagggtgacatcctcaccctgctcgagtctgagagggaggccaggaggctgcgctgaagccctggtggccttggatgtaattctgttaattttgttctatgtttgtcgaacttgccgtgtgaccttcacaacatctgctttgagatttactcagcctggattgcagttttattttatgttcctgctggaaagtgacttgccgagacatagttatcattggttatctataatagctcaatcgacgcgtgcaatctg

SEQ ID NO: 100228 - DNA, 416 bp, Zea mays
gcggctccgttcaccaagagaggtctgctgctcaagttcctgctgctgggcggcggctcacttctggcctacgtcagcgcgtcggcgtcaccggacctcctgccgatcaagaagggacctcaggagccgccgcagccgggcccgcgcggcaagatctaagctcagcttctccatttgcatggtctagtagcttgctttgtactgctagcgccggtcgatccgtcgcaatcgtcatggatcatctctctatcttgttgttacgctgttcataatttggtatatttgccattccgctattgtgtactctttggcatacatacaataattaaaatggcgttgcgtggctctcatataattaaccttcacataacctgaaaactcaagtacgtatagtatgggccactttattgtggatt

SEQ ID NO: 100229 - DNA, 368 bp, Zea mays
ccctcttccaccaaaaattgacccaagtgttaccatgatgactgtggaggaaaagccagatgtgacgtacaatgatgttggtggctgcaaggagcagattgagaaaatgcgtgaagttgttgaacttcctatgcttcacccagaaaagtttgtcaagctcggtattgatcctccaaaaggcgtcctttgctatggcccacctggcactggcaagacacttcttgcaagagctgtagcaaatcggactgatgcttgtttcatccgtgtaattggaagtgagttagttcagaagtatgtcggcgaaggtgctcggatggtcagggaacttttccagatggcccgctcaaagaaagcgtgcattggattct

SEQ ID NO: 100230 - DNA, 415 bp, Zea mays
cattttaatccaaacaatctgacacacggtgcaccagaagactaagtccgacatgcgggtgacctgggaaacattggtgcaaatgctgagggcatagccgaggcaaccattgttgatacccagattcctttgactggcccaaattcagttgttgggagagcatttgtggttcatgagcttgaagatgatttggggaaagggggccatgagctcagactctctactggaaatgctggtggaagactggcatgtggtgttgttggcctgactccattgtaggttgctcgccgggtgcccgggttgcagttgcagctacgctggtacattcttgccgtggtggacttttggcttgaatccagttattgggacagtgacctttattgtattacttggattcatttcatgcatgtggtat

SEQ ID NO: 100231 - DNA, 413 bp, Zea mays
ggggaatgtcacaattaaactttgggatcttggtgggcaacgaagattccgcactatgtgggagcgctactgccgtggagtttctgctattctatatgttgtggacgctgctgaccgagatagcatcccaatagcgaaaagtgaattgcttgatctgctgacaaaacagtctttaactgggattcccttgcttgtccttggcaacaaaattgacaagtcagaagcgctttctaagcacgcattggttgatcaacttggactggaattgataaaggaccgcgaagcttgttgctacatgatctcctgtaaggattctgcgaacatagacgttgtcatcgactggcttatcaagcactctagaacagctaaatacgctttatgggtggtcggatcacttgatgcatggtaatttg

SEQ ID NO: 100232 - DNA, 312 bp, Zea mays
gatcggatcaccttcttgcattgggtcctctgtctctcttcctactttacactcccggtatcgcatcatctcttttctactgcatgcaatggtctcttttgcttacaacaattctcctgctgatgtatccagcatggcatcatacatctacaattacgtacgtagtgcaacgactgccgattcgttgcgtgacgaacatatatgcgaatgcaagctgcgactaccatacatgcataatgagtgataaatatatatacaaaactgactaagcgccgaccatactctaataactggtccaaaacattataacaa

SEQ ID NO: 100233 - DNA, 399 bp, Zea mays
cccacgcgtccgcggacgcgtggggcgccactgtccagtgcgcgcgtcaagcttgcggagctagccgccatggcctccctcgccggcgtctccgtgaagcccgtggccatcaagggtctcgccggcagctccatctccggaaggaagctcgccgtcgccaggccgtcggcccgctccatccgcaggccccgcgcagccgccgtggtggccaagtacggcgacaagagcgtctactttgacctcgacgacatcggcaacaccaccggacagtgggacctctacggctctgacgcgccctcgccctacaacccgctacagagcaagttcttcgagacgttcgcggctccgttcaccaagagaggtctgctgctcaagttcctgctgctgggcgggggctca

SEQ ID NO: 100234 - DNA, 426 bp, Zea mays
gcacagcatcatctgaccgcactgtattagatttggaatgtcgatggcttcgagttgggaagaactttagtcggccatcatcgttgggtttgggactgtgtcttctccgtcgatggtgcttatcttataacagcatcttctgacactacagcgaggctatggacgatgtctactggagaggccatcagggtgtaccagggtcatcacaaggccaccgtgtgctgctctctccatgatggagcagaatcagcgccctcataagcatgttgtgactgcttttctgtacatacgttagattgcagaactctttcactcttgtaaacttgagacctagcaagttgttaacgcaagcctctggggttgcgtacaaataatttgcgtgctgttggtggatgtttaaacctgctatgttttatggaatgaatg

SEQ ID NO: 100235 - DNA, 219 bp, Zea mays
cccacgcgtccgaaccaagcccgcacgacacgacaccaagtcgaggagctcgagagggcaccaataatggccggcgtgaactccagcgtcgtcgggctcaagcccgccgcggcagtgccgcaagccggcgacgactcatcgacggcgaagcgggtgcaactggccgcgcccgaaggccgtcgcgccgctctgctacgcctggcggacgtcttcgccgtc

SEQ ID NO: 100236 - DNA, 414 bp, Zea mays
gcgatcggagcatcccgtcccaagaggagaaactccggccggcgacgcgggggaaaatggggaagacgccggtgcggatgaaggcggtggtgtacgcgctgtcgcccttccagcagaaggtgatgccggggctgtggaaggacatcaccaccaagatccaccacaaggtcaccgagaactggatctccgccacgctcctcctcacccccgtcgtcggcacctaccaatacgccatgtggtacaaagagcaggagaagctttcccacagatactaaatgggatgtcctccaagttgctgcggcttgtcgcagttgaattttccatgatgggttgtataatctgtcaatgtcatttctttgctcagttttagttcaacccattttcacctttccatatgcatatacggtatctgtg

SEQ ID NO: 100237 - DNA, 381 bp, Zea mays
cccacgcgtccgggcctgccaggtcgcgctcatgggcgccgtcgagggctaccgcatcgacggcggcccgctcggcgaggtcgtcgacccgctctaccccggcggcagcttcgacccgctcggcctcgccgacgaccccgaggccttcgccgagctcaaggtcaaggagctcaagaacggccggctcgccatgttctccatgttcggattcttcgtccaggccatcgtcaccgggaagggcccgctcgagaacctcgctgaccacattgccgaccccgtcaacaacaacgcttgggcctacgccaccaacttcgtccccggcaagtgagggaggcgccgccggtgacctttaggtgtccggatgcatgtgagcgcacgctg

SEQ ID NO: 100238 - DNA, 351 bp, Zea mays
gcgtcaccaagagcaacccggagaccggctaggtcatcggcgtcttcgagagcgtgcaggcgtccgacaccgacctcggggccaaggcgcccaaggatgtcaagatccagggggtctggtacgctcagctcgagtgattcgagtgtctaactgctaggtgtccgaccggcgtcatggatcttgggaaggtgtatgtataccatggaaaactttggagagcataggaggaatcgtgtatgtaatgtacttgttaatgcaaattcaggctgtcgcttttttactccaaaaaaaatgctaacagatctgaaggtaaacaaattgaaggtgatatgaataatcttcaaaagagat

SEQ ID NO: 100239 - DNA, 420 bp, Zea mays
  unsure (1)..(420): unsure at all n locations
cttgatgatcgaggaccctataactggtcacatacctcgtcatgggtaaactttgacgtggagcggactaataccagaataagataccacgcaatgggagtggagagatggcgagagtagcgcgtaccctccgtggcaagaggctggacggtggtgtatctgtgctctcggttggcgtgaacctgatctggtcttaagaaccccggtggcgagttgacatatgcaagggttaagtgctacatatgtcgtgtgattgaagatcctcagctgagtataatcgattcggatcgccgtaccttcgtggttatgaatacttggtcactgccctacacgtagcaatccagtgaagatgaagggatgatgaaaagaccgctagtataagccaagtgcttgaactanggtagaaagaactctagatgc

SEQ ID NO: 100240 - DNA, 430 bp, Zea mays
gcgtagacaaaggtcggagttccaatcaaaaatcaaagacaccctttacgtggccatgaaggctaagccagagctcgttccatcgttgatgaccatggcactgaatgatgccatgacatacgacaagaccacaaaaactggaggcgcaaatggatctatcaggctagaaacaagcagacctgagaacagtgggctctcttccgcgttggatttgctgactgaagccaaaaaggagatcgattccttttccaagggaggtcccatttcgtttgcagatctgatccagtttgcagcacaatcagcactgaagagatcgtttcttgacgctgacattgccaaatgtggtggaaatgaagagaagggaagaacactgtactctgcatatggttcaaatgggcagtggggtctggtcgatagaacgttcgggaga

SEQ ID NO: 100241 - DNA, 421 bp, Zea mays
  unsure (1)..(421): unsure at all n locations
cccacgcgtccgcccacgcgtccgcctacgcgtccgaaccccagcgccatggacatgagctacgcgctctgcacctcctccggcaccgtcgtgcaggacggcgcctacgggtaccagaacctcttcgacaccaccgtcgacgccttctacgtcgccatgggcaagaacggcggctccggcgtgccgctcgtggtgtcggagagcgggtggccgtccggcggcggcgtccaggccacgccggccaacgcgagggtgtacaaccagtacctcatcaaccacgtcggacgcgggacgccgtgccacccgggcgccatcgagacctacctcttctncatgttcaacgagaaccagaaggagagcggcgtggagcataactgggggctcttctaccccaacatgcagcacgtctaccccatcagct

SEQ ID NO: 100242 - DNA, 414 bp, Zea mays
ttgagttctcctctgagcagatactgaagctaacaagggaaacaaggaagatgcttccagacatcaccttatcagtaacagttcctcacacacttagtttgccagatcagatgagactagcagagctactcgaagaggaaggagctgatataatccaaaccgagggtgggaaatgttctagcccgacaaaacctggagtgcttggattgattgaaaaggcaacaccaacactcgccgcagcatactccatctctcgggctgttagtattccagtgatgtgctcgtcagggttaagctcggtgactgcaccaatggcagtaactgcaggagctgctggagttggagtcggttctgctattaacaaactcaacgacgttgtggcaatgatcgctgaggtgagaagcattgcgcaag

SEQ ID NO: 100243 - DNA, 426 bp, Zea mays
cccacgcgtccggaaaaatccccagttctttggtccgcgtcagagaggcggcggcgatgtctgggcgcggcaagggcggcaagggtctgggcaagggcggcgcgaagcgccaccggaaggtgctccgcgacaacatccagggcatcaccaagccggcgatccggaggctggctaggaggggtggcgtgaagcgcatctcggggctcatctacgaggagacccgcggcgtgctcaagatctttctcgagaacgtcatccgcgacgccgtcacctacaccgagcacgcgcgccgcaagaccgtgaccgccatggacgtcgtctacgcgctcaagcgccagggccgcaccctctacggcttcggaggctaggctaggcgcctcttcgtagtcggggactggttatgggacatgtctctgtgtgatgctt

SEQ ID NO: 100244 - DNA, 427 bp, Zea mays
cccacgcgtccgaccacgcgtccgtgaacatgcacagaaaatcattaagggtgttacgacgacaaagttatcttctgcaattgaagcctctgttgctcggggtcagatcggtatacagcaggtccgaggattgaaggaagcaaacttccaactagatagcttgattgcggagccgcagcgagaaagcatttataggaaaactgttgaagagctcttttcttcaggtacaggggatttcgatgaagaggaaatgtatgtgaagattccagctgatctcataataagttctgagaaggccaagtcaattgtacaggatattgcaaaggttaggttggagaactcccttgtccaggctattgcgttgcttcggcagaagaagagagatgatgtgctttcatctctgaatgacatgctcgcatgtgatgct

SEQ ID NO: 100245 - DNA, 419 bp, Zea mays
cagctatgtcttctcaggtcgacaggcgcagccagtccgccgggaagcgcgcgcgcaccgacggcagccggcgtgaggacgactgggtttgccccagctgcaagaacgtcaacttcgccttccgcaccacttgcaacatgcgcagctgcaaccagtccaggccagcagatcacacggccatgcagaccccgcctcactatcccatgtcagggggttacatgggccctgggacgccaccatcgatgtaccttggtgggggcgctcccccatatggatcctcaatgtttaatgggcctgcggtgacgcgctatggtattccgcaatttcctgggggttctgcgtattcatatggatatggtggtcccataccaatggggagcccctacgggccaatgcaaattgctgggccaactccatac

SEQ ID NO: 100246 - DNA, 419 bp, Zea mays
cccacgcgtccgcggacgcgtgggtgctattggaaaggatgttcaggccatgaaggctgtcgttggagaggaggcactctcgtctgaggatctgctttacttagagttccttgacaagtttgagaggaagtttgtgacacaaggagcatatgacacacggaacatcttccagtcactcgatcttgcatggacattgcttcggatcttccctcgcgaacttctccaccgtattccagcaaagaccttggaccagtactatagcagagatgcttgccactgaatcactgatcgttgatcagtgttccaatattttggcaagtgcagctttgaataaattgaacagattggcctcgtggccattttcctgtatttatctgtagtcaggtccaattcttttctgttggtgagcgcaagttatt

SEQ ID NO: 100247 - DNA, 429 bp, Zea mays
gtagccttcgacgcgtcgagcatcgatcatgtcggcctactgcggaaagtacaacggtgagctcatcaagaatgctgcctacattggcacccctggcaagggtatccttgctgctgatgagtccactggcaccattggcaagcgcctttccagcatcaatgtccagaacgttgaggagaaccgccgtgccctccgtgagctcctattctgctgccctggtgctctccagtacatcagcggtgtgatcctcttcgaggagaccctgtaccagaagaccaaggatggcaagccttttggtgatgtcctcaaggagggaagcgtactacctggcatcaaggttgacaagggcaccattgaggttgatggcactgataaggagaccaccacccaaggccatgacgaccttggcaagcgctgcgccaagtacta

SEQ ID NO: 100248 - DNA, 430 bp, Zea mays
gcagcggcgtcaccatctccattagagcccagaagaagagtaatagcgactctgggagtagtagcggaggtggggacgtgcggaccagcagcgggaggcgagtgtggcgtcgtcggaaactgaccaaagaagatgacatgttgcgttacaagttggatcgtatccctttcttagaagagaaggtgagaaaggtaagggagaatgggaagatcatatgcctggatattaatcagctgatgttatctcaagagaatagatttgcgttcaccatggaggtggctgaagaagctaatgcctatcttgagaagaacaggcttgaatatgggttaaagaagcctatactgcatgttctcagtgatcgcatgaatgaatctgggttttctcggcctgagggttacctttatccttatcctatcaagcctggccctta

SEQ ID NO: 100249 - DNA, 423 bp, Zea mays
caacgtggccagcgggaccaagctcatggtcgtcccgtacggcgccaacgtggagctggtcatgcagggcaccagcatcctcggcgtcgagagccacccgctgcacctgcacggcttcaacttcttcgtggtcggccaagggtacggcaactacgacccggtcaatgacccgcccaagttcaacctcgtcgaccccgtcgagcgcaacaccgtcggcgtgccggccggcggatgggtggccatccgcttcctcgccgacaaccccggggtctggttcatgcattgccatttggaggcgcacacaacatggggcctcaggatggcatggttggtgctcgacggcagcctcccgcaccagaagctgctcccgccgccgtccgacttacccaaatgttgattagactcttcctccatctctatcct

SEQ ID NO: 100250 - DNA, 431 bp, Zea mays
cccacgcgtccgcgccagttatgaggttatgggcttggatgccactgccctgtcttacggtgaccttgtcaagagggtccttgggtgcttcggcccctcggaattttctgtcgccgtgaccatcttcggcgggcggagccaagctgggacatggggaaaggaacttggtgcggaggcttatgactgcaacaacatggtcgagcaggagctgcctggaggtgggatcctcatctaccagagcttctgtgctgctgaagacgccgttgctagctcgcccaaatccgttcttcgctgctttgatggcgagaatgcagcaccttttgcgaaggactgcaagctggctaatcttgtctgcttggaggaagttggatgctatcgaggagaaggatggagtgcttgatgagtaagacgggtttcttgtgtccatttgc

SEQ ID NO: 100251 - DNA, 411 bp, Zea mays
caaaagctgagaacaaggctgctaagaaagtatccgctattctttcatgggaaaacacagagaaagcaaacatagaagctgaactgaagaagattgaggaacaactggaaaagaagaaggctgaatatgcagagaagatgaagaacaaggttgcaatgatacacaaggaagccgaagagaagcgagcgatggtggaggcaaaacgcggtgaggaggtcctgaaggccgaggagatggctgccaagtaccgggccaccggccacgctcctaagaagctcatcggttgcttcggagcctaagaaaccttccaagtcagaccgagcagaaagtgaaaaacgtcagccagtgattgcttggtcctctcgctctatcaagtgtgtagtgtgtcttcgaaagtttgtaaagcctact

SEQ ID NO: 100252 - DNA, 405 bp, Zea mays
gtttcggtgtaatggcaactacaggttgactatgcatgcactccagaagaagtgcagcagcacttcaagtcttgtggaactgttaacagagtgacaatcctgactgacaagtttgggctaccaaaaggttttgcttatgtggaatttgttgaagttgaagctgttcatgaagctattaagtcgaatgaatcagaattgcatggtcgccagctcaaggtggcaccgaataggactaacattcctgggatgaatcaactccgcggtcgaggtttcaatccataccggtcatatggttatagtccttatggttatggctatggctacaggagattccctagattccgccgtccgcgaagactgtatatgtgaagctcgtatgtccatatggtatgcagtacatggact

SEQ ID NO: 100253 - DNA, 343 bp, Zea mays
  unsure (1)..(343): unsure at all n locations
cggacgcgtgggccgccttgtcacagaccacgagatagcaagcctgtgcatcgagatgctcagcgatggctcggagctaccggcgacggcgctggagtggatcatggcggagctagtaaagaacccaagcgtgcaggacaagctctaccaggagatgatggagaaagccaaagccaccactgacgcttctgctggcgtgctaccgttctcggaggatgacttgcccaagataccctacctgagagcggtggtgcttgatggtctgcggcgccatgctacggggcaccaaatgccttcacacagggttgaggangacgtggatgtgggtgactgactggtgccc

SEQ ID NO: 100254 - DNA, 423 bp, Zea mays
cgctagtgttggacagaagagaatacactacagtactacatggcgaagcagcagcagcagggcatgccggcagtggcgctggtagtgctggtggtgctggcgacggcggcggccgagacggcgtcggcggcttcgtgcaacgccgggcagctggcggcttgcgcgccggcgatcacggccggcgcgaggccctccgcgtcgtgctgctccaacctcaaggcgcagcaggggtgcttctgccagttcgtgaagaaccccacctacgggcgctacatcaacagccccaacgcgcgcaaggtcgtcgcctcctgcggcgtctccgtgccgcgctgctagtacgtgtacgtgtgtgcaatgtgcatgcatgtacgtgcgcacgtgggctgatcttactgcttggttcgtgccttgccgcgcgctatc

SEQ ID NO: 100255 - DNA, 420 bp, Zea mays
aggggtgactactggcacgccaattgttggtattgtcccaaacacagatcagataggcagtgatcaccgtgaaatagccaatgtgtaccgaccttctcatgcagacgcaacttatgacttcaagtacggcgttagagctgtacagggaggtgggaggtcgtttggcacagaaaccgtaggaagggtggctgcaggtgccctcgccaagaaaattcttaagctcaaatgtggattagagatctcgtcgtttgtttacaaagtgcatcacgttgtgctcccagaagacgcggttgattatggatctgtaactttggaacatatagagagcaacatcgttagatgtgctgatccagagtacgcagagatgattatagacgcaatcgacagagttcgagttccaagggattcggacggtggaat

SEQ ID NO: 100256 - DNA, 423 bp, Zea mays
gggaggggacgagagcggtctcgtgaggggtgtgctcgccgcgctccgcgagcgagccgaggccgaggacgccgctcgcttcgccgtcgcccactacaacaagaaccagggcgccgctttggagtttactagggtgctcaaatccaagcggcaggtggtgaccgggaccctgcatgacctgatactggaggcagctgatgctggaaaaaagagtgtgtacagagcaaaggtttgggtgaagccgtgggaagatttcaagtctgtcgatgagtttcgccttgatggagactctgaatctgaacccgagccttctgttgcttctgatgttagctctgggcaagatattgtacaagaagaggctcgcctgcacaccattgagaatgatgggctttccggcgatttcacatcatcatcttaggcata

SEQ ID NO: 100257 - DNA, 422 bp, Zea mays
gtacggcagtcaaatgtcaacagatttaagtgcaatagcatacgaagtaacctctttgagaggctaacaagggttgtcaggtcctacgcaaatgcagttctaagttcgtttgaagaccctgagaagattctagaccaggcagttctggagatgaatgatgacttgacaaagatgcggcaggccactgcacaggtcttggcatctcaaaagcggcttgagaataaatctaaagctgcagaacaagcttctgctgattggtatcggagggctcaacttgctcttcaaaagggtgacgaggatcttgctcgtgaagcccttaagcggcgtaaatcatatgctgacaatgcaagctccttaagatcccagcttgatcagcagaagggtgtagttgaaaatctgatttcaaatacccggcttcttga

SEQ ID NO: 100258 - DNA, 433 bp, Zea mays
  unsure (1)..(433): unsure at all n locations
cgagacgatactgctccccgggtgcgactacaaccactggctgatcgtcatggagttgcccaaggaccccgcgcccacccgcgagcagatgatcgacacctacctcaacacactcgccaccgtcctcggcagcatggaggaagccaagaagaacatgtacgcgttcagcacgaccacctacaccgggttccagtgcaccgtggacgaggagacgtcggagaagttcaagggtctgcctggggtgctgtgggtgctccctgattcctacatcgacgtgaagaacaaggactacggaggtgacaagtacgtgaacggcgagataatcccctgcacgtacccgacgtaccagccgaaggagcggaggacgtncaagtacgagagcaggcggtacgagaggcggagagatgggccaccggcgggcagcaggaaaccg

SEQ ID NO: 100259 - DNA, 399 bp, Zea mays
gcgggcccatcctggacgacgagatcaacgaggtcatcgtgcgcccgctggtgcacggcgccaggctgcacgccgtggtggacgcctgctacagcgccacggtcctggacctcccctacctgtgccgcatgtccaggaacgggttctggcagtgggaggacgagtgcccgccgtcgggcgcctggaagggcaccagcggaggccacgccgtgctcatcagcggatacagcgagggcaaaggcaacttcgccatgatgcccgacgcccacgcgtcggtcgtcggggccatgacgcacagcttcgtccggacgctggagtgccagccgcgcggggtcacctacggccacctgctcagctccatgagggccatcatgaagaaccgcggcgggggctgcgatc

SEQ ID NO: 100260 - DNA, 458 bp, Zea mays
cggaattcccggttcgagccacgcgtcacgcttgcggtgattggaccggtgtagaagacagggtgggcacttgaggttgatgagctgaagaaacaacttgaggaggctcgatctaagggcatcagtgtcagggcgcttgctgtcataaatccagcaaatccaccaggacaggtccttaccgaggaaaaccagatgaaaattgttgaattctgcaagattgaaaggctcgttcttctcgcggatgaggttaaccaagaaaacatatatgtcgaagacaagcaattgcactcgttcaaaaaaatcgcacggtcgctgggatacactgatgacgaccttcctttggtatcgttccagtcgatttctaaaggctactatggagaatgtggaaagcgaggtggttacatggagataactgggttcagtcctcaagtacgggaccaaatctacaagatggcatc

SEQ ID NO: 100261 - DNA, 365 bp, Zea mays
cggacgcgtgggctccgtgataggcaactcgctgcgcaatttcatgaaatgcctctggatcttaagatgatccgagcagaaaaagctggatttgaaatcctgaaatctacaacggtagataaactccccaatgatcttgaaggaatcgcttactgaatggagaagctctacattcttattgatgagatctacagatacctggatgatgctggacaaagacgcgcggcacctgatcacaaaatcgaacggctgctatctcaatcctgtgcttcaatgccaagattcgccccaggtgctgacgatcagcttttaaatgacaagattcaggataaccttgcgctagtatacctgtcaagcatcacaag

SEQ ID NO: 100262 - DNA, 413 bp, Zea mays
gagcggcggcgcgggcggacaaggagcaggcggaggaggagctgtgccaagccacaatgggtatctcacgcgactcgatgcacaagcgccgtgccaccggtggaaagcagaaggcctggaggaagaagcgaaagtatgagcttggtcgccagccggccaacaccaagttgtcaagcaataagacagtgaggagggtccgtgttcgtggaggtaacgtgaagtggagggctcttcgccttgatactggtaactactcatggggaagtgaagctgttacccgcaagacccgtatcctcgacgtggtctacaatgcatcaaacaatgagcttgtgaggacacaaacccttgtgaagagtgccattgtgcaagttgatgctgccccattcaagcagtggtacctcactcactatgga

SEQ ID NO: 100263 - DNA, 418 bp, Zea mays
  unsure (1)..(418): unsure at all n locations
cccacgcgtccgtgacgccccagccgccgctgtccaaggagttcgccgacgagaacaagcccgccggactggtcaagctgaacccggcgagcgagtacccgcccggcctggaagacacgctcatcctcaccatgaagggcatcgccgccggcatgcagaacactggctaggcggcttctcttcactcacctgcagagtgcaccgcaataatcagcttccggatggtggcgttttgtcagttttggatggaaatgccgaactggcagcgtctgttttccctatgcatatgtaatttcctgcctctttatattcactcttgttgtcaagtccaagtggaaaatcttggcatattatacatattgtaataataagcatcgtacaatctgcatgctgntttgtaataattaattaatatccc

SEQ ID NO: 100264 - DNA, 341 bp, Zea mays
ccaagaacaggaaggaaacaccgccgtcgccgtgccttccattccagtactcgcggaggaaaggaacaccagccagcgccatggtcacgtcgacgaccgccgtcgccgtgctgtccccgccgtccgtggccgggcttcgcctggcgccgtctacccgggcgcgcgtggcgttccgcgcggcgcgggcgcggcggtacgttgcggcgcgcgcggagctgagcccgtcgctggtgatcagactgagcacgggcgtgtcgctcttactgggccgcttcgtcttcttcaacttccagcgggagaacgtggcgaagcacgtgcccgagcagaacggcaagacgcac

SEQ ID NO: 100265 - DNA, 416 bp, Zea mays
cccacgcgtccgggcttacttgggagactgcatatatgaactttatgctcggaggcacttcttctttccacctctgagcatcaatgagtacaacaaacgtgtgatggatgttgtgaagtgtgagtcacaggaccttttgttgaacaagcttcttggagaagattttctaactgaagaagaaagggacatacttcgttgggggcggaatattgttagcagcaaaactcgcaccaggaagcgtgcaggaattgctgtctacaaccgggcatcttcactcgaaacactaattggatatctttacctcacaaatttcaaacggttggaacaactgatgtttcaattgggcttcacaagtggtgcctcatcacagcatattgcagacgagctgcgctcaagtttccagaaaacaacccccg

SEQ ID NO: 100266 - DNA, 426 bp, Zea mays
cccacgcgtccgcccacgcgttcgcccacgcgtccgcccacgcgttcggtccagaagagcaagatcttctatatcctatggtccccatactccgccaaggtgaagagcaagatgctttatgcaagctcaaaccagaaattcaagagtggcctcaatggcattcaagttgaactccaagccacagatgcgagtgaaatcagcctcgatgagatcaaggatcgggcacgctaggcgcaccgacatcgcgagtttcatggtcacgcatcatggactcgcctactactgcggatttgtacgccattatagactaggtgctgctaaagactgctgtggtgatttgtgggacagatgctgcgtaaaaagatcctcatggctttcagatgaccatgaaaggttggatctatcatgtaatttcatgttatctgc

SEQ ID NO: 100267 - DNA, 446 bp, Zea mays
tgccgtaccggtccggaattcccgggcaaccccgtctgcctctgcgagctcctctccggcgccgccgactcctacggcatcgccgtcgactacggccgcgcgctcgcgctccccggggtctgccgcgtcgccacaccgtccgtctccacccggaccggctgatcgaggtgaaggtcacggcggacaacagcagctgcatccgctccatctccttcatctacatcggagccgatggcaaaccgtacgaggaggggccatggggtttcggccatgctggcacggagtacaagattgatctgtgcaggttcgacgagagcttgacggagatctccgggaccacgggcccagcctacaacattgacaatctggtcaagtctctcaaatttgtcagcaacaaacgtacttacggaccgtacggcagggacgagggcaccccgttccgtgtc

SEQ ID NO: 100268 - DNA, 403 bp, Zea mays
  unsure (1)..(403): unsure at all n locations
cggacgcgtgggcagtgacactggagttaggaggcaagtcccctttcatcataatggacgatgctgatgttgaccatgctgttgagcttgcgcactttgccctgttctttaaccagggacaatgctgctgtgctggatctcgcacgtttgtacatgagcgtgtttatgatgagtttgtggagaaggccaaggctcgtgcattgaagcgcgtcgttggtgatccgttcaggaaaggtgttgaacagggcccgcagattgacgacgagcaattcaaaaagatcttgcgctacattaggtatggtgttgacggtggagctacccttgtgacgggtggtgataggttgggtgacaagggtttctacatncagccaacgattttctcagatgtccaggacggcatgaa

SEQ ID NO: 100269 - DNA, 428 bp, Zea mays
ctggctccttatctgcttgatgaagatacagggtgggcacttgaggttgatgagctgaagaagcaacttgaggaggctcgatctaagggcatcagtgtcagggcgcttgttgtcatagatccaggaaatccaacaggacaggtccttaccgacgaaaaccagaagaaaattggtgaattctgcaagaatgaaaggctcgctcttctcgcggatgaggtttaccaagaaaacatatatgtcgaagacaagcaattccactcgttcaaaaaaatcgcacggacgctgggatacactgatgacgaccttgctttggtatcgttccagtcgatttctaaaggctactatggagaatgtggaaagcgacgtggttacatggagataactgggttcagtcctcaagtacgggaccaaatctacaagatggcatc

SEQ ID NO: 100270 - DNA, 433 bp, Zea mays
ggcagcctgcaggggtttgaggagctattggcctcagtacttggaaagaaggcaggcgagaagggtaccttcaagctactgaaggcacgggcctcggctcaaacctatgtcaagatggcattcacggtggagaagaagcttgctgaaggggatgtgaactggtcaaatattccagaatggaagacgaagcccaagaggatgagagcgcactatgaagtccttgctcgagtggaggagggtcaggcgatccctgagaggatagcgcaggtacagcctttccaggccaacgaggccatgtcggagagtgtgctcaccggcaacgtcacgaggtcgaagatggaaatcgtccatccaccgtcggtttacttcactctctgagtgagggaagaactggatgctgtttgatgttctcttcagagctactacacgttgg

SEQ ID NO: 100271 - DNA, 395 bp, Zea mays
cgcacaccagcacggcagcacctgccctcctcgccgtcgctgcctccctccgcgcgaccgatctaccctccgccgccaccatgtcgctgatcgccggggaggacttccagcatatcctgcgtttgctgaacaccaacgtggatgggaagcagaagatcatgttcgccatgacctcaatcaagggtgtcgggcgccgcttctccaacatcgtctgcaagaaggccgacatcgacatgaacaagagggccggcgagctgacgcctgatgagctggagcgcctgatgactgtcgtggccaaccctaggcaattcaaggtgccggactggttcctcaacaggaagaaggattacaaggacagcaggttctcgcaagtcgtctacaacgcccttgatatg

SEQ ID NO: 100272 - DNA, 433 bp, Zea mays
cgccgacaaaaccagaccatcaaacaagtgccagcgccctctcgcagtcgccgcaatggagagcaccttcatcatgatcaagcctgacggcgtccagaggggcctcattggtgagatcatcagccgttttgagaagaagggcttctacctcaaggccttgaagcttgtgaacgtggagaggtcgtttgctgagaagcactacgccgatctcgcctccaagcccttcttccagggcctcgtggactacatcatctctggccctgtggtggccatggtctgggagggcaagagcgtcgtcacaactggccgcaagatcattggcgccaccaaccccctggcttctgagcccggcaccatccgtggcgactttgctgtcgacattggcaggaatgtcattcatggaagtgacagcattgagagtgctaataaggag

SEQ ID NO: 100273 - DNA, 431 bp, Zea mays
gcaagacggcggcgaaggccaagccagcggcggcgtccgggagcccgtggtacggccccgaccgcgtgctgtacctgggcccactgtccggcgagccgccgagctacctgacgggcgagttcccgggcgactacggctgggacaccgcggggctgtcggcggacccggagacgttcgccaagaaccgggagctggaggtgatccactcccgctgggccatgctgggcgcgctcggctgcgtcttcccggagcttctcgcccgcaacggcgtcaagttcggcgaggccgtgtggttcaaggccggctcccagatcttcagcgagggcgggctggactacctcgggaacccgagcctcatccacgcgcagagcatccttgccatctgggcctgccaggtcgtgctcatgggcgccgtcgagggctaccgcatc

SEQ ID NO: 100274 - DNA, 350 bp, Zea mays
acccaaccttcccctacaccagaaaaatccccagttctttggtccgcgtcagagaggcggcggcgatgtctgggcgcggcaagggcggcaagggtctgggcaagggcggcgcgaagcgccaccggaaggtgctccgcgacaacatccagggcatcaccaagccggcgatccggaggctggctaggaggggtggcgtgaagcgcatctcggggctcatctacgaggagacccgcggctgtgctcaagatctttctcgagaacgtcatacgcgacgccgtcacctacaccgagcacgcgcgccgcaagaccgtgaccgtcatggacgtcgtctacacgctcaagcgccaggg

SEQ ID NO: 100275 - DNA, 400 bp, Zea mays
cccacgcgtccggtgagaagcagcgcaaatttgttgaaaccattgagctacaaattggactgaagaactatgaccctcaaaaggacaagcgcttcagcggttctgttaagctgcctcacatccctcgccctaagatgaaggtttgcatgcttggtgatgctcagcatgttgaggaggcagagagaatgggtatagacaatatggatgtggaagccctcaagaagatgaacaaaaacaagaagctagtgaagaagctggcaaagaagtaccatgctttccttgcatctgaggctatcattaagcaaattcctcgtcttcttggtcctggtcttaacaaggcaggaaaattccctaccttggtgacacaccaggaatcccttgagtccaaggttaacgagac

SEQ ID NO: 100276 - DNA, 392 bp, Zea mays
gccacgctgaggatgcatacaagaagatccgttccggagctacacttgttcaactttatactgctcttgcataccgtggtccagctcttatacccagaataaaggctgagctagcagaatgtttggaaagagacggattcaaatctgtgcaggaagcagtcggcgctgatttccgatgatccctggcggatcgctgacaaggtctgaataaccgttccggtaaagttcatgtgattttgatgagaagcaagcaactctttttttgtgtgtgtgggcacgatgcttgccaattccatttgaccggtacttgaaaagaaataccgggttgaaactttgctgggggtgagttgagtaatgagcggctgtatcacgcgcgcgtacatgagcttttg

SEQ ID NO: 100277 - DNA, 422 bp, Zea mays
gcagattgccgcttgagacattgtttgatgaatttgttgttgcccatatccttgggtgggggggcaaagctgtaatgatacgaaatcaacttctactttgggtcttgtcgattggctttgagctaatggagctaacgttcagacatatgctgccaaactttaatgagtgctggtgggatagcattatcttggacatattgatctgcaattggtttggtatttgggcaggaatgcacacagtccgtcactttgatggcaaaacttatgaatgggttggactgagccgccaacgaagtatcatgggtaaggtgaaaagatcgttgagccagttcactcctgctcaatgggacaaggatcagtggcatcctttcatggggccactgcggttcatccaagtgctgttcctctgcgttgtcttcatg

SEQ ID NO: 100278 - DNA, 287 bp, Zea mays
cccacgcgtccgcccacgcgtccgacccgatgtaccctggcggcagcttcgagcccctcggcctggccgacgaccccgaggccttcgccgagctcaaggtgaaggagctcaagaacggccgcctcgccatgttttgcatgttcggcttcttcgtccaggccatcgtcaccggcaagggcccgctcgagaacctcgctgaccacatcgctgacccaggcaacaacaacgcatgggcctacgccaccaacttcgtccccggcaactaagcttaacagctatgctatgca

SEQ ID NO: 100279 - DNA, 427 bp, Zea mays
cccacgcgtccgggctgacatgatgaagaagaagatctcaatgcctgcccacctgatgtttgacggtcaggacgacaagctgtttgagcacttctccatggtcgcgcagaggcttggcgtttacactgccagggactacgccgacattcttgagttccttgttgacaggtggaaggtggcggacctgactggtctgtcgggtgaggggaacaaggcgcaggactacctctgcacccttgcttcaaggatccggaggctagacgagagggcccagagcagagccaagaaagcaggcacgctgcctttcagctgggtatatggtagggaagtccaactgtgaaatcggaaacccattgcgactgcttgagttggagcatagtctatcatgcaccctaagacgcatcgcgacgacaagacctggtgtgtc

SEQ ID NO: 100280 - DNA, 423 bp, Zea mays
cccacgcgtccgcccacgcgtccgacccgctgtaccctggcggcagcttcgaccccctcggcctggccgacgaccccgaggccttcgccgagctcaaggtgaaggagctcaagaacggccgcctcgccatgttttccatgttcggcttcttcgtccaggccatcgtcaccggcaagggcccgctcgagaacctcgctgaccacatcgctgacccagtcaacaacaacgcatgggcctacgccaccaacttcgtccccggcaactaagctcaacggctatgctatgcaacttcattgtctttcggatcggagagggtgtacgtacgtggattgattgatgctgcgagatgcatgtgtgtcttttgtttcacgttgcattgcataggcaagtcgagatgatgagttggcgttgtacactaagatg

SEQ ID NO: 100281 - DNA, 417 bp, Zea mays
ggagatcgggcgcgtggccctggtgaactacggcaaagactatggccgcctggtcgtcatggtcgatgtggtcgaccagaacagggcacttgtggacgcccctgatatggtcaggtgccagattaacttcaaacggctctcacttactgacatcaagattgacatcaaacgcgttcccaagaagtcaaccctgatcaaggctatggaggaagctgatgtgaagacgaagtgggaaaacagctcatggggcaagaagctgattgtccagaagaggagggctgcgctcagtgactttgacaggttcaaggtcatgctggcaaggatcaagaggggtggtgctatcaggcaagagctcgccaagctgaagaaggcgtccacggcttaagtcccttttggtggatggcatgttagtttttg

SEQ ID NO: 100282 - DNA, 409 bp, Zea mays
ctccagcgcctccaccttcctcgccgcctcactccctctgaggtcgcagatccgtccgggtagacgaagccgcccgcacccatggcctccggtgagctcgcctgcacctacgccgccctcatcctcagcgacgacggcatcgccatcaccgccgagaagatcgccaccatcgtgaaggcggccaacatcaaggtcgagtcctactggccggcgctcttcgctaagctcctggagaagcgcagcgttgaggatctaatcctctccgtgggatctggtggtggcgctgctccagttgctgcttccgccccagctgggggtgctgcagctgctgctgcccctgctgcagaggagaagaaggaagagcccaaggaggagtctgatgacgacatgggctttagcctgttcgact

SEQ ID NO: 100283 - DNA, 410 bp, Zea mays
gtgaagagtgccattgtgcaagttgatgctgccccattcaagcagtggtacctcactcactatggagttgacattggtaggaagaagaaaacccctgctgcaaagaaggataatgctgagggacaagaggttgaggcagcagctgaggaaacgaaaaagagcaaccatgtcacgaggaagcttgagaagcgcaaggagggacgtacccttgacccacacattgaggagcaatttggcagtggacggttgctggcatgcatttcttcccgccctggacagtgtggccgtgctgatgggtacatccttgagggtaaagagcttgagttctacatgaagaagctacagaggaagaagggcaagagcgctgtagcttagagcattctcatggattgtcttgcaccgaaatgtgt

SEQ ID NO: 100284 - DNA, 406 bp, Zea mays
cttggcacaactgatgagaatgagccgttacaggcaatgatgaaagaccagttcgcaaactatgtggtgcagaaggttctggagatatgtgatgaccagaaccgtgaattgattctttcccgtatcaaggtccacttgaatgcactgaaaagatacacctatgggaagcatatcgtggcacgtgttgagaagcttattgctgcaggagaacggcgcattggtgccccatcctcttgctgagatggcaataaagctatatacaggtcgcagaataacacctgtacagacagacagggatagcgaggcctagctttttaccattaccagtagtcggtaatattgagcgacggagaggttaaaaaaggctcccaaatcctttgatgtaaataaaggatagccgctggaa

SEQ ID NO: 100285 - DNA, 428 bp, Zea mays
cccacgcgtccgcggacgcgtgggcggactcgtgggtgctggcaagcccaagccagcgggggccggcggcccctggtacggggccgaccgcgttctgtacctgggcccgctgtccggccagcccccaagctacctgaccggcgagttccccggcgactacggctgggacaccgcggggctgtccgccgacccggagactttcgccaagaaccgcgagctggaggtgatccactgccgctgggccatgctgggcgcgctcgggtgcgtgttcccggagctgctcgcccgcaacggcgtcaagttcggcgaggccgtgtggatcaaggccgggtcccagatcttcagcgagggcgggcttgactacctcggcaacccgagcctgatccacgcgcatagcatcctggccatctgggcgtgccaggtggtgc

SEQ ID NO: 100286 - DNA, 430 bp, Zea mays
cccacgcgtccgcccacgcgtccgcccacgcgtccgggcgagttcgtcaccccgggcctgctcttccgctacatcgccgggtggatcgggtgggtcggcaggagctacctcatcgccatcagcggcgagaagaagcccgccatgagggagatcatcatcgacgtcgagctcgccacccgcctcctccccagggggttcatctggcccgtcgcggcctaccgcgagctcatcaacggagacctcgtcgtcgacgacaaggacatcggctactactagctgctgcacctgtgcttgcacatcgctgctggcgagttgggcagtcgtcgtacgtgggaaacatggcttttggtgtaggaggaaggaatggaagtggtctgttgtacttaaagaaactagatgaagaagtcttgtataactgaaacttcacccc

SEQ ID NO: 100287 - DNA, 421 bp, Zea mays
ggcgggtggcattgcctcgcagttgacgacaaggggcgcgcctacgcctggggtggaaaggagtacgggcagtgtggtgaggagcctgagaggaaggaggacgggacgagggcgctcaggagggacatcccgatcccgcagcggtgcgcgctcaagctcaaagtccggcaagtagccgctggagggacacattcagtagttttgactcaagaaggtcacgtctggacatggggacagccatggcctccgggtgatatcaagcaaatatctacacctgtacgtgtgcaaggccttgagaaagtgagggtcattgctgtaggtgcattccataatttggcactaacggaggatgtaattttgtgggcatggggtaataatgagtatggtcagctggggactggagatacccaaccaagatcac

SEQ ID NO: 100288 - DNA, 329 bp, Zea mays
ggcgactagggcggcaagcaccagctcatcaccgccaccgtctccgacggggggctctgcgatctgcaaggcgcaggccggcgacaagcggaggttcaagggcgccaggaagggcgtcgagaaggccgacgccttcttcatcgtcgcgtgaccgacgtatactattgtttctttgatgcttttcatcagggatgcacatgcacgcaccgagtgtacgtagagagctaggcatggcctggctcgccatgcttgttgtgtgattctttgattgtacatgagaggacccgtttctgctgacatccaagttgtttgagaaaaacttacataca

SEQ ID NO: 100289 - DNA, 413 bp, Zea mays
cccacgcgtccgcccacgcgtccggcggcgccggcgtgcttgtgatctgaacccaagtggggcctccgctccggtcacccgtcgctccacgcaaccatgtcgaggaggaagaccagggagcccaaggaggagaacgtcacccttggacccactgtccgtgaaggagagtatgtctttggtgttgctcacatctttgcatccttcaatgacaccttcattcatatcactgatttgtctgggagggaaactctggttcggatcaccggtggcatgaaggtgaaggctgaccgtgacgagtcgtcaccttacgctgctatgcttgctgctcaagatgtcgcacagcgcttcaaggagcttggcattactgcactgcacattaagcttcgtgccaccggaagcaacaagaccaagac

SEQ ID NO: 100290 - DNA, 413 bp, Zea mays
  unsure (1)..(413): unsure at all n locations
gcaaaggcagcacactcagctatccagcaaaagagatcgagacgcaggagtcatggccggcgtcagcgccgccgtggtgaccaccatcgttgcccgcgccgcgatcgccaggcccaatgctctagggctgcctgcgttgagggcgaggagcgagagggtgcggtgcagctacgccaaggatgccaagaacgcggccccagtcagcaccaagggcgcaggcgcgtcgctgctcgccgcagcgggcgcggtgaccgcgtcggcggggcccgcgctggcgctcgtggacgagcgcatgtccacggagggcaccgggctgagcctcgggctcagcaacaacctgctggggtggatcctcctgggggtcttcggcctcatctggtccctctacaccatctacacctntgacctcgacg

SEQ ID NO: 100291 - DNA, 426 bp, Zea mays
acgggaggatgaacatcggcagccggccagccaagaggaggcccggcggcggcatcacggccctgcgcgccatcccctggatcttctcgtggacccagaccaggttccacctccccgtgtggctgggagtcggcgccgcattcaagttcgccatcgacaaggacgtcaggaacttccaggtcctcaaagagatgtacaacgagtggccattcttcagggtcaccctggacctgctggagatggttttcgccaagggagaccccggcattgccggcttgtatgacgagctgcttgtggcggaagaactcaagccctttgggaagcagctcagggacaaatacgtggagacacagcagcttctccttcagatcgctgggcacaaggatattcttgaaggccgaccatttctgaagcaggggctggtgc

SEQ ID NO: 100292 - DNA, 430 bp, Zea mays
gagattgtgaaggaagtctcttcctacctgaagaaggttggatacaaccctgataagatgcacttcgttccaatctctggttttgaaggtgacaacatgattgagaggtccaccaaccttgactggtacaagggcccaaccctacttgaggctctggacttgatcaatgagccaaagaggccttcagacaagcccctgcgtctcccccttcaggatgtgtacaagattggtggtattggaactgtccctgttggacgtgttgagactggtgtcattaagcctggtatggttgttacttttgggcctactggtcttactactgaggttaagtccgttgagatgcaccatgaggctctccaggaggcccttcccggtgacaatgttggcttcaacgtgaagaatgttgctgtgaaggatctgaagcgtgggt

SEQ ID NO: 100293 - DNA, 400 bp, Zea mays
agcctcttcaacgagctgctgtccgagtacgcgctctccggcggcaagcggggcgaccggaactctgaagacttcgtgcacctcttgctgtcgctgcagaaagactacggtctcaccacggataacatcaagggcatacttgtgaacatgttcgaagcagccatcgagacatcattcctggtgctggagtactccatgagcgagctgatgaacaaccggcacgtcctggccaagctccagaaggaggtgaggacggcgacgcccgacagccgcatggtgatggaggaggacctgagccggatgccatacctgaaggccaccatcaaggagtccatgcgcattcacccgccggcgccgttcctactgccggacttctccacccacgactgcgagatcaacg

SEQ ID NO: 100294 - DNA, 413 bp, Zea mays
ctccctcctcagctacgacgacctccgcgcctacctcgagtcgcaggagacggcggccggggcagacggtcagcgcggcgtggcgctcctgagcgagaccatgtccacacccgtgctggtggccacagcagaccagaccctggaggacgtcgagtgccacttcgaggccgtgtcggggcttccggtcgtcgacagcggcctcagatgcgtcggggtgatcgtcaagaacgaccgggcaagagcctctcatgggtccaagacgaagatatcggaagtgatgacatcttcagctatcacactatcgtctgacaaaaccgtgatggatgctgctgttctcatgctcaagaagaagatccacagattaccagttgtaaaccaggacgaaaaagtaataggtatagttacccgcgctg

SEQ ID NO: 100295 - DNA, 403 bp, Zea mays
gaattttaccactgataaattgaggtccctagtgaagaagtggcagacattaatcgaaggccatgttgatgtcaagacaaccgacaactacatgttgcgtttgttctgcatcggcttcaccaagaggcgcccaaaccaggtcaagagaacctgctatgctcaggcatcccagatccgtcagatccgccgtaagatggttgagattatgatcaaccaggcttctacatgtgacctgaaagaacttgtttcgaaggtcattccagaagttattggtaaggagattgagaagtctacctccagcatcttcccacttcaaaacgtcttcattcgcaaggtgaagatactcaaggcccccaagttcgatcttgggaagctcatggaggttcacggcgactacaaagag

SEQ ID NO: 100296 - DNA, 375 bp, Zea mays
cggacgcgtgggcggacgcgtgggcgacgccgtcgtggcccgcctcgacacgcaggccaagatgcaggtcatcggcaagtccatgcagtccatcgtcaagtcgctcgactccgcgctcgccaccgggaacctccagaagatgtccgagaccatggacaatttcgagcgccagttcgtcaacatggaggtccaggccgagttcatggagggcgccatggccggctccacctccctctccacgcccgagaccgaggtcaacagcctcatgcagcaggtcgcggacgactacgggctcgaggtctccgtcggtctgccgcaggcagccgcgcacgccatccctgccgccaaggataaggagaaagtcgacgaggatga

SEQ ID NO: 100297 - DNA, 417 bp, Zea mays
gcagaggccgggcaccccgctctacaacatcaaggcttacctccctgtcatcgagtcctgtgggttctccagccagctgagggctgcaacctctggtcaggcgttcccccaggctgtctttgaccattgggacatgatgggctctgatcctttggaggctggctcccaggctgctcagctggtgctggatatccgcaagaggaagggtctcaaggaacagatgatcccactttctgagtttgaggacaagctctaaatttgtggttgttggtgacactgttacagctgccggttcaatcgtcaattggttttactgtaaatgcagtgtgtgctgctgtgctgacagtctgatgctctattttaatactccctccgtttcgttttagatgtcgctggatagtgcaaaattgaaccatc

SEQ ID NO: 100298 - DNA, 410 bp, Zea mays
cccacgcgtccgcggacgcgtgggttcaccaagacgtatatcgatataccaatttgatggtgagcgcagtttggaagacagacagaatttgatatttcgagttacttgctcaaaaggaacatacattcggtccctatgtgcggacttgggtaaagcacttggaagctgtgctcatttaactgccttgcggagagactcgataggtgaatactcggtcaatgatgcttggaacttcgatgagcttgaagaacaaatcaccaaggggtatttatgagcatgccagtgagccgagctaggttatatgcggcttgcaaccagtggcatccatgctgccatgtcagtcccaaagctgtcaacgtgggcttcagcgaagagttgcaaatccagttcagttcatactcaaccttttg

SEQ ID NO: 100299 - DNA, 403 bp, Zea mays
tcgtctccgtctcccggctcttcggcgtctagctcgtcaacgcgcgcgtccgccgtcgggtcctccgacgggcgtcccaccgcaggggaatacagatcgtcgatccgctgggcttgcaaacatgtatatccgagtgaagcgcaacaagagtacctacttcattcaatgtgaaccaacagagacagctttgagcatcaaacagaagttgcactcgctgatagatcaacctcctagtagtcagcagttggtcttgtggcctagcagtgatgtgcttgaagactcaaagactttggcagatcaaaaggtggataacgattccattgttgcattggcactaagaaaagatgacggtgagtttgaggaagttttcatcgctaggccggaggatttcatgtcatcatca

SEQ ID NO: 100300 - DNA, 405 bp, Zea mays
gccacccattggcgtacgcgaggcgatcggagcatcccgtcccaagaggagaaactccggccggcgacgcgggggaaaatggggaagacgccggtgcggatgaaggcggtggtgtacgcgctgtcgcccttccagcagaaggtgatgccggggctgtggaaggacatcaccaccaagatccaccacaaggtcaccgagaactggatctccgccacgctcctactcacccccgtcgtcggcacctaccaatacgccatgtggtacaaagagcacgagaagctttcccacagatactaaatgggatgtcctccaagttgctgcggcttgtcgcagttgaattttccatgatgggttgtataatctgtcaatgtcatttctttgctcagtttaagttcaacccatttt

SEQ ID NO: 100301 - DNA, 430 bp, Zea mays
cggacgcgtgggttcggcgaggccgtctggttcaaggccggctcccagatcttcagcgagggcgggctggactacctcggcaaccccagcctgatccacgcgcagagcatcctcgccatctgggcctgccaggtcgtgctcatgggtgccgtcgagggctaccgcattgccggcgggccgctcggcgaggtcgtcgacccgctgtaccctggcggcagcttcgaccccctcggcctggccgacgaccccgaggccttcgccgagctcaaggtgaaggagctcaagaacggccgcctcgccatgttttccatgttcggcttctttcgtccaggccatcgtcaccggcaagggcccgctcgagaacctcgctgaccacatcgctgacccagtcaacaacaacgcatgggcctacgccaccaacttcgtcccc

SEQ ID NO: 100302 - DNA, 426 bp, Zea mays
cccacgcgtccgtcttcttggtccgccgtctccactccgcgttccctggctccctgcgtggcgtcttgggggagagagagaagtgggagacccgcgagaggctgccgtgtagggactagggaccgtagagtaagcgacagcgaaggagggagagggggatggccgggatcgggccgatcaggcaggactgggagccggtggttgtgcggaagaaggcacccaccgccgctgccaagaaggatgagaaggccgtcaacgccgcgcgccgctccggcgcggagatcgagaccatgaagaagttcaacgctggtatgaacaaggcggcgtccagcggcacatccctcaacaccaagcgcctcgacgacgacacagagaacctcgcccatgagcgagttccaagtgacctgaagaaaaatctcatgcaag

SEQ ID NO: 100303 - DNA, 426 bp, Zea mays
cccacgcgtccgcatggatgttgataagatcgcatttactggatctaccgatactggaagagattattctcgagttggctgcaaagagcaaccttaagacagtgacactggagttaggaggcaagtcccctttcatcataatggacgatgctgatgttgaccatgctgttgagcttgcgcactttgccctgttctttaaccagggacaatgctgctgcgctggatctcgcacgtttgtacatgagcgtgtttatgatgagtttgtggagaaggccaaggctcgtgcattgaagcgcgtcgttggtgatccgttcaggaaaggtgttgaacagggcccgcagattgacgacgagcaattcaacaagatcttgcgctacattaggtatggtgttgacggtggagctacccttgtgacgggtggtgata

SEQ ID NO: 100304 - DNA, 422 bp, Zea mays
cccacgcgtccgcccacgcgtccgcccacgcgtgcggtcttgccaatgcagggggtggggaggccctgagattagaagacctggaaactttcagacctgaagaagggatgatccttgctaatgcaacatcattggggatgtacccaaatgttgatggtactcctattccaaagaaagccttgggtttctatgatgtggtatttgatgccgtatatgccccaaaagttactcggcttcttcgagaagcagaagaatgtggagttaaagttgttagtggtgtggaaatgtttattagacaagccatgggtcaatttgagcatttcaccggtggtatagaagctcctgaaagcctgatgcgtgagatagcagcaaaatacacctagcaggctaatggcgaaaacctatctttgatgaatatttgc

SEQ ID NO: 100305 - DNA, 423 bp, Zea mays
cggacgcgtgggattttctctcctctctccgtcgccgcctcgggccaaaccgtacgcagggagttgattgatcgattgcagccatgagtaagttgcattccgagcttctcaaggattgcatctcccagatagttcaggatgccaagaagaataggaagttcactgagactgttgagcttcagattagtctgaagaattatgatccacaaaaggacaagcgtttcagtggctctgttaagttgcctcacatccctcgtccaaagatgaaggtgtgcatgcttggtgatgcccagcacgttgaggaggctgagaagatgggacttgactacatggatgttgaggccctcaagaaaatgaacaagaacaagaagcttgttaagaagcttgccaagaagtaccatgcttttttggcatcagagacca

SEQ ID NO: 100306 - DNA, 393 bp, Zea mays
cccacgcgtccgcccacgcgtccgcccacgcgtccgagcaccaacgtgtatgcttacaggtcaataatcgctctaattgtttgcattccacctgcattgatctttgaagggcccaagctaatgcagcatggatttagtgatgccattgcaaaagtaggtttgacaaagtttgtcagtgacctattcttggttggactgttctaccatctgtataaccagattgctacaaacaccttggagcgagtggctcctctgacacatgctgtcggcaatgtgttgaaacgtgtttttgtcatcggtttctcaatcattgtttttggcaacaaaattagcacacaaactggaattggcacgtgcattgccatagctggtgttgctatgtactcttacatt

SEQ ID NO: 100307 - DNA, 355 bp, Zea mays
ttgtggagtcatgggccaatttcttcaaaattatcattaatttatgatgttcatgtaactatagtcgtaggataaggcagggccggtttggtttcatcacgcggatgggagcaccttcttgacgatctcatcactgagcgaggcgatctgggcgtcgagcgccttaacagcctcctccttctgcgcctcgaggttggcgagcgcctttacgagctcggccttcacacggctgcgcccctcgttcagcttggcctccagcttcgcggtggtctccttcttcatcttgttaagcgccgcctcgatctcggcgcgcgccatcttcatgatggccgccgcctggtccttcagctgcttc

SEQ ID NO: 100308 - DNA, 418 bp, Zea mays
cagctatgcgcctctgcctttgttgcatgtggtagtcgcaactcgccagtgctctctgctgtacaacgtacaagtcaggttgaggagttggagcaggaaaagcaggagctggagtttattgcagatatgtacgtgaaagaaagttctgagtctaggacaattgctgatattgaagaatcagaaacccgagctcgcaatcaggctgaatatttgaggagcaatctagaggagcatagtcttgagcttcgggttaaagcagcaaatgaagctgaagctgcatgccagcaaaggctttcctttgctgaagtggaactagaggagttaaggaccaaagtagatgcatctgaaagagatgttgtggaacttaaggaggcattaagaattaaagaggctgaaggagacgcctatatttctgata

SEQ ID NO: 100309 - DNA, 407 bp, Zea mays
cggacgcgtgggttctacctcaaggccttgaagcttgtgaacgtggagagggcgtttgcggagaagcactacgccgatctcgcctccaagcccttcttccagggcctcgtggactacatcatctctggccctgtggtggccatggtctgggagggcaagagcgtcgtcacaactggccgcaagatcattggcgccaccaaccccctggcttctgagcccggcaccatccgtggcgactttgctgtcgacattggcaggaatgtcattcatggaagtgacagcattgagagtgctaataaggagattgccctgtggttccccgagggccctgctgattggcagagcagccagcacccctggatctacgagaagtaaacatggaaagtttcacatcaaaccttgagagc

SEQ ID NO: 100310 - DNA, 420 bp, Zea mays
cggacgcgtggctcgtctagatccgttcatcctggtggttttgtgaggtcgaaagcggggagcgaattagaagatgctggacaagctgtgggacgacgtggtggccgggcctcgcccggagacgggcctcgagaagctccgcaaggccaccaccgcccgcccgctcgtcatcaacaaagacgcggacggcggcagctacaagcgggcgcagtcgatgccgtcgaccccgacgacgccggtgacgccgtcgtcgtcgtcgtcgtcgacgacgccgcgcggcgccggcaacgtgtggcgcagcgtcttccacccggggagcaacctggccaccaagggcatgggcgccaacctcttcgaccggacgcagcccaacttccccaccgtctacgactggctctacagcgacgagaccaggagcaa

SEQ ID NO: 100311 - DNA, 421 bp, Zea mays
gctgaagcttctagtcagggtagtcccaataagaaaaggcataagtttgatagtggtgatggcacttcatgcaagcgttgtagttgtaagaagtccaaatgcctgaaactttactgtgagtgttttgctgctggagtctattgttctgagccttgttcgtgtatcggctgtatgaacaaccagagtcatacggaaactgttctatctacgcggcatcagattgaatctcgcaatccattagcatttgctcctaaagtaattcatacatctgagcctggtctggaactaagggacttctccaataaaactcctgcttcagctcgtcacaaaaggggatgcaattgcaagaagtcgtcatgtctaaaaaaatactgtgaatgttttcagggtggtgtgggatgctccataagttgcagatgcg

SEQ ID NO: 100312 - DNA, 406 bp, Zea mays
cccacgcgtccggatattgttccttcatcacacaactgtgacattccgcatgtgaaccgggctgagtatcagctgattgatatttctgaggatggatttgtgagccttcttacttcagatggcaacactaatgatgatcttagactcccaactgatgagactcttgtggcccagattaaggaagggttcgaaagcgggaaggatcttgttgtgactgtccagtctgcgatgggggaggagcagatctgcgcgttgaaggatgttggccccaagtaacttccttggctttggagactgaaccctactgtatctcaacttaaatcggaaaagaagtgtatcaccaaaggattgctaccgagacattcacctggcttgagctggcttttgctatagcgtgcaaggggtt

SEQ ID NO: 100313 - DNA, 403 bp, Zea mays
atggcgtctaagaggatcctgaaggagttgaaggacctgcagaaggacgcgcccacctggtgcagcgcaggtcctgttggtgaggacatgttccattggcaagcgaccatcatggggccttcggacagcccatttgcaggtggggtattcttggtgaacattcacttcccaccggattaccctttcaagccaccaaaggtgtctttccgcaccaaggttttccacccgaacatcaacagcaacggcagcatttgccttgacattcttaaggaacagtggagtcctgctttaactatctcaaaggttctcctgtcaatctgctcactgctcacggacccaaaccctgatgatcctcttgtccctgagattgctcacatgtacaagaccgacagggccaagtatg

SEQ ID NO: 100314 - DNA, 432 bp, Zea mays
accacgcgtgcggatgctgatctggttgctggactgatggctctaatggagagtgatcgtgttgctggtttcaacttggggaacccaggagagtttaccatgttggagctagcacaggttgtgaaggaaacaattgacccaatggcaaccattgaattcaaacccaacacagctgatgatccccatatgagaaagccagatatcaccaaggctaagcaactgctacattgggagccaaaggtctctctcaaagaaggccttccgctaatggttcaagatttccgtcaaaggatctcggatgagtaatcaaagcaattcttttttccccgaatgtgccatgcacgtgtttgtaatcagagcaatcgtatgatactggtgaccggtttgattctgaacgatgctgcaactacagtcaggagctcttcaccaact

SEQ ID NO: 100315 - DNA, 434 bp, Zea mays
  unsure (1)..(434): unsure at all n locations
cccacgcgtccgagaagatcgccgtcctcggcttcgccttcaagaaggacaccggcgacgccagggagaccccggccatcgatgtctgcaagggcctgctgggtgacaaggcccagatcagcatctacgacccccaggtgacggaggaccagatccagcgggacctagccatgaacaagttcgactgggaccacccgatgcacctgcagccgacgagcccgacggccgtgaagcaggtgagctgcgtgtgggacgcgtacgaggccaccaagggcgcccacgggctgtgcatcctgaccgagtgggacgagttcaagaccctggactaccagaagatcttcgacaacatgcagaagcccgccttcgtcttcgacggccgcaacatcgtcgactccgagaagctganggagatcggcttcatcgtctactccatc

SEQ ID NO: 100316 - DNA, 426 bp, Zea mays
gtgaagactcctcgtggcctccgcacactcaactctgtttgggcccaacatggtagcggggaagtgaggagaaggttctacaagaactggtgcaagagcaagaagaaggctttcacaaagtatgctctcaaatatgaaaatgatgctggcaagaaggaaattcagctgcagcttgagaagatgaagaaatatgcttctgttatccgtgtcattgctcatacccagattaggaagatgaagggtttgaagcagaagaaggctcacctgatggagattcaggtcaatggtggtaccattgctgacaaggtggactatggctacaaattctttgagaaagaggtccctgttgatgctgtcttccagaaggatgagatgattgacatcattggtgtgaccaaggggaaaggttatgagggtgtggtcact

SEQ ID NO: 100317 - DNA, 425 bp, Zea mays
cccacgcgtccgcaacccggccgtgaccttcggcctgttcctggccaggaaggtgtccggggtccgcgcgctgctctacatcgtggcgcagtgcctgggcgccatctgcggcgtgggcctcgtcaagggcttccagagcgcctactacgtgcgctacggcggcggcgccaacgagctcagcgacggctactccaagggcaccggcctcgccgccgagatcatcggcacgttcgtgctcgtctacaccgtcttctccgccaccgaccccaagcgcagtgcccgtgactcccacgttccggtgctagctcctctcccaattgggttcgccgtgttcatggtgcacctggccaccatccccatcaccggcaccggcatcaacccggcgaggagcctgggagccgcggtcatctacaacaaggacaagg

SEQ ID NO: 100318 - DNA, 405 bp, Zea mays
ggccgccgcgcctcctccttcgccgtcgtctgctccaagaagaagatcaagaccgacaggccctacgggattgggggtggcctgaccgtcgacgtcgacgccaacgggagaaagggcaagggcaagggcgtgtaccagttcgtcgacaagtacggcgcgaacgtcgacggatacagcccaatctacaacgaggatgactggtctcccaccggcgacgtctacgtcggtggaaccactgggcttctgatctgggccgtcaccctcgctgggatcctcggcggcggcgccctcctcgtctacaacaccagcgccctctccggctaaggatatccaatgcatgcgcttcttgcgattcgtcgtgtaaaatcagggtgtctgtctataatctagcctccatggatgctc

SEQ ID NO: 100319 - DNA, 286 bp, Zea mays
ccggctcgacccactcgtgcgacgcaaccttcacctacaccagaaaaatcttcagttcttttgtccgcgtcagagaagccgggccgatgggggggctccgcaaaggccgcaagggtctgggcaacggcggcactaaacatcacccgaaggggcttcttgacaacatccagggcatcaccaagcctgcgattcggaagctgtcttagatgggtggcctgaatcgcatctcggggctcatctacgaggagacccccggcgttctctaaatctttctcgataacctcat

SEQ ID NO: 100320 - DNA, 389 bp, Zea mays
cccacgcgtccgcccacgcgtccgcccacgcgtccgcccacgcgtccgggttgctctagagccgttcatcctggtggttttgtgaggtcgaaagcggcgagcgaattacaagatgctggacaagctgtgggacgacgtggtggccgggcctcgcccggagacgggcctcgagaagctccgcaaggtcaccaccgcccgcccgctcgtcatcaacaaagacgcggacggcggcagctacgagcgggctcagtcgatgccgtcgacccctactacgccggtgacgccgtcgtcgtcgtcgtcgtcgacgacgccgcgcggcgccagcaacgtgtggcgcagcgtcttccacccggggagcaacctggccaccaacggcatgggcgccaacc

SEQ ID NO: 100321 - DNA, 405 bp, Zea mays
ccacgcgttcgatcgaacctcacccccgatctgatcgaatcgaaggctgcggcggcgatgggcggtgaccatggcggtgggcacgccggcggcgacttccgccagaaggtatggagcatgacgggcggcccgtactgccgccccgtccactggcgccgtaacaccgccatcgccatgttcggcgtcttcctcatctgcatccccatcgctatgaagtccgcagagctcgagcaacgcccgcatcacccagtccggccaatcccatctcaactgcggtgcaaaaactttggtaagaaggaatactgaaggaccctccaactagcatgaagtgcgggcaccttgcttttgccttcattttgtggaaacctgtgcctagccataatgctgggttaagtgttaggagca

SEQ ID NO: 100322 - DNA, 430 bp, Zea mays
cccacgcgtccgctgggctagccgccggtctcttgctctgatagcttgctccaggacgtacgtacgtacgtagatcgatccatcgatcgctagctagctgacgaccatggcgtccctctcctctgccgccatcaccgccccttccttcacggccgcgcccgctcgcgcagtggtcagcaggaggtccttcaccgtgcgtgcctctctccgcaaggccactgccaccgccgccgtggccgttgccgccagcgtcctgcttgccggcggcggcgccatggcccaggaggtgctgctgggcgcaggcgacggcgggctcgtcttcgagcccagccagttcaccgtcaaggccggcgacaccatcaccttcaagaacaacgccggcttcccgcacaacgtcgtgttcgacgaagacgaggtgccgagcggcgtc

SEQ ID NO: 100323 - DNA, 447 bp, Zea mays
tgcggtaccggtccggcattacatggtcgacgagtccgccgtgcgcatcccggccatcgccggaggagacgggccgccccgtggcatcatctctttctacggcggccactgctgcagcgatttcatttacagctggaactcactggaagaggaagaagacacctcgaagcaaacctgcgacagccagggtaacctcgtgctaactgggccatcaatggccacctcggcagaaagtccaattgccttcaccttctacctccatgatggcagcccgcaagccggagaagccgctgaggacgacgaggacatcgggaggataatctgcgactgcatcggcgacgacttctccaactacaacagggccatagtcgagactgtccaaatgggctatggcctcgctgaagtgatctatgccgtgctgaacaacggcgtccaaggccgggtcgc

SEQ ID NO: 100324 - DNA, 392 bp, Zea mays
cccacgcgtccggtccgtaagcacagctggaactgcagctgagaacattcagcaagtccagcaaagttcgaaagatattcaaagcaagtcccagggcgcttcaacaaggagctgtacaaaggttcataagcaaggagttgcgcttggccggtccgtggacctctctaaattcaccgactacggtgagctcaaagcggaactagacaagatgtttgagttcgagggcgaattggtatctgctaaccggaactggcagatcgtttataccgacaacgagggtgatatgatgcttgtcggagatgacccgtgggaggagttctgcaacatagtgcgcaagatctacatctacacgaaggaagaggtccagaagatgaactcgaaatcatccgtgc

SEQ ID NO: 100325 - DNA, 393 bp, Zea mays
gacagacttcatcgagagtgagttcctcgaggagcaggtggaagccataaacaagatcggcaagtatgtcgcccagctgaggagagtgggcaaggggcacggggtgtggcacttcgatcagatgctgcttgaggaagaggcctaaaaagaagaacggacagatgaatgaaggaaacaagtgtgtaatgtgttgatcaggcggaggaataataatgggtcaactgacaactctgggtcggtggatttgtagttggtttgggttttttagttgtagaacggtgttgccctcctagagagggatgaacacattatgcatgcgatgtgtcagttcggtcggtgctatgcttcgttgggatttgattggcggaaataaaactcctaatctatggcttg

SEQ ID NO: 100326 - DNA, 396 bp, Zea mays
  unsure (1)..(396): unsure at all n locations
ccgggtcgacccacgcgttcgctcagattgcagtagtcttgggttcttgcactgctggtggggcatatattcctgcaatggcggatgagagtgtaatagttaagggaaatgggactatatttctagcgggtccaccacttgtaaaggctgctacaggagaggagatatctgctgaggaccttggtggagcatcagtacattgcaaggtatcaagagtctcagatcattttgcacaagatgaaattcatggacttgagttggggcgaaacattgtgaagaacctgcacttagctgctaaaggaacaaatattcagagttctgcttgtggttaccaagagccattgtacgatgtanaggaacttcgctccattgcaccagctgatgtgaaacagtcct

SEQ ID NO: 100327 - DNA, 348 bp, Zea mays
tttttcatcccatgactctatctcagcttgtatatacgattgagaggagaggtgcacactcagctatatagatgagtgttttaaaacatattacagtgtctgtctgtgtctgtcaaccacaggaaaaaaaaggagaaagaactacagaggttcccgccaaccgaaacgcacaaaaatagggtccgttcatatatgtatcggagatttggagccaccaccgttgatccgcaggtctgagtgactgaaggggacagggccaacattcccgcttggttccttgagacagtagcagctatagcttcgagggcgaggatggacgcctcaagccggcctcagacttcgagcggg

SEQ ID NO: 100328 - DNA, 452 bp, Zea mays
acgcgtccgcggacgcgtgggggggaacggagggtttgcaaggaaccttcaaccacatgagattgtggaacaggtgttgggcatcgaggggacgttcaaacacagggtgacaaatgttgtgttcatggggatgggtgagcccatgatgaacctcaagtcagttctagaagcacaccaatgcttcaataaggaactaaaaattgggcaaaggatgatgacaatatctacagttggtgttccaaatacaataaaaatgctagcatctcacaagcttcagtcaacgctggcagtcagtctgcatgccccaaatcagaagctgcgggagacgattgttcctagcgccaagtcttaccccttgggagcactaatggatgactgcaagagttacttccttgaaactgggcgcagggtatccttcgagtacactctgctagctgggattaacgatgaaa

SEQ ID NO: 100329 - DNA, 435 bp, Zea mays
  unsure (1)..(435): unsure at all n locations
gaaaaatatccccaaaccctagctcccgatctcgatggcgaaccctcgcgtcttctgggacatgaccgtcggcggcgccccggcgggccggatcgtgatggagctgtacgccaacgaggtgcccaagaccgcggagaacttccgcgcgctgtgcacgggcgagaagggcgtgggcaagtccgggaagccgctccactacaagggctccaccttccaccgcgtcatccccgagttcatgtgccagggcggcgacttcacccgcggcaacggcaccggcggcgagtccatctacggcgagaagttccccgacgagaagttcgtgcgcaagcacaccgnccccggtgtgctctccatggccaacgccgggcccaacaccaacggctcccagttcttcatctgcaccgtcgcgaccccttggctcgacggcaagcacgt

SEQ ID NO: 100330 - DNA, 450 bp, Zea mays
acgcgtccgcccacgcgtccggttgcatttgctgttgtgtgggctgtttttcgccagctccccttggcttggattgggcaagacattctgggtattgcattgatagttacagtcatccaaattgtgagagtacctaacctcaaggtgggttcggttcttcttggctgtgccttcctgtatgatatcttctgggtgtttatctccaagagatggtttcatgagagcgtgatgattgtggttgcgcgtggcgacaagaccgacgaggatggtgtgcccatgctgctaaaaatcccgcgcatgtttgatccatggggtggatacagcatcattggctttggtgatatccttcttcctggtcttttagttgctttctcgctaagatacgatttttctgcaaagaagggcttacggtctggttactttttgtgggcaatggtggcctatggctct

SEQ ID NO: 100331 - DNA, 329 bp, Zea mays
  unsure (1)..(329): unsure at all n locations
ctagatccgttcatcctggtggttttgtgaggtcgaaagcggcgagcgaattagaagatgctggacaagctgtgggacgacgtggtggccgggcctcgcccggagacgggcctcgagaagctccgcaagggcaccaccgcccgcccgctcgtcatcaacaaagacgcggacggcggcagctacaagcgggcgcagtcgatgccgtcgaccccgacgacgccggtgacgccgtcgtcgtcgtcgtcgtcgacgacgccgcgcggcgccggcaacgtgtggcgcagcgtcttncacccggggagcaacctggccaccaagggcatgggcgc

SEQ ID NO: 100332 - DNA, 407 bp, Zea mays
  unsure (1)..(407): unsure at all n locations
cccacgcgtccgcactcggcacgcaggctagcagcacagcagcagccagagccatggcctctcctcgctacgcttcgcttcctcggcgccgattcctcctcctcctcctgcaccctcgtccgtccccttccggcgcgcgagctcgcccgagatggcgaacgcgagatcgggtgtcgctgtgaacgatgagtgcatgctgaagtttggcgagctgcagtcgaagaggctgcaccgcttcataactttcaagatggacgacaagttcaaggagatagttgtggaccaggtcggggatcgcgctaccagctacgaagacttcacaaacagccctcctgagaatgactgccgatacgcgatctatganttcgacnnttgtactgcagaggatgtccagaagagcaggatct

SEQ ID NO: 100333 - DNA, 189 bp, Zea mays
cggacgcgtgggcgcgccgtcaacagggctcaggacggccgccgtcgtcagggcgtccggggaagcgcaagcgcaagcgcaggcgggccgtcgcgccgtgctcgggctggtggccactggcatcgtcggcggcgccttgtcgcaagcggtgcacgccgagaccgtcaagaccatcaagatcggagcccc

SEQ ID NO: 100334 - DNA, 405 bp, Zea mays
gggcaacagacctcctggtgcctggcgttctcccaattggctgcttcccgttgtacctggcgctgtacaacaccagcagcaaagcagattacaacgcccggaccgggtgccttcggaggtacaaccgcctggccttccaccacaacagggagctgaagcagcagcttgacgagcttcagaagaagtaccccaagacgaagatcatgtatggagattacttcaaggctgcactgcagtttgtcgtcaaccctgggaaatttggtttcagcacggctttgcaagcgtgctgcggcgccggagggcagggcaactacaacttcaaccctgaagaagaagtgtggcgagcagggcgcgagcgtgtgctccaacccgtcgtcgtacgtgagctgggatggcatccacatg

SEQ ID NO: 100335 - DNA, 431 bp, Zea mays
  unsure (1)..(431): unsure at all n locations
ggtaaagctatctcgagctagctagctgctgtaagccgttgccatggccaaaatggtgttgctctgcgtgctcgtctccttcctcctgatgcccttggcctccctagccctgacgcaggacttctgcgtcgccgacctgacctgcagcgacacgccggcggggtacccgtgcaagtccagcgtcaccgccaacgacttctacttccacggcctggccggccagggcaaaataaacccactcatcaaggccgccgtgaccccggccttcgtgggccagttcccgggcgtcaacgggcttggcatctctgcggccaggctcgacatcgaggtgggcggcgtcgtgccgctgcacacccacccggcgggctcagagctcctcttcgtgacccagggcaccgtcgccgncggcttcatcagctccggctccaaca

SEQ ID NO: 100336 - DNA, 437 bp, Zea mays
  unsure (1)..(437): unsure at all n locations
cgccttcttcgtccctgccggctccgggaacgccggcggcgggacctacgcgaaggagaagctgggcaacgacatcacggtggangcgtggctcaacacgcacggtcccaacgaccgcacgctcgcgcaggggctcaagggtgaccccacgtacctggtggtggagcaggacaagacgctggccacctacgggatcaacgccgtgtgcactcacctcggctgcgtcgtgccgtggaacggcgctgagaacaagttcatctgcccctgccacggatcccagtacaacaaccagggcaaggtggtccgtggaccggcgcctctgtcgctggccctggttcacgccgacgtcgacgacggcaaggtcctcttcgtcccgtgggtggagaccgacttcaggaccggcgaggacccatggtggaaggcatgaagatgatccg

SEQ ID NO: 100337 - DNA, 405 bp, Zea mays
  unsure (1)..(405): unsure at all n locations
gcccagatcgacgccgtgtacgccgccatgaaggccatggggcacacggacgtgggcgtccggatctcggagaccgggtggccgtccaggggcgacgaggacgagaccggggccacggtgcagaacgccgtcgcgtacaacggcaacctcatgcagagggtcgccatgagccaggggacgccgctcaagcccaacgtgcccgtcgacgtctacgtgttcgcgctcttcaacgagaacatgaagccagggcccacgtcggagcgcaactacgggctgttctaccccaacggctcgccggtgtacgcgctcagcgccggcttccgcggcggttcaggtccgggcgggtcgctcaacccgtactacacatncatgttctcctnctcgtccagatccggcgtgagcgcg

SEQ ID NO: 100338 - DNA, 390 bp, Zea mays
caggcgcgtcgctgctcgccgcagcgggcgcggtgaccgcgtcggcggggcccgcgctggcgctcgtggacgagcgcatgtccacggagggcaccgggctgagcctcgggctcagcaacaacctgctggggtggatcctcctgggggtcttcggcctcatctggtccctctacaccatctacacctctgacctcgacgaggacgaggagtccggtggcctctcgctctagatccaccctctcctgttaatgatctgaatgtaaacatggtggcggtcatcggtgtaaatttagacatggctatttgcatctaagatccatcctctcctgttaataatgtttggagactacgtacgcctgaagcaatgcaatagcaactttgcgagaaaaa

SEQ ID NO: 100339 - DNA, 238 bp, Zea mays
cggaattcccgggtcgacccacgcgttcgcccacgcgttcgcttcagccgtcgtcgctcgtagcaagcaggagcagcaaggatgccgggtggccacgggctgcgctcgcggacgcgcgacctgttcgcgcgcccctttcgcaagaaaggctacattccggtcaacaactaacttcggacctaccagatcggggactacctcgacctcaaagggaaccgggccctccacaaagggattc

SEQ ID NO: 100340 - DNA, 418 bp, Zea mays
cgcaacttcctccttcccaagggcaaggctacacttctgaccccagaagtcctcaaggaaatgcagctggagcaggagagaatagaagctgagaagaagcgggtaaaagaagacgcgcaacaacttgctcgagtttttgaaaccattggcgctttcaaactccctcgcaaaggtggaaaaggaaaacagatctttgggagtgtcacggcacaggatgttgttgacataataaagtcacaacttaatagggatgtcgacaagaagctggtgacggttccagaaatccgtgaaatcggagagtatgttgcagagatcaagcttcacccagacgtgacagcgcgagtaaggctgaatgtctatgcgaaatgagctcaacagttacagaacctcgagtaatggactttggaagagcctgatg

SEQ ID NO: 100341 - DNA, 432 bp, Zea mays
cggacgcgtgggcaagcatcggcattgcgatgaggctcatggatatgtccggaaggaggtttctcctcctcgcgacgatcgcagtcctaatagtcgcgctactcgtcctggtggtgtccaacatcgtggacgtgggggacgtggcgcacgcggcgctctccacggccagcgtcatagtctacttctgcttcttcgtcatggggttcgggcccgtccccaacatcctctgcgcagagatcttccccaccacggtccgcggtgtctgcatcgccatctgcgccctggccttctggctcggtgacatcatcgtgacgtacactctccccgtgatgctgaacgtcgtcgggctcgccggcgtctttggggtgtacgccgtcgtgtgcgtcctagccctcgcgttcgtgttcgtcaaggtgcccgagacgaagggca

SEQ ID NO: 100342 - DNA, 410 bp, Zea mays
gccagatgcgtatccttacaaatccccatcgattggtttcatcaataagatatatcgcccaaatgtcgatgaaatgtctggttcagtctgtttggatgtcatcaaccagacatggagcccaatgtttgatcttgttaatgtgttcgaggtcttccttccacaacttctgttatatcctaatccttctgatccattaaatggagatgcagctgcgttgatgatgcgtgatcgccctgcttatgaacaaaaggtgaaagagtactgtgaaaaatacgccaaaccagaggatgctggtgtcagcccagaagacgagtccagtgacgaagagctgagtgaagaggaaaatgactcgggtgatgaggagataatgggcaaaccagacacatagtcgagttggaacctagatctgt

SEQ ID NO: 100343 - DNA, 412 bp, Zea mays
gttgagagagagagagagggatcgagagcgcggcggaggcgatggcgagcggagggaagggactcaacgcgactggggagttcttccggcggagggacgagtggaggaggcaccctatggcggggaaccagctgcgccacgccacacccgggctcggcatcgccatcgtcgccttcgggatctacctcgtcggcgaggccgcctacaaccgcctctaccgcccctccggcgacaaccaccactagatcgccggcaggatccgtgactcggtcaagaagctggagccaactttaccaagcactggtgctgttgatgtttttacagttttgagctcataaggtcagccatgaccatattgtaatctgtgaccaggtagacttgcccactggtccgtccaactattgtcttggga

SEQ ID NO: 100344 - DNA, 473 bp, Zea mays
gtaccggtcctgaattccctgggggacccacgcgtccggtccaaccaagtcagcacccgcgcgcggcaaggagttcacgcccatggcgagcaccggcatggcgtcggccacctcgcgggtcatgctggccgcgggcgtgcccactgccagtagcggcagcggccgtgtcagcttcgcctcggcgcccaaccggcttggcaggaggcttgtggtccgggccgatgaggagtccccggcagagccggcgcccacggcggaaggggagggcgccgtggccaccaagcccaaggccgagaagccgccgccgatcgggcccaagaggggcgccaaggtgaagatcctgaggcgggagtcctactggtacaacgggatcggcaacgtcgtcaccgtcgatcaggatcctaacacccgttacccggtggtggtgcggttcaacaaggtgaactacgccggcgtgtctaccaacaactatg

SEQ ID NO: 100345 - DNA, 413 bp, Zea mays
cccacgcgtccgcccacgcgtccgcgctggtcggcgactacgggttcgacccgttcgggctcgggaagcccgtggagtacctgcagttcgaactggactcgctggaccagaacctggccaagaacgaggccggcggcatcatcggcacccggttcgagtcctccgacgtcaagtccaccccgctccagccctacagcgaggtgttcggcctccagcggttccgcgagtgcgagctcatccacggccgatgggccatgctcgccaccctcggcgccctcaccgtcgagtggctcaccggcgtcacctggcaggatgctggcaaggtggagctggtggatgggtcctcctacctgggccagccgctgccgttcaccatctcgacgctcatctggatcgaggtgcttgtgatcggc

SEQ ID NO: 100346 - DNA, 406 bp, Zea mays
ggagatcctcccgcttggccctttgaatgatttcgagagagctggtctggaagcggggaagaaggaactgggcgagagcattcagaagggcatcgctttcatgagcaagtgaaagcggagcggtacggagggatcgtccctgagtcagatccggaccatacgtagtaacgtagatgtagggtgttgtgatatagtgctcctacctatacttgtaaggccacggtaaaaagaaggctaattaccctttagcaactgtgaccatctacttggcataatggcatggaataaatctttcgtcttcggtggcggacaagggccgtgcctgctctgtgctttgctggacggtgggtgagccacagcggggccgcaggaacaacagaatagcattggtttggagaccggtgtt

SEQ ID NO: 100347 - DNA, 412 bp, Zea mays
  unsure (1)..(412): unsure at all n locations
aacagcaagtgtagattctcctaaggaacggattgtaccacctgcagagaaacctgccacaacttctttgagaattgaccgatttgtacgcccatttaccctgaaagctgtgcaggagcttcttggtaaaactggatctgtacaagacttctggatggaccatatcaagactcattgctatgtgacattttcttcggtggatgaagcaatggctactagggatgctgtttacaacctacagtggcccccaaataacggcaataagttggtcgccgaatttgttgatcctcaggaagtgaagctcaaggttgacccccctcccccgccagctgctcctgttagcccagctgctatcacaagggcacctnctcttcaacagactcaaagtgtgccacgccaggctgctacacca

SEQ ID NO: 100348 - DNA, 377 bp, Zea mays
  unsure (1)..(377): unsure at all n locations
gcaaagacaaatccttagaattattgtatatgcctnctcgccataatcagtgcaaaagcgtactcaagccagcgaatagatgagttgaacaataagagagcaacaagaaaaggattccttttttttatgatgacagaagaaggaatgcaacccaacatgacgttcatcatgtcacctcttccttatttaagggatgtttagtagcagatggaacgatcaaaagaactcaaatgccaatcatccatggagaaggatgtggtcatgtcatgtgagagcgacatttgctgcagcacaaaaatgatccgagcgggaccaaacatattctaggcagaatcgtatcaccaccagcaccgaagcttggatagcgcctggatata

SEQ ID NO: 100349 - DNA, 389 bp, Zea mays
cgtcggcaagccggcggctggcacgagggacgtcttcggcgagggccgcatcaccatgcgcaagaccgtcgtgaagcccaagccggcggcgtccggcagcccatggtacggtgccgaccgcgtcctgtacctgggcccgctgtccggctcgcccccgagctacctgaccggcgagttccccggcgactacgggtgggacaccgcggggctgtcggcggacccggagaccttcgccaagaaccgcgagctggaggtgatccactgccgctgggccatgctcggcgcgctcgggtgcgtgttcccggagctgctcgcccgcaacggcgtcaagttcggcgaggcggtgtggttcaaggcgggctcccagatcttcagcgagggcgggctgg

SEQ ID NO: 100350 - DNA, 443 bp, Zea mays
cacgcgtccggcgcttcgctgggcaagccggtgaaggggcttggcctgagcatgggccgcgagcgggcccagcggagcattgtgtgccaggcggcgagcagcatctccgccgaccgcgtccccgacatggagaagcggaagctgatgaacctcctcctcctcggcgccatctcgttgcccaccgtcggcatggtcgtcccctacggcgccttcttcgtccctgccggctccgggaacgccggcggcgggacctacgcgaaggacaagctgggcaacgacatcacggtggaggcgtggctcaacacgcacggtcccaacgaccgcacgctcgcgcaggggctcaagggtgaccccacgtacctgggggtggagcaggacaagacgctggccacctacgggatcaacgccgtgtgcactcacctcggctgcgtcgtgccgtggaa

SEQ ID NO: 100351 - DNA, 416 bp, Zea mays
tcgaccccgattcgtccgcccgcgaccgggattccctccgccaagcgcggatctgagcgctgcgctccgtgtcgccgctcgaatccgccatgaagggggccaaatccaagggcgccgccaaggccgatgccaagctggcggtgaagagcaagggggcggagaagcccgccaagggcaggaaagggaaggccggcaaggaccccaacaagcctaagagggctcccagcgctttcttcgtgttcatggaggaatttcgcaaggagttcaaggagaagaaccctaagaacaagtctgtcgctgcggtggggaaagctgctggcgacaggtggaaatccctgagcgagtcggacaaggctccctatgtagccaaggctaacaagctcaagctcgagtacaacaaggccatcgctgcctac

SEQ ID NO: 100352 - DNA, 411 bp, Zea mays
gtgagatttatgatcagtatggtgaagatgcgcttaaggaaggaatgggcggtgggggatcccatgttgatccatttgacatcttctcatcattttttggaccctcttttggaggaggtggtggaagcagcaggggaagaaggcaaaggaggggagaagatgtagttcacccacttaaagtttctctggaagatctttacaatggcacctcaaagaagctctctctttcgcgcaatgtcatctgctccaagtgcaagggcaagggctcgaagtctggtgcctcaatgaggtgccctggttgccagggctcaggcatgaaagtcactattcgtcagctgggcccttccatgatacagcagatgcagcagccttgcaatgagtgcaaggggactggagagagcatcaatgaga

SEQ ID NO: 100353 - DNA, 420 bp, Zea mays
  unsure (1)..(420): unsure at all n locations
cggacgcgtggggccgacaaaaccagaccatgaaacaagtgccagcgccctctcggagtcgccgcaatggagagcaccttcatcatgatcaagcctgacggcgtccagaggggcctcattggtgagatcatcagccgttttgagaagaagggcttctacctcaaggccttgaagcttgtgaacgtggagaggtcgtttgctgagaagcactacgccgatctcgcctccaagcccttcttccagggcctcgtggactacatcatctctggccctgtggtggccatggtctgggagggcaagagcgtcgtcacaactggccgcaagatcattggcgccaccaaccccctggcttctgagcccggcaccatccgtggcgactntgctgtcgacattggcaggaatgtcattcatggaagtgac

SEQ ID NO: 100354 - DNA, 258 bp, Zea mays
  unsure (1)..(258): unsure at all n locations
cggaattcccgggtcgacccacgcgttcgctgcaaggcgcaggccggcgacaagaggtggttcaagggcgccaggaaaggagtcgagaaggccgtcgtctggttcaacgtcgcatgatgcagtaatattggttcttcgatgggatgggatgcacgcactacgtaaagagcttggctaggccaagcctggcttaacacccttgggtggtccttcgactggacatgagaaccaagacttagaactttgntccgtttaaaa

SEQ ID NO: 100355 - DNA, 390 bp, Zea mays
ggatcgggaaggtctttcaggcatggtcgttcaatgtctccagaagagcacaggcatgggggcaggcatgaatgggatccatcatcgagagtgtccagaagtgcagcacatatcgaggatattaactcgagaggaggtgaagcatcccggaatggagatcctgatgctttggcaacaatgaacgcaactgcagaagctcttgaagcaaaagaaaagcaaaagccatcgtttgaattgtctggaaagcttgctgaggagaccaacagagttgcaggtgtaaatctattatattcagaacccccagaggctcgaaagtcagagattagatggaggctctatgtatttaaagatggtgaaccactgaatgaaccactgtatgttcatcggatg

SEQ ID NO: 100356 - DNA, 372 bp, Zea mays
  unsure (1)..(372): unsure at all n locations
agggcaaaatgtatcctgtatctatatggtttcaatgtgtgtctgtatgtactgaactgtacaggcttatcgagaaagatcactgcgagtctacaacaatccacacccaacacaggcggtggacacaacccatccaataatctttcatgagtacagtgtcggagtcatcggccaatttcttcaaaattatcattaatttatgatgttcatgtaactatagtcgtaggataaggcagggccggtttggtttcatcacgcggatgggagcaccttcttgacgatctcatcactgagcgaggcgatctgggcgtcgagcgccttaacagcctnctncttctgcgcctcgaggttggcgagcgcctctacgagctc

SEQ ID NO: 100357 - DNA, 454 bp, Zea mays
  unsure (1)..(454): unsure at all n locations
cacgcgtccgcccacgcgtccgtgctcatgggcgccgtcgaggggtaccgcatcgccggtggcccggtcngggaggtggtcgacccgctggaccccggcggcagcttcgacccgctcgggctcgccgacgacccggaggcgttcgcggagctcaaggtcaaggagatcaagaacggccgcctcgccatgttctccatgttcggcttcttcgtgcaggccatcgtcaccggcaagggtcccgttgagaacctcgccgaccacctcgctgaccctgtcaacaacaacgcctgggcctacgctaccaacttcgtccccggcaagtgagcgagggcatatacatacttgtatgcgtgtaccggagacatacgtattcgtatatgtactgcangagatgtaccagtatttgtgaagaaaggagcaatggctcagagattgtaccagtagtgtacgtatt

SEQ ID NO: 100358 - DNA, 416 bp, Zea mays
gaagaccagaaggtgagaagagagagagagagtgtgtgtgatcggtacaaggatcagcgctgtgcctgcgcgtgctgcttcaccgaatcgagtcagatcctgtccgaatccgagctaagggatggcaaccggtagtgaagcctcgaaggcagctgaggctgtggttgactggcataaacacgacagcaagaggatgctccatgcggtttaccgtgttggggatctggaccgcacaatcaagtactacacggaatgctttgggatgaaactgctgaggaaaagggatgttcctgatgagaagtacaccaatgccttccttggctttgggccagagaacaccaactttgcagttgaattgacatacaactatggcgttgacaagtatgacattggaacgggctttgggcatttcgcaa

SEQ ID NO: 100359 - DNA, 294 bp, Zea mays
gcagggtggacattttgtgttcatagacaacgcttcagggttccactcggctgtcggctatgcgtgccgtaatcttctatcagtaaatggagaggagggattcacatttcctgatggcctaatatctgcgtgaagtggcatgttcaacaagcttgctcaacaacagtttacataaagcaaagatatacgattgtggaaatcattgcccatttccaccaatttgcttgtatacggattatgctgtgtatatattacataacaaatgtattagtatcatttaatgcacgatttgtg

SEQ ID NO: 100360 - DNA, 343 bp, Zea mays
cgcgcaccgccgtcgccgcccaaccgcagtaaggaggaaggagcaggaagatgccggcggggcacgggctggggtcgcggacccgcgacctgttcgcgcggtccttccgcaagaaggggtacattccactcaccacgtacctgcgcacctacaagatcggcgactacgtcgacgtcaaggttaacggcgccgtgcacaagggcatgccgcacaagttctaccacgggcgcaccgggagcgtctggaacgtcaccaagcgcgccatcggcgtcgagatcaacacgcaagttaatggccgcatcatcaggaagcggatccatgtccgcgtggagcatgtgcaacc

SEQ ID NO: 100361 - DNA, 352 bp, Zea mays
cggacgcgtgggacgtacaccaagcccaagaagatcaaacacaagcacaagaaggttaagctctccgtgctgcagttctagaaggtggacgacaccactagcaaggtgacccgcctccgcaaggagtgccccaacacagagtgcggcgcgggcgtcttcatggccaaccacttcgaccgccactactgcggcaagtgcggcctcacctatgtctacaaccagaaggcgtaattgcttgccccgatttgctttatccgcctaccctatcgaacatccagctgttggttactcgaattgtatctcatgtagatctgtctgaggttgaaacttaaatggagcagtagtatctgtc

SEQ ID NO: 100362 - DNA, 459 bp, Zea mays
acccacgcgtccgcggacgcgtgggcggacgcgtgggcggacgcgtgggtggcttcggcctcatctacgataacctcgagtctgccaagaaggtcgagcccaaataccgcctcatcaggaatggtcttgctactaaggttgagaagtcccgcaagcaaatgaaagagcggaagaacagggccaagaagatccgtggtgtcaagaagaccaaggctggtgacgccaagaagaagtaaacagtcatttatatttctgtattactgtcctgaactctgggtggtcgtctagttgcaatgtcataattatggtcgtgttaggttttgttccgcactcagcagtaagtgaagttttgtaattcctggatgtgaacctacccggattggctgtagcatgttgtgagatgagaaggctattttgtcatgcagttgtgtcatttgcaagccaatccattttgtcatg

SEQ ID NO: 100363 - DNA, 418 bp, Zea mays
  unsure (1)..(418): unsure at all n locations
ggccaacaggtgcaggttttcctcatttttattagatcctttcttagcgatcttggatctccactctccaggactccagggtttgccgtttgcttgacgatcacacgtatcaaaaagggttctcaagtattattggttgatgctatgctccaagaattagaaaaggagattgatgatgtggatgcacaaattggaaatcgttggcaactgcttgataaggaccatgatggcaaagtgacccctgaagaggtggcggcggcgacagcttatctcaaggacaccatagggaaagaaggcgtgcaagagctcatcagcaacctttctaaagacacagaaggaaaaaatccttgttgaagatattgtgaagctagcatcccanatagagaacaatgaagaggaagaggaagcacggtagatg

SEQ ID NO: 100364 - DNA, 301 bp, Zea mays
tcgcggacgcgtgggcggacgcgtggggttgtcaccttcggtccaactggcctgaccagggatgtgaagtctgttgagatgcaccacgaggctctccaggaggcccttcctggtgacaatgttggcttcaatgtgaagaacgttgctgtgaaggatctcaaacgtgggtacgtggcctccaactctaaggatgaccctgccaaggaggctgctagcttcacctcccaagtcatcatcatgaaccaccctgggcagattggcaatggctatgccccagtgctggactgccacaccttccaca

SEQ ID NO: 100365 - DNA, 412 bp, Zea mays
catctgcaggcgctccctcgacattgagaggcccaactactccaacttgaatcgccttgtgtctcaggtgatctcatcgctgactgcttctctgaggttcgatggtgccctcaatgtggatgtgaacgagttccagaccaacctggttccttacccgaggatccacttcatgctctcctcctacgcaccggtgatctcttctgcgaaggccttccacgagcagctgtctgtggcggagatcaccagcagcgcgttcgagccggcttccatgatggtcaagtgcgacccacggcacggcaagtacatggcttgctgcctgatgtaccgcggcgacgtggtgcccaaggacgtgaaacgccgcgtggccaccatcaagacgaagcgcaccatccagttcgtggactggtgcccg

SEQ ID NO: 100366 - DNA, 404 bp, Zea mays
cccacgcgtccgcggacgcgtgggtgcctaccagtcgatacatgacttctcgaagccggtgatcaacatgatgaaggctgcaggttgggatcttgatggggctgctagtgcgatcgagcctggtgtggtttacacaagaagggctcacaagaagtttgcttttgaatcctatatttgccaaagaatgttcagtgggttccaagaagagagcttttctatcaaggattctaacatcagtgtttccaatgaggctttcttccaccaattcctcgcggtgcgagccatggatcctctggatgtcctgagccagaaccctgattcagtattcggaaagttctgcagaagcaagtacctatcgcttgtgcatcaaaaaatggaaggttctttcttcggcaacgtggatc

SEQ ID NO: 100367 - DNA, 403 bp, Zea mays
cccacgcgtccgcccacgcgtccgcccacgcgtgcggcggcgacggcttcaagctgctgatcccgtccaagtggaaccccagcaaggagcgggagttccccgggcaggtgctacgctacgaggacaacttcgacgccaacagcaacgtgtccgtcatcatccagcccacgtccaagaagaccatcgccgactacggctctcccgaggagttcctctcccaggtcgactacctgctcggcaggcatgcctacggcggcaagaccgactccgagggcgggttcgagaccggcgccgtggccaccgccaacgtcctggagagctccacccacgtgatcgacggcaagcagtactacgccgtgtccgtgctcaccaggacggcggacggcgacgagggcggcaagca

SEQ ID NO: 100368 - DNA, 430 bp, Zea mays
cggacgcgtgggggcgtccatgaccggcctctcgcagggcgttctgcccagcaggcgcgccgccaacagggccaggacggccgccgtcgtcagggcgtccgccgaggcgcaggcgcaggcgcaggcgggccgccgcgccgtgctcgggctggtggccactggcatcgtcggcggcgccttgtcgcaggcggtgcacgccgagaccgtcaagaccatcaagatcggagccccgccgccgccctccggtggactccccgggactctgaactctgaccaggcgagggacttcgacctccccttgaaggagcggttctacctgcagccgctgccgccggcggaggcggtggcgagggtgaagacgtcggcgcaggacatcatcaacctcaagccactcatcgacaagaaggcgtggccgtacgtccagaacgac

SEQ ID NO: 100369 - DNA, 478 bp, Zea mays
taccggtccggaattcccggggtgggatcgactgcaaatgataaacctatacctgctccagatcctgaagtttcgcatataagcccccctctttcgttcattaagggtgtgttgccgaaatatttccactctgagtggtcagtagctcagttcaggctccatgagggggagcagtacattgttgcatttggacatgagaagaataccgtgtcagttgttggtatggatggaagcttctacagatgtcaatttgacccagttaatggaggagaaatgctgcagctggagtgctacagttttctaaaaccgtcagatcaaccgtagcgacacacaattatcatctatcaattgatgccctcctccccgtaccaagaactgtacagtatctttgtgcgccctcgttggccggaggtctaagctaaatatgataatattttctttgtgtatatatatttcttgttggctctgggtgatgtat

SEQ ID NO: 100370 - DNA, 397 bp, Zea mays
gcgccactgtccagtgcgcgcgtcaagcttgcttagctagccgccatggcctccctcggcgccgtctccgtgaagcccgtggccatcaagggtctcgccggcagctccatctccggaaggaagctcgccgtcgccaggccgtcggcccgctccatccgcaggccccgcgcagccgccgtggtggccaagtacggcgacaagagcgtctactttgacctcgacgacatcggcaacaccaccggacagtgggacctctacggctctgacgcgccctcgccctacaacccgctacagagcaagttcttcgagacgttcgcggctccgttcaccaagagaggtctgctgctcaagttcctgctgctgggcggcggctcacttctggcctacgtcagcgcgt

SEQ ID NO: 100371 - DNA, 436 bp, Zea mays
ccaaacccgcacgacacgacaccaagtcgaggagctcgagggcaccaatcatggccggcgtgaactccagcgtcgtcgggctcaagcccgccgcggcagtgccgcaggccgccgccgcctcatcgccggcgaagcgggtgcagctggccgcgcccgagggccgccgcgccgctctgctcggcctggcggccgtcttcgccgtcacggccaccaccgggtcggccaaggccacgatcttcgatgagtacctcgagaagagcaaggccaacaaggagctgaacgacaagaagaggctggccaccagtggcgccaactttgcgcgcgcctacaccgtggagttcggcagctgccagttcccctacaacttcactgggtgccaggacctcgccaagcagaagaaagtccccttcatcagcgacgacctcgagattgagtg

SEQ ID NO: 100372 - DNA, 456 bp, Zea mays
cggtccggaattcccgggccgcccgtcccctcctgctcgcccatggctcccatcgctgtcggcgacgccctccccgacggccagctcgggtgggtcgacgagaacgaccagctgcagcaggtctccgtccacgcgctcgccgccggcaagaaggtcatcctcttcggcgtccccggcgccttcaccccgacctgtagcaaccagcatgtgccaggcttcatcacacaggctgagcagctcaaagccaagggtgtagacgagatcctgcttatcagcgttaacgaccccttcgtcatgaaggcgtgggcgaagacctaccccgagaacaagcacgtgaagttcctcgccgacggatctggagcgtacaccaaggcgctcgacctcgagctcgatctcacggacaaagggctgggcgtgcgctcgaagaggttcgctctcctggccgacgacctcacg

SEQ ID NO: 100373 - DNA, 426 bp, Zea mays
cccacgcgtccggaggatgcccccatggaaattgtggatgaggaagccaccaagcctgagggatggctggatgatgaacccgaagagattgatgatcctgaggcagccaagcccgaggactgtgacgatgaagaggatggtgaatgggaggcaccaaagattgacaaccccaagtgctaagaggcacctgtatgtggcgagtggaagaggccgatgaagcagaatgctgcttacaaaggcatgtggcatgcacctatgattgacaaccacgactacaagggaatctgtaagcctcacgagatacccaaccctgagtactttgagcttgacaggcctgattgtgatccaactgctgctattgggattgagatctggacaatgcacgatggcatactgttcgacaatatcttgattgctgatgatgag

SEQ ID NO: 100374 - DNA, 437 bp, Zea mays
aagaaaatcaccaacgcaagggatcttatcaacgttttggaagaagccatcagaggtgcgtacgcaatcctgataattgcagaggatattgagcaggaggctcttgctacccttgtcgtcaacaagctcagaggatcactgaagatcgctgccatcaaagcccctggttttggagagcgcaagactcagtacttggatgatattgccatccttactggagcaactgtaatcagagatgaagttgggctgtcacttgacaaggccgacaattcagttcttggaacagctgcaaaggttgtccttacgaaagagtcgacaacaattgttggtgatggcagcacccaggaagaagttactaagagggttgcacagattaaaaatctcattgaggcagcagaacaagaatatgaaaaggaaaagctcaatgagaggatagc

SEQ ID NO: 100375 - DNA, 267 bp, Zea mays
tggtctcccaccggcgacgtctacgtcggtggaaccactgggcttctgatctgggccggcaccctcgctgggatcctcggcggcggcgccctcctcgtctacaacaccagcgccctctccggctaaggatatccaatgcatgcgcttcttgcgattcgtcgtgtaaaatcagggtgtctgtctataatctagcctccatggatgctcaaccttcgtcatgtaacaataatcagtgctactcttcattacataattttgatgctatat

SEQ ID NO: 100376 - DNA, 437 bp, Zea mays
ctgggaggcacacccctggtaccttcactaaccagctccagacctccttcagcgagccggggctgctcatccttaccgacccaaggactgaccatcagccaattaaggagtctgctctggggaacatccccaccattgccttctgtgatactgactctcccatgcggtatgtcgatatcggcatcccagcgaacaacaaggggaggaacagcattggatgcctgttctggcttttggccaggatggttctgcagatgaggggcactatcctccctgggcacaagtgggaggtcatggtggatttgttcttctacagggacccagaggaagcaaaggagcaggaggaggaagctgctgttgcccctgagtttgccgcaatcactgattaccaaggagctgatcagtggggtggtgaccagtggacctctgatgtgact

SEQ ID NO: 100377 - DNA, 440 bp, Zea mays
accgcagcgacgagcgggaggagatgaagatcatcattgacacggatcccggcatcgatgacagcgtggccatcctgatggcattccagatgccgggcgtccaggtcctagggctcaccaccatcttcggaaactgcaccacagagcatgccacacgcaacgccttgatcctgtgcgagaaggcaagccatctagaggtcccagtagctgagggcagccatgagcctctcaagggaggaaagccgcacgttgctgacttcgttcatggacctgatggcctcgggaacgtagatcttcctgatcccactatcaagaaagtggaggaaagtgctaccgacttcttggttgataaggtctcgcgatttcctggagaggtctctgtgctcgccttgggtcctctgacaaacatagcattggccatcaagaaggatccctcattc

SEQ ID NO: 100378 - DNA, 445 bp, Zea mays
  unsure (1)..(445): unsure at all n locations
gccaggactgcgaggcgtcgccggccggcgacggcttcgtctgcggtgactttatcttgagcctgaccgagcccccggtctgcacaccgaggccgtgggactgctgcgacagcgtggcctgcacaagggactacatccccaactgcatgtgcctggacaaggtggagtcgtgctcgagcaactgcgaacggtgcgagtttctgtatcattcggaccctcctcgcttccaatgccgagacatcttccacggctatcctggtcccaagtgcaggacatggatcagtacgagcaactagctcagctcagctacttgctaaaagtagcgtagcgcagcgcgcgcggctacttgctagtatacgtacgtncacaaataaaaataaaagtggctagcgtacaaagctaacatctggttgttcgtccccgacattggaccgattagcctagc

SEQ ID NO: 100379 - DNA, 441 bp, Zea mays
cgccgtcgccgcccgcgacggagttgtcgcgctcggcgggccttcgtggaccgtgcttgtgggcagaagggactcgaccggttcgttccctagccagacaagcgacctcccacctccgacgtcgagcctccaagcactgttagccgcgtacagcaagaagaacctcgacgcgaccgacatggtcgctctctcaggcgctcacacaatcgggcaggcccagtgctcgagcttcaacggccacatctacaacgacacgaacatcaacgcggccttcgcgacgtcgctcaaggccaactgccccatgtccggcggcagcagcctggcgccgctggacaccatgaccccgaccgtgttcgacaacgactactacaagaacctgctgtcgcagaaggggctgctgcactcggaccaggagctgttcaacaacggcagcaccgacag

SEQ ID NO: 100380 - DNA, 442 bp, Zea mays
gcggtgtggttcaaggcgggctcccagatcttcagcgagggcgggctggactacctcggcaacccgagcctggtccacgcgcagagcatcctggccatctgggcgtgccaggtggtgctcatgggcgccgtcgaggggtaccgcgtcgccggcggcccgctcggggaggtggtcgacccgctgtaccctggcggcagcttcgacccgctcgggctcgccgacgacccggaggcgttcgccgagctcaaggtgaaggagatcaagaacggccgcctcgccatgttctccatgttcggcttcttcgtgcaggctatcgtcaccggcaagggccccctcgagaacctcgccgaccacatcgccgaccccgtcaacaacaacgcctgggcttacgccaccaacttcgtccccggcaagtgagcgaagggcatgatgcttgcatgcg

SEQ ID NO: 100381 - DNA, 432 bp, Zea mays
cggacgcgtgggcgcgcatcctattgccctcgcgccaccgtcgccgccgctgcagcgagccaccgccctgccgtcgcctgaggtagacaccaagccaccgccatggggcgtatgcacagccgcgggaagggtatctcttcatcggcgctgccgtacaagaggactcctccgatctggctcaagacagctaccaccgaggtggaggagatgattaccaaggctgcgaagaagggccagatgccgtcgcagattggtgttctgctccgtgaccagcacggcatcccgcttgtcaagagcgtgactggtagcaagatcctccgcatcctcaaggcccatgggttggcgccggagatcccggaggatctctacttcctcattaagaaggccgtggcgattaggaagcatctggagaggaacaggaaggacaaggac

SEQ ID NO: 100382 - DNA, 334 bp, Zea mays
ggcattgtctacgtcgaccgcaaaaataactacacgcgctacatgaaggagtcagccgagtggttaaaagagttcaatactgcgaagaagcctagcaagaagattattacgccagcttaaaaacatgggacctcgtgatgtgggtacggtgccacccatgaaataaaaacctagtgtgtggtttgaaacctaaatttttctttttcttttttgcaccatgagagaggtagtggagtcatattctccagcaccgtggctaataatgtattgttgcagtacaatctagcattgtcgtcatgcaataaataaagtgactggtttccctatttcaaaa

SEQ ID NO: 100383 - DNA, 440 bp, Zea mays
cttcaacgagttccaggacctcgtcgatcactacgagggggctgagctgtcggagtacggacttcggttgatcgggtcagaccttgagcactacatccgcaaactgctgtacgacggggtgatcaagtacaacatgaggtccagagtcctcaatttcagcatgggcaagcctcgcatcaagttcaacagcaaccagataccagaaaagatatagaatgtacttatccaacgcccttaaaagaatggtttctctccattcgattaccgagcaagatgtatactctgcagtcccagatacgatccagagcattccagaattcatattacgcagatgcaaagccatacaccgattctgttggcagaattttgtcacccctgcacagtaataaccacataacgagagtctgggcaaaataaggggtttggctcgagttttagat

SEQ ID NO: 100384 - DNA, 439 bp, Zea mays
cccacgcgtccgggcctgttcttctttgatttctaccttccacctgagtatccggaaggtcctccgtcagcatactaccattctggtggtttgcgtgtaaatccaaacctgtatgtggatggaaaggtttgcttaagtctcttaaatacttggaccggcagagggaacgaagtgtgggacccatcatcatcaagtattctacaagtactggtttcacttcagggattggttctcaatgaaaaaccctattttaatgaggctgggtacgagaagcaagttggtactgttgaaggggagaagaatgcagtgccgtataatgagaatacgtacctgctgagcgtgaaatccatgctgtatatattgagacggcctcctttgcattttgaggattttgtgaagagccatttccgcaagcgtggccactacatccttaaagcct

SEQ ID NO: 100385 - DNA, 430 bp, Zea mays
cagccaagccccaatctgaatcttgctgcagttggcctaacagcaggatctaatggagggctagggggtccagaccgtatttttgtgggtggcctcccgtattacttcactgaagcgcaagttcgggagttgcttgaatcattcggtcctcttcgagggtttgatcttgtgaaggatagggaaactggtaactcaaaaggctatgcattctgtgtttaccaggacctcaccgtcactgacatcgcttgtgctgcactaaatggtatcaagatgggtgacaaaacccttactgtcagacgagcaaaccagggggcatctcagcccagaccagagcaggaaagtatcctattgcaggcacaacaacaggtgcaattgcagaaacttgtgtatcaagttggagcgctttctacaaaggttgtatgcctcacac

SEQ ID NO: 100386 - DNA, 380 bp, Zea mays
cggacgcgtgggcgcgggatggcgcggcggcctggcggggacggctacggcgcgggccgggaccgcgcgcccacggagatggcgccgctgttccccggctgcgactacgagcactggctcatcgtgatggacaagcccggcggggagggcgccaccaagcagcagatgatcgactgctacatccagaccctcgccaaggtcctcggaagtgaggaggaggcgaagaagaagatctacaacgtctcgtgcgagcgctatttcgggttcgggtgcgagatcgatgaggagacatctaacaagctcgaggggctccctggtgttctctttgtgctaccggattcgtatgttgaccctgagtacaaggactacggagctgaact

SEQ ID NO: 100387 - DNA, 443 bp, Zea mays
ctgaatcctccgcaactcgccgccgccgggaccgaccgacccgatcctatcgatcgaggatgtcgtacgcctacctcttcaagtacatcatcatcggcgacacaggcgtggggaagtcgtgcctgctgctgcagttcacggacaagcgcttccagcccgtgcacgacctcaccatcggcgtcgaattcggcgcccgcatgatcaccattgaaaataagcccatcaagctccagatttgggacacggctggccaagaatcattcagatctattactagatcatactacagaggcgctgctggtgcccttttggtttatgatattactaggagggagaccttcaaccatctcgcaagttggttagaagatgcaaggcagcatgcaaatgctaacatgactgtgatgctgattggaaacaagtgtgatctttctcatagacgtgct

SEQ ID NO: 100388 - DNA, 420 bp, Zea mays
cccacgcgtccggcacactcagctatccagcaaaagagatcgagacgcaggagtcatgggcaccgtcagcgccgtcgtggtgaccaccatcgttgcccgcgccgcgatcgccaggcccaatgctctagggctgcctgcgttgagggcgaggagcgagagggtgcggtgcagctacgccaaggatgccaagaacgcggccccagtcagcaccaagggcgcaggcgcgtcgctgctcgccgcagcgggcgcggtgaccgcgtcggcggagcccgcgctggcgctcgtggacgagcgcatgtccacggagggcaccgggctgagcctcgggctcagcaacaacctgctggggtggatcctcctgggggtcttcggcctcatctggtccctctacaccatctacacctctgacctcgacgagga

SEQ ID NO: 100389 - DNA, 433 bp, Zea mays
ctcgtctccgctcgctctagcgtgggagaaggcggaaccggagtgccactcgtgcgagggcggctcgccaccctcgaccggcggcgtccccctgcctcccgtcagcataccgtcagtcccgctgccccctgtcagcataccgtcggtccccctgccccctgtcagcataccgtcagtgcccctgccgccggtgaccctccctaccattccgatcgttgggggaagcccgagcccgacgaagaagggacaccggaaggcgtgcccaccgcctacgtctaccccgacgccgacacccacgcccacgccgtactcggacaagtgccccatcgacgcgctcaagctcggcgcctgcgtggacgttctcgggaacgaggtgcacgtcggcgacgccaacgtccagtgctgcccgctcgtgaagggcatcgccgggctc

SEQ ID NO: 100390 - DNA, 384 bp, Zea mays
taccggaccggaattcccggcggcgacgccacgcgtccagtcctgcgcgcggagccttcatggccaaccacttctgacctaccactactgccgtaagggagggctcagatacggataccaccagccttattgggaagcccctactttgtcacggtaccgaacatggcttgtgtctctaagaggacctcacacccgttatgctcagccatgatggagacgtccaagaagtctttgaacataacacctgaagctgtccagatcactcgtaggttgaatgaaaacatataatgctaatatacgccctgtaagacactggagcctattactgaggtcagcaatgatcctgttctaggggttgacgctgacaacgtccacgacttccgc

SEQ ID NO: 100391 - DNA, 438 bp, Zea mays
cggacgcgtgggcggacgcgtgggcggacgcgtgggcggacgcgtgggctggcgctgagggcactgggcaggcccaacgccgtggacgggaccatccccgaggtgtcgccggcgctgcgcgaggagttcgtgattgcgtccaaggacgacgaggtcgtggacgcctgagcgagcatccacgcgccagcatgcaagcagcgtcttatctgggccggcgccatcacggggtttcttcttttaatctgggactttgttgttgttggacgaatgaattcccttcgatcggttagctttaatctgtctcgttagtgtgtcgtgttcgtgtagcaccatgccacagctacgccatgccgtgtgctctgtcacgtgggggccattcgtggggtctcctgctgctgtcagaacgaataagagaagatggaattgtggtgaaacaat

SEQ ID NO: 100392 - DNA, 438 bp, Zea mays
ccgctatctgcctccttaccaataaatttatcattcctgagattagcaattatgctgggatgttcttcattcttcttttcgcctccatttttgccactggtatattggagcttagatggagtggtgttggcattgaagattggtggagaaatgagcagttttgggttattggtggcacctctgcccatctcttcgcagtgttccagggtctgctgaaagtgttggctgggattgataccaacttcacagttacctcaaaggcatctgatgaggatggtgactttgctgagctatatgtgttcaagtggaccagtttgctcattcctccgaccactgttcttgtcattaacctggtcggaatggtggcaggaatttcttatgccattaacagtggctaccaatcctggggtccgctctttggaaagctgttcttctcga

SEQ ID NO: 100393 - DNA, 438 bp, Zea mays
gaggcggtgtcgctcatcgcgcaccggctgggccggatggacccgccgctgcggcgggagtgcatcgagcacctctgcgaggcgcactcgcaccggtggagcatgcgccgcagcaaggcccacttcttccgcctcatggcggcgctggcgcccctgttcacggggctcaggtggttcgtcgacgtctgtcactggaagaacccgtccaccaccgtcgcggtccacatcatctacgccatgctggtgtgctgccccaacctcatcatgcccaccttcttcatgtacaagttcctcatcggcctctggaactaccggcgccggccgaggcacccgtggcacgtcgacaccaaggtgtcgcacgccgagatggcgcacctggacgagctggacgaggagttcgacgacttcccgacggcgcgtcgtcccgaggtgatccgc

SEQ ID NO: 100394 - DNA, 433 bp, Zea mays
cccacgcgtccgcggacgcgtgggcggcgccggcgtgctcgtgatctcaacccaaggcgggcctccgctccggtcacccgtcgctccacgcaaccatgtcgaggaggaagatcagggagcccaaggaggagaacgtcacccttggacccactgtccgtgaaggagagtatgtctttggtgtcgctcacatctttgcatccttcaatgacaccttcattcatatcactgatttgtctgggagggaaactctggttcggatcaccggtggcatgaaggtgaaggctgaccgtgacgagtcgtcaccttacgctgctatgcttgctgctcaagacgtcgcacagcgctgcaaggagcttggcattactgcactgcacattaagcttcgcgccaccggaggcaacaagaccaagacccctggacctggtgcccagtc

SEQ ID NO: 100395 - DNA, 438 bp, Zea mays
aacgccggcgccggcaacgtcccagtcgtcgtgtccgagagcggctggccgtccgccgggggcgacgccgccaccgcgggcaacgcgcagacctacaaccagaacctcatcaaccacgtcggccagggcacgcccaagcgccctggccccatcgagacctacatcttcgccatgttcaacgaggaccagaagacgggagccgagtcggagaggcacttcggcctcttcaacccggacaaatcgccggcgtaccccatcaatttctcctaattcctaaacaagacgccgaggtccattccaagacatttataaggcaatacacacacatagatatatacatacacatacatacgggagaaagtagaataaataaactgcctgcagtagaatgcaaagtgtattcatgtaaggcaactgcttcgattatttcctaaagat

SEQ ID NO: 100396 - DNA, 442 bp, Zea mays
  unsure (1)..(442): unsure at all n locations
cccacgcgtccggtgggaggaggccgacggcgaggagctggtgctggtggcccctaacgtcctgtccgtggagcacgcgctggagcgcatggagctcgtgcactcctgcgtcgagaaggtgcgcatgaacctgcgcacgggcgccgtgtcgcgcaccccgctctcggcggggaacctcgacttcggcgtgatccacccgggctaccttggccggcgcaaccggtacggatacctcggcatcggcgaccccatgccgaagatctccggagtggccaagctggacttggaccgcgccggcacgggcgactgcacggtggcgcggcgcgacttcgggcccgggtgcttcgcgggggagccgttcttcgtccccgacgacgtggagggggacggcaacgaggacgacggctacttagtgtgctacgtncacaacgagcgcaccggc

SEQ ID NO: 100397 - DNA, 439 bp, Zea mays
gccgccgccgctgcagtgtccatagccaccgcaggagactgagatggggggttttgtcgagacccacaagagcaatgcatacttcaagcgtttccaggtgaagttcaagagaaggcgcgctggcaagacagactacagggccaggataaggctgattaaccaagacaaaaacaagtacaatacacccaaatacagatttgttgtgcgatttaccaacaaggacatcacagcacaaatcatatctgctagtatagcaggtgatatggttcttgcttctgcttactcgcatgagttgccacgatatggtctcgaagttggtctgaccaactatgcagctgcctactgcactggccttctgttggctcgccgtgcgctcaagacccgtggtttagataaggaatatgagggcaatgttgaggccactggtgaggacttctct

SEQ ID NO: 100398 - DNA, 438 bp, Zea mays
ccgacatcgtctctgcggctcccggcgtgtcgctgcagaaggcgcggtcctgggacgagggcgtcgccaccaagttctctaccacgcctctcaaggacatcttctacgggaagaaggtggtcatcttcggcttgcccggtgcatatacaggggtcttgttcacaagcgcacgttcctagttacaagaagaatattgacaagttgaaagcaaaaggaatcgactctggtatctgcgtagctgcgaatgatctcgtatgtactggatggatgggcaaaaaagctagacgctgaagatacaattgagttctatggcgactatgatgggagtttccacacacgcttggatatggagatagacctttctgctgctgtgcttggccgccgatctcacaggtggctcgcctttgttgacgatggtaagatcaagtgtttcaatgt

SEQ ID NO: 100399 - DNA, 439 bp, Zea mays
tgcttgcagggttggtaaagtgagtgagctttttgtttatcagaacttcagccgtgccggcgttgaatctgttagtgctggtgacatttgtgctgtatgtggaatcgatgatatcatgatcggggaaactatagctgataaagttacaggaacaccattgcccactatcaaagtggaggagccaacagtcagaatgtctttctccatcaatacatcaccttttgttggacgggaggggaaatatgttactagccgaaatctccgtgacaggttgtatcgcgagctcgaaaggaatttggctatgaaagtagaagacggggaaactgctgatacatttcttgttagtggcagaggcacactacatctcacaatattgatagaaaatatgcggagagaaggatatgaatttatgattggacctccaaaggtcataaaacag

SEQ ID NO: 100400 - DNA, 421 bp, Zea mays
cgcgccgccgccgccgccgccgccgcagccgcaacaatgccgtcgcacaagacgggccggatcaagaagaagctggcgaagaagatgcgccagaaccggcccatcccctactggatccgcatgcgcactgacaataccatcaggtacaacgccaagcgcaggcactggcgccgcaccaagctcggcttctgagcgtcgggattggccggctgctgcgtcggaaggctagggtctaagagctatcttccttctgttttatcaatgtgtcagtttttctgtaagctagcaagtgttgctatgacgcttttattaagattctggtgagcggtgatgttaagagaaaattggcactactgtggtgtaccccaagattccttgcagcattgctatgctaagtaaagaaccctttatcttattatat

SEQ ID NO: 100401 - DNA, 440 bp, Zea mays
gaggagcagctacactgcggacggacttcgggcatggagggccagttccaggttggcggggaggaggtcatgcaagcatggtacatggatgacagtgaagaggaccagaggcttcctcatcatcgcgagcccaaagaattcattcctctcgacaaactttccgaactaggaatattaagctggcgcctaaatgctgatgattgggagaatgatgagaacctcaagaaaattcgtgaagccaggggttactcttacatggacatttgtgatgtgtgcccagagaagttgccaaattacgaggctaagataaagaatttctttgaagaacacttgcatactgatgaagagatacgctattgccttgagggcagcggctactttgatgtgaaggaccaagatgatcaatggatccgtgtaacggtaaagaaagggggcatgat

SEQ ID NO: 100402 - DNA, 439 bp, Zea mays
  unsure (1)..(439): unsure at all n locations
cccacgcgtccgcccacgcgtccgcccacgcgtccgcggacgcgtgggggaagactgggggctggacacactgtgtgacctgtatgagaccctggccattacccagagtgtcatctttgtcaacacccgccgcaaggtggactggctcactgacaagatgaggagcagggaccacaccgtttctgccactcatggtgacatggaccagaacactagagacatcatcatgagggagttccggtctggctcctcccgtgtgctcatcaccactgacctgcttgctcgtggtattgatgttcagcaggtgtccctggtcatcaactatgatcttcccacccagccagagaactacctgcatcgtattggtcgtagtggtcgttttggtaggaagggtgttgccatcaactntgtgacccgcgacgacgaacgtatgctgttt

SEQ ID NO: 100403 - DNA, 443 bp, Zea mays
  unsure (1)..(443): unsure at all n locations
gcggcgccttccccaaggccgacaaggccgtcgtcgncgtggaacccaagttctaccctgccgacgacgtcaagccccgcgttcccagcacccgcaagcctaagcctaccaagctcaggtcgagcatcacgcctgggacggcgctgatcctcctcgcaaggcgcttcatggggaagagagtggtgtttctcaagcagctcaagtccggcctgctccttatctctgggcctttcaagatcaatggagtaccgatccgccgtgtgaatcagacctatgtcattgctacatcaaccaaagttgacatctctggtgctgatgtcgccaagtttgatgacaagtactttgccagggagaagaagcagaacgtgaagaagaccgagggcgagctttttgagacagaaaaggaggcatccaagtcactgcctgacttcaagaaggatgac

SEQ ID NO: 100404 - DNA, 416 bp, Zea mays
agcaagcagcgagtacatacatactaggcagccaggcagccatggcgcccaccggatgatggcctcggcggccagcggcgtcgctccgttccaggggctcaagtccaccgccagcctccccgtcgcccgccgctcctccagaagcctcggcaacgtcagcaacggcggaaggatccggtgcatgcaagtgtggccggcctacggcaacaagaagttcgagacgctgtcgtacctgccgccgctgtcgacggacgacctgctgaagcaggtggactacctgctgcgcaacggctggataccctgcctcgagttcagcaaggtccgcttcgtgtaccgcgagaactccacctccccgtgctactacgactgccgctactggaccatgtggaagctgcccatgttcggctgcaacgacg

SEQ ID NO: 100405 - DNA, 442 bp, Zea mays
ctgtttttgatgaccctacagtggagattcaagagttgactgcagtcattaagaaggagatcacggctttgaattctgctgttgtagacctacaagctctctgcaattcacaaaatgagagtggcagtctctccaaggacacatcaaatcattccactacagtcgtggacaacctaaaaaatcgtctgatgagtgcaacaaaagaatttaaagaagttcttaccatgcgaacagagaatttgaaggttcatgaaaatagaaggcaaatgttctcttcgtcagctgcaaaggacgcgtcaaatccattcatccgtcaacgaccccttgttgctagggatccatcagagtcatctgtgcccccagcaccatgggccagcgactctgcatctaccccattattccagaggaagaaaactaatggagaccatggggcatcatcatc

SEQ ID NO: 100406 - DNA, 429 bp, Zea mays
gtccggaattcccgggtcgacgcacgcgtccgctcatgtgagcactagggttgcaggaacaataggatacctggctcctgaatacgctgtgagggggcaagtgacgaagaaatcggatatctatagtttcggcgttttgctactggaaattgttgctggtagatgtaactacaacagtagattgcctcagggagaccagtttctgcttgagaagacatgggcatactacgtgcagggaaagctagagaaggtcatagacgccgaagcaggggaggacctgaacgtcgaggaggcatgccgtttcttgaaggttggcctactatgcgcccaagacgcgatgaagctgcgtccgaacatggccagcgtcgtcctgatgctgataggagagaaaggaatctccgtggacaggatcaccaagccagccgtgat

SEQ ID NO: 100407 - DNA, 442 bp, Zea mays
caaacctaacgtaccctcttccgcgccgccatgtctgggaggaagaagacgcgggagcccaaggaggagaacgtgacgcttggccccgctgtccgcgagggagaacacgtctttggcgttgcgcacatcttcgcctccttcaacgacactttcatccatgtgacggatctgtctggaagggagacgctcgtccgcatcactggtggcatgaaggttaaagctgatcgtgatgagtcctcgccttatgctgctatgcttgcctcacaggatgtcgcgcaaagatgcaaggagcttggaattactgcattgcacattaagctccgtgctactggtggaaacaagaccaaaacccctggccctggtgctcagtctgctcttagagctcttgctcgatctggcatgaagataggccgtattgaggatgttactccagtccccacag

SEQ ID NO: 100408 - DNA, 438 bp, Zea mays
gcaagcagcgagtacatacatactaggcagccaggcagccatggcgcccaccgtgatgatggcctcgtcggccaccgccgtcgctccgttccaggggctcaagtccaccgccagcctccccgtcgcccgccgctcctccagaagcctcggcaacgtcagcaacggcggaaggatccggtgcatgcaggtgtggccggcctacggcaacaagaagttcgagacgctgtcgtacctgccgccgctgtcgacggacgacctgctgaagcaggtggactacctgctgcgcaacggctggataccctgcctcgagttcagcaaggtcggcttcgtgtaccgcgagaactccacctccccgtgctactacgacggccgctactggaccatgtggaagctgcccatgttcggctgcaacgacgccacccaggtgtacaaggagct

SEQ ID NO: 100409 - DNA, 446 bp, Zea mays
cccacgcgtccgcgaatcctctccttccaccatctcgaacctctccttccgtctcctccgcggccgattcttccagtctccagccaccttcaactgccggccgcaagtggccccgcgtctcacccctaaccccagtgaagaatctaggcgtcgtctatccagccccgtcatcatcaccatggaggagcatgggctgtggtccagcggggccagcgacaagaacaagtccatggttgagcagctgcagaggtacggggtcatcaggtcgaccaaagtcgcggaggtgatggaggccatcgacagggggttgttcgtgccacctgggggctcgccataccacgatagccccatgccgattgggtacaatgccaccatatcagcaccacacatgcatgcggcttgcctggagctactggagaagaatcttcagcctgcaatgcgagctc

SEQ ID NO: 100410 - DNA, 416 bp, Zea mays
  unsure (1)..(416): unsure at all n locations
ccgagagtcgtcggggtttcctgcttcaacagtgcttggacggaacccggcgctcgtggcccaccccggccggccgcccatagccagccctccgtcacctcttcaccgcaccctcggactgccccaaggcccccgccgccgctccagcgccgcgcagccaccgccgccgccgccgcctctccttagtcgccgccatgacgaccgcgtccacctcgcaggtgcgccagaactaccaccaggactcagaggccgccatcaaccgccagatcaacctggagctctacgcctnctacgtttacctgtccatgtcttactactttgaccgcgatgatgtggctttgaagaactttgccaaatactttcttcaccaatctcatgaggagagggaacatgctgagaaactgatgaagctgcag

SEQ ID NO: 100411 - DNA, 455 bp, Zea mays
ggcagctccaacctctgggtgccgtcctccaagtgctacttctcgatcgcttgctacttgcactcgcgctacaagtcagggcagtcaagcacttacaagaagaacggaaaacctgctgccatacgctatggaactggttccattgctggttttttcagtgaggatagcgttacattaggtgatctggttgtgaaggatcaggaatttattgaagctacaaaggagccagggcttaccttcatggttgcaaaatttgatggcattcttgggctaggctttcaagaaatctctgttgggaatgcaacaccagtgtggtataacatggtgaaacaaggtctcatcagcgaccctgttttctctttctggtttaaccgacatgctgatgaaggagaaggtggtgaaattgtgtttggtggaatggattctagccactacaagggtgatcacacgtttgt

SEQ ID NO: 100412 - DNA, 403 bp, Zea mays
gtgccctctctctctcttgttcttgttgtgcaggttttgtggtctacttcttcgagaagatctgtgccaggatccccagagggcaggagaagttcctcgccatcatggatctcaagggctggggctacgcaaactgcgacgtccgggcctacatcgcggccattgagatcatgcagaactactacccggagcggctgggcaaggcgctgatgatcaacgtgccctacatcttcctcaaggtgtggaagacgatgatctaccccttcatcgacgccaacaccagggacaagttcgtgttcgtggatgacaagagcctgcgggagacgctgcggcgggagatcgacgagagccagctcccggagttccttggcgggaagatgcctctcgtctccctcaaggacta

SEQ ID NO: 100413 - DNA, 421 bp, Zea mays
atcttcccggatggcgaagggaaagtcaatccagaaggtgtagcgtattacaatggttggataaactatctgcttcagcaaggcatgactccttacatcaacctttaccactatgatcttcctcttgcgcttgagaagaaatatggagggtggttaagcgcgaagatggcggacttgtttacagactatgctgacttctgttttaagacctacggcgatcgcgtaaagcactggtttacattcaatgagccaaggatagtagcgctacttggctatgacacagggtcaaatcctcctcaaaggtgcaccagatgcgctgctggtgggaattcagcaaccgaaccttacatagttgctcataattttctcttggcacatgctactgcagttgcaagataccgtacgaaatatcaggctgctc

SEQ ID NO: 100414 - DNA, 397 bp, Zea mays
agctcccgcaactgccgccgccactcccactcccgcagccatgccgcccaagctcgacgggtcgcaagtggtggacgtgttcgtccgtgtgacctgccgcgaggtcggcacagcgtcttcgctggcccccaagatcggcccggtcggtctttcccccaagaagatcggagaggacatctccaaggagactgccaaggactggaagggccttcacgtcaccgtcaagctcaccgtccagaaccggcaggccaaggtctccgtcgtgccctacgacgcggcgctcgtcatcaatgcgctcaacgagccagagagggaccgcaagaatgtcaagaacatcaagcacagcggcaacatcagcctcgacgacgtcatcgagatcggcaggaccatgaggcac

SEQ ID NO: 100415 - DNA, 499 bp, Zea mays
accggtccggacccacgcgtgcgcgtcaagcttgcttagctagccgccatggcctccctcgccgccgtctccgtgaagcccgtggccatcaagggtctcgccggcagctccatctccggaaggaagctcgccgtcgccaggccgtcggcccgctccatccgcaggccccgcgcagccgccgtggtggccaagtacggcgacaagagcgtctactttgacctcgacgacatcggcaacaccaccggacagtgggacctctacggctctgacgcgccctcgccctacaacccgctacagagcaagttcttcgagacgttcgcggctccgttcaccaagagaggtctgctgctcaagttcctgctgctgggcggcggctcacttctggcctacgtcagcgcgtctgcgtcaccggaccttctgccgatcaagaagggacctcatgagccgacgcagccgggcccgcgcggcaagatctaagctcagcttctccatttgcatg

SEQ ID NO: 100416 - DNA, 387 bp, Zea mays
cccacgcgtccgcctaaataagccatcgattcaggctcttatccatgggctgaacagacgctaggactcgattgcaatcaattaccgaaaaaatgaacttgaggagaaaatgttgctgaacttgcacaaaaagaaatggacagatgggctaattttgaagaggtttgacactcattcaaaaaccaacgagcagactgtccaggaaatgctaaacctagccatcaagtacaacaaggcggtgcaggaggaggacgaactgccacctgagaaacttgcgatagcaaatgtaggtcggcaagatgcaaaaaagcatttggaagagcatgtgttcaatttgatgtcatcaaacatagttcagaccctatgaaccatgctcgacacggttgt

SEQ ID NO: 100417 - DNA, 425 bp, Zea mays
ctcgatcccagcatccgagagagctccacaggccaggtccccatcgccgcggcgcttgcgccacctctcccccgcccggtagtagcctcgccgccgttgccgagatggggttcgtgtccttcgtcgggagggtgctcttcgtcgccgctttcctcctctccgcctaccaggagtttaatgaattcggtgctgatggtggaccagcagctaaggcccttcggcccaaattcaacgggtttggcaaaaatgtatctgctcatctgggagtagctgtgccacacattgagttgaagcatgtgattgctgctacaattggtcttaagggtcttggaagcctcctttttattttgagcagctctctcggtgcttatctcctgctgctgtaccttgctttgatcactcctatcatccatgacttctacaac

SEQ ID NO: 100418 - DNA, 443 bp, Zea mays
gcagtttcccgtcggcaggatcgctcggttcctcaaggccggcaagtacgccgagcgcgtgggcgccggcgcccctgtctacctcgccgctgtcctcgagtacctcgccgctgaggtcctggagcttgctgggaacgcagcgagggataacaagaagacccgcatcgtgccgcgtcacatccagctcgccgtgcgcaacgacgaggagctgaccaagctgcttggtggtgccaccatcgcgagcggcggcgttatgcccaacatccaccagcaccttcttcccaagaaggctggctcgtccaaagcttccaccgtcgatgacgatgacaactgaagcttgccactggagaagaggcattcgctaccgtcttggttcctaggtttagcacgcaattagtcagcatgtctttgagagctcgatgtgtttgggaatgacaatagct

SEQ ID NO: 100419 - DNA, 500 bp, Zea mays
  unsure (1)..(500): unsure at all n locations
ggaattacccgggtgcgacgccacgtccgtccgcaacactaccggggtaaaacgcgggctatgtagcactctgagtgatcgcgctgcatatctgtggtagagggccnagttcgcctgccgagtagtcatcgatgcaagggctgagacanagcacaggcagattatacgaagaattgcttaaaccagtggtgagtgatttcntgatttgtatgaacttcaattacttctgtatgcagcatcatcnttcatatatgctatatcntgctagattatctgtatgacactcccttcctgttgctcactggaacatgtttgtacctcaacttgggagatatttttgtacggctaggccttattctaagaaaacatcaatttaaatgtgggacagagagtttaaggtaaatgaaaatttgaatatcctgttgacttgacacatcattcatttgtgcctagataaaaaggaacgccttcgacttatctactactactacaaacacaaa

SEQ ID NO: 100420 - DNA, 418 bp, Zea mays
  unsure (1)..(418): unsure at all n locations
gctcgctcgatcctagcttcccttccaagaagcgcagcgcccatggccatggccacgcgagcctccgccgccacgcgccacctgctggccgccgcctgggcgccggcggcgaagccgcggcagctgagctcgcagctcgcgctgccgtcgtcgtcctcccgcgggccggccccgctccgcgcgtccaccgaggaggcggtggaggcgcccaaggggttcgtggccccgcagctggaccccagcacgccgtccccgatcttcggcggcagcacgggcgggctgctccgcaaggcgcangtggaggagttctacgtcatcacgtggacgtcccccaaggagcaggtgttcgagatgcccaccggcggcgccgtcatcatgcgggaaggccccaacctcttgaagcttgcgccgcaggagc

SEQ ID NO: 100421 - DNA, 503 bp, Zea mays
  unsure (1)..(503): unsure at all n locations
ttcccgggtcgacgcacgcgtccgcccacgcgtccgccccaatggccgcggcttctccaccggctacgacaacgccgtcacgggcgccgtcgggggcagatgtgaggaggatgagctccacaaggagaacatcaagaacgccgccttcttcaccggcaacatcacgttgagcgtcaccaagagcaacccgtagaccggcgaggtcatctgcgtcttcgagagcgtgcagtcgtccgacaccgacctctgggccaaagcgcccaatgatgtcaagatccagggggtctggtactctcagctcgagtgattcnagtgtctaactgctaggtgtcctaccgtcctcatggatcttgggaaggtgtacgtaccatggaaaacttttgagagcagatgatgaatcgtgtatgtaatgtacttgttaatgcanattcnggctgtcgcttttttatttttttattttcagtgtgggtttcttctctttcttgtgttctcaagaactacat

SEQ ID NO: 100422 - DNA, 451 bp, Zea mays
cggacgcgtgggttccagtgtccgccgtcgtgcgctcgctacccctctccctcgaggcctgggccggcgaggagcgcccaggggcccaccaggatgaagtttgttgctgcctacctgcttgctgtcctcgctgggaactccagcccctctgccgaggacttgacagccattctggagtcagttggctgtgaagttgacaatgaaaagatggaactccttctgtcccaactgagcggtaaggacattaccgagctcattgccgacggcagggagaagtttgcttcagtcccatgtggcggtggcggtgtggctgtcgcggcagctgcccctgctgctggcggcgctcctgcagctgaggcgaagaaagaagagaaggtggaggagaaggaagagagtgatgacgacatgggcttcatcctcttcgactaagcttgtgcaatagtcaagaata

SEQ ID NO: 100423 - DNA, 414 bp, Zea mays
gggtgaaccttaaagctatcaagagactcgtagaggctgaggcacttaagatggaaattattccaaaccccaaggaagttgatggtgtgaaagtccttcaactcgaaaccgcagctggtgcagctattcggttcttcgacaaagcgattggaattaatgttccccgctcaaggtttctcccagtgaaggctacatctgatctgttgcttgtgcagtctgatctttacaccttggttgatggctttgtcatccgcaacccatccagagcgaatccagctaacccttcaattgagcttggacctgagttcaagaaggttgccaatttccttgctcggttcaagtccatccccagcatagttgagcttgacagcttgaaggtttctggtgatgtctggtttggctctggaattacac

SEQ ID NO: 100424 - DNA, 352 bp, Zea mays
gccgccgtcgtcagggcgtccgccgaggcgcaggcgcaggcgcaggcgggccgccgcgccgtgctcgggctggtggccactggcatcgtcggcggcgccttgtcgcaggcggtgcacgccgagaccgtcaagaccatcaagatcggagccccgccgccgccctccggtggactccccgggactctgaactctgaccaggcgagggacttcgacctccccttgaaggagcggttctacctgcagccgctgccgccggcggaagcggtggcgagggtgaagacgtcggcgcaggacatcatcaacctcaagccactcatcgacaagaaggcgtggccgtacgtccagaacgacc

SEQ ID NO: 100425 - DNA, 420 bp, Zea mays
atcctgacggtgcccatcagctccgtgatccacccggggtacgaggaggtggtgcgcggcgagggcatgcccgtccccaaggacccgtccaggaagggcaacctccggataaagttcgacatcaagttcccggcgaggctctcggcggaccagaagtccggcgtcaagaggctgctcgggcagtagagcgcctcgtgttctggtgtgctgtgtgtcagacattttcgtgttggttgatcttgaactgggggatgctgccatttgcagcgtccgtgacgacgacgacgaggaggcaggccaccgagcgctgagtacagaacaagctagtggtggtatatggttgagaccttgagatgcacagcataggattccttgtgcaatcttccagacgggtggtgcttgtctgttcaccggtccatg

SEQ ID NO: 100426 - DNA, 437 bp, Zea mays
gacagagcctaaacccgaaccgaatccggagccaaagccagagccgcaacctaaggcagggcctaagcctgagccggaaccagaaccaaagccagagccacaaccaaagcctgagcctaaaccagaaccaaaaccagagccaaagccagagcctaagcccgaaccaaaaccagagccaaagcctgagcctaaacccgaaccaaggccagaacctaagccagagccaaagcctgagccgaaaccgaaaccagatccaaagccagagccacaaccaaagccagagcctaagccagaaccaaaaccagagccaaagccagagcctaagcccgaaccaaaaccagagtcaaagcctgagcctaaacccgaaccatgaccagaaccagaaccaaagccagagcctaaacctgaaccataaccgaaaccatgaccggagccac

SEQ ID NO: 100427 - DNA, 440 bp, Zea mays
gccgccaatcccacccagctctgccggtcccgcgcttcgctgggcaagccggtgaaggggcttggcctgagcatgggccgcgagcgcgcccagcggagcattgtgtgccaggcggcgagcagcatctccgccgaccgcgtccccgacatggagaagcggaagctgatgaacctcctcctcctcggcgccatctcgttgcccaccgtcggcatggtcgtcccctacggcgccttcttcgtccctgccggctccgggaacgccggcggcgggacctacgcgaaggacaagctgggcaacgacatcacggtggaggcgtggctcaacacgcacggtcccaacgaccgcacgctcgcgcatgggctcaaaggtgaccccacgtacctggtggtggagcatgacaagacgctggccatctacgggatcaacgccctgtgcactca

SEQ ID NO: 100428 - DNA, 423 bp, Zea mays
atcttcccggatggcgaagggaaagtcaatccagaaggtgtagcgtattacaatggttggataaactatctgcttcagcaaggcatgactccttacatcaacctttaccactatgatcttactcttgcgcttgagaagaaatatggagggtggttaagcgcgaagatggcggacttgtttacagactatgctgacttctgttttaagacctacagcgatcgcgtaaagcactggtttacattcaatgagccaaggatagtagcgctacttggctatgacacagggtcaaattctcctcaaaggtgcaccaaatgcgctgctggtgggcattcagcaaccgaaccttacatagttgctcataattatctcttggcacatgctactgcagttgctagataccgtacgtaatatcaagctgctcag

SEQ ID NO: 100429 - DNA, 390 bp, Zea mays
gccgaggtatacagcgatccgtcgaaaatccacatggaactcaactggacagcccagtacactgatcttggccaaagcctcgcccaggcgtggaaatggcagaaagcgcacccgaacggatatggaccagcctgattcagagttcaaagattgagagagactcgtcacgcagatccaaagggtccatgtgcagtcatgtagccttcagacagttggttcttcatcaccatagaaagatagcaaagagcaacagaagagtcctgattcttttattgcagcgctcgaagaaggaaaaaatatcacagagaaccccctacctgctccttgattagtttcaaatatatatatataggtcctcgttgacattttaaatataattgatgtgtgctg

SEQ ID NO: 100430 - DNA, 366 bp, Zea mays
cggacgcgtccgcccacgcgtccgcccacgcgtccgggccgacgccgccgcgcggagcggcaagtcgctggccaacgagatgaaggtcgggtacgtggagtcggcggggtcgtcgccggcgaagacggacctcgcggagctggcggcgctgctggccaagaacctggtcgacgagaccgccgcggtggcggcgttccagggggacgtgctcgtgtacggcggcgccaacctgacgctcgtggacatggagcaggtggacctgtacgggctcgagatcaaggggcagcgcccggtccacgtggagtacggcatggacggcgtcggcgacgagggcgcggtgctggtgcagcccgaccgccgacgggc

SEQ ID NO: 100431 - DNA, 445 bp, Zea mays
cccacgcgtccgcagcagtcggacgagcagaccaaggcggagatcatgcaggtgctgcggaagatgttccccggcaaggacgtcccggacgccaccgacatccttgtcccgagatggtggtccgacaggttctacaagggcaccttctccaactggccagttggcgtcaaccgctacgaatacgaccagcttagggcaccggttgggagggtatacttcaccggtgagcacaccagcgagcactacaatggctatgtccatggagcctatctttcaggtatcgactccgctgaaattctcatcaactgcgcccagaaaaagatgtgcaagtaccatgtccagggaaagtatgactaggaagctacagcaaattgatttaaagctccagcaaattgagcagtgtggatgttgcatttctcagttcattttttccctggtttcaaca

SEQ ID NO: 100432 - DNA, 426 bp, Zea mays
cagacttatttgttccttggtgctggggatgctggaactggtattgcagaacttattgcgcttgagatttcgaaacagacgaatgctccaattgaagagtgccgcaagaaggtttggctggtggactcaaagggtttgattgttgactctcgtaaaggctcccttcagccattcaagaaaccttgggcgcatgagcacgagcccttgaaaaccttgtatgatgctggtcactccatcaaacctacagttctgatcggtacatctggagttggaagaacattcacaaaagaaatcattgaggccatgtcttccttcaacgagaggcctatcatcttttcactgtcaaacccaacctcgcattctgaatgcactgctgaacaagcatatacctggagtcagggccgttcaatctttgccagtggcagt

SEQ ID NO: 100433 - DNA, 319 bp, Zea mays
  unsure (1)..(319): unsure at all n locations
tcccgggtcgaccgacgcgtccgnccacgcgttcgnccactcgtncgtccactcttncgnccacgcgtccgccaacgtgttctgcaagcccaaggcgagcacggagtacatcgcgtacagcggcgacggcttcaagctgctgatcccgtccaagtggaaccccagcaaggagcgggagttccccgggcaggtgctccgctacgaggacaacttcgacgccaacagcaacgtgtccgtcatcatccagcccacgtccaagaagaccatcgccgactacggctctcccgaggagttcctctcccaggtcgactacctgctc

SEQ ID NO: 100434 - DNA, 440 bp, Zea mays
  unsure (1)..(440): unsure at all n locations
gacccacgcgtccgcccacgcgtccggccaggtggtgctcatgggcgccgtcgaggggtaccgcatcgccggtggcccgctcggggaggtggtcgacccgctgtaccccggcggcagcttcgacccgctcgggctcgccgacgacccggaggcgttcgcggagctcaaggtcaaggagatcaagaacggccgcctcgccatgttctccatgttcggcttcttcgtgcaggccatcgtcaccggcaagggtcccgttgagaacctcgccgaccacctcgctgaccctgtcaacaacaacgcctgggcctacgctaccaacttcgtccccggcaagtgagcgagggcatatacatacttgtatgcgtgtaccgtagacatacgtattcgtatatgtactgcangagatgtaccagtatttgtgaagaagggagcatgggctc

SEQ ID NO: 100435 - DNA, 441 bp, Zea mays
ctcaactgttggacaatgggcacggatagagaatatgaccatcctgggcgaggatgttcatgtgtgtgacgaggtatacagcaatggcggtgttgttctcccacataaagagatcaagtcaagcattttgaagcctgagatcgtcatgtgagagttctccagttttaactacagtacattcttaagttcttcgactaagtgaggattgcagatccccttttataagtgatatctattggtatctttggcctaattcaaacagcttcagacatgttcgcttgctaaactgttgacgatgtatccttgttctttgttgaaaaagtttgtacttgtagtgtcaatcatatttcacaagtggttgtcatatatactgagggaggttttggacccttgatctacagaagttcaatacaatagtagcaggaataagttatttttttt

SEQ ID NO: 100436 - DNA, 450 bp, Zea mays
attcttttccaagtttgggaaggttgtggagcatgaaatcatccgtgaccatgcaaccagccggtcacgtggatttggttttatagtctttgatgcagaaaaagcagtagatgatttattacataagaagggcaatatgattgatctaaatggttctcaggtggagatcaagaaggcagaaccaaagaaaccctctaaccaaccacctcgttcacttgatagtgagcctaggggccgtccatatgcagacagttatgatggatttggcagctcttacaattatggtggtagttttggtccctatagatcacctcgaagttttggcgctaggcctagcagctacagtagtgcttatggtcctggtgattatggtagtggctatgctacttatggtggagcattagtaggataccgtgaacctttcctttattctaatcgctatggtagcac

SEQ ID NO: 100437 - DNA, 426 bp, Zea mays
cgctgtgaatgcgcccatggtcccagctgagatcctgtcagagctggctccatatgtttgtctggccgagaagctcgggaggctggcggtgcagctcgtggccggcgagagcggcatcaagggcgtgaaggtggtgtacaccacagcgcgtggccccgacgacctggacactcggctcctccgcgcgatggtgaccaagggcctggtggagccggtgtccagcacgttcgtgaacctggtgaacgcggactacacggccaagcagcgcggcctccgcctcacggaggagcgcgtggcgcacgacagccccgcggcggaggcgccgctggagtccgtccaggttcgcctctcgcacgtgcagtccaagttcgcgggtgccatcagcgacggcggggacgacatcgtcctggagggccgggtcaagta

SEQ ID NO: 100438 - DNA, 299 bp, Zea mays
cggacgcgtgggaagagcctcaaggagctcaccggcaagctcttcagcaccatcggcgggcttgaccatgccgcgaagatcaagagcacccctgaggccgagaaatacttcgcagcaaccaaagatgctcttggcgatgttctcgccaagctaggctagacgcaatggctaataatggccatgtaatttcggacttgtgtttgttcatatggacccggcaaggcaatgtaccattttctgttgatattgtatcaggaagcacttaactacaatgctatcttgagtccttgacaaagtac

SEQ ID NO: 100439 - DNA, 469 bp, Zea mays
gagcgaggcaggcaacccaccaccgagaggcagggacaggaacaggaagccggaggcgaggatgtcgtcggtgttcagcggcgatgagacggcccccttcttcggcttcctcggcgccgccgccgccctcgtcttctcatgcatgggcgccgcgtacgggaccgcgaagagcggcgtcggcgtggcgtcgatgggtgtgatgcggccggagctcgtcatgaagtccatcgtgcccgtggtcatggctggtgtgctcggtatctacgggctcatcatcgccgtcatcatcagcacggggatcaaccccaaggcgaagccctactacctctttgatggctacgcccacctttcgtccgggcttgcctgtggtctcgctgggcttgcagctggcatggccatcggcattgtcggtgatgctggagtcagggcgaatgcgcaacagccaaagcttttcgtcggcatgatcctc

SEQ ID NO: 100440 - DNA, 429 bp, Zea mays
  unsure (1)..(429): unsure at all n locations
cccacgcgtccggcggccggtctctgctttcagattcatttctaaccagggttcctccaggccagccgccggcactgttgaggagctcacatcgcctcgacacaacacggtctctggtttcaacgtataataactgggctgcgagcactatatggatgatggcttcacgaggcaccagtgccgtgctttcaagggctgctcggatgaggcaaaaactgcagtctgccttggaggccagtgccctagatattgaagacgtttcttaccaacatgccgggcatgcagccgtcaaggacaatgcgaacgagacgcacttcaacatcaaggttgtttcaccaaaatttgaggggcagaaccttgtgaagcgtcacaggatggtgtatgatcttctgagggatgagcttagctcaagcctncatgctgtctcca

SEQ ID NO: 100441 - DNA, 495 bp, Zea mays
ccggcattcccgggtcgaccgacgcgtccgcacgcagctagctaggagcagcagcagcggcggcgatggcggcctccatgatctcctcggagctctggcggtggcgcctgagggcctgcacgccctcggccgccgcgcctcctccttcgccgtcgtctgctccaagaagaagatcaagaccgacaagccctacaggattgggggtggcctgaccgtcgacgtcgacgccaacgggagaaagggcaagggcaagggcgtgtaccagttcgtcgacaagtacggcgcgaacgtcgactgatacagcccaatctacaacgaggatgactggtctcccaccggcgacgtctacatcgagtgaaccactgggcttctgatctgggccgtcaccctcgctgggatcctcggcggcggcgccctcctcgtctacaacaccagcgcactctgcggctaatgatatccaatgcatgcgcttcttgcgattcgtcatgtaaaatc

SEQ ID NO: 100442 - DNA, 474 bp, Zea mays
ccggcattcccgggtcgaccgacgcgtccgcgaagcgcgcacaaagagaagaacctcggtgctgagatggcacaagccatggcgtcgatgagaggcctctggcagggcgtgctgcccagcaggcgcgccgacagcagaaccaggacggccgtcgtcgtcgtcagggcgtccgcagagggcgacgccgttgcgcaagcgggccgccgcgccgtgatcgggcttgtggccactggcatcgtcggcggcgccttgtcgcacgcggcgcgcgccgagaccgtcaagaccatcaagattggagccccgccggcgccctccggtggactccccgggactctcaactctgaccaggcgagggacttcgacctccccttgaaagagcggttctacctgcagccgctgccgtcggcggaggcggctgctagggtaaagacatcggcgcacgacatcatcaacctcaagccgctcatcgacaag

SEQ ID NO: 100443 - DNA, 418 bp, Zea mays
  unsure (1)..(418): unsure at all n locations
ggagaagatgacccaaattatgtttgagactttcaatgttcctgccatgtatgttgcaatccaagcggtgctctcactctatgctagtgggcgtactactggtattgtactcgactctggtgatggtgtgagccacactgtgcccatttacgaaggatatgcccttcctcatgccattcttcgtttggatcttgctggtcgggacctcacagactccctcatgaaaattctcactgagaggggttactccttcacaacctcagccgagcgagaaattgtaagggacatcaaggagaagctagcatatatagcccttgactatgagcaagagttggaaactgccaagaacagctcttcagttgaaaagagctatgagctacctgatggacaagtaatcaccattggtgcanagagattc

SEQ ID NO: 100444 - DNA, 340 bp, Zea mays
cccacgcgtgcggtgactgtaagccgctggagtacaagctctcggcctggcacctcataagctgcgggtgcatgtgccaaggccgcgacttcacccgcagaaacggcaccggcggagagtccatctacggctagaagttacccgacgagaagctcgtgcgcaagcacaccgtccccggtgagctatccatggtcaacgccgggcccaacagcaacggctctcagttcttcatctgcaccgtcgcgaccacttggctcgactgtaagcacgtcgtcttcggtcaggtacgctagggcatggacgtcgacaaggccatctagacagtgggcactcgcaacgg

SEQ ID NO: 100445 - DNA, 441 bp, Zea mays
  unsure (1)..(441): unsure at all n locations
cccacgcgtccgggttttcgcgccgccgccgccgccgccgccgcagccgcaacaatgccggcgcacaagaccttccggatcaagaagaagctggcgaagaagatgcgccagaaccgccccatcccctactggatccgcatgcgcactgacaataccatcaggtacaacgccaagcgcaggcactggcgccgcaccaagctcggcttctgagcgtcgggattggccggctgctgcgtcggaaggctagggtctaagagctatcttccttctgttgtatcaatgtgtcagtttttctgtaagctagcaagtgttgctatgacgctnntattaagattctggtgagcggtgatgttaagagaaaaatggcactactgtggtgtaccccaagattccttgcagcattgctatgctaagtaaagaaccctntatctntatatatat

SEQ ID NO: 100446 - DNA, 386 bp, Zea mays
ctttgataaatatggcagggtcgcatatgtaagaatcaagaagaactttgactttatcgggtttgagatacaggacgatgctacaagagcattggagggtactaatggaagccatttcatggacagggtgatctctgatgagtatgcacttcgtgatgacgatgaataacgtgatagaggtaacgtgtacagcccatacaggagaggtagtgaaagatccgcaggtcgaaagcgatcttctagtccctacggtggaggaccggagagaggtagcccagattactggagaagcaaggagagggggagcccatactatggctggagaagacgcagtcctgataatggcaatggagtaagctcatctggtcgtagcagaggcgatcatg

SEQ ID NO: 100447 - DNA, 452 bp, Zea mays
cccacgcgtccggcgggatcgagactacgtcgacctcggtgggagctgaggccgtcaccgggcaggtcacggaggtcaacaaggacaccttctggcccatcgtcgaggccgccggcgacaaggtcgtcgtcctcgacatgtacaccgaatggtgcgggccttgcaaagtgatggctcccaagttccaggagatgtccgagaagaacctggacgtcgtgttcctcaagctggactgcaaccaggacaacaagcctctcgcgaaggagctgggcataaaggttgtgccgacgttcaagatcctcaagggcgggaaggtcgtgaaggaggtcaccggcgccaagatcgacgagctagcggaagccatcgagatagccaacaagaagtcaggctgacaaaggaatagcaagatcgacgtgcagtgcaagcaaggatgaatggatgatcgatgaact

SEQ ID NO: 100448 - DNA, 438 bp, Zea mays
gattcttgaagagatcgagcttcttttgcaccacaaggtcgaggatgtcttgcaactgcggatcaagctgcggctgcggctcaagctgcaagtgcggcaagaagtaccctgacctggaggagacgagcaccgccgcgcaggccaccgtcgtcctcggcgtggccccggagaagaaggccgcgcccgagttcgtcgaggccgcggcggagtccggcgaggccgcccacggctgcagctgcggtggcaactgcaagtgcgacccctgcaactgctgatcacatcgatcgacgaccatggatatgattattatctatctagcttgtggtggtggttgaacaataataagcgaggccgagctggctgccatacataagtattgtgtggcgtgtgtgagagagagagaaacagagttcttcagtttgctatctctctctgcat

SEQ ID NO: 100449 - DNA, 401 bp, Zea mays
cccacgcgtacgaccgtgctgaccaggacttctgacggcgactagggctgcaagcaccaggtcatcaccgggaccgtctccgacggcaagctctacatctgcaatgcgcaggccggctacaagcggtggttcaagggcgccaggaacggcgtcgagaaggccgccgcctacttcagcgtcgcgtgaccgacgtaaactattgtgtctttgatgcttctcatcacggatgcacatgcacgcaccgcgtgtacgtatagagctaggcatggcctggctcgacatgcttgttgcgtgtttctttgattgtacatgagaggacccgtttctgctgccatccaagctgtttgagaaatcttggtactaatattgcttcatctgttctgtttttaaaagaaaaatac

SEQ ID NO: 100450 - DNA, 388 bp, Zea mays
  unsure (1)..(388): unsure at all n locations
cacaaggttcgagttcgtcaccgtctagtacgactgtgcgagggaggaagaggcgaggagaagatgcagatcttcgtgaagaccctgacggggaagaccatcaccctcgaggtggagagcagcgacaccgtcgacaacgtcaaggccaaaatccaggacaaggaagggattcccccagatcaacagcgactgatattcgctggcaagcagctggaggatggacgcacgctggctgactacaacatccaaaaggagtcaactcttcatttggtcctcaggcttangggtggaaccatgatcaaggtcaaaactctcactgggaaagagatcgagatcgacattgaacccactgactcgattgacaggatcaaggagcgtgttgaagaga

SEQ ID NO: 100451 - DNA, 433 bp, Zea mays
cccacgcgtccgcaggacgcttccccgccgagtgcttctcaacgcagttggcgaatccggcatggttgcttctggtgacacattgcttggtttgtatgagaaagaacggttaggcctgttgcagtatgccgacgatgagtctaaagaagagaggtactgggaaaccttggatgctgatttgcgttactggaccagatccctgcgcccagtgcagtggtatcctggtcatattgcaaaaacagagaaagaattgaaggaacaattgaggctcatggatgtcgtcatagagatccgtgatgctaggattcccttgtccaccagccatcctaagatggactcatggctaggcaaccggaaaaggatcatagtcttgaatcgcaaggacatgatctcaactgaggatatgaatgcatgggctacttactttggtaat

SEQ ID NO: 100452 - DNA, 477 bp, Zea mays
ggcagcttctcatcaaatcagaccctggtgaagttgttaaacctgaccaattcaaggcgagtaacgattaggggatgccaatttaccagaggcctttcatgaaggggaagctgtacatccatttcacggtggagttccccgactcgctggcaccagagcagtgcaaggctctcgagacagtacttccaccaaggccttcatccaagctgacatacatggagatagatgaatgcgaggagactactatgcatgatgtgaacaacatctaagaagagatgcgcaggaagcaagctcacgctgcccaagaggcgtacgaggaggacgactagatgccgtgcggagcccagagagtgcagtgcgcgcaacagtgagcagactatcatcaaggcaattgggaggcgtggtgcccttaaagcatgggagtgatctctggttttgctgtcgccgagcttggaaatatgaagctgaatcgacctc

SEQ ID NO: 100453 - DNA, 475 bp, Zea mays
atcacgaggaggcaggggagcagcatccacaaccacaagccatggcggggagggccaacagccccactaacaactccgccctcatcgcaatcatcgccgacgaggacaccgtcactggcttcttgatggccggcgttggcaatgttgatctgcgcaagaaaaccaactacctcctcgtcgacaacaagacgacagttaaacaaatcgaggatgcgttcaaagaatttactacgagggaggatattgctattgtgctcatcagtcagtatattgccaacatgataaggtttctggtggatagctacaacaagcccgtccctgctattctggagatcccatccaaggaccatccatatgatccagcgcacgactctgtgctctctcgagtgaaatatctgttctctgcagaatcggtggcgtctgataggcgatgaaggcatccttgcgtagcagtacccttcgatgcatctatttt

SEQ ID NO: 100454 - DNA, 359 bp, Zea mays
gctgaagtaactgcaattagagaggcttgcaaaaagcttgggaaaattgagctctcagactgcgaaatttacgcgtcctgcgagccatgcccaatgtgctttggtgcagttcatctctcccgaatcaagaggctggtttatggggccaaggcagaggctgccatcgccattggatttgatgacttcattgcagatgctctgagaggcactgggttctaccagaaggccaacttggagatcaagaaagctgacggcaatggtgcattgatcgctgagcaagtctttgaaaagactaaagagaagttccagatgtactgatgctgagcagaagagagatctcagatttgtacaatgcttac

SEQ ID NO: 100455 - DNA, 414 bp, Zea mays
  unsure (1)..(414): unsure at all n locations
cccacgcgtccgcccacgcgtccggtcccgcaccacgcccgcgagcacacggtggtggccggctacgacgtccccgccggtgcgcgcgtgctggtgaacgtgtgggccatcgctcgcgaccccgcgtcatggcctgacgcgcctgacgcgttccggccggagcggttcttgaacggcagctccggcgccagcgtcgacgtgcgcggcgcgcactttgagctgctgccgttcggggccgggcggcggatgtgccccgcgcacggcctcgcgatgaagctggtgaccgctggcgtggcgaacctggtgcacgggttcgcgtggcggctgccggacggtatggcgccggaggatgtgagcatggaagagctatttgggctttccacgcgccggaaggttccgctcgtcgncgtcgcg

SEQ ID NO: 100456 - DNA, 415 bp, Zea mays
cccacgcgtccgcggacgcgtgggctgacgctggcgtcaccgaggtctatgttcatcagccaggtgattggcaccggaatggggtgtgtcatcgggccctgcatcttctggctcttctacaaggcgttcggtgacattggcgagagcggcaccgagtacccggcgccctatgccatcgtgtaccgcaacatggccatcctcggcgtggatggcttcggctcgctcccgaaaaactgcctcaccctctgctacattttctttgcggcagcgatcactatcaaccttgtcagggacctgaccccctacaaggtgtcgaggttcatcccgctgccaatggcaatggcgattccgttctacatcgggtcctacttcgccattgacatgtttctgggcagcgcgatcctcttcgtgtggg

SEQ ID NO: 100457 - DNA, 477 bp, Zea mays
atcgctcgatcctagcttgccttccaagaatcgcagcgcccatggccatgtccacgcaagcgtcctccggcacgcgccacctgctggccgacgactgggcgcctgcggcgaagccgcggcagctgagctcgcagctcgcgctgccgtcgtcgtcctcccgcgggccggccccgctccgcgcgttcaccgatgaggcagtggaggcgcccaaggggttcgtggccccgcagctggaccccagcacgccgtacgcgatcttctgaggcagcacgggcaggctgctccgaaaggcccaagtggaggagttcatacgtcatcacgtggacgtccaccaaggagcaagggttcgagatgcccaccggcggcgccgccatcatgcgggagggcccgaacctcttgaagctggcgcgcaaggagcaatgcctggtgctcggtaccaggttgcgctacaagtacaagatcagctaccagatctac

SEQ ID NO: 100458 - DNA, 463 bp, Zea mays
cccacgcgtccggcccgccggcgagtacgggtactccgagaccgaggtggtcaccgccagcggcgagggcgagtacgagaggtacaagaaggaggagaaggagcacaagcacaagcagcacctcggcgaggccggcgccatcgccgccggcgccttcgcactctacgagaagcacgaggcgaagaaggaccccgagcacgcgcacaggcacaagatcacggaggaggtcgctgccgcggcggccgtcggcgccggcggctacgtattccacgagcaccacgagaagaagaaggaccacaaggacgccgaggaggctagcggcgagaagaagcaccaccacctcttcggctgaccgtagtaccggccggcgcgcgaccgagctagctagctccggcgcacacaaccacacacctgtttaattctgtactgcatgcgtgtgtaatttgatggttcacaataatga

SEQ ID NO: 100459 - DNA, 470 bp, Zea mays
cccacgcgttcggaccgtcggcgagtacttttactccgagacctatgtggtcaccgcctcgagcgtattcgactacgagaggtacaacatggaggataacgagtacaagcacaagcagcatctcagcgaggccgtcgccatcagacgcggctccttctcactctaccagaaacactaggcgaagaaggacccttagcacgcgcacagtcacaagatcaccgacgacgtcgctgcctctgcggccgtctgcgcctgcggctacgtattccacgagcaccactagatgaagaatgaccacaatgactccgatgaggctagctgcgagaataatcaccaccacctcttcggctgaccgtagtaccggacgtcgcgcgaccgagctagctagctttctcgcacacaaccacacacctgtttaattctgtactgcatgcgtgtgtaatttgatggttcacattaatgagtcccta

SEQ ID NO: 100460 - DNA, 411 bp, Zea mays
  unsure (1)..(411): unsure at all n locations
tggacttttacgtcgttctggaacgagctggttatcgtgttgcacgtcggcgcangtgcaagtcccgtgttggcatccagcacagggtgaccaaagaagacgccatgaagtggttccaggtgaagtacgagggtgtcatcctcaacaaggcccaaaacacctcgtaatcattgatagtcatcaaacgacttgcccttaattctgtgtactatgaacaaaacaccccgtgtttggttcaagtataatctgtgtactatgaattctgtgtttgttggataccaaatgcactgccagttttgcgtctgtgcccgtaattccatcttgataatcagactagcagttaggaacaaataactgttgttttgattgtgttaatttgagctcgccagcaaaatctaaggaacatcaaaa

SEQ ID NO: 100461 - DNA, 429 bp, Zea mays
  unsure (1)..(429): unsure at all n locations
cccacgcgtccgggaggcccccgtcgagaagacggagttcgacgtgatgatcgaagaggtgcccagcagcgcgcgtatcgccactatcaaggtggtgcgcgcgctcaccagcctcgcgctcaaggaggccaaggaccttatcgagggtctccccaagaaggtcaaggaggccgtcagcaaggacgaggccgaggacgccaagaagcagctcgaggaggtcggcgccaaggtgtctatcgcgtgacactaggtatacgaggactccttttttttttctttagtttcttttgtttgcatccccaatctcttgtatccccactatcgttcgtaaggaattgcntgttcatgatatgagatctgtgtatgtgtcgattcactagcttatatgtgtgtgatatatctctgccttgaattggcagtgaatgtgat

SEQ ID NO: 100462 - DNA, 450 bp, Zea mays
  unsure (1)..(450): unsure at all n locations
agcttctggtaaactcagatactcctcaggaggttgaagccgggaaggaaatcatatttagctatgatgtaggcttcgaggagagtgatatcaagtgggcttctcgctgggacacctacttgttaatgatagatgatcaaattcactggttttctattgtgaactctctcatgatcgtactcttcttatctgggatggtggcaatgattatgctccgcaccctgtatagagatatctctaggtacaatcagcttgaaactgaagaagaaacccaagaagagacaggatggaagcttgttcatggagactgtattccgccttctgcaaactctgacttactctgtgtctgtgttgggactggtgttcagttcttcggtatgctgctagtaaccatgatncttgctgntctgggtttccttttaccatcaaaccggngaggactgatgactg

SEQ ID NO: 100463 - DNA, 440 bp, Zea mays
cccacgcgtccggcccgccggcgagtacgggtactccgagaccgaggtggtcaccgccaccggcgagggcgagtacgagaggtacaagaaggaggagaaggagcacaagcacaagcagcacctcggcgaggccggcgccatcgccgccggcgccttcgcactctacgagaagcacgaggcgaagaaggaccccgagcacgcgcacaggcacaagatcacggaggaggtcgctgccgcggcggccgtcggcgccggcggctacgtattccacgagcaccacgagaagaagaaggaccacaaggacgccgaggaggctagcggcgagaagaagcaccaccacctcttcggctgaccgtagtaccggccggcgcgcgaccgagctagctagctccggcgcacacaaccacacacctggttaattctgtactgcatgcgtgtgt

SEQ ID NO: 100464 - DNA, 444 bp, Zea mays
cccacgcgtccgtttagaaactatgacagcaaatggatttgaaattgatgttgtcacatgtggaacactcattaatggtctatgcaaggctggtaggactcaggttgctttgaagcttttaagaggcatgcgaattaaagggattagacctactccaaaagcttacaacccggtgatacagtctttgtttagactgaataatttaagagatgctcttagtcttttcagggagatgactgaggtgggtgagcctcctgatgccctcacatataagattgttttccgtggtctgtgtcgtggtggagggcctatcaaagaagcttttgatttcttggtggagatggtgaataagggtttcatgcctgagttttcatcctttcgaatgctagctgaaggtctattgaatctgggcatggatgattatcttattagtgctattgaact

SEQ ID NO: 100465 - DNA, 417 bp, Zea mays
gctttgcgggcatgaaaaagaagaagaagatacatgtggaacttgattcttctcttaccgagaccggagatgttgatgacacaggagacgatcaagttagagaggatgaagaaggagaagggattgtgctcgctggtgccgctgccaccagatacccttgggaaggaactgacagagattataagtatgaagagctgcttggcagagtattcaacattttgcgtgagaacaacccggatcttgctggtgatagaagaagaactgttatgaggccccctcaagtcctcagggaaggaacaaagaagacagtttttgtgaacttcatggacttgtgcaaaacaatgcataggcaaccagaacatgtgatgatgttcttgcttgctgagatgggaacaagtggatccctggatgggcaac

SEQ ID NO: 100466 - DNA, 451 bp, Zea mays
gcttgcttctcagatttgcagacgattcttatttggacagctatatcagcacaattgggggtgatttcaaaattcgcacagtggagcaagatgggaagaccataaaacttcaaatttgggatactgctgggcaagagcgcttcaggacaatcactagcagctactaccgcggagctcatggaatcattattgtatatgacgtgacagaccaagaaagcttcaataatgtgaagcaatggttgaacgagatagaccgttatgcaagtgataatgttaacaagctccttgttgggaacaagagtgaccttactgccaacaaagttgtggcaactgagacagcaaaggcgtttgctgatgagatgggcatcccattcatggagacgagtgccaaaaacgccatcaacgtggagcaggccttcatggctatggctgcatccatcaaggataggat

SEQ ID NO: 100467 - DNA, 390 bp, Zea mays
  unsure (1)..(390): unsure at all n locations
ctgcccttctcctgccgtgcggggtcctgctcctcctgcgccggcaaggtcgtttctgggtccgtcgaccagtccgaccagagcttcctaaacgacaaccaggttcgcgacggttgggtgctcacctgcgctgcgtaccccacctccgacgtcgtcatcgagacgcacaaggaggatgacctcctataattctagctagctatacaccgncagggcccgtcgtcttgtgccaccacatgcagtaccgaccgcgcacgagatgagacgtgtcgtctcaataattctagctatatatatatatatgcatgcatgcatgtacttttccctgttccaaactgagtatattctaaattacaagatttaatcacaaggtttagagcaaaaaataaa

SEQ ID NO: 100468 - DNA, 449 bp, Zea mays
cgtcgtcgggctcaagcccgccgttgcagtgccgcaggccgccgccgcctcatcggcggggaagcgggtgcagctggccgcgcccgagggccgccgcgccgctctgctcggcctggcggccgtcttcgccgtcacggccaccaccgggtcggccaaggccacgatcttcgatgagtacctcgagaagagcaaggccaacaaggagctgaacgacaagaagaggctggccaccagtggcgccaactttgcgcgcgcctacaccgaggagttcggcagctgccagttcccctacaacttcactgggtgccaggacctcgccaagcagaagaaagtccccttcatcagcgacgacctctagattgagtgctaggtgaacgagaagttcaagtgcggcttcaacgttctctggaagtggcgaatcaactagcagcagcgtttgatgggaatgg

SEQ ID NO: 100469 - DNA, 451 bp, Zea mays
cccacgcgtccgcggacgcgtgggcgggctatggccggactacgacgactggacctggccgtcgtgctgccgccgcacccaattcgagatggacaagatattgccactgaaggaggtgcttgacaagtactggccgtccctctactgctccaaatctggaacatgcttcagcggcaagggactcttctgggctcacgagtgggagaaacatggaacctgctctgcccctgtggttcaggatgaattacagtatttcacccttgcccttgacctctactccaagtataacgttacggaaatgctgtcaagtggagggatacaggtttcaaatggtaaggaatatgcactgagcgatgtcatcgataccatcaaacatgcttttgggggatcgccacatattgtttgcaagaggggttcaatcgaagaacttaggttatgcttcgacaaagaa

SEQ ID NO: 100470 - DNA, 441 bp, Zea mays
gttcaaagttatattgacaagggattcagagcgatcgaaaagctgttggaaggatgtgagagtaaatatgctactggagatgatgtccaattggcagatgtgttccttgaaccacagatacatgccggcataaatcgcttccaaatcgatatgtcgatgtacccaatcttggagaggctccatgatgcatacatgcaaattcccgcattccaagccgcgcttcctaaaaatcaaccagacgcaccttcatcataatcatcaagattatctcaataatttgcatgtcattttgtaataatttggatagggagccactgcttcctccatcccgttgtggatcaaaagggtgaacgattggcacttacctgcatggtccaatacctattatatttcttaaacagatactatttacggctattgtaatttaagcccaatacctgc

SEQ ID NO: 100471 - DNA, 466 bp, Zea mays
ggtgatcgggaaggtgcggtcgacgatcgggctggacaagtcggacccgagcgtggccgacgcggtggcggagctccgggacctgtccaactcgtgggtggccaagtaccggcgggagaagtcgctgctggggcgtccgtcgttccgggagatgtactcggcgctcaacgccgtgtcgggccactacatcagcttcggccccacggcgcccatcccggccaagcgccgcgcccgcatcctcgaggagatggacaccgccgagaaggcgctccaacggggcaggtaggccaaatcccagcgaagctggcccgttgcaggaacgcgagtgcccagctcggcgacaacgctaccattttgtttttgtaactactgcgatgcattcgtcgtcgttgttttcgcggctgggagcgtgtgttgtgactgtggagtaaaaagttaccgagcttttgagctgagtttgcgactt

SEQ ID NO: 100472 - DNA, 402 bp, Zea mays
gcgggtggatttcaccactcactgtggtaagatcaggttctactgctgggagaccgcagggggagagaagtttggtggcctcagggatggatactatatccatggccagtgtgcgatcatcatgtttgatgtaacctcaaggcttacttacaagaatgttcctacatggcatagggacctgtgcagggtctgtgaaaacatccccattgtcctctgcggtaataaggttgatgtgaagaacaggcaggtcaaagccaagcaggttactttccacaggaagaagaatctgcagtactatgaaatttctgccaagagcaactacaactttgagaaacctttactgtaccttgcaaggaagctggctggtgatccgaaccttcactctgttgaagctggagctct

SEQ ID NO: 100473 - DNA, 411 bp, Zea mays
aacacttctcaacccaatgggcttgttgttccagatgcaagcttgcaggcagttaagtggacatctgatgtattagacttgatggagattggacaagcaaatagagcagttggttcaacagcgctaaatgaacgaagtagtcggtcacacagtattctaactgtacatgttcgagggatggatttgaagaatggatcaacctctaggggttgtttgcatcttattgatcttgctggtagtgagagggtagagaagtctgaagtatccggcgatagattaaaagaagctcaattcattaacaaatcactctatgcgttaggtgatgttatatactgctttgcacatagaagtgcccatgtgccttatagaaacagttagcttacacaagttcgtcaaagttctctatgtgga

SEQ ID NO: 100474 - DNA, 463 bp, Zea mays
cccacgcgtccgcccacgcgtccgggcaccacacctcttcttcttcttgctcctcctccgagcacagctagcgcctgctccccttcgcctgtgatcatgtcttgcagcagcggcaagtgcgactgtggctccagctgctcctgcggcagctcatgcaactgcatgtcccctaacgtggagaccgccgccgccagcagcatcaagaccacggtcctcgccgcgccgaccaccaaggccagcgccggcggcttcgaggcggccaccgagggcggcggctgcgactgcaacacctgcaactgcggcaccagctgcggctgctcctgctgcagctgcaactgagccggtcaggcgatggcgcacgagagtcgagaggacgacgacgagtcgtataaatataatagcggcgtctaaataagatcctgtcaactgcacccgccattatcgatccatggtcgctcctggg

SEQ ID NO: 100475 - DNA, 406 bp, Zea mays
tccgaattcccgggtcgaccacgcgtccggggagttgccaggagcatgccaacatctgctgcccttgatgttgttgcaaagaatttgagccttgagttctttgaggtgcctactggatggaagctttttgggaattggatggatgctggaatgtgctcaatctgtggtgaagaaagctttggcactgtggctgaccacattcgtgagaaggatggcatttgggctgagcttgcatggctatcaattattgctttcaagagtttggacagccttgtaggagataagcttgtcactgatgaagatatgtgtcgctagcactggtccacatatggtcgctatttctacactcgctatgactatgagaatttttatgcacgggctgctaatgagcttattgcttacctag

SEQ ID NO: 100476 - DNA, 235 bp, Zea mays
gtggattgctacattccagtgccacagcggtagaccgacctaacgatcttactcgctggggaagatgtcttgttcatcaccggtcctggtacagatgccactggtcgtatcgagcgtgtctacggccatattgctgacacagttgatatcgttgaaatctgggacaccacgcactgctccgtgactggcgtcgaaatgttccagaagaccatggacgataccatggctgtagaca

SEQ ID NO: 100477 - DNA, 446 bp, Zea mays
cgacaaatccacacgaatcctctgattcagagcagggtgttggcattgatcagacgcctgccatggcggatcagttcgtggattcggcgaacaatgtgatcattgaggaggtgaacaagggcctgaacccaggaatggtggttctgcttgtggttgcaagcttcctgctgctcttctttgtggggaactatgcgatgtatgtgtatgcgcagaagacgctcccgccaaagaagaagaagccggtgtcgaagaagaagctgaagagggaaaagctgaagcagggggtctctgcgccgggagagtaaacggccatgctgccgatccttccgtccagagctcctattcacatgattattaaagaaaaaaatttatatatatataccagctggagccgtagtgttggagtaactttgttctgtagatgctctgtctttaatggtacatct

SEQ ID NO: 100478 - DNA, 411 bp, Zea mays
cccacgcgtccgcccacgcgtccggtcaagcgctgccacaagcccgaccgcaaggagttcaccaaggtggcggcgcggacggcgatcgggttcgtcgtcatgggcttcgtcggcttcttcgttaagctcatcttcatccccatcaacaacatcatcgtcggttccggctaggcttacaggagtacagggcgactagcatgggagtagtgcaatacttttgggagcaatagataacgaggatcctggtctttcgaatagtattgttaatgaaatttttcgttcggttgtgtttctgatgtaatcgttgtactgagtagaccttctggataccggattctgagtagacctttgaatccttgatggatcagccaatctcggaaaggaagtttcgtattttgttgttccgttaac

SEQ ID NO: 100479 - DNA, 449 bp, Zea mays
caagaaccgggagctggaggtgatccactcccgctgggccatgctgggcgcgctcggctgcgtcttcccggagcttctcgcccgcaacggcgtcaagttcggcgaggccgtgtggttcaaggccggctcccagatcttcagcgagggcgggctggactacctcgggaacccgagcctcatccacgcgcagagcatccttgccatctgggcctgccaggtcgtgctcatgggcgccgtcgagggctaccgcatcgccggcggcccgctcggcgaggtcgtcgacccgctctaccccggcggcagcttcgacccgctcggcctcgccgacgaccccgaggccttcgccgagctcaaggtcaaggagctcaagaacggccgcctcgccatgttctccatgttcggattcttcgtccaggccatcgtcaccgggaagggcccgctcgagaacc

SEQ ID NO: 100480 - DNA, 465 bp, Zea mays
cggacgcgtgggatcaaggtgggctccttcggcgagggccgcatcaccatgcgcaagacggtgggcaagcccaaggtggcggcgtccggcagcccctggtacggccccgaccgcgtcaagtacctcggccccttctccggcgagcccccgagctacctcaccggcgagttccccggcgactacggctgggacaccgccgggctgtccgccgaccccgagaccttcgccaagaaccgcgagctggaggtgatccactcccgctgggccatgctcggcgcgctcggctgcgtcttccccgagctgctctcccgcaacggcgtcaagttcggcgaggccgtctggttcaaggccggctcccagatcttcagcgagggcgggctggactacctcggcaaccccagcctgatccacgcgcagagcatcctcgccatctgggcctgccaggtcgtgctcatgggtgccgtc

SEQ ID NO: 100481 - DNA, 366 bp, Zea mays
  unsure (1)..(366): unsure at all n locations
gcccgacctcaggaagaaggtgatgcccgtcgtcatcgtccgccagcgcaagccgtggcgcctcatggacggngtctacatgtacttcgaagataatgctggagtgattgtgaatcccaagggtgagatgaaaggttccgctatcactggacctatcggcaaggagtgtgctgatctttggcctaggattgctagcgcagcaaacgccattgtttgagagcttgttggaatatgttcagacttctatatgatcatcttattatcagctgctagactgcaattgggcttatgtttgttcactcaattttgtaggaaacagaatttggtataccaaggggatctatatgacaatgtatgccataaaaa

SEQ ID NO: 100482 - DNA, 448 bp, Zea mays
  unsure (1)..(448): unsure at all n locations
aggaatcttacccttaccaaggtgtcaatggaatctgcaagtttaagaatgagaatgttggagtcaaggttttggactcggttaacatcaccctgagtgctgaggatgaactgaaggatgctgttggtctggttcgcccagttagtgttgccttcgaggtgatcactggtttcaggctgtacaagagcggagtttacactagcgaccattgtggaactacaccgatggatgtgaaccacgctgttctggctgttggctacggtgtcgaagatggtgtcccctactggctcatcaagaactcatggggcgctgactggggtgatgatggttacttcaagatggaaatgggcaagaacatgtgcggtgttgctacgtgtgcatnctaccctattgtcgcatgaggcccttacgaaatgttacatggtctgtttggcatcaataatgcatg

SEQ ID NO: 100483 - DNA, 450 bp, Zea mays
cggacgcgtgggctgttgagtatgcacttcgtgatgacgatgaaaaaggtgaaagagggagacgggtacagcccagacaggagaggtcgtgaaagatccccaggtagaaggcgttctcctagtccctacggtagaggacgggagagaggtagcccagattacgggagaagcaaggagagggggagcccagactatggcaggggaggacgcagccctgataatggcaggggagtaagcccagctggtggtggcagaggcgatcatgccaggggtggagggcgcagtcctgactatgatcgccagcgccgggaagctagtcctccaggttatgacaggtcccccagccgctcacctgggagggaggccagagagtagaagcagcgttccattccatgcctgtgttcaagcatcagatgaatgtgcaagttggtaatgttagccggcaggaaa

SEQ ID NO: 100484 - DNA, 451 bp, Zea mays
  unsure (1)..(451): unsure at all n locations
ggcctcgcgaaagtagagagagaaccatcatgccagccaataacaaaaatggagttcgagtttgagcgaagaaaggtgaccaaagaggatgtcaaggaacttatattcagggagatattagagtatcatcctcaacttctcaaggattacatgaatggaactgagaaaacaaactttatatatcctagtgctgttgacaatttccgaaggcaatttgctaacttggaggaaaatggaggaaagagtgtggcgcacaccgcttcatcagacaggaagcatgtttcgctcccaaggacaaccacagttcattctaatccaatccctccaaatggaacctcccaagttccccgaaagattcccacaggtagaccaggaagagtggttggttcagtaataccatttgagaacgcaactgctgttgatccatacagccaacgcanggtggtgagga

SEQ ID NO: 100485 - DNA, 392 bp, Zea mays
ccacgtacctgcgcacctacaagatcggctactacgtcgacgtcaaggttaacggctcggggcacaagggcatgccgcacaagttctaccacggccgcaccgggagcgtctggaacgtcaccaagcgcgccatcggcgtcgagatcaacatgcaggttaatggccgcatcatcaggaagcggatccatgtccgtgtggagcatgtgcagcccttccgttgcacagaggagttccgcctgaggaatgccaagaatgaccagctcaaggcggatgccaagctccgcggtgaggtgatcagcaccaagaggcatcccgcgggacccaaacctggcttcatggttgagggtgctacactcgagacagccactactactgctaatgatgagatcaac

SEQ ID NO: 100486 - DNA, 455 bp, Zea mays
cccacgcgtccggcagcagcaggcggcgcctaggagcggcatcccactgagtgcttgcggccatggctaggggattgaagaagcacttgaagaggctcaatgcgcccaagcattggatgctcgacaagcttggcggagcttttgctcccaagccatcttctggacctcacaagtccagggagtgccttcctctgatcctcatcatcaggaacaggctcaagtatgctctgaactaccgtgaggtcatttctatcctgatgcaacgccatgtacttgttgatggcaaggtcaggactgacaagacctaccctgctgggttcatggatgtcatttccatccccaagacaatggagaactacaggctgctttatgacaccaagggccgcttccgtcttcacccaatcagggatgaggatgccaagttcaagctctgcaaggtgaggtctgttcagttt

SEQ ID NO: 100487 - DNA, 454 bp, Zea mays
gcacgccaggctcctcctccagctcctgttcgagatggtggtggctccatgtttggaggagttgggtccaccattgctcaaggtatggcgtttggcacgggtagtgccatggcacacagggctgttgatgctgtattaggtccccggaccattcagcatgagactgttgcctcagaagctgctgctgctgcccctgcccctccagtgatgaatgctgacgcttgcagcatccattctaaggctttccaagattgtctcaacaactatggcagcgagatcagcaagtgccagttctacctagacatgctgaacgagtgccgccgtggtggtgtgtctgcctaagctgcctctggggttattcgtggattttctttcggtgatgctatctcattaataagataccgtgaaacttttgtctccacagcttgaagctaaacttcctgggattaataca

SEQ ID NO: 100488 - DNA, 465 bp, Zea mays
ccctcgtccaagtatatcaacgtagcaaggtggtttaatcacattgatgcgctcgtgaggctgagcggaattactgcagagggccaaggtgtgaaggttgaatcctcagcagttccttcagccccaactccagatgttgctgaagcacaggccccagctgctgaggaggaggacgatgatgatgttgacctttttggtgaggagaccgaagatgagaagaaggctgctgaagagcgtgctgcagctgccaaggcttctggcaagaagaaagaatctgggaagtcatcagttttacttgatgtgaagccatgggacgatgagactgacatggccaagcttgaggaagctgttaggagtgtccagatggaagggctgctctggggcgcatccaagcttgtcccagtcggatatggtatcaagaagctgcaaatcatgatgaccatagtcgacgatcttgtctctgtc

SEQ ID NO: 100489 - DNA, 364 bp, Zea mays
cggacgcgtgggtcaagactggagctgagtgaaaggacgctgctgagaacacgatggtggcatacaaggctgcccaggacattgctctggctgagcttgctccaactcaccctattaggcttggactggcacttaacttctcagtgttctactatgagattctgaactcacctgatcgcgcctgcagtcttgcaaagcaggcttttgacgaggccatctcggaactggacaccctgagcgaggagtcctacaaggacagcactttgatcatgcaggtgctacgtgataacttgaccctatggacttctgacatctcgtaggaccctgcttaatagattaaggaggcactcaagcgcgactcgag

SEQ ID NO: 100490 - DNA, 450 bp, Zea mays
  unsure (1)..(450): unsure at all n locations
gaagacaacccgtcagcccctctcgtttttcatccgccttcgcctccaaccgcgtgcgctccacgcctcctccaggaaagcgagagcttctgcataagaacaacaaatcaaaagcgtgatcagctcggtgccaacaaaacctcaacaaccaagtttcatgtctgatctcgacgtccagcttccatctgcctttgatccgtttgctgaggcaaatgctgaggactctggtgctggtcctggaacgaaggattatgtgcatgtgcgcatccagcagcgcaacggcagaaagagtctgactacagtccagggtctgaagaaagagttcagctataacaagatcctcaaggatctgaagaaggaattctgctgcaatggtactgtagttcaggacccagagctaggccaggtcattcagctccaaggtgatcagcgcangaatgttgctacttt

SEQ ID NO: 100491 - DNA, 432 bp, Zea mays
acgggatgtcgcaggtgaacatcgagggcaacgggtgcgggcgggcgctgccgccgcagccgaccgtgaaggtgtactgccgcgccaaccccaactacgccatgagcgtccgcgacgggaaggtggtgctggcgccggcgaaccccaaggacgagtaccagcactggatcaaggacatgcggtggagcacgagcatcaaggacgaggaaggttacccggcgttcgcgctggtgaacaaggcgaccggggaggccatcaagcactcgctggggcagtcccacccggtgcgcctggtgccctacaacccggactttttggacgagtcggtgctgtggacggagagccgcgacgtcggcaacggcttccgctgcgtccgcatggtcaacaacatctacctcaacttcgacgccctccacggcgacaagtggcacg

SEQ ID NO: 100492 - DNA, 448 bp, Zea mays
gtcaagaccatcaagatcggagccccgccgccgccctccggtggactccccgggactctgaactctgaccaggcgagggacttcgacctccccttgaaggagcggttctacctgcagccgctgccgccggcggaggcggtggcgagggtgaagacgtcggcgcaggacatcatcaacctcaagccactcatcgacaagaaggcgtggccgtacgtccagaacgacctccgcctccgggcctcctacctgcgctacgacctcaagaccgtcatcgcttccaagcccaaggaggagaagcagagcctcaaggagctcaccggcaagctcttcagcaccatcgacgatcttgaccatgccgcaaagatcaagagcaccccggaggccgagaaatacttcgcagcaaccaaagatgcgctcggcgacgtcctcgccaagctagcctagatgg

SEQ ID NO: 100493 - DNA, 426 bp, Zea mays
gacgcgcgcgcgtgcggggtcgaccgccacctggccggcgggcggaggcacgtcgtgccggggcaggagcgcggctggaagaacgtcttcaaggtgcggcccagcgcggtaaccaggatcctcgtgcgcttcaagccgctcacagacgccgcgtcgccggaggagagccgcttccccttcgacgtcaccactggtccgggttacgtgtaccattgccacattttggaccacgaggacaacgagatgatgaggccgatgaagattgtgcgttgaacggtttccaggaagaaaaacatatattctatgaatgattccgtatcgcaaaagaaacgacatgtttactgtgtctttcccattaatgatttaagcaggaagaacttttagatgattgaacttttcagttaatatagcatttgtcgagtaaaa

SEQ ID NO: 100494 - DNA, 462 bp, Zea mays
  unsure (1)..(462): unsure at all n locations
cggacgcgtgggcgccgacgccgcgccgccgcagcaattgtcaccgtcgctatggcccggatcaaggtgcacgagctccgggggaagagcaagacggacctgcaggcgcagctcaaggagctgaagtctgagctctccctcctccgcgtagccaaggtcaccggcggcgcacccaacaagctctccaagatcaaggtggtgcgcacctcgatcgcgcgcgtgctcacagtgatctcgcagaagcagaagtcggcgttgcgggaggcgtacaagaagaagaacctgctccccctcgacctccgccctaagaagacccgtgccatccgccgccgtctgaccaagcaccagctctctctgaagaccgagagggaaaagaagcgtgagaagtacttccccatgaggaagtatgctatcaaggcctangtcagaactgtgagatgctgcgcttagcatatcatcggc

SEQ ID NO: 100495 - DNA, 426 bp, Zea mays
gacgcgcgcgcgtgcggtgtcgaccgccacctggccggcgggcggaggcacgtcgtgccggggcaggagcgcggctggaagaacgtcttcaaggtgcggcccagcgcggtaaccaggatcctcgtgcgcttcaagccgctcacagacgccgcgtcgccggaggagagccgcttccccttcgacgtcaccactggtccgggttacgtgtaccattgccacattttggaccacgaggacaacgagatgatgaggccgatgaagattgtgcgttgaacggtttccaggaagaaaaacatatattctatgaatgattccgtatcgcaaaagaaacgacatgtttactgtgtctttcccattaatgatttaagcaggaagaacttttagatgattgaacttttcagttaatatagcatttgtcgagtaaaa

SEQ ID NO: 100496 - DNA, 460 bp, Zea mays
cccacgcgtgcgcccactcgtccggtggtattcccgcttgcgagcttagggagcacctggtcatcttgcgaagcagtgatgccacacgccatctgtttgaggtgtcagctggccttgactctttggttctcggtgaaggacaaatccttgctcaggttaaacaagttgtgaggagtggacagaacagtggaggcttgggaaagaacattgataggatgttcaaggatgcaatcactgctggaaagcgtgtccgctgcgagaccaacatatcatctggtgctgtttctgtcagttcagcggcggttgaactggccctgatgaagcttccgaagtctgaagcactgtcagctaggatgcttctgattggtgctggtaaaatgggaaagctagtgatcaaacatctggttgccaaaggatgcatgaaggttgttgtggtgaaccgctccgtggaaagggtgga

SEQ ID NO: 100497 - DNA, 399 bp, Zea mays
cccacgcgtccgcccacgcgttcgcccactcgtccgctccgccgcttgcccgcttttgcgctctgcctcccggctctcggcttcttctacacgctaccgtctcacagccgtaaacgcccctcccggatcccgctagttcgccaccgccgcccgcccgcccgccgttcgcctcatcatggccgcctcgtcgaccggcacctccgtccacgacttcatcgtcaaggatgcgagcggcaaagacgttgacctcagcacctacaaggggaaggttcttctcattgttaacgtcgcatcccagtgtggcttaactaactccaactacactgagctggcccagctctacgagaagtacaaggaccaaggctttgaaatcctggcttttccatgcaacctagttgg

SEQ ID NO: 100498 - DNA, 451 bp, Zea mays
ccgctgccgtttcttctcgagtgtgaccatggcggctcagggatccctcgtcatgtggagggcggtcttcgcagcgctgggcttgctcatggtggccacgctggtgtacaccttggccaccgacggctcgccgttccgccttgagctgtttacgccgtggatggtggcaacactggctgatttttatgttaatgttattgcaatctcggcttgggttatctacaaggaagcaaactgggttagttctgctgtgtgggtggttctgttgttttgctttggcagtgctgtcacttgcgcttatattgttaagaaacttcttgaagtaacatctgcagggtcatcccaagatcctcttgaccttctatttatcaggcaaggtaatctatcccaaagaaagtgctcttatgttgtaattggaagggttattttcagcattttggggatattcatg

SEQ ID NO: 100499 - DNA, 291 bp, Zea mays
cccacgcgtccggcgacgacctcgagattgagtgcgaggggaaggagaagttcaagtgcggctccaacgttttctggaagtggtgaagcagctagcagcagcgtctgatgggaatggaggagatcatcacctgtcttgtcgaccctagatatgtccaaactgcagggaaattaaatcttcatgtgtaattgtgctcattctgtttcaatcatctcaacatccgatcatgaacctcttgcattattaactggctcgatcgtcttctcagtttaagacgttggaggctgcttt

SEQ ID NO: 100500 - DNA, 452 bp, Zea mays
ccgcgtgcgaaccaagcagaccccagcagaagaagcgaagtcgtcgccggagcaggaggaagagcgagcagcaagatgtcgtggcaggcgtacgtcgatgaccacctgctgtgcgacatcgaaggccagcacctcagcgccgccgccatcgtcggccacgacggcagcgtctgggcacagtccgagaacttccccgagttaaagcctgaggaggttgctgggatgataaaggactttgatgaacctggaactcttgcaccaactggtctttttgttggaggtacgaagtacatggtgatccaaggtgaacctggagttgtcatccgaggaaagaagggcactggaggcattactatcaagaaaactggcatgtccttgattatcggtatctatgatgagccaatgactccagggcaatgcaatatggtggtggaaaggctcggcgattacct

SEQ ID NO: 100501 - DNA, 424 bp, Zea mays
  unsure (1)..(424): unsure at all n locations
cggacgcgtgggcagaagaccaagctcatgacccgcctcacgtacacgctggacgagatcgagggcccgctcgaggtcggctccgacggcacgctcaagttcgaggagaaggacggcatcgactacgccgccgtcaccgtgcagctcccggggggcgagcgcgtgccgttcctcttcaccgtcaagcagctcgtcgccaccggcaagcccgagagcttcggcgggcccttcctcgtgcccagctaccgtggctcctccttcctcgaccccaagggccgcggcggctccaccggctacgacaacgccgtcgcgctccccgccgggggcagaagtgacgaggaggagctccagaaggagaacatcaagaacgccgnctnctncaccggcaacatcacgttgagcgtcaccaaaagcaacccggaga

SEQ ID NO: 100502 - DNA, 451 bp, Zea mays
  unsure (1)..(451): unsure at all n locations
gcttgcttagctagccgccatggcctccctcgccgccgtctccgtgaagcccgtggccatcaagggtctcgccggcagctccatctccggaaggaagctcgccgtcgccaggccgtcggcccgctccatccgcaggccccgcgcagccgccgtggtggccaagtacggcgacaagagcgtctactttgacctcgacgacatcggcaacaccaccggacagtgggacctctacggctctgacgcgccctcgccctacaacccgctacagagcaagttcttcgagacgttcgcggctccgttcaccaagagaggtctgctgctcaagttcctgctgctgggcggcggctcacttctggcctacgtcagcgcgtcggcgtcaccggacctnctgccgatcaagaagggacctcaggagccgccgcagccgggcccgcgcggcaggatctaagct

SEQ ID NO: 100503 - DNA, 470 bp, Zea mays
cggacgcgtgcgctatcaccttggaggtgtacagctctgacaccattgagaatgtgaagggcaagatccaggacaaggagggcattcccccagaccagcagcgtctgatctttgcgggcaagcagctggaggatggccgcactctcgcggactacaacatccagaaggagagcacccttcaccttgttctccgcctcaggggtggtatgcagatctttgtgaagaccctgactggaaaaaccataaccctggaggttgagagctcggacaccatcgacaatgtgaaggcgaagatccaggacaaggagggcatccccccggaccagcagcgtctgatcttcgccggcaaacagctggaggatggccgcaccctagcagactacaacatccaaaaggagagcacccttcaccttgtgctccgtctccgtggtggtcaataagtcatgggtcgtttaagctgccgatgtgcc

SEQ ID NO: 100504 - DNA, 463 bp, Zea mays
cggacgcgtgggctctggtggttttgagcgagtatttgaggtcggccctgtgtttagaggagaaaattcaaacacacacaggcatctatgtgagttcgttggtcttgatgctgaaatggagattaaggagcattattttgaggtctgtgacattatagatggcttattcgtatcaatatttaaacacttgtctgaaaactgcaagaaagaactcgaatcaataaacaggcagtatccatttgaacctctgaagtatctagacaaaaccttgaagctcacttatgaagaaggaattcaaatgttgaaggaagccggaacagaaatcgagcctatgggtgacctcaataccgaagctgagaaaaaacttggtcggcttgtcagggaaaagtatgacacagattttttcatcctgtatcggtatcctttggctgtacgtccgttctacaccatgccttgttatgac

SEQ ID NO: 100505 - DNA, 345 bp, Zea mays
aaacaagtccatccaatgggctgggatattaattaattattacaaaacagcatgcaaattgtaccatgcttattattacaatatgtataatatgccaagattttccacttggacttgacaaccagagtgaattttaagaggccggaaattacatttgcatagggaaaacagacgcttccagttcggcatttccatccaaaactgacaaaacgccaccattcggaagctgattattgcggggcactctgcaggtgagtgaaaagaagcccgctatccagggttctgcatgccggccgggatgcccttcatggtgaggatgaacctgtcttccaagccgggcgggta

SEQ ID NO: 100506 - DNA, 455 bp, Zea mays
tctatccgtactttgtaacagacagtgagaaaatgtctgccgagtatgagaactgcaagctacttttggttgacaaaaagatcaccaacgcaagggatcttatcaatgttttggaagaagccatcagaggtggatacccaatcctgataattgctgaggatattgagcaggaggctcttgctacccttgttgtcaacaagctcagaggatcattgaagattgctgccatcaaagcccctggttttggagagcgcaagactcagtacttggatgatattgccatccttactggagcaactgtaatcagagatgaagttgggctgtcacttgacaaggctgacaaatcagtccttggaacagcagcaaaggttgtccttactaaagagtcgacaacaattgttggtgatggcagcacccaggacgaagttactaagaaggttgcacagattaaaaat

SEQ ID NO: 100507 - DNA, 456 bp, Zea mays
  unsure (1)..(456): unsure at all n locations
agtcaccactcccaagccagtaccgagtcctacgagcagtcgcacgcaagtgtcaagagacgaaacggtcgacatggctcgcacgcaatctgccgtagcggtcgccgtggtgggcgcggtgctgctgctggcagcggcngcgacgacctcggaggccgncatcacctgcgggcaggtgagctccggcatcgcgccctggctcttctacgcccgcggcacggggtccgnccccttcgcgtnctgctgtagcggcgtcaggaacctcaagagcgccgncagcaccgncgncgacaggcgcgccgnctgcaactgcctcaagaacgccgnncagggcgtcagcggnctcaacgccggaacgccgncagcatcctctcaagtgcggcgtcagcatccnctacaccatcagcaccttcaccgactgcttccaggtgaactaaaacctagaccacgcgcgac

SEQ ID NO: 100508 - DNA, 423 bp, Zea mays
cccacgcgtccgcggacgcgtgggtgagaaactcggctacacctgcaaaatggatatggcaatggcttccttcgtcgccgctacgcaccaccacggcagtcacctggccgccggcttcccctactccgcgcgagcaggcaggagcgttggccgcagcggcgtcaccatctccattagagcccagaagaagagtaatagcgactctgggagtagtagcggaggtggggacgtgcggaccagcagcgggaggcgagtgtggcgtcgtcggaaactgaccaaagaagatgacatgttgcgttacaagttggatcgtatccctttcttagaagagaaggtgagaaaggtaagggagaatgggaagatcatatgcctggatattaatcagctgatgttatctcaagagaatagatttgcgttcaccat

SEQ ID NO: 100509 - DNA, 200 bp, Zea mays
aggcgacgattatggggccatcagatagcccatacgctggtggcgtatttttggtcactgttcagtttccaccggactacgcattcaaaccaccgaaagttgcattcaagacgaagggttaccacccgaatatcaacagcaacgggagcatctggcttgatatcttgaaagagcaatggagccctgcactgaccggttct

SEQ ID NO: 100510 - DNA, 343 bp, Zea mays
cgcaaggactcgcgacggacggagcaacggaggaagcaactacgcggcagccatggtgaacgttccgaaaaccaagaagacctactgtaagaacaaggaatgcaagaagcacaccctgcacaaggttacccagtacaagaaaggtaaggatagcctttcagctcaagggaagcgacgttatgaccgcaaacagtctggatatggtggtcagacaaagcctgttttccacaagaaggcgaaaacaacaaagaagattgtgctgaagctgcagtgccagagcttgaagcactactctcaacacccgatcaagaagtgcaagcactttgagatcggtggtgacaag

SEQ ID NO: 100511 - DNA, 410 bp, Zea mays
  unsure (1)..(410): unsure at all n locations
tcgtgctcatgggtgccgtcgagggctaccgcattgccggcgggccgctcggcgaggtcgtcgacccgctgtaccctggcggcagcttcgaccccctcggcctggccgacgaccccgaggccttcgccgagctcaaggtgaaggagctcaagaacggccgcctcgccatgttttccatgttcggcttcttcgtccaggccatcgtcaccggcaagggcccgctcgagaacctcgctgaccacatcgctgacccagtcaacaacaacgcatgggcctacgccaccaacttcgtccccggcaactaagctcaacggctatgctatgcaacttcattgtctttcggatcgganagggtgtacgtacgtggattgattgatgctgcnagatgcatgtgtgtcttttggttcacg

SEQ ID NO: 100512 - DNA, 455 bp, Zea mays
cccacgcgtccgcgccgcggcagtgccgcatgccggcgccgcctcatcgccggcgaagcgggtgcagctggccgcgcccgagggccgccgcgccgctctgctcggcctggcggccgtcttcgccgtcacggccaccaccgggtcggccaaggccacgatcttcgatgagtacctcgagaagagcaaggccaacaaggagctgaacgacaagaagaggctggccaccagtggagccaactttgcgcgcgcctacaccgtggagttcggcagctgccagttcccctacaacttcactgggtgccaggaccttgccaagcataagaaagtccccttcatcagcgacgacctcgaaattgagtgcgaggggaatgagaagttcaagtgcggctccaacgttttctggaagtggtgaagcatctagcagcagcgtctgatgggaatggaggagatcatca

SEQ ID NO: 100513 - DNA, 330 bp, Zea mays
agcgactcagcgagcgagagcagcacacactgcacgcagctagctaggagcagcagcagcggcggcgatggcggcctccatgatctcctcgtcagctctggcggtggcgcctcagggcctgccgcccctcggccgccgcgcctcctccttcgccgtcgtctgctccaagaagaagatcaagaccgacaagccctacgggattgggggtggcctgaccgtcgacgtcgacgccaacgggagaaagggcaagggcaagggcgtgtaccagttcggcgacaagtacagcgcgaacgttgactgatacagcccaatctacaacgaggatgactg

SEQ ID NO: 100514 - DNA, 316 bp, Zea mays
gcgctagctgaggacggtacagcggcacagaggtgctacgtacgacgacgacgacgcaggcgccacacatggcatcccagctctccgccgccgtgccccggttccacggcctccggggctacgccgcgcccaggtccgcggtggcagcgctgccgtccgtgagggtgggcaggaagaggtcgtcgtcgcagggcatccgctgcgactacatcggctccgccaccaacctgatcatggtgacgacgacgacgctgatgctgttcgcggggcggttcgggctggcgccgtcggcgaaccgcaaggcgacggccgggct

SEQ ID NO: 100515 - DNA, 457 bp, Zea mays
cccacgcgtccgctggccatgaacaagttcgactgggaccacccgatgcacctgcaaccgacgagccccacggccattaagcaggtgagctgcgtgtgggacgcgtacgaggccaccaagggcgcccacggggtgtgcatcctgaccgagtgggacgagttcaagaccctggactaccagaagatcttcgacaacatgcagaagcccgccttcgtcttcgacggccgcaacatcgtcgacccggagaagctgagggagatcggcttcatcgtctactccatcggcaagccgctcgacgcctggcttaaggacatgcccgcggtcgcttaattcgtctgaggtgctccattggattggatccggggaaggaagaggaactggttgaccattcttcattacagtttgttttttgcaggattcttaaaagttggacggcgctgctagtattccatgtttc

SEQ ID NO: 100516 - DNA, 437 bp, Zea mays
cagagtgtggcaccaatcaacctattgagaaagtgcttgcagctgaagatgcagagtgttgtatttgcctatctgcttatgatgatggtgcagagttgcgggaactcccttgtgggcaccatttccactgcacctgcatcgataagtggcttcacatcaatgcaacatgccccctgtgcaagtacaacattcggaaaagcaacagtagcagtggaagtgaagaagtatgaatgcaaccgcttgacaatgccaatctgtttaaacttcgtgcctgtgtcgttgctaatgtaactccagggcttgagcagtgtaaatttttgtactaaaaagaagtgctgatagagtcaattatgtataaagttacctcaagtgctgtctatatgtccgataagtaataaatagttgggtgtgcatctgtatttactgtcaggaatgat

SEQ ID NO: 100517 - DNA, 398 bp, Zea mays
tcggcatcatcgctgatggcgaagacaagaacggcaagccgcacaagctcaggctatactccatcgccagcagcgccctcggagatttcggcgactccaagacggtatcgctttgcgtgaagaggctagtctacaccaacgatcagggggagattgtcaaaggagtctgctcaaacttcctgtgtgacttgaaacctggcgccgatgtgaagatcacagggccagtgggcaaggagatgctcatgcccaaagaccccaatgcaacagtcatcatgctcgcaacggggaccggtattgctccgttccgctccttcttgtggaagatgttcctggaggagcacgaggactacaagttcagcggccttgcgtggctgttcttgggagtcccgacgagcgac

SEQ ID NO: 100518 - DNA, 368 bp, Zea mays
  unsure (1)..(368): unsure at all n locations
gacgaaggaagctttggagatatgtcaagtggtgatgttgatgaagataacgagagaagagaatgcgtaaaagctgctgcagtttcctctgtcgtcggtgttctggctagtttgcccatatctttctatgaagttgaagatcttccacaactattccttcggtcatcaattgttttcataagttgtgctttgtttggagtcacattccggtacgctgttagaagagatctggataatatccaactaaaaactggggctcctgcagcatttgcttttgttagaggccttgctctgctggaatctggtagaaccttcgagctgagtactgataccttaatatcagntactcttgatgctgcagtcagtgt

SEQ ID NO: 100519 - DNA, 332 bp, Zea mays
gacccacgcgtccggatttacggaaggccatggaaggtcttctcgaacccgctgaggaggaagtaccaattggttcggcaaaagttcgagctgtctttagtagtggcagtggaaaggtggccggatgcatgattacaacaggaaaagttgttcaagattgtaatgtgcgggttattcgtaaagggaaagaagtatacgtgggttcgcttgattccttgagaagggtgaaagaaactgtgaaggaggttggtgctgggctagagtgtggtattggggtagatgacttctatgaatgtgaggaaagtgacatcatagatgcattcaataccgtg

SEQ ID NO: 100520 - DNA, 408 bp, Zea mays
  unsure (1)..(408): unsure at all n locations
tctagagcaaagcataccccaaaatccccaaaccctaggcgaactgggcacggcggcgatggcagcggcgggcctgcggaaggggaacgcgcgcctnccacccgaggtgaaccgggtgctgtacgtgcggaatctgccgttcaacatctcgagcgaggagatgtacgacatcttcggcaagtacggcgcgatccggcagatccggctgggcaacgccaaggacacgcgcggcaccgnctacgtcgtctacgaggacatatacgacgccaagaacgccgtcgaccacctctccggcttcaacgtcgccaaccgctatctcatcgtgctctactaccagcccgccaagatgtccaagaagtcggatgtcaagaagaaggaggacgagatcactaggctccaggagaagta

SEQ ID NO: 100521 - DNA, 460 bp, Zea mays
  unsure (1)..(460): unsure at all n locations
cccacgcgtccggggagtcgtagaggagcagcaggtgcaccaaaaggatggcagcgccaggctccctgcgacttctccaggccccgtccttcgctgcggccaagtgccagccggtgggtggccgggcatccgcgcggcgagcgccacggccactgttcgccgtgcgcgcctcggctgctgacgccgncaacagggatgccgtgctcaaggccttccgcgagaacagggctctcaagataatttccggtcttcagaactttgacaggagcagtgttgcatctgttgtcacagctgcagataagggaggtgcaacacatgttgacatagcatgtgacaaggacttagtaaagcttgccatggatcttaccaaccttccgatctgtgtctcatctgtagatccttcagcgttccattctgcagtacaagcaggagctaaaatggttgagattggaaactatga

SEQ ID NO: 100522 - DNA, 204 bp, Zea mays
cggacgcgtgggcggacgcgtgggctcagttttcatgggcctttctgttcctcaatactgcaatgagtacacatctattgctggttatggtcctgttcacacacattcaagatgggtatgtaacatttgttctttttttccgtgaaatcttacaattctgtggaaagataaataaagtactcacatcggttgtcttgttcaaaa

SEQ ID NO: 100523 - DNA, 471 bp, Zea mays
ccgagagacaggacccgatgctggtactcaagttcatctggatggagaagaacatcggcgtagcactcgaccagctggttcctggctatggcagcatcccgttgagcccgtactacttctggccgcggaaggacgcgtgggaggagcttagagccaagttggaagagaaagagtggatctcgcagaagcagatgatcatccttctcaaccaggccaccgatatcatcaacctctggcagcagggtggtgggaacctgtcgacatgagtcccttcccgccctgttctttcaaccgtgcaaagcttgcgttttgttggtttcactacaggctctctctgttgttaatgttaaaagtatggtacatggccttgtagatcggttcaaactgttctcaggtatggccttttccatggaaatcatcttgggatttatcttagttattatgtgtatcaatccgtcacccccccccccc

SEQ ID NO: 100524 - DNA, 313 bp, Zea mays
gaaaaaaacgtgacatggtcaacgagtgggcatgggccatggctttgcaccctgtagaacaaggcgagtgactacaaaacagctctgttcggcatatggagagaacaaaaaaagaagaagattacaggtgatcctggagatatgaacaaacgcctggacgactcagaattcaagcccgtgctgtctggcagaatcagcgagagcctttatgcggccatggtagaggaaaccacctcggtcgaagacaaccttggtgatccctttctccaagcaagacttggcaatcacctcaccgatcttttgtgctatttcg

SEQ ID NO: 100525 - DNA, 382 bp, Zea mays
  unsure (1)..(382): unsure at all n locations
cccacgcgtccgcccacgcgtacggcagcatgtacgtgttcatgcaatggaagcagtgaggggttgctgggagcttgaacaatctttacaaagcctaacaggggcatctcctggtgaaggcactggagcgaccatgtctgatgatgaagacaaccaggtggatagcgaagccaacatgtttgatggaaatgatggatcagatggtatgggctttggccccttaatgctgacagagggtgaacgatccttagttgagcgtgtacggcacgagctaaagaacgagcttaagcagggttacaaagaaaaagcttgtgatatcaaggaagagattatgcgcaagcgcagagctgcgaaacttnctggagatactgcatctgtgctg

SEQ ID NO: 100526 - DNA, 347 bp, Zea mays
  unsure (1)..(347): unsure at all n locations
gccacggacaagcggttcaagacgctgccggcgtcngaggcgctgccgcggggcgaggccatcggcggctacatcttcgtctgcaacaacgacaccatggacgagaacctcaggagggagctgttcgggctgccgtcgaggtacagggactcggtgcgggccatccgcccggggctgcccctcttcctctacaactactccacccaccagctgcacggcatcttcaaggccgccagcttcggcgggaccaacatcgacccgacggcgtgngaggacaagaagtgccccggcgagtcgcgcttnccagcacaggtgcgagtggcaacgcggaagatctacgatccact

SEQ ID NO: 100527 - DNA, 414 bp, Zea mays
cccacgcgtccgcccacgcgtccgctccatagctcgtcgccaccggccaccgccaccctggatcacgccgtccgtcgaggtaaggtcagcatggtgagggtcagtgtgctcaacgatgcgctcaagtccatgtacaacgctgagaagatcggcaagaggcaggtcatgatcaggccgtcgtccaaggtcatcatcaagttcctgacggtcatgcagcgccacggctacattggagagttcgagtacgttgatgaccaccgatcgggcaagatcgtggtcgaactcaacgggaggctgaacaagtgcggcgtcatcagccctcgctttgatatcggcgtgaaagacattgaaggatggactgcaaggcttggtccgttcaggcagttcggatacattgttctcacaacttttgca

SEQ ID NO: 100528 - DNA, 457 bp, Zea mays
cccacgcgtccgatcgtcgtgctctccacaccagcagccccgcagaagcccaagagcccggccgctccgcgatccccagtcgtcctggcgccggcgccagcgcccgcaccggcggcgccgcaccacgtggacctcgcggacctcctcagcgtggccgggccgttccacacgttcctggactacctgcagaagaccggcgtcatcgagaccttccagagccaggcgaacgacacgaagcggggcggcatcaccgtcttcgtgcccaaggactcggcgttcgcggcgctgaagcagaccacgttcgccaacctcacccaggaccagctcaggtcgctgctgctgtgccacgcgctgcccaagtactactcgctggccgagttcgaccggctgagcgcgctcggtccggtggccaccctcgccggctcgcagtacacgctgaacctcacctacgacatgg

SEQ ID NO: 100529 - DNA, 427 bp, Zea mays
gccgaccccacgccagtagagatgagggccacatcgtccccagtgcccgccgccgtccgcgtcgccccctcctccgccgccgtagcagtgaaacctcgtgccgcagcgagtggcggcggaggcagcacagcaggcaggcgcgacgtgcttgccgccggtaccgggctgggcgcggcgctgctgctggcgctggggccggcgcgcgcggcggacgaggagtacgtgagcgagacgaaggaggtgatcgggaaggtgcggtcgacgatcgggctggacaagtcggacccgagcgtggccgacgcggtggcggagctccgggacctgtccaactcgtgggtggccaagtaccggcgggagaagtcgctgctggggcgttcgtcgttccgggagatgtactcggcgctcaacgccgtgtcgggccactaca

SEQ ID NO: 100530 - DNA, 369 bp, Zea mays
ggccacggcaagttcaagcatggtcacggccaccacggcaagttcaagcacgggcacggcaagttcaagcatggcaagcacgggcacggcatgttcggcggcggcaagttcaagaagtggaagtgatgtgccctccatggttgatcgtagctgaactcaggcttccaggacatgtgttgccagtaataccttttcagcgttactcatccttcatctgtatttccagtaatccagcttgtggcgagtgacataatgctaataagtgacataaataaccatttgctgatatgctgtatatgttggtcttgtggatggagcgctctgaagattatatccattgccagtaataaatcgtggctttatctgacc

SEQ ID NO: 100531 - DNA, 404 bp, Zea mays
gtttagtcgtctaaattgaagaactaaccttagacagaaaagttagacaaaatgtggcaggttaggcagcaaaccaaacatacctttagtattccttagtttggcactctggccttatgtgcattcagcattgttggttgttctatatacccttaacacttgatgcaccaagagatgtttaaaatggatgcagatggcagggaaggttggccagaactggcaccctatgaagccatccatgttggagctgcagcaccgcagatccccgaggcgctgatcgagcagctgaagcccggcggcagaatggtgatccctgtcgggacagtcttccaagagctgaaggttgtggacaagaagttggatggcactgtcagcataagagacgaaacgtctgtgcgctatgt

SEQ ID NO: 100532 - DNA, 213 bp, Zea mays
gccacgcgtccgccgacgcggccgtccacgcgtccgaggaaacgtgtgactgcacacatagtcctggctgggctaggctccaccatggtcgacacaagcatggtgctcgagctacttcatctggtctcagaataaatctggttttgtcgtgccggaactgtgagctcacagagatgaacaaataccataacgatgttgctagctgatgtggtg

SEQ ID NO: 100533 - DNA, 442 bp, Zea mays
  unsure (1)..(442): unsure at all n locations
gcaccacgccgctgcccaacgagcgcgacgccgagatccggagcaagatgaaggcggacggcacgttccagcagaagcgggagcaggcgacgcagcaggggatccacgagtcctactaccgcgacatgaccgtcatgttcggcaagtgggagttcgaccccatggcgctgccggagccgccgtgccccgtgcacctctggcagggcgacgaggacggcctcgtccctgtcgtgctgcagaggtacctcgccggcaagatcggatggatcaactaccatgaactccctggcaccggccacttcctgtcgtcggtgcctgggctcggagacaacgtccttaggacccttttcagtgacaagcagtaaacaaacaatcctncctcacgacgtatcgaagctttcgagcatggtggtggtggttgcgcattagttcattttaatat

SEQ ID NO: 100534 - DNA, 459 bp, Zea mays
gacgacttgtttcattgattcttgaagagatcgagcttcttttgcaccacaaggtcgaggatgtcttgcaactgcggatcaagctgcggctgcggctcaagctgcaagtgcggcaagaagtaccctgacctggaggagacgagcaccgccgcgcaggccaccgtcgtcctcggcgtggccccggagaagaaggccgcgcccgagttcgtcgaggccgcggcggagtccggcgaggcccgccacggctgcagctgcggtggcaactgcaagtgcgacccctgcaactgctgatcacatcgatcgacgaccatggatatgattattatctatctagcttgtggtggtggttgaacaataataagcgaagccgagctggctgccatacataggtattgtgtggtgtgtgtgagagagagagaaacagagttcttcagtttgctatctctctctgcatgtttg

SEQ ID NO: 100535 - DNA, 271 bp, Zea mays
cccagcacgccgtccccgatcttcggcggtagcactgtcgggctgctccgcaaggcgcaggtggaggagttctacgtcatcacgtgggtgtcccccaaggagcatgtgttcgagatgcccaccggcggcgccgtcatcatgcgggaggggcccaacctgctgaagctggcgcgcaaggagcagtgcctcgcgctcggtaccaggctgcgcttcaagtacaagatcacctaccagttctaccgcgtcttccccaactgcgaggtgcagtatc

SEQ ID NO: 100536 - DNA, 431 bp, Zea mays
gctcggcgctggtgatcagcctgagcacgggcgtgtcgctcttcctgggccgcttcgtggtcttcaacttccagcgggagaacgtggcgaagcaggtgcccgcgcagaacggcaagacgcacttcgacgccggcgacgagcgcgccaaggagttcgcggccctgctcaagtccaacgaccccgtgggcttcaacctcgtcgacgtcctcgcctggggctcgctcggccacatcgtcgcctactacatcctcgccacctccagcaacggatacgaccccaacttcttctgagcggtcgtcgaggatgtattctacagacagccgtgtgcgtgcgtgtgtgcttgtcatgtatccgatcaaagtttggttaatttggacaagtagtgcaactgcagaataattggtatttggatagtgcaccatgccaacatg

SEQ ID NO: 100537 - DNA, 278 bp, Zea mays
cccacgcgtccgcccacgcgtccggttcgtcaagaaccgggagctggaggtgatccactgccgctgggccatgctgggcgcgctcggctgcgtcttcccggagcttctcgcccgcaacggcgtcaagttcggcgaggccgtgtggttcaaggccggctcccagatcttcagcgagggcgggctggactacctcgggaacccgagcctcatccacgcgcagagcatccttgccatctgggcctgccaagtcgtgctcatgggcgccgtcgagggctacc

SEQ ID NO: 100538 - DNA, 390 bp, Zea mays
  unsure (1)..(390): unsure at all n locations
ggggttcgtggccccgcagctggaccccagcacgccgtccccgatcttcggcggcagcacgggcgggctgctccgcaaggcgcaggtggaggagttctacgtcatcacgtgggtgtcccccaaggagcaggtgttcgagatgcccaccggcggcgccgccatcatgcgggaggggcccaacctcctgaagctggcgcgcaaggagcagtgcctcgcgctcggcaccaggctgcgctccaagtacaagatcacctaccagttctaccgcgtcttccccaacggcgaggtgcagtaccttcaccccaaggacggcgtctacccggagaaggtcaaccccggcagggagggcgtcngccaagacttccgcagcatcggcaagaacgtcaaccc

SEQ ID NO: 100539 - DNA, 337 bp, Zea mays
agcgggccggccacgccgccggagatcttcgacaaggtgtctgagagcatcaagcaggcggaggagacgtgcgcggacgaccagaagggcgacgccgagtgcgcggcggcgtgggacgaggtggaggagctcagcgccacggccagccacgcccgcgacagcctcaaggagaccaacgccaacgacccgctcgagaagtactgtaaggagaacccggactccgaggagtgccgcatctacgacaactagctatagtcgtagctatatagggcgtggaatgatactctcgatcggcgcgtcatacgtggaatgaacttgtatgaagctatacctcaat

SEQ ID NO: 100540 - DNA, 358 bp, Zea mays
gtcttacgatgttgtggggactcaaattgtccagacaggtgttcctgcttccaaagcgggtctaattcgaggaatggagggttcaattgcaagccttgctgagctagtcatgcttgctatggctataattgcaaatgatgtgtcccatttcggcttcctggccatcctgtatgagtcatcacttgctggtgcagcatggatgttctgtcagtggttaacaaatccaacacatgatcaaagggaactatttatggttgatcccctatatcaagttcaggcaatatattggatgacgcatgaaacaaccaggaaaactgcatgcgcctacttgctggtggtgcttggctgatctgcaata

SEQ ID NO: 100541 - DNA, 368 bp, Zea mays
cccacgcgtccgcccacgcgtccgcagggtcgagacgaggggtgcagccgctgcacaagagctcagagaatctgggctctccgatgtcatcttccatcagctggacatcaccgacgctgcgagcgtcagtcggctggctgagttcctcaaggctcgttttggaaagctagatatcctggtaaataatgccgcagttggtgctgttgagtacgtccaagatcctgctgacagttcaacgagcgaggaagagctgagtggcatggatatggtccaaaggcttcagtgcatgcttaagagagtccgggagacctacgacgctgcgacagaaagcatcaagacaaactactatggcataaagcatgtgatcg

SEQ ID NO: 100542 - DNA, 454 bp, Zea mays
  unsure (1)..(454): unsure at all n locations
gatttacccggtgtgagatatcgcattattcgaggaaccctagatgctgtcgcagtaaagaatcgtcaacaagggcgttctaaatatggggccaaaaagccaaaaaaataagtgattcgtttttagcccttataaaaagaaaacggattcttgaacctctttcacgctcatgtcacgtcgaggtactgcagaaaaaagaaccgcaaaatccgatccaatttttcgtaatcgattagttaacatggtggttaaccgtattatgaaagacggaaaaaaatcattggcttatcaaattctctatcgagccgtgaaaaagattcaacanaagacagaaacaaatccactattggttttacgtcaagcaatacgtagagtaactcccaatataagagtaaaaacaagacgtaataaaaaaggatcgacgcggaaagttccgattgaaataagatctaaa

SEQ ID NO: 100543 - DNA, 436 bp, Zea mays
gccttacgtagcgaagctcagagcaagcgagggtacggtcaaggggggtgatggcgctgtctcgacgcatggcggctcccgtcctcgtcctcatgctcctcctcgtcgccacagagctggggacgaccaaggtggcggaggcgaggcactgcctgtcgcagagccaccggttcaagggcctgtgcatgagcagcaacaactgcgccaacgtgtgccagaccgagaacttccccggcggcgagtgtaaggcggagggcgccacgcgcaagtgcttctgcaagaagatatgctagtagtagcctcggctttgctggcacaagcaggtcgtcggcacgcaacgcaattcaagcatcatatcggtcctacatccgggttgctgtctactcgaccccgttttctctttcgatcgatttcgttggttcctggtgctctcttc

SEQ ID NO: 100544 - DNA, 463 bp, Zea mays
  unsure (1)..(463): unsure at all n locations
ggtaaatcctaggaaatttagatgagaagaaagctatagcgaggcgcttgccaagtgcttggtgaatcgcctcaaccggatgtggttgtcgatctcgcggagtcgagtcgagtttagtcgtggttgaagatacaaactcatacgaagtgatcgtgtgtatggttataaagtataccaatctactgttgggaccatgcttcgtcgccgaaggtcctgcaggaagaaacagcttcggctgaagctgtctgcacgtgatgaccgaaggttgctgttcatgaagcttcggaattacaaaccgacttaaaagtagaatgaccttttagtccataagtgtttgagtcgttgttgtaaacttttatgaggggcatgtttgtaattcctcacaggctgtgtctngtgcctataaatagtgaacaatattcctttactgttcacacattcttgtaattgcaatcgcatcaat

SEQ ID NO: 100545 - DNA, 466 bp, Zea mays
  unsure (1)..(466): unsure at all n locations
ccggcatctgcaccagcggcaggggacgaagaagaagaagaaggcccctctctcgacctgctccgccgccagctcgccgcgggcgactaccggcaggcggacgagaccacgcgggcgctgatcatcgacctcgccggcgagcccgcgaggcgccgagggtacgtcttcttctccgaggtccagttcatcccggccgaggacctcgccgccatcgacgggctctggaaggagcacagcggcggcaggttcgggtacagcgtgcagcggcggctctgggagaagtcgcggcgcgacttcacccgcttcttcatccgggtcggctggatgaggaagctggacacggatgtggagcagtacaactacagggcctttcccgacgagttcttgtgggagttgacggacgacacgcccganggacacctgccggttaccaacgccctcaggggcacgcaacttctggcgaaca

SEQ ID NO: 100546 - DNA, 236 bp, Zea mays
caactattaaattctgggatcttgtagcttggaggactatgtgtacccttactcaccagaaaaagtctgtccgagctatggcgcttcatccaaaggagaaagcatttgcatcagcatcagcagacaacgtaaagaagtttaaccttcccaaaggcgaatttctgcacaacatgccttctcagcagaaaacaataatgaattcaatggctgcaaatgaggaacgtgtcttggcaact

SEQ ID NO: 100547 - DNA, 296 bp, Zea mays
gccttacgtagcgaagctcagagcaagctagggtactgtcaaggggggtgatggcgctggctcgacgcatggcggctcccgtcctcgtcctcatgctcctcctcgtcgccacagagctggggacgaccaaggtggccgaagcgaggcactgcctgtcgcagagccaccggttcaagggcctgtgcatgagcagcaacaactgcgccaacgtgtgccagaccgagaactttcccggcggcgagtgtaaagcggaaggcgccacgcgcaagtgcttttgcaagaagatatgcctgtag

SEQ ID NO: 100548 - DNA, 435 bp, Zea mays
cccacgcgtccgcgtcgctcaagaagtacgcgcccgacagcgccccggccctcgccatgaacgccaccatcgagaagaccaagcggcggttcgagaactacggcaagttcggcctgctctgcggcgccgacggcctgccgcacctcatcgtcagcggcgaccagcggcactggggcgagttcgtcaccccgggcctgctcttcctctacatcgccgggtggatcgggtgggtcggcaggagctacctcatcgccatcagcggcgagaagaagcccgccatgagggagatcatcatcgacgtcgagctcgccacccgccttctccccagggggttcatctggcccgtcgcggcctaccgcgagctcatcaacggagacctcgtcgtcgacgacaaggacatcggctactactagctgctggacctgtgcttgcaca

SEQ ID NO: 100549 - DNA, 420 bp, Zea mays
ggatgagtaccagcttgaagatcttgaaatcgtttctgctgatgatatgttgaaggtgggagtatctaacttccgaaatgcctgggaaaacatggatccagagactgagcgagttgacgagtatgggcttggagtaagggagagcttggctgatgctgtaagtgctgttataagcatccttggcatgcagccttgtgagggaactgacgtggtcccaagcaattcaaggtcgcacacttgtctgctctctggtgtgtttattggcaacgtgaaagtcttggtgagactgtcatttggaattagtgcaccgaaggaagtggccatgaagctggcagttagatctgatgatccagagatcagtgacaggatccacgaaattgtcgctaatggcttaaaacaatggtagtatcttttttttta

SEQ ID NO: 100550 - DNA, 399 bp, Zea mays
caagaacaggaaggaaacaccgccgccgtcgcgccttccattccagtactcgcggaggaaaggaacaccagccagcgccatggtcacgtcgacgaccgccgccgccgtgctgtccccgccgtccgtggccgggcttcgcctggcgccgtctccccgggcgcgcgtggcgttccgcgcggcgcgggcgcggcggtccgtggcggcgcgcgcggagctgagcccgtcgctggtgatcagcctgagcacgggcgtgtcgctcttcctgggccgcttcgtcttcttcaacttccagcgggagaacgtggcgaagcaggtgcccgagcagaacggcaagacgcactttgacgccggcgacgagcgcgccaaagagttcttcggcctgctcaagtccaacgaccc

SEQ ID NO: 100551 - DNA, 390 bp, Zea mays
cgcacacgttcgcgccaaccatatcgctgtggcgacgactcacacgcaggaccacgcggggagcgacaagtactgcgtgtggtacgcgctggacttcgtcgacggcgagctcaaagaggagatgtttgctattcgctttggatctgtcaagaattgcgagactttcaaggacactgctgaacagatagctgagcaccaaggaaagagcgatgataaagaatatgatgaagtctccactgccgcttatgatttgacacagaagttaacagtggcagagcccagcgcggaggaaaatgcagataatgaggacgctgatgcatacgatgataagaaggatgctaaagagtgaaagttgaatgcaatcaatggtcaaatggatgccattccatt

SEQ ID NO: 100552 - DNA, 416 bp, Zea mays
cccacgcgtccgctcttgataatattaatgtggtgcctttaacaacagagtcagaagtaggccacaatgagcattcaaatgaagcacctacaaaaacttttgcagaagagacagccaaactacctaatacttttaagacaccagaggccaacaatgaaagcacacatagaaatatggaagtgcttgtagacaagcctgaggagaaagttgttgtcaatgcgtctaatcttggtaattttgttgggaagcctgtgttccaagcagagcgcatatacaatcagactcctgtcggagtggtcatgggtttagcttggaatgctatgggtggttcgaccttgtacattgagacagcaaaagtagaggaaagcaaaggcaagggaacactttttgtgacaagccagcttggcgatgtcatg

SEQ ID NO: 100553 - DNA, 443 bp, Zea mays
cccacgcgtccgcccacgcgtccgctgcatcgctcgctccgcggtcgccaccactgccaggccgctccgcctcgccgcctcaaggtccgcgcgggctaccagactcgttgcccgcgccagcgtagtcgatgacttgccgctggtcgggaacaaggcgccagacttagaagccgaggctgtgttcgaccaggagttcatcaacgtgaagctctctgattacattgggaagaagtacgtcattctgttcttctaccccttggatttcaccttcgtctgcccgaccgagattactgcgtttagtgacagatacgaggaatttgagaagttgaacactgaggttcttggtgtttccattgacagtgtgttcttccaccttgcatgggtgcagacagacaggaaagtcggtgggctcggcgatcttaaatacccacttggttctgatg

SEQ ID NO: 100554 - DNA, 292 bp, Zea mays
ctttaggtggggtcaaagatggtgtcgctgaagttgcaaaagcgccttgccgcgagctacctcaagtgtgggaaaggcaaggtgtggcttgacccaaatgaagttagtgagatctccatggcaaactcccgccagaatatccggaagttggttaaggatgggtttatcatcaagaagcctcataagatccactctagatcccgtgcaagaagggcacatgacgccaagcaaaagggacgccactcaggatatggtaagcgtaggggtaccagggaggctaggctacccacca

SEQ ID NO: 100555 - DNA, 408 bp, Zea mays
tccacgcgcagagcatcctcgccatctgggcctgccaggtcgtgctcatgggcgccatcgaggggtaccgcgtcgccggcggcccgctcggagaggtcgtcgacccgctctaccccggcggcagcttcgacccgctcggcctcgccgacgaccctgaggccttcgcggagctcaaggtgaaggagctcaagaacggccgcctcgccatgttctccatgttcgggttcttcgtccaggccatcgtcaccggcaagggcccgctcgagaacctcgccgaccacctcgccgaccccgtcaacaacaacgcatgggcctatgccaccaactttgtgcccgggcagtgagggggtggaggcgccaccgcccaccggccaccgctgcggatatctaggtgttcggatgcacgtg

SEQ ID NO: 100556 - DNA, 375 bp, Zea mays
  unsure (1)..(375): unsure at all n locations
ggcagcttcgacccgctcggcctcgccgtcgaccctgaggccttcgcggagctcaaggtgaaggagctcaagaacggccgcctcgccatgttctccatgttcgggttcttcgtccaggccatcgtcaccggcaagggcccgctcgagaacctcgccgaccacctcgccgaccccgtcaacaacaacgcatgggcctatgccaccaactttgtgcccggcaagtgagggggtggaggcgccaccgnccaccggccaccgctgcggatatctaggtgttcggatgcacgtgagcgcgcactggttccagtttgtaccatgatgtaaattacttaccgtaccagggttcaatcggcaaggaaagaattgttgtgttcc

SEQ ID NO: 100557 - DNA, 471 bp, Zea mays
ggaattcccgggttactctgcagtccaagggacgtgccaaaacgtccagccagccgtcaccatcagcggcttccaggacctgcccagcggcgacgagaacgcgctcgccaacgcagtcgccaaccagccggtgtctgttggcgtcgacggcggatcgagtcctttccagttttaccagggtggcatatacgacggggatggctgtggcacggacatgaaccatgcagtgacggcgatcggctacggcgccgatgaccagggaacccagtactggatcctcaagaactcctggggcacaggatggggtgagaacggtttcatgcagctacagatgggcgtcggcgcctgtggtatctccacgatggccttctacccaacttcatgaacacaaatcttcagataaagcgtagtatataccagtccatgcatatgactgcagaataaagcatggagagataattacatgcgtgc

SEQ ID NO: 100558 - DNA, 466 bp, Zea mays
cttcaattcaacagcagcttgcatctttgaaacttaaagatgcgccggtcattggtgctgttaatcctgtgaagggagagatagtcctcgcacaatttagcgttgacaactcctggaacagagctatgattgttaatggacctcgttctgttgaatctccggacgacaagtttgaagtattctatattgactatggcaaccaagaggtggttacctacagtcgtttacgacctgtagacccatctgtttcctcgtctactgctcttgctcagctatgcagccttgctttcataaaagtgcccagtcttgaggatgactttggtcaggaagcagcagagtatctaagtgaatgtttgctcagtagctcaaagcaatacccggcaatgatcgaagaacatgatactttctgggggaaatcaaaaggacaaggaaccggaaatgttctcattggtactcttggtgatgc

SEQ ID NO: 100559 - DNA, 414 bp, Zea mays
  unsure (1)..(414): unsure at all n locations
ctccttcttatccccacctccctcgcggatcactcgccgccgccgccggccgcagccatcgccgtgatgctgtccctgtcgagggcgatcgggaggcggctcttctcgtccgccgaggccgcgtcgacggctgcggtgaggacggcgcagaacccgctcgaggagttcttcgaggtcgagcggagcaccgaggagggcaagcctnctccccactacggtcgcagctggaaggcttctgaactgcgactaaaatcttgggatgaccttcagaaattgtggtatgttcttctaaaggaaaagaacatgctaatgacacagcgtcaaatgctgcattcagagagcatgaggtttccaaatccagaacgaatttccaaggtaagaaatcaatgtgcccggataagcatgtctngactg

SEQ ID NO: 100560 - DNA, 409 bp, Zea mays
gcgggggcggcgagcggctgctcagggcgtcgcagtgctacctgtcgaccacggccggcccgatcgccggcatgctgttcgtgtccaccgagagggtcgcgttccggagcgaccgctcgctggcgctgccgctgacgtctccggccggcggcggcagcggcagcggcacgacgacggtgctgcgggtgccgtacaaggtgtccatcccgctgcgcagggtcgcggcggccaggccgggccagaacagggaccggccggagcacaagtacgtgcaggtcgtcacgcgcgacggcttcgacttctggttcatgggcttcgtcaggtaccaggcgtccctgcaggagctggagaaggccgtcgcgcagtcgcagtcgcaatgacctcaggcgatccgccggccggcccggcg

SEQ ID NO: 100561 - DNA, 475 bp, Zea mays
caagaaatgcttctcaactttgctacagaatgtgcggactctgtacttcctgcgtacataccgatcatagaacggaggaagaacactccgttcaacgaggagcacagggcatggcagcaattgcggagaggtcgttatgtggagttcaaccttgtctacgaccgtggtacaacatttggcctaaagactggaggaaggattgagagcatacttgtgtcccttccacttacagcacgatggcagtatgatcataaaccggaagaaggaaccgaggaatggaaacttctggaagcctgcataaacccgaaggattggatctgattagccgttattcttgagatcttttgttagaagtttcccttctgtagggctaagaccacgtgcagtttcattatatattttgcatctgtagaatcgtgaataaatatgatgtagtgatgttgtagctgtttggatctatctgctggtttttccc

SEQ ID NO: 100562 - DNA, 402 bp, Zea mays
  unsure (1)..(402): unsure at all n locations
cccacgcgtccgcccacgcgtccgcgttgaggacaagcccaccgtcctcctgtacggcggcngcgccgtcgtcgcgctatggttgacgtccgttgtcgtcggggccatcaacgccgtgccgctgctccccaagatcctggagctcgttggcctcggctacaccggctggttcgtctaccgctacctnctcttcaagcaaagcaagaaagagctggtcgacgacattgagaccctcaagaaaaagattgctggaacggcggaataagcgctagctctcgtggaaagctttagaaaaccaacgacgagaggggccgtttcttctttgcaaattaagatatcaaaccgaggaacgtaccaatgcagctactggtcgccatgtcatgtgttgtgtgatgcataccc

SEQ ID NO: 100563 - DNA, 416 bp, Zea mays
cccacgcgtccgccacgcgtccgccggctcccagatcttcagcgagggcgggctggactacctcgggaacccgagcctcatccacgcgcagagcatccttgccatctgggcctgccaggtcgtgctcatgggcgccgtcgagggctaccgcatcgccggcggcccgctcggcgaggtcgtcgacccgctctaccccggcggcagcttcgacccgctcggcctcgccgacgaccccgaggccttcgccgagctcaaggtcaaggagctcaagaacggccgcctcgccatgttctccatgttcggattcttcgtccaggccatcgtcaccgggaagggcccgctcgagaacctcgctgaccacattgccgaccccgtcaacaacaacgcttgggcctacgccaccaacttcgttcccg

SEQ ID NO: 100564 - DNA, 427 bp, Zea mays
cggacgcgtggggttggaagggatcctgctggtatgagccaccccacagagaaaagggacctctatgatgctgatcacggaaagaaggttttgagcatggctcctggccttgagaggctcaacatccttcctttcaaggtggctgcatatgacacaaagcaaaagaaaatggatttctttgatccatcaaggaaagatgatttcctcttcatctctggcacaaagatgcgcactcttgccaagaaccgagagagtcccccagatggttttatgtgcccgggtggctggaaggtactcgttgaatactatgacagcttggtgccatctgagggcagcagcaagctgcgtgaaccaattgcagcctaaatctggaaaatccttcatataaggaatgctactatatcttagcaagcggttctttgcgaca

SEQ ID NO: 100565 - DNA, 364 bp, Zea mays
  unsure (1)..(364): unsure at all n locations
cctaggggcactcgcatggaaaggcctcctagacaatttgcgcctgctttcagagcttatgttggcaacttgccatggcaagctgatgactctaggctggtgcaattgttcagcgagtacggagaagtcgttaatgctgcggttgtctatgatagagaaaccgggcgctcacgaggattcggttttgtaacgatggtgtcgaaagaggaactcgacgacgctatctctgccctggatggacaggaattggacggcncgcctcttcgggtgaacgttgcagcagagcgaccacaagagggcttttgatgcngcggtacgagagagatggcttgcttgttgtgatgagagcacngagacacaacgc

SEQ ID NO: 100566 - DNA, 421 bp, Zea mays
  unsure (1)..(421): unsure at all n locations
cgcccgatcgggatggcaagtgccgccagcgacaggtgtcatgcagcgcggccggngatgctgtggcggccccgaaggcggaagaaggaggcgggctcatgaagacgctgtggctcggctcgctcttcggcctctggtacctgttcaacatctacttcaacatctataacaagcaggtactcaaggttttcccataccctataaacatcacagaagttcaatttgctgtcggaactgtagcagctctgttcatgtggatcactggtattattaagaggccaaagatttctggagcacagcttgtagccatcctacctctggctattgttcatactatgggcaatcttttcaccaacatgagccttgggaaaattgcagtgtcatttacgcacaccatcaaagctatggagcctttcttttc

SEQ ID NO: 100567 - DNA, 439 bp, Zea mays
gaataatcctgtaggtttgatgcttctttctgaggttgctttaggagacatgtatgaactaaagaaagccacgtccatggacaaacctccaagagggaagcattcgaccaagggattaggcaaaaccgtgccactggagtcagagtttgtgaagtggagggatgatgtcgtagttccctgcggcaagccggtgccatcatcaattaggagctctgaactcatgtacaatgagtacatcgtctacaacacatcccaggtgaagatgcagttcttgctgaaagtgcgtttccatcacaagaagtagctgggagactaggcaagtagagttggaaggtagagaagcagagttaggcgatgcctcttttggtattattagtaagcctggcatgtatttatgggtgctcgcgcttgatccattttggtaaagtgtgcttgggca

SEQ ID NO: 100568 - DNA, 431 bp, Zea mays
  unsure (1)..(431): unsure at all n locations
gatggcggtcctgggcatggacgacgcgacgcgcgtgggcaagcggcccttcttcacgacacacgaggagctcctagaggaggagtactacgacgagcaggcgccggagaagaagcgccgactgacggcggagcaggtgcagctgctagagcggagcttcgaagaagagaacaagctggagccggagcgcaagaccgagctggctcgccgcctggggatggcgccccgccaggtagctgtttggttccagaaccgccgcgcgcgctggaagaccaagcaactcgagaccgactatgaccgccttaaggctgcttacgacgcactcgccgtcgaccaccagggcctnctggccgacaacgataaccttcgggcacaggtgatctccctgacggagaagctgcaaagcaaggaggacatcccgtcagcaacca

SEQ ID NO: 100569 - DNA, 368 bp, Zea mays
  unsure (1)..(368): unsure at all n locations
gctcgcgcatcctattgccctcgcgccaccgtcgccgccgctgcagcgagccaccgccctgccgtcgcctgaggtagacaccaagccaccgccatggggcgtatgcacagccgcgggaagggtatctcttcatcggcgctgccgtacaagaggactcctccgatctggctcaagacagctaccaccgaggtggaggagatgattaccaaggctgcgaagaagggccagatgccgtcgcagattggggttctgctccgtgaccagcacggcatcccgcttgtcaagagcgtgactggtagcaagatcctccgcattctcaaggcccatgggttggcgccggagatcccggaggatctctacttnctcat

SEQ ID NO: 100570 - DNA, 347 bp, Zea mays
  unsure (1)..(347): unsure at all n locations
gtcaaaatcacttggtaacgttgttgatcctcttgaggtgataaatggcatgtcgctggatggtcttctgaaacgtttggaagaaggcaatctggatccaaatgaattaaacattgcaagagatgggaagaagaaagattttcctgatggcatatcagaatgtggtaccgatgctctacgctttgcactgatatcgtacacnttccagtctgacaggataaatcttgatattaagagggtggttggatacagacagtggtgcaacaaattatggaatgccatccgctttgcgatgggcaaactgggtgaccattacattccgccggcaactgttgatgtgtctctta

SEQ ID NO: 100571 - DNA, 420 bp, Zea mays
  unsure (1)..(420): unsure at all n locations
cggacgcgtacggcgacacgaagttcgataccctgtcctacctggcgtcgctgccgacggacgacctgctgaagcaggtggactacctgctgcgcaacggctggataccctgcctcgagttcagcaaggtcggcttcgtgtaccgcgagaactccacctccccgtgctactacgacggccgctactggaccatgtggaagctgcccatgttcggctgcaacgacgccacccaagtgtacaaggagctgcaagaagccatcaaatcctacccggacgccttccaccgcgtcatcggcttcgacaacatcaagcagacgcagtgcgtcagcttcatcgnctacaagccccccggcagcgactagaccgngccccgccggccgcccccggcggctagctagctagctaagctctgcgtgagct

SEQ ID NO: 100572 - DNA, 391 bp, Zea mays
ccgctccgcaaggagcctgaattttatgttcttaaagaagatgagtcgccctgtatttttggtccaatcgtgaaacaaagatggtcctatgcatgcgcaaaacaacttattgagaggcttgtatttgctgaaggtgcagaaaatggccttgatttcacaatcgtgagacctttcaattggattggaccaaggatggacttcattcctggtgttgatggtcctagtgaaggtgtgcctcgggttttggcttgcttcagtaacaatctgctccggagagagcccttgaagcttgttgatgggggtcagtctcagagaacctttgtctacatcaaggatgccatcgaagctgtagtgctgatgattgaaaatcctgctcgagccaatggccaca

SEQ ID NO: 100573 - DNA, 470 bp, Zea mays
ctcatgggtgccgtcgagggctaccgcattgccggcgggccgctcggcgaggtcgtcggcccgctgtaccctggcggcagcttcgaccccctcggcctggccgacgaccccgaggccttcgccgagctcaaggtgaaggagctcaagaacggccgcctcgccatgttttccatgttcggcttcttcgtccaggccatcgtcaccggcaagggcccgctcgagaacctcgctgaccacatcgctgacccagtcaacaacaacgcatgggcctacgccaccaacttcgtccccggcaactaagctcaacggctatgctatgcaacttcattgtctttcggatcggagagggtgtacgtacgtggattgattgatgctgcgagatgcatgtgtgtcttttgtttcacgttgcattgcataggcaagtcgagatgatgagttggcgttgtacacttagatgaaccatgtttggg

SEQ ID NO: 100574 - DNA, 365 bp, Zea mays
  unsure (1)..(365): unsure at all n locations
gcggtatctttttcactcaggactgggtatccatgccaggtgttataccggtggcttctgggggtattcatgtttggcatatgccagctctgaccgaaatctttggagatgattccgtattacaatttggtggaggaactttaggacatccttggggaaatgcacctggtgcagcagctaatcgtgtggctttagaagcctgtgtacaagctcgtaacgaagggcgcgatcttgctcgtgaaggtaatgaaattatcaaagcagcttgcaaatggagtgctgaactagccgcagcttgtgaaatatggaaggagatcaaaattgatggtttcaaagcgatggataccatttttaaataaanaaaa

SEQ ID NO: 100575 - DNA, 402 bp, Zea mays
agcaatcgcaggaaccctagcgccgccgcacccgcaggaatgggtatcgacctcgtcgccggtgggaggaataagaagaccaagcgcactgcgcccaagtctgacgatgtctacctcaagctcctcgtcaagctctaccgtttcttggtcaggaggaccaagagcaatttcaacgctgtcattctcaagaggcttttcatgagtaaaaccaaccgaccaccaatctccatgcgccgccttgtcaagtttatggaaggaaaggagaagaacattgctgtcattgttggcacagtcacagatgacaaaaggatccaggaggttccagcaatgaaagttactgccctgaggttcacggagacagcaagggccaggattgtcaatgctggtggcgagtgcctcaca

SEQ ID NO: 100576 - DNA, 403 bp, Zea mays
cccacgcgtccgcccacgcgtccgcccacgcgtccgctcgccgaggaggagcgcctcgtcatcatgcgcttcggccatgactgggacgagacctgcatgcagatggatgaagtgctagcagcagtagctgagaccataaagaactttgcggtcatctaccttgttgacatcacagaggtccctgatttcaacaccatgtatgagctgtacgacccttcgacagtgatgttcttcttccggaacaagcacatcatgattgatctcgggactggaaacaacaacaagatcaactgggccctgaaggacaagcaagagttcatcgacattgtggagaccgtatacaggggcgcccggaaaggccgtggtctggtgattgctccaaaggactactccaccaagtacc

SEQ ID NO: 100577 - DNA, 432 bp, Zea mays
cccagaacgaggccatggacgaggcttgttggtccgacgtcgaattctgcagaaccactcaggtcaggtgacagaaaaaaaaagcttggcacggcaccctgttgagcctgttcctctcatccccgccctcacctttctgtctcctcccgtcgctcctctgccagaactggtactgtctctccaagacactcgcggagctggaagcgcttgattacgcaaagaggagtggactagacgtggtgtccgtctgcccgtcgctggtgatcgggcccttgctgcagtcgacggtgaacgcaagcagctccgtcatagtcgattgcttgaaaggagatcgtgaggtgaagctgaagctgaggaacttcgtggacgtccgcgacgtcgccgacgctctgctcctggtgtacgagactccggaggcgtctggacggtaca

SEQ ID NO: 100578 - DNA, 414 bp, Zea mays
ggttcgggttcgtgaggttctccggggttcggtttcgtgggtgagcggatcgagatggcggcgtcggatgttgagtaccgctgcttcgtcggcggcctcgcctgggccacggacgaccactccctccacaacgccttcagcacctacggcgaggtcctcgagtccaagatcatcctcgatcgggagacgcagaggtcccgcggcttcggcttcgtcaccttctccacggaggaggcgatgcggaacgccatcgagggcatgaacggcaaggagctggacggccgcaacatcaccgtcaacgaggcccagtcccgcggcggctgtggaggcggcggcggtgggtacggtggtggccgtggaggcggcggctacggcagtggcgggcgccgtgatggcggcggcggctacggcggt

SEQ ID NO: 100579 - DNA, 274 bp, Zea mays
actcactctctctcaccatccgcgccagttcaaccaagtcagcacccgcgcgcggcaaggagttcacgcccatggcgagcaccaacatggcgtccgccacctcgcgggtcatgctggccgcgggcgtgcccactgtcagtagcggcagcggccgtgtcagcttcgcctcggcgcccaaccggcttggcaagaggcttgtggtccgggccgatgaagagtacccggcagagccggcgcccacggctgaaggggagggcgccgtggtcaccaagcc

SEQ ID NO: 100580 - DNA, 370 bp, Zea mays
gtcaagggacaggatggcaatgaggtgttctttcgcataaagaggtccacccagctgaagaagctgatgaacgcctattgcgaccgccagtctgtggacatgaatgccattgcattcctgtttgatggccgcaggcttcgcggcgagcagacccctgatgagctggagatggaggacggcgacgagatcgacgccatgcttcaccagaccggaggcatgcgtcctagcaccacctaaaagcagcagctgcggagcctcgttttgctctccgccctgcgtagtactaaacaaaagggaaaaagtctttttaaggaacttgtgatgctctggctccttgtgccattgctgagggacattcttagcctttatt

SEQ ID NO: 100581 - DNA, 323 bp, Zea mays
attcgttgctcgcgatcctcgcttcgggatccggaagagatggccaagtcgaagaaccgcacggggcacaaccagtcgtacaaggcgcacaagaacggcatcaagaagcccaagcgccaccggcagaccttcaccaaggggatggaccccaagttcctgaggaacctgaggtattcaaggaagggcaacaagaagagtggtgaggctgaggagtatgaaggaaagcatgggtgtgtttcctatgttttagctcagttgtatggtgggacttatgaccttttgctgccgtaatgtttttatgataatcatgttttgaagagttt

SEQ ID NO: 100582 - DNA, 419 bp, Zea mays
gcccaacttgatcttgctagtggaagattgtggtcgcagttgttgcatttcaaacaagaaggttttcttcttggtgctggaagtccttctggatctgatgctcacatctcatcaagtggcattgttcagggacatgcgtactcaattttgcaggtaagagaagttgatggccacaaactcatccaaatcagaaatccatgggcaaatgaagttgaatggaatggaccatggtcagactcgtcaccagagtggacggaacggatgaagcataagctcatgcatgttccacagtcgaagaatggggtattctggatgtcttggcaagattttcagattcactttcggtcaatatatgtttgtcgtgtttatccacctgaaatgcgttactctgtccatgggcaatggcgtggctacaatgc

SEQ ID NO: 100583 - DNA, 427 bp, Zea mays
  unsure (1)..(427): unsure at all n locations
cctgttgcccgagcacctgctgctggccaacaaacaaatcagcaggccgcatcacccgctcagccagcagttgcattgccagtgcagccatcacctgcctctgcagggcctaatgcaaatcctttgaacctttttcctcagggtgttccaagtggtgggtccaacccaggtgttgttccaggtgcaggatctggtgctcttgatgccttgcgacagcttccacagtttcaagcactccttcagttagtccaggctaatcctcaaatcttgcagccaatgcttcaagagctaggtaaacaaaacccacaaattctgcggttgattcaggaaaatcaagctgagtttctccgcttggtgaatgaatcttctgagggtggtcctggagggaacatactangtcaactggcagctgctgtgccacaaacgc

SEQ ID NO: 100584 - DNA, 350 bp, Zea mays
cccacgcgtccgcggacgcgtggggagagatcgcatcttgcctgcccacccaagcttggctttcgttcctcctcgccccagcgacgcggcctcccgtagaccgagcaaggcaacccaccactgagaggcacgcagaggagcaggaagccggagaccaagatgtcgtcggtgttcagcggcgatgagacggcccccttcttcggtttcctcggcgccgccgccgccctcgtcttctcatgcatgggcgcagcgtacgggaccgcgaagagcggcgtcggcgtggcgtcgatgggtgtgatgcggccggagctcgtcatgaagtccatcgtgcccgtggtcatggctggtgt

SEQ ID NO: 100585 - DNA, 433 bp, Zea mays
aaacggtataatcttttatgcaggtagcatcttcaaagctgcagggctcaagaacagtaacctggacacatgtatacttggagtgattgcggttcttgccactgctgttacgaccaagatcttggacagggctggacggagaatcctccttatcatttcttcttttgggatgaccctaagccttcttgtggttgctgttgtattttacatcaaggacaatatttcacatgactctgacttgggtaacaccttaagtatggtgtccttggttggtgtcttggcttatgtcactgcctactcctttggtatgggtgccattccatggatcataatggctgagatccttccagttagcatcaagagtgtggcaggaagctttgcgaccctagccaactggttgacatcctttggaataacaatgacagcaaatttg

SEQ ID NO: 100586 - DNA, 410 bp, Zea mays
gccgtagccgtagccgtagcgataagagtgagctagctggtgcacaccggcatggcggccacggcgtactccgtggcgctcctcggcggcgcgcgcctccccgccgctccgcgctccgccctcctccctcggcgcagcgtctgccagcttcgcttccaagatgcaccgaggctctccctgctccgtgcgaaggccgcttccgaggacacatcggcctccggcgacgagttgatcgaggacctcaaagcgaagtgggacgccgttgaggacaagcccaccgtcctcttgtacggcggcggcgccgtcgtcgccctctggctgacgtccgtggtcgtgggcgccatcaacgccgtgccgctgctccccaagatcctggaactcgttgggctcggctacaccggctgggtcgt

SEQ ID NO: 100587 - DNA, 405 bp, Zea mays
  unsure (1)..(405): unsure at all n locations
tggttgtgttggtgctgcgcaggtgtacccgctgttcgcggcgatgggagttgccgttggcatctgcgggtttcagctcttccggaacatcaccggcaacccggaagtcagggtaaacaaggcagggagggcagccggcgtgcttgagaaccatgaggaggggaggcgttacgccatgcatggcctcagaagctttgtgcacgacaagacccccgagatcatgccagctatcaacaagttctttactgaccccaagtgaagcaaagcagctttggttggccgctgatgacgatggttctggtactagttgcccttggggattgtgtaccctntttatggcaattcgatatgggaatgagttcgacggtccctggttgttcttcgtactcacctgtcatgtggatt

SEQ ID NO: 100588 - DNA, 418 bp, Zea mays
atcaagctccttgctccccgaccaaaccctacctgtacccgccgccgccgccgcagcagccatgccgcccaaattggacccctctcaggtggtggaggtcttcgtccgcgtgacgggaggcgaggtcggcgcggcgtcgtcgctggcccccaagatcggcccgctcggtctctccccgaagaagatcggtgaggacatcgccaaggagaccgccaaggactggaagggcctccgcgtcaccgtcaagctcaccgtgcagaaccggcaggccaaggtctccgtcgtcccctccgccgcggcgctcgtcatcaaggcgctcaaggaacccgagagggacaggaagaaggtcaagaacatcaagcacagcggcaacatcagcctcgacgacgtcatcgagatcgccaagaccatgcggaac

SEQ ID NO: 100589 - DNA, 387 bp, Zea mays
cggacgcgtgggcggacgcgtggggaaggacgagtcctggcacccgctaccagagaggctgtacaaaagcctggactttatgactaggaaactgcggttcaccatgccgttccccttgctcgcgttcccgttatacttgtttgcgaggagtccagggaagtcaggatcacacttcaacccaggcagtgatctgttccaacctactgaaaagaatgacatcataacatcgacggcgtcctggctggccatggttggtgttctggccggtctcacctttctgatgggtcctgttccgatgctaaagctctacggagtcccatacttggtatttgttgcttggctggatatgggcacatacttgcaccatcatggccacgaagacaagct

SEQ ID NO: 100590 - DNA, 249 bp, Zea mays
ctgacgcatatgcggacgcgttttgaatttcgagtcctggcacccgctaccagggagggggtacaaaagcctgtactttatgactaggaaactgcggttcaccatgccagtccccttgctcgcgttcccgttatacttgtttgctatgagtccattgaatgtaagatcacacttcaacccaggcagtgatctgttccaacctactgaaaatattgacatcatgacatttactttaatctggctggccat

SEQ ID NO: 100591 - DNA, 377 bp, Zea mays
  unsure (1)..(377): unsure at all n locations
cccacgcgtccgcccacgcgtccgcccacgcgtccgcccacgcgtccgccgaccccaagcgcagtgcccgtgactcccacgtcccggtgttggcccctcttccgattgggttcgccgtgttcatggtgcacctggccaccatccccatcaccggcaccggcatcaacccggcgaggagcttgggagccgcggtcatctacaacaaggacaaggcctgggacgaccaatggatcttctgggtgggcccactgatcggcgccgncatcgccgncgnctaccaccagtacgtgctgagagccagcgccaccaagctcgggtcctaccggagcaacgcctaataagtcccggcggcgggagcttgtggcgccaccgatcga

SEQ ID NO: 100592 - DNA, 404 bp, Zea mays
cggacgcgtgggttggaacaggaaattaagtttcttagtcaatttaagcatgaaaatattgtgcagtactatggcagtgaaactatcgaagatagattctacatatacctggagtatgttcatcctggttcaatccataagtatgttcatcaacactgtggatcgctgacagaagcagtcatccgtaacttcacacgtcatattctcaagggtcttgcttttttacatagccaaaagattatgcatagggatatcaaaggggcaaatttgttagttgatattaacggtgtagtgaaattggctgacttcggaatggcaaagcatttgagtactgcagctcctaatctttcattgaagggaacaccatactggatggctcctgaggttgttcgggctacactcga

SEQ ID NO: 100593 - DNA, 425 bp, Zea mays
ttcctcacagcgagaagaggtttgctggtttcaagaaggatgacaagcagctggatgctgatatccatcgcaagtacatctatggtggccatgttgctgactacatgaggaacctcgctgaagaggagccagagaagtaccagtctcacttcagtgagtacattaagaagggaattgaggctgacgacatggaagctctgtacaagaaggtccatgctgccatccgtgctgatccttctgtggtcaagtcaaccaagcagccaccaaaggagcacaagaggtacaaccccaagaaactgacatacgagcagaagaaggccagtctcattgaaaggctcaaccaactcaactcctcgggcggcgcagatgacgacgacgaggatgacgaagtaaagttcgtcccatcgaagtaatgctatcttatg

SEQ ID NO: 100594 - DNA, 358 bp, Zea mays
gaccaacaagatcatggacttcatcaagtttgacgtcggcaacgtggtcatggtgaccggcgggaggaacaccgggcgtgtaggtgtgatcaagaacagggagaagcacaagggcggcttcgataccatccacgtcgaggactccatgggccaccagttcgccacccgcatgggcaacgtgttcaccatcggcaagggcaacaagccgtgggtgagcctgcccaagggcaagggtatcaagctcagcatcatcgaggagcagaggaggcgcgactttgctgcccaggctgctgccaaggcataagttctctgaatgtgctgcttggagctttttgctatgtctaagttaaattttatc

SEQ ID NO: 100595 - DNA, 308 bp, Zea mays
  unsure (1)..(308): unsure at all n locations
gagcgccacgacgtacgcttccgctaggtcgtcgtgccggcgcaggctaccttcggtgagttgaagaggatccttgttcagactactggcttggagcctgagaggcanatgctcttcttccgtgggaaggagaagagtgacagagagttcctgcacacggcaggtgttaaggatggagcaaagctgcttctgctcgagaagcctgcccctgccaacatatagcagaaggttgagcctgtgattatggatgaaagcatgatgaaggcatgtgcggctgttgctcgtgttagagttgaagttgataagct

SEQ ID NO: 100596 - DNA, 269 bp, Zea mays
ctattgtgctcatcagtcagtatattgccaacatgataaagattctggtggatagctacaacaagccagtccctgctattctggagatcccatccaatgaccatccatatgatccaccgcacgactcggtgctgtctcgagtgaagtatctcttctctgcggaatcggtggcgtctgataggcgatgaaggcatccttgtgtagtagtaccctttggtgtatctggtttggtatgcattgaaaagaagtggcatgcgttcgagcgagac

SEQ ID NO: 100597 - DNA, 409 bp, Zea mays
cccacgcgttcgcggacgcgtgggtgacgatcggaggccatgtgctgcgcgaaggtgagtggctgtcgctgaatgggtcgactggtgaggtgatccttgggaagcatccgctttccccaccagcccttattggcgatctgggaactttcatggcctgtgtggatgatgttagaaagctcaaggtcctggctaacgccgatacccctgatgatgcattgactgcgcgaaacaatggtgcacaaggaattggattatgccggacagagcacatgttctttgcttcagacgagagtgataacgctgtcaggcagatgattatggctcccacgctagagctgaggcagcaggcgctcgaccgtctcttgccgtatcagaggtctgacttcgaggcatgttccgtgctatggat

SEQ ID NO: 100598 - DNA, 204 bp, Zea mays
gtggaggcggcggctacggcggtggcgggcgccgtgatggcggcggcggctacggcggaggcggcagctacggtggcggcggcggctacggtggtggcggcagcagctaccgcggtggcaaccgtggcggccgctacggcaactccgacgggaactggaggaactgagcggtggggcccgcgcggccaaagtatcctgttcgct

SEQ ID NO: 100599 - DNA, 339 bp, Zea mays
cgcgccgccgccgccgccgaaacagctcatctctctctcgatctcagccatggcggaggtggagcagccccaggacgcggtgaagctcttcaaccgctggaccttcgacgatgtccaggtgaacgatatctcgctgaacgactacctggctgtgactgcggcgaagcacgcgacattcctgccgcactccggggggcgctactccaagaagcggttccgcaaggcgcagtgcgccatcgtcgagcgcctcaccaactcgctcatgatgcacgggcgcaacaacggcaagaaggtcatggccgtccgcatcatgaagcacaccctggagatcattcacct

SEQ ID NO: 100600 - DNA, 422 bp, Zea mays
cccacgcgtccgacgtatatgcccttgtcccggttcctttccccatccccaactccattaggtgcttgatccttgagaagagagaggaagacgagagctagaagcgaaggagaaaagcagttcttcagctaggcaggagggcacaggaaggaggagatggcgtcaaagaggattcagaaggagctcaaggatctgcagaaggaccctcccacctcgtgcagtgcaggtcctgttggtgaagacatgttccactggcaggcaacaataatgggtccatctgatagcccatattctggtggagttttcctagttacaatccattttcctcctgattatcctttcaaaccaccaaaggtggcatttcgcactaaggtgttccatccaaacatcaacagcaacgggagcatttgcctcgacatctt

SEQ ID NO: 100601 - DNA, 436 bp, Zea mays
cggacgcgtgggcgcctttccttggcctcggcacatggttacagcacgagcgctcagacccgaccctgtttgagatgacgcatgggctcactgcctgggacctgaatgaccacaagccagctttcggcgagctcttcaaccaaggtatggtctgcgacagcagcttcgtcatggacatcgtcgtcaaggagtgcggcgacgtcttccggggtctaagctcccttgtcgacgtcgccggagggcttggcgcggcggcactggctatctcgaccgcgttcccgcatgtccagtgcagtgtcctggatctcccgcatgtcgccgccaatgctcccgctaacaccagtgtcaagtatattgctggcgacatgtttgagagcattccaccggcagacgccgtcttccttaagtgggttttgcatgactggggcgatgctga

SEQ ID NO: 100602 - DNA, 178 bp, Zea mays
gccgacccggagactttcgccaagatccgctagctggaggtgatccactgccgctgggccatgctgggcgcgctcgggtgcgtgttcccggagctgctcgcccgcaacggcgtcaagttcggcgaggccgtgtggttcaaggccgggtcccagatcttcagcgaggggcgggcttgac

SEQ ID NO: 100603 - DNA, 318 bp, Zea mays
caattccatcctgagttcaagtcaagaccttcaaaaccttctcccctatttgtgggactaattgcagctgcatctgggcagttggatagggtgctgcaagaccgctgcaatggtcatgttggttcagctaaacatgttctgagcaatggctcatatacatccgcagtacaccaaaatgggaacccaaagaagctcaccaatggtctctcaaacggaacatactatgccaatggcaatggtgtgcatgcttagaccatcagatggatggatcaaggattttgcaactttttacttcaattatgcggttcctaatgcatc

SEQ ID NO: 100604 - DNA, 437 bp, Zea mays
  unsure (1)..(437): unsure at all n locations
ctccggngttcgggttcgtgggtgagcggatcgagatggcggcgtcggatgttgagtaccgctgcttcgtcggcggcctcgcctgggccacggacgaccactccctccacaacgccttcagcacctacggcgaggtcctcgagtccaagatcatcctcgatcgggagacgcagaggtcccgcggcttcggcttcgtcaccttctccacggaggaggcgatgcggaacgccatcgagggcatgaacggcaaggagctggacggccgcaacatcaccgtcaacgaggcccagtcccgcggcggccgtggaggcggcggcggtgggtacagtggtggccgtggaggcggcggctaccgcggtggcgggcgccgtgatggcggtggcggctacagcggtggcggcggctactgtggcggcggcggctacagtggtggtggc

SEQ ID NO: 100605 - DNA, 345 bp, Zea mays
  unsure (1)..(345): unsure at all n locations
gcgaccacgctcgctgtgcttcttcttttctcttttgtcgtcagtctggagacaagctggatacgaatctagctgcagtcccaagacctaacctctatgctgagagaccgctgaaggaggggtctcattcttgggagaggaaagcacccgtggaccactgaaacacacactgatcaaaccgaaaggatgtcttcggcggggcatttgagagtttggtcacgggggctatcttcagcgtttattttatttttaacgcaagccttcgcactgaaaaaacaagggtgtccaacncttgcactgtatctgtagcagagccctcctgtcggctatatatatatatgataa

SEQ ID NO: 100606 - DNA, 347 bp, Zea mays
gcaagccatggcgccgaaaggatggtgtctacatgtactttgaagacaatgctggagtgattgtgaacccaaagggagagatgaaaggttctgccatcactgggcccatcggaaaggagtgcgctgatctctggcccaggattgctagcgcggcaaatgcgatcgtctaaaggaagcagtttgtcgaagtttcatttaaaatggggacttgagaagggagttcttagttagacgagcttttgattgccctgaatgtgtttccccggctaatgcttgtgctgctggaccgtttcctgatagctttgctttgatgacatcctccccgttatcgataaagttgcttaaaa

SEQ ID NO: 100607 - DNA, 446 bp, Zea mays
cggacgcgtgggccagattctttctgttagaaaatgttcggaactttgtttccttcaacaaagggcagaccttccgtttggcagttgcatctcttctggagatgggataccaggtccggtttggaattctagaagcaggggcttttggtgttgcccagtccaggaaaagggcgtttatttgggctgctgcacctggagagatgcttcctgattggccagagccgatgcatgtgtttgctagccctgagctgaagataacactgcctgatggccaatactatgcagctgcaagaagcactgctggtggagcgcctttccgagcgattactgttagagatacagttggggatctgcctaaagtgggaaatggtgccagcaaactcacgcttgagtatggaggtgagcctgtgtcttggttccagaagaagataagagggaatatgatg

SEQ ID NO: 100608 - DNA, 443 bp, Zea mays
  unsure (1)..(443): unsure at all n locations
gccgatcggagaggtggtcgacccgctgttccctggcggcagcttcgacccgctcgggctggccgactacccggaggcgttcgccgagctcaaggtgaaggagatcaagaacggccgcctcgccatgttctccatgttcggcttcttcgtgcaggctatcgtcaccggcaagggccccctcgagaacctcgccgaccacatcggcgaccccgtcaacaacaacgcctgggcttacgccaccaacttcgttcccggctagtgagcgagggcatgatgcttgcatgcgtgtaccgtagacgtacgtattgctacgtactgcatgttgcaccagtatttgtgaagggagctctgggagccagagactgtaccgctagtgtatctgtatgcatgctgtggagctgaacaataaaatatgctgntgatatattatgtcttcatttaaa

SEQ ID NO: 100609 - DNA, 285 bp, Zea mays
cccgtatcaaggtgcacgagctcctgtggaagagcaagacggacctgcaggcgcaggtcaaggagctgaagtctgagctctccctcctccgcgtagccaaggtcaccggcggcgcacccaacaagctctccaagatcaaggtggtgcgcacctagatcgcgcgcgtgctcacagtgatctcgcagaagcagaaatcggcgttgcgggaggcgtacaagaagaagaacctgctccccctcgacctccgccctaagaagacccgtgccatccgccgccgtttgacca

SEQ ID NO: 100610 - DNA, 161 bp, Zea mays
ccacgcgtacgctattggttgctgggcattgacagagccagattatgtaagtgatgcaagctccctatggacgtgcagcaaccaatgtacctggtggttggcatttatatggacaaaaacgctggataggtaacagcacttttgcagatgtcctcatcatt

SEQ ID NO: 100611 - DNA, 468 bp, Zea mays
gccggcccacgcccacgcgtgcgcccactcgtccggatttacctgatttatctatggtggtccccaagtttcgtcctggtctgcttccaaagcagacccggagttgtcctacgatgactcttgtacttgatcttgatgagagcacacaatatatgttcgatgccgcccctatctcaaggaattcttggatagggttgccagcgtgtttgagacaattattttcactgctagtcaaagcatttatgcggagcaacttctcaatgttcttgatcccaaaagaaagttgttccgtcatcgtgtttatcgtgaatcttgtgtctatgtggagggaaactacatgaaggatctgacagtacttggacgtgacttaactcgcgtaatgattgttgacaattctccgcatgcctttgggttccagttggacaatggcattcctatagaaagctggtttgatgatcccaatgacat

SEQ ID NO: 100612 - DNA, 373 bp, Zea mays
ccgcctcctctccctatcacccggagctcgaccgaacgccggtcaccatgatcatccccaagaagaaccgcaatgagatctgcaagtacctcttcaaggagggcgtgctgtatgccaagaaggactacaacctgtcgaagcacccgcagatcgatgtgcccaacctccaggtgatcaagctcatgcagagctttaagtccaaggagtatgttagggagaccttctcctggcagtactactactggtatctcaccaacgatggcattgagcacctacgcaactacctgaacctcccgtctgagatcgtgcctgccacgctcaagaagtctgccaagccacctggcccgccatttggctctggccctcctggtga

SEQ ID NO: 100613 - DNA, 363 bp, Zea mays
ctagcaaccagctagctcgggcggttgcattcagccatcatgtcggaggagaagcggcaccacttcttcaaccaccacaagaaggacgaggagcatcccgccggcgagtacgggtactccgagaccgatgtggtcaccgccaccggcgagggcgagtacgagaggtacaagaaggaggagaaggagcacaagcacatgcagcacctcggcgaggccggcgccatcgccgccggcgccttcgcactctacgagaagcacgaggcgaagaaggaccccgagcacgcgcacaggcacaagatcacggaggaggtcgttgccgcgggggccgtcggcgccggcggctacgtattccacgagcaccac

SEQ ID NO: 100614 - DNA, 231 bp, Zea mays
atccactcccggtgggcgatgctggtttctctgggctgcgtgttcccggagatgggggctgataactgcgtcaagtgcggcgaggccatgtggttcaaggccggcgcgcagatcttctcggagggcgggctggactacctggggaaccccaacctggtgcacgcgcagagcatgctggccatctgggcgtgccaagtggtgctcatgggcttcgtcgagggctaccgcgtc

SEQ ID NO: 100615 - DNA, 314 bp, Zea mays
  unsure (1)..(314): unsure at all n locations
cccacgcgtncgcccactcgtccggaggcctgtccgtacgtcgcgccgctcctncccaagacgaggcttactcccgcgcgcaggcgcgtttctgggccgattacatcgacaagaagatctatgacagccagactcggctgtggaagttcgagggcgaggcgcgggagcaggctaataatgacctggtggaggtcctggagaccctggagggggagctcgccgacaagcctctcttcggcggcggcgccctcggcttcgtggacgtggctctggtgcccttcacgtcctggttcctcgcctaccagaagctgggc

SEQ ID NO: 100616 - DNA, 432 bp, Zea mays
ccggaattcccgggtcgacccacccgtccgcggacgcgtgggctgatccatccaagacagggatcgccattgtcggactcggaggaacaccgactcgtatcgtaaggccgaccctgggcgtccaaatacctaccgcagcatgctggcaccctccgtaagaacggcttcatcgtcatcaaaaaccgtccctgcaaggttgtggaggtttctacctacaagactggtaagcatggccacgccaaatgccactttgtcgccatagacatattcaatgggaaaaagcttgaagatattgttccttcatcacacaactgtgacattccgcatgtgaaccgtactgagtatcagctgattgatatttctgaggatggatttgtgagccttcttacttcagatggcaacactaaggatgatcttagactcccaactgat

SEQ ID NO: 100617 - DNA, 416 bp, Zea mays
  unsure (1)..(416): unsure at all n locations
cggacgcgtgggcggacgcgtgggctgaggccttcgcggagctcaaggtgaaggagctcaagaacggccgcctcgccatgttctccatgttcgggttcttcgtccaggccatcgtcaccggcaagggcccgctcgagaacctcgccgaccacctcgccgaccccgtcaacaacaacgcatgggcctatgccaccaactttgtgcccggcaagtgagggggtggaggcgccaccgtccaccggccaccgntgcggatatctaggtgttcggatgcacgtgagcgcgcactggttccagtttgtaccatgatgtaaattacttaccgtaccagggttcaatcggcaaggaaagaattgtgtgttcactgtcttgtgcagtctcttggtccaatatgaatcaacttacacagcatctcc

SEQ ID NO: 100618 - DNA, 416 bp, Zea mays
  unsure (1)..(416): unsure at all n locations
ctcctgcagaagcctcggcaacgtcagcaacggcggaaggatccggtgcatgcaggtgtggccgggctacggcaacaagaagttcgagacgctgtcgtacctgccgccgctgtcgactgacgacctgctgaagcaggtggactacctgctgcgcaacggctggataccctgcctcgagttcagcaaggtcaggcttcgtgtaccgcgagaactccacctccccgtgctactacgacggccgttactggaccatgtggaagctgcccatgttcggctgcaacgacgccacccaggtgtacaaggagctgcaggaggccatcaaatcctacccggacgccttccaccgcgtnatcggcttcgacaacatcaagcagacgcagtgcgtcagcttcatcgnctacaagcccccgggcaga

SEQ ID NO: 100619 - DNA, 314 bp, Zea mays
  unsure (1)..(314): unsure at all n locations
cggacgcgtgggtttcgagttagttcatgaataaatacctgcaacactgatagcanattctgctgctgctgcgttgatgaaacaagggcatgttcaggctgtcattgttggtgctgatcgaatagcagcaaatggtgacacacccaacatgattggcacatacaacctcgccatcttcgcgaagcatcatagcgtgcagttctatgtggcagcgccggtaacttccattgatctcttccttccatctggggatgagatagtcatagaagaaagatcaccaaaggagttgctgaactcttaaggtggtctgggaa

SEQ ID NO: 100620 - DNA, 261 bp, Zea mays
gcaagcagcaaaggaaggggcactggttctctacacccttgccgatccttcaatggccgaggcgactaagaaggcctgcgatttctggggtgttccatgcaccgatgttcttcggcctactgtcgaagccattgcctctcacatcggtgttgctccatctggaattccacgaagctctccgagtcgaaatggtcggctatcagaggattacttccaacggatcgatgctatcgatttcaccatcaaacaagacgacggggc

SEQ ID NO: 100621 - DNA, 276 bp, Zea mays
gacaagaagaggctgaggaccattggcaccttctttgcgcgcgcctactccatagagttcggcaactgacatttgcattacaacttcactgggtgccaggacctctgcaagcatgaagaaagtccgcttcattagcgacgaccttgatattgagtgcgaggggaaggagaagattaattgcgagcgtccacgctctctggaaatggtggagcatctagcaccgaccgttgatgggaatggaagagatcatcacctgtcgtggcgaacctaaatatg

SEQ ID NO: 100622 - DNA, 244 bp, Zea mays
ctcaccaacaagagcgacctgctcctcgccttcaaccccgtccacaagctcgttcccgtcctgctggactgcgacaagcccatctccgagtcactcgtcatcgtggagtacctcgacgacgccttccccggcgctggccaggccgtcctccccgccgacccctatgaacgcgccgtcgctcgcttctgggccaaatacgtcgacggcaagttgcacggcatgatggtgaatgcgctcatggggg

SEQ ID NO: 100623 - DNA, 325 bp, Zea mays
acgcggacgcgtgggcggggaggtgatgccagggcagtgggagttccaagtcgggccttccgtgggtatgtcttcaggcgaccaggtctgggtcgctcgctacattcttgagaggatcacggagatcgccggtgtggtggtgacgttcgacccgaagccgatcccgggcgactggaacggctccggcgcgcacaccaactacagcacggagtctatgaggaaggagggcgggtactaggtgatcaaggcggccatcgaaaagctgaacctgcggcacagggagcacatcgcggcctacggcgagggcaacgagcgccgtctcacc

SEQ ID NO: 100624 - DNA, 365 bp, Zea mays
  unsure (1)..(365): unsure at all n locations
cggaattggagggtcgacccacgcgtaccgcgtgacgcgtggggtgctcggnctcgtcaaaggcgaggctggcaaggtgcctgccgagccatgctgtaccctcatcaaaggccttgcggacttcgaggccgccgtctgcctctgcacggccatcaaggccaacgtgctcggcgtcgtcatcgatgtccccatcaagctcagcgccctcgtcaactaactgggcaagtgggtggcccaaggcttactggtgcgcgtaagcagcttccggcggtcacacgctcgtagctgttcacgtacgagattacatatgcacgcaccctgcatggcacgaatgcatgcattgggtctgctgatatatctctcct

SEQ ID NO: 100625 - DNA, 378 bp, Zea mays
  unsure (1)..(378): unsure at all n locations
ctgacagcaccacctgctgctgtatctacgagtacgggaagtactgcttcgcctggggctgctgcccgctcgagggcgccacctgctgctacaatcactacagctgctgcccccatgactaccccatctgcaacgtcaggcccggaacctgcctcatgggcaaggacagcccactgtcactgtcagtgaacgctaccaagcgaaccctggccaagccgcactgggctttctccggcaacacagctgacggaatgaagagcagcgcatgagaaaacgcagcgtggcattaggtcgtcagcaacctgggtgatcgattagagccaccgcgtgggaaatggtcaccttgcccccctgattgactacngaagcatggctcgg

SEQ ID NO: 100626 - DNA, 396 bp, Zea mays
caaggagtttgataatgagactccatacactattatgtttggtccagataagtgtggatcagccaacaaggttcatttcatccttaagcacaagaatcctaagactggaaagtatgttgagcatcatctcaaattcccaccatctgtcccatatgacaagctctctcatgtctacacggctatcttgaagccagacaatgaggtcagaattttggtagatggggaagaaaagaagaaggcgaacttcctttctgctgatgattttgagccagcacttatcccatccaagaccattcctgaccctgatgacaagaagccggaggactgggatgagagagctaaaattcctgatccagatgcagtaaagcctgatgactgggatgaggatgccccgat

SEQ ID NO: 100627 - DNA, 281 bp, Zea mays
ggaattggaggtccggccccgacgtacgcgtcacctaattcccaagggctggtgcgtgttcgtgtacttccggtcggtccacctcgacgacaagcgctactactagccctacaggttcaacccgtggaggtggaaggagaaggacacgagcaccatgggcttcaccccttttggcggtgggcaaaggctgtgcccatgcctggatctggccaggctggaagcttacatctttctccatcacctggtgaccagcttcaagtgggtggcggaggaggaccaca

SEQ ID NO: 100628 - DNA, 122 bp, Zea mays
cggacgcgtggtggcggcagctctgctggccttggccctggccgtgtcgaccgccgaggcgaggaacatcaagaccacgacgtctgagtataacgactactcggtggtgcattcgcatacct

SEQ ID NO: 100629 - DNA, 226 bp, Zea mays
cggatctcctacacaagtacaacgtgcgctccatccctatccgcatggacgaccaggggcatgtcgtgcgcggcagctacaatggccttgaggggaaggtggtgcaagtgtaccgccgccgctatgtcatccacgtcgagcggatcacccgcgagaaagtgaacggctccaccgtgaacgtgggcattcacccctccaaggtgatcgtcaccaagctgaatctcga

SEQ ID NO: 100630 - DNA, 343 bp, Zea mays
cggacgcgtgggcggacgcgtgggctggaagaggaagaagacacctcgaagcaaacctgcgacagccaaggtaacctcgtgctaactgggccatcaatggccacctcggcagaaagtccaattgccttcaccttctacctccatgatggcagcccgcaagccggagaagccgctgaggacgacgaggacatcgggaggataatctgcgactgcatcggcgacgacttctccaactacaacagggccatagtcgagactgtccaaatgggctatggcctcgctgaagtgatctatgccgtgctgaacaacggcgtccaaggccgggtcgctgtcaaacttgctc

SEQ ID NO: 100631 - DNA, 396 bp, Zea mays
gcgccactgtccagtgcgcgcgtcaagcttgcttagctagccgccatggcctggctgggcgccgtctccgtgaagcccggggccatcaagggtctcgccggcagctccatctccagaaggaagctcgccgtcgccaggccgtcggcccgatccatccgcaggccccgctcagccgacgtggtggccaattaccgcgacaagagcgtctactgtgacctcgacgacatcagcaacaccaccgtacagtgggacctctaccggtctgacgcgccctcgccctacaacccgctacagagcaagttcttcgagacgatcgcgggtccgttcaccaagagaggtctgctgctcaagttactgctgctgggcggcggctcacttctggcctacgtcagcgcg

SEQ ID NO: 100632 - DNA, 319 bp, Zea mays
cggacgcgtgggcgcgccacctgctggccgccgtctgggcgccggctgcgaagccgcggcagctgagctcgcaggtcgcgctgccttcatcgtcctcccgcgggccggccccgctccgcgcgtccaccgaggaggcggtggaggcgcccaaggggttcgtggccccgcagctggaccccagcacgccgtccccgatcttcggcggcagcacgggcgggctgctccgcaaggcgcacgtggaggagttctacgtcatcacgtggacgtcccccatggagcaagtgttcgagatgcccaccggcggtgccgacatcatgcg

SEQ ID NO: 100633 - DNA, 407 bp, Zea mays
  unsure (1)..(407): unsure at all n locations
ggacgctggaacgggtagtggtgcatcccttggtgctgctcagcatcgtcgaccactagaaccgcgtctcccgcgacacccgcaagcgcgtcgtcggcgtcctcctcggcacctcatcccgcgggtccgtcgatgtcaccaactcctacgccgtgccgtttgaggaggatgacaaggatcctaggatctggttccttgaccacaattaccacgagtcaatgttctccatgttcaagaggattaaatgccaggagcatgttgttggctggtacagcactggcccaaaactaagggagaacgacttggatgtncatgcattattcaacagttatgttcctaatncagtcttggtgattattgatgtccaacccaaggagctgggtataccgaccaaagcgtactacgct

SEQ ID NO: 100634 - DNA, 361 bp, Zea mays
  unsure (1)..(361): unsure at all n locations
ggtgcgacccacgcgtnccgcggacgcgtgtggcgctgtcggaggtggtccgtcgtagaacggctaccctctaccatacggtggtncgggctggagaagctggagaaggtcttcgcggacgaggccgtcgccgagttcttcgacaaccccaccgtcccgcgcgaggagaaggccgagctcatcgacgagatcgccaggtcgtccgagctgcagccgcacgtcgtcaacttcctcaacgtcgtcgtcgacaacttccgcgcggccatcgtgccgcagatcgtcgccgagttcgagaacgtctacaactcgctcacgggcaccgaggtcgccaccgtcacctncgtcgtgcagctcgagtcgc

SEQ ID NO: 100635 - DNA, 294 bp, Zea mays
ctgcctattgttccctccttcgtgataatgaggctgaagtgcggatagcaactgctggaaaagtaactaagttttgccgcatattaaatcctcagctctcagtccaacatattcttccatgcgttaaggaattgtcatcaaattcatcccaacatgttcgttcagctttagcctcagtgattatgggaatggctcctgtactgggaaaggatgctaccattgaacaactttgttcaatttttctctctttgttgaaaaacaaattttctgatgttcgacttaacataatcagca

SEQ ID NO: 100636 - DNA, 357 bp, Zea mays
acgcgtacgatccaagcgtggagaggataactgctgaaagcatataagtagtaagcccacccgggggggagtgctctctgctccgacttccctagagcctccggtagcacagccgagacagcgacgggttctccacccatacggggatggagcgacagaagtatggaaataggataaggtagcggcgagacgagccgtttaaataggtgtcaagtggaagtgcagtgatgtatgcagctgaggcatcctaacgaacgaacgatttgaaccttgttcctacacgacctgatcaaatcgatcaggcacttgccatctatcttcattgttcaactctttgatgaaaagaaaagatgaaaa

SEQ ID NO: 100637 - DNA, 340 bp, Zea mays
ggaagattgaattccctctcccagatattaaaactagaagacgcatcttccagattcacgacatcaaaaatgacattagctgacgatgtgaacttggaagagtttgttatgaccaaagatgagttctcgggcgctgatattaaagccatctgcacggaggctggattgctcgccttaagagaacgtagaatgaaagtgacccatgcagatttcaagaaagcaaaggagaaggtgatgtacaagaagaaggaaggtgttccggatggtctctacatgtagtagacgtctcctgccttgtcagaacaagttatcctcgtctctctcgtcatgggagatttga

SEQ ID NO: 100638 - DNA, 253 bp, Zea mays
cacgcaccgggacaccagcatcccccaacagcgccactgtacagtgcgcgcgtcaagcgtgcttagctagccgccatggcctccctcgccgccgtctccgtgaagcccgtggccatcaagggtctcgccggcagctccatctccggaaggaagctcgccgtctccaggccgtctgaccgctccattcgcaggccccgcgcatccgacgtggtggccaagtacggcgacaagagcgtctactttgacctcgacg

SEQ ID NO: 100639 - DNA, 363 bp, Zea mays
  unsure (1)..(363): unsure at all n locations
cccacgcgtccggggaaatcctcactggcgaagaaccatatgccaatatgcactatggcgcaggtatagggggcatcgtaaacaacacactgaggccacatgtgccagcttcatgtgatccggagtggagaaggctcatggagcagtgctgggctccagatccggcacagcgcccagcgttcacagagatcgctggacggcttcgctccatgtcaagtggcagcaaatcaggcgaaggcaaccaaataagatacaggtggagtactgcctttcaacccccaatcccgtggggggtctcttctccttttttccttttgactggagagtnatacatatacatgcatgttatagagtgctgtaaaa

SEQ ID NO: 100640 - DNA, 415 bp, Zea mays
  unsure (1)..(415): unsure at all n locations
gccaaccatctaccagcgactcagcgagcgagagcagcacacactgcacgcagctagctaggggcatcagcagcggcggcgatggcggcctccatgatctcctcgtcagctctggcggtggcgcctcagggcctgccgcccctcggccgacgcgcctnctacttcgacgtcgtctgctccaagaagaagatcaagaccgacaagccctacgggattgggggtggcctgaccgtcgacgtcgacgccaacggtagaaagggcaagggcaagggcgtgtaccagttcgtcgacaagtacggcgcgaacgtcgacggatacagcccaatctacaacgaggatgactggtctcccaccggcgacgtctacgtcggtggaaccactgggcttctgatctgggccgtcaccctcgctggga

SEQ ID NO: 100641 - DNA, 358 bp, Zea mays
ccaacccttccggccttgggccaaaccctacgcagggagttgattgatcgattgcaggcatgagtaagttgcattccgagcttctcaaggattgcatctcccagatagttcaggatgccaagaagaataggaagttcactgagactgttgagcttcagattagtctgaagaattatgatccacaaaaggacaagcgtttcagtggctctgttaagttgcctcacatccctcgtccaaagatgaaggtgtgcatgcttggtgatgcccagcacgttgaggaggctgagaagatgggacttgactacatggatgttgaggccctcaagaaaatgaacaagaacaagaagcttgttaagaa

SEQ ID NO: 100642 - DNA, 368 bp, Zea mays
acgccatctagggcattaacggcaaggagctggacggccgctacatcaccgtgggcggggcccattcccgcgggggccgtggaggcggcggctgtggttacggtggtggccgtggaggcggcggctactgcggtggcgggcgccgtgatggcggtggcggctactgcggtggcggcggctactgtggcggcggcggctacagtggtggtggcggctgctactgcagtggcaaccgtggcggcggctacggcaacttcgacgggaactggaggaactgagcggtggtgcccgcgcggccaaattatcctgttcgctaccgtgatgtttaccctagtccagacggtttatcttcggtcgtgtcgtgtttg

SEQ ID NO: 100643 - DNA, 328 bp, Zea mays
cccacgcgtccggggggccaacatcctggtgggcggcgccttcgacggctcgtgcatgaaccccgccgtgtgcttggggcccgccctcgtcagctgggagtggggctaccagtgggtgtactgggtcggccccctcatcggcggcggcctcgccggcgtcatctacgagctgctcttcatctgccacacccacgagcagctgccctgcaccgactactaaaagccgaagccgaccgacccatgggtgcgcagcgcagcgcagctagcatccagcgctctcttcccgctcgccgacgtttagtttctctcgtgcacgtgcatgcatcgt

SEQ ID NO: 100644 - DNA, 406 bp, Zea mays
ccggttcggaattccagcgtcgacccacgcgtgctacgacgcgtgggccgagtgtgatatccatgatggctgaggcctatggtgacagcgctgcgaaggacgactgagaagcagaagaagatgacgagagtgccggggagagcagcatctctcttaaggtggtagtttccaaagactctggcccagagctcgagttcacatgcacagccttccgcgaggagatcaccatcgatgatatgctgatagtggagaaaacagacgacgacgaccgagaatagaagttcccctacgagggccccgagttcaccgagctccctgtgaatgttcagaaaggcctgttcaagtacctggagcaaagaggggtaacgctgtcggctaccaactatatgcacgattacatggtgac

SEQ ID NO: 100645 - DNA, 352 bp, Zea mays
  unsure (1)..(352): unsure at all n locations
cggacgcgtgggcggacgcgtgggttccccggcagcacccctccgccgtggctcgacggcaggcttcccggcgacttcggctttgatccctggggcctcggatctgacccggagagcctgcggtggaacgtgcaggcggagctggtgcactgccggtgggcgatgctcggcgcggcgggcatcttcatcccggagttcctgaccaagatcggcgtcctcaacacgcccttctggtacaccgnncgcgagcagcagtacttcaccgacaccaccaccctcttcatcatcgagctcatcctcatcggctgggccgagggccgccgttgggctgacatcatcaagcccggaagcg

SEQ ID NO: 100646 - DNA, 325 bp, Zea mays
ctggacaagaaggtggtggatgtggccagggaggtggccaaggtggaggtgccatcatgccggcgccatctggacgttgtggtggcctgtgaggatgacgacgacaatgatgtcgacgtcccacttgtgtccatttactttcggtaaagaggggctcaccgcccgtttacatgttgatcctgtgcgatatttgtcaatgtttgtctcagaaggatcaagtgtataatttgcgatagcaaccgtgaactagattgtgtttaagcacatactgatgatttcctgtgctgccatctggttagactcggctgggaattgtcgctgaaaa

SEQ ID NO: 100647 - DNA, 308 bp, Zea mays
tacttacataggttgggtcctcgaaagtatacctcaagatataattgatacacacgaggtacaaacaatcactctcgactacagaagggagtgtcaacaggatgatatagttgattctcttacttgcatagaggaaggagaggagaaaagcatgaacggctctgcttctgcagcagcgcctcacaaagaagagcggcagcagttcctgcattgcttgagatttgcagccaacggacacgagatcaaccgtggccgtaccgtgtggaggaagctagctagataaaagtgttctttcgtcataaatgatc

SEQ ID NO: 100648 - DNA, 164 bp, Zea mays
cggacgcgtgggcggacgcgtggggtcggtgctatgctcccgtactggttctcggcggtgaccatgaagagtgtgggcagtgctgcgctcaagatggtggaggaagttcgtcggcagttcaacaacatccctgggctcatggaaggcaccacaaagcctgacta

SEQ ID NO: 100649 - DNA, 320 bp, Zea mays
acgccccacgcgtacggcgccaagctacccaccgacttcgggaagccgctcaccgtgcatctgaagaggctcgcggccgccggcaagctgacgagggtgaataactccttcaagctgccggccaccgacgccaagcccaaggccgccaagcccaaggcacccaaggccgcgcccaagcccaagccctcgccgaaggcgaaggccaagaccgctgcgaagcccaaggcggcgtcgcccaagcccaaggccaaggccaaggccaaggccaaggccaagcctgtcgctcctgccgccgcgtcgcccaagccccgcgggcgccc

SEQ ID NO: 100650 - DNA, 249 bp, Zea mays
cggacgcgtggggaaggaaacaccgcctccgccgcgccttccattccagtactggcggaggaaaggaacaccagccagcgccatggtcacgtcgacgaccgccgccgccgtgctgtccccgccgtccgtggccgggcttcgcctggcgccgtcttcccgggcgcgcgtggcgttccgcgcggcgcctgcgcggctgtccgtggcggcgcgcgcagagctgatcccgtcgctggtgatcaggctgagcac

SEQ ID NO: 100651 - DNA, 358 bp, Zea mays
cccacgcgtccgcggacgcgtgggctgatatggatccagctcagcgtgctgcctttctggaggaagatgatgagatggaagatgcacattctgttgctgcatctgctggtgacactgatgctaatgttgatgttaatgaacattttgtatgtttctcctgtgttgatggtgaactttatgagcttgatggacgaaaatcacaacccacatcccatggcccttcatcacctgaaaccttgttgcaggatgctgcaaaagtcatcaaagctagaattgcagagaaccctaactcgatgaacttcaacgtcatggctctttcaaagaaatgaaatgtactgtgatggatggattttctttg

SEQ ID NO: 100652 - DNA, 384 bp, Zea mays
atggggagaagctgctctactcttagctgctggcgctaaaggtaaccgtgccgcactgccatcggggacaattatgataaaacagccaattggtcgctttcaaggtcaggcaacagacgttgacattgccagaaaagagattcgaaatgtcaagatagaaatggttaagctgctggcaagacacatcggtaaaccaatggaagagattgctcgggacatcaagcgtcctaaatactttagccccagtgaagctgtggattatggcatcatcgacaaggtgatatacaacgagaaaatccacgatgattgcggcgtcgtgtcagaactcaaaagatcaaatttgatatagtgttctttttacacaagtagacacgtctatgcatg

SEQ ID NO: 100653 - DNA, 362 bp, Zea mays
gctggattctaccgcaactccttgcttcccaagggcaaggctgcgcttctaaccccagcagtccacaagcaaaatacaatagtggcatctgagaatgaaaatccacctttaatgccggcaatcatgactcctggtggtgcgcttgatctcgcaactgtactactgggaaatcgtataatcttcattggccaatatattaactcccaggtggcccaacgtgtgatatcacagcttgtaacacttgctgccatcgatgaagaggctgatattctgatatatcttaactgccctggtggaagtctctattcgatcttagcgatttatgattgcatgtcctggataaagcccaaagttgggacagt

SEQ ID NO: 100654 - DNA, 365 bp, Zea mays
cggacgcgtgggcggacgcgtgggcggtacgcgtgggctcgcggctgctgcggcggccgtggcagccatcggcggcgccggcgccgccatggcgggccccaagaacgggacccccgaggcgaagaagaagtacgcggccatctgcgtcaccatgcccaccgccaaggtctgccacaactgagcacgcccgcgttgcagctgcagggccggggggtggtatataattaatgtacgtgccacggtgttgttgtccctattgttggttcgagctttagatgcatgcctgacgtgaggccgcttaattgctttctgacggcctcggagctgtaagaatatcaagtgcactgcaaaactgaattcggttg

SEQ ID NO: 100655 - DNA, 354 bp, Zea mays
gtttcattgattcttgaagagatcgagcttcttttgcaccacaaggtccaggatgtcgggcaactgcggatcaagctgcggctgctgctcaagctgcaagtgcggcaagaagtaccctgacctggaggagacgagcaccgccgcgcatgccaccgtcgtcctctgcgtggccccggagaagaaggccgcgcccgagttcgtcgaggccgcggcggagtccggcgaggccgcccacggctgcagctgcggtggcaactgctagtgcgacccctgcaactgctgatcacatcgatcgacgaccatggatatgattattatctatctagcttgcggtggtggttgaacaataataag

SEQ ID NO: 100656 - DNA, 379 bp, Zea mays
cttttgaagaagcccgagcagcaggattcaccgaagagagtgggacgctgggtgatagatgggagactgtatcaaacagtgatcttgttttgctactgatatctgattctgctcacgctgataactacgagaaaattttctcgcacatgaaaccaaacagtattcttggtttgtcacatggatttctccttggacatttgcaatctgtgggttttgatttccctaaaagcatcagtgtgattgctgtatgccccaaaggaatgggcccatcagtcagaagactttatgttcagggcaaagagatcaatggtgctggtatcaatgctagctttgctgttcaccaggatgttgatggaagggcaacagatgtagctctagg

SEQ ID NO: 100657 - DNA, 360 bp, Zea mays
gcctctgttggccgttcgaatctccgcacccaatttaatcgacacctcaccgagatgggccgcagagttcttcgtcggtggcaactggaaatgcaatggaaccacagatcaggtcgagaagattgtcaaaaccctgaatgaaggacaggttcccccttcagatgttgtcgaggtcgttgtcagccctccttatgtcttccttcctgtggtcaagagccagctgcgccaagagttccatgttgctgctcagaactgctgggtgaagaagggaggtgctttcactggtgaagtcagtgctgagatgctcgtcaaccttggtgttccctgggtcattcttggacactctgaaaagagagctct

SEQ ID NO: 100658 - DNA, 332 bp, Zea mays
ggttgctctagatccgttcatcctggtggttttgtgaggtcgaaagcggcgagcgagttataagaggcttgacaagctgtgggacgacttggtggccggtcctcgcccggagacgggcctcgagaagctccgcaaggccaccaccgcccgtccgctcgtcatcaacaaagacgcggacggcggcagctacaagcggtcgcagtcgatgccgtcgaccccgacgacgccggtgacgccgtcgtcgtcgtcgtcgtcgacgacgccgcgcggcgccggcaacgtgtggcgcagcgtcttccacccggggagcaacctggccaccaaatggcatg

SEQ ID NO: 100659 - DNA, 362 bp, Zea mays
cggcgaggtgggcgccctcgcgggcggcgcctttgctctgtacgaggggcagcgtgcgaagaatgacccggcgaacgcgcataggcacaagatcgaggccggcgtggcaacggcggcggcgctgggcgccggcggctacgcgtaccacgagcaccgtgagcagaaggaggcccactacgagagcaggcagcatgagcacagggtgccgcacgggcacggtcacgggcacggctactcctactactgcgactgaaacgactgatcatcccatcgatcgagatatgcatgcagaactcgatatatatacggcccctatcgccgtacacgtgcgtgcgtgtaagtaaataagagcaaacgtcgtc

SEQ ID NO: 100660 - DNA, 167 bp, Zea mays
ggactaccgagctttctgtttggccaatctatgggtggagcagttgcattgaaggttgacttcaagcaaccaaatgaatggaatggtgcaatactggtggcaccgatgtgcaagatagcagacgatgtggttccaccttggcccattcagcaagttctaatttttat

SEQ ID NO: 100661 - DNA, 284 bp, Zea mays
gtgtacccgcgcgcgcagcacttgagacgcgccaaggagtgcccgcaggaggcgactatgagggccaagtggaagaataagcgcatgaggaggctgaagaggaagcgccgaaagatgaggctgaatccaagtaggctgatggggattgtggatggtggtgtcggcatagttgtgtaacgtacttcgatgctggttcatggagagatgcacatcctagttcgtcgtcacgattgccatgggtgcaatggctcgtctaggaaacctgcacttcaataagccatgta

SEQ ID NO: 100662 - DNA, 410 bp, Zea mays
  unsure (1)..(410): unsure at all n locations
cgcgtacacatgattttcccaactattcccactattggggtttggtaatctgcctcagctggtgaaggtggaggaaatatcacaaaccattgattctgagaacttcacagtgcaaaactgtatcaagttttcaggacctttggctacaacctcagttgccactaatgcaaaatttgaaattagaagccccaagcgtgtgcagatcaaatttgatgaagggattgttggtacaccacagttgaccgactccattgtgctaccaaagaagtttgagttatttggacagaacatcgacctgagtccactgaaaggcatattttcttccatcgaaaatgcagcatcctcggttgcaaagaccatatctgagcagcctncgctcaaataccgatcaggacaaacaatgctgaatc

SEQ ID NO: 100663 - DNA, 400 bp, Zea mays
ggcgtggtcactcgttggggtgtcacccgccttccccgcaaaacccacaggggtctccgcaaggttgcttgtatcggtgcatggcatcctgctagggtctcctatacagttgcccgtgctggtcagaacgggtaccaccaccgcaccgagatgaacaagaaagtttacaagatcggcaaggctggacaagagacccacgatgcctccacagagtttgacaggaccgagaaggacatcactcccatgggtggcttcccccactatggtatcgtgaagggtgactacctgatgatcaagggatgctgtgtgggtccaaagaagaaggtggtgaccctccgccagtccctcctgaagcagacttcccggctggcgctggaggagatcaagctcaagttcatcg

SEQ ID NO: 100664 - DNA, 361 bp, Zea mays
gagcaaagttcggactccagccatggctgtgttatgtatggcatgcagtcagggtagggatgctttttcacagtctggcctgtattcaaatcaccaagacataggaccacgttatgcgggggtacttctcggactgtcaaacactgctggcgttctggcaggagtttttggtactgctgccactggctacattcttcagaaaggttcttgggatagtgtgtttaaggtgtctgttgtgttgtacatagtaagaacggtggtttggaatgtcttttcaactggagagaaaattctcgaataagctgtggacattcctatatgccactatacggaactgtgtgattttgatgatgtcattttg

SEQ ID NO: 100665 - DNA, 337 bp, Zea mays
cccacgcgtccggccagctccagccctccagccaagcaaggtgccgacaggcagctggggttcgcgtccaagcagtccctctcctacctcgatggcacgctgcccggcgactatggcttcgacccgctgggcctctcggacccggagggcaccgggggcttcatcgagcccaagtggctggcctacggcgaggtgatcaacggccgctacgccatgctaggcgcggtgggcgccatcgccccggagatcttcggcaagatgggcatcatccccccggagaccgcgctgccgtggttcaagacgggcgtcatcccagccgcgggcacctacaactact

SEQ ID NO: 100666 - DNA, 371 bp, Zea mays
gccaggtcgtgctcatgggcgccgtcgagggctaccgcatcgccggcggcccgctcggcgaggtcgtcgacccgctctaccccggcggcagcttcgacccgctcggcctcgccgacgaccccgaggccttcgccgagctcaaggtcaaggagctcaagaacggccgcctcgccatgttctccatgttcggattcttcgtccaggccatcgtcaccgggaagggcccgctcgagaacctcgctgaccacattgccgaccccgtcaacaacaacgcttgggcctacgccaccaacttcgtccccggcaagtgagggaggcgccgccggtgacctttaggtgtcccggatgcatgtgagcgcacgcctgttttc

SEQ ID NO: 100667 - DNA, 378 bp, Zea mays
ggacggctataaagacgaggcccatctcgaaatccacggcgatcaataagacgggtggccctctcctgatcgtggtgtgcctcacagcagcatccatggcggtcgagccggagaagcatgcggcccccgcggcacaggtgacggccgtgcacatcgtgtacgttgaccgccccgaggacgccgaccctgaagagttccacatgcgcaccctcacccccgtgctcggcagcgaacagaatgccagggacgcattgctctaccactacaagaacgccggcagcggcttctccgagaagctcaccccccagcaggtcaaggatctcacagagcaacccagtgttcttcatgttgtgccgagccagacttaccagctacatg

SEQ ID NO: 100668 - DNA, 371 bp, Zea mays
gaagaagaaaaattctaatgtcccagctgggcttttctttcagcatgctggtcataggtttggggtctgtgtcagatgcaaaaactaacccttcacactcatgcttctatttttaccatgcatttcataattcatgttgtacatgtcggcagggataatatcgtagacttccactggaattcgtcagatccttggacaattgtcagtgtctcagatgatggtgaaagcactggtggaagtggaacactgcagatatggcgaatgagtgatttgatctaccgcccagaggatgaagttcttacagagctggagaatttcaaggctcaacctgccagttgcgctccgaggaattgagtcatgtgaaaactctg

SEQ ID NO: 100669 - DNA, 208 bp, Zea mays
gcatattatgcttcggtgctgatggcacagaaaattgcaaaggaaaagggttattctgatgtcggctacttggacgctgttcacaagaagtaccttgaataagtattctttatgcacatgtttacgacgccaaggactatgttatttctaccccagcaataaaaggaacaatattacctggtatgacatggaaaagcatattctacgt

SEQ ID NO: 100670 - DNA, 347 bp, Zea mays
caattcctgacaacgtgggtcaaaaacttattggccttgttacaagtagagatgaaggcgctgatttactaaagcttgatgatgtcattgatcttgtcattccaagaggcagcaataagctggtttcgcaaatcaaagcatcaactaagatacctgtcctcggtcatgcggatggtatttgtcatgtatacattgacaaatcagctgacatgaatatggcaaaacgaatagtgatggatgccaaaactgattacccagcagcctgcaatgctatggggacattgcttgttcataaagaccttataaaggctccaggtcttgatgatatactcctatcactcaaaaca

SEQ ID NO: 100671 - DNA, 300 bp, Zea mays
cttcgacaacgtcggccgctggctccattagctcaacacacattccgacacgacggtggccaagatgctggtgggcaacaagtgtgacctgtgcgacatccgccaggtgcccgtggaggaaggcaaggcgctggccgaggccgagggcctcttcttcatggagacgtctgccctggacgccaccaacgtgaagacggccttcgagatcgtgatcagggagatctacagcaacgtgagccgcaaggtcctgaactcggactcgtacaaggccgagctgtccctcaacagggtgagcatcga

SEQ ID NO: 100672 - DNA, 398 bp, Zea mays
cgacgactcggctcgcggacggagcctgtcgcggttctccatcgactcccccttcttggtcgcttccaggggtttctcttctactgaaacagttgtcccaaggaaccaagatgctggcctagctgacctcccagcaactgtggctgctgtgaagaatcctaaccctaaggtggtttatgatgagtacaaccatgaaagatatcctcctggagatcccagcaagcgtgcctttgcatactttgtcctgagtggtgggaggttcatatatgcttcactgctgcgtcttctcgtactgaagtttgtcctgagcatgtcagcaagcaaggatgtgcttgcccttgcttcacttgaggtggacctctccagtatcgagccatggaccacagtgaccgtgaagt

SEQ ID NO: 100673 - DNA, 420 bp, Zea mays
ggcgtgcccacatccaagcgcaccttcgagcaggcgcagtcgctcggcatcccgctctggacgctcgacgacaacccgctcatcgacctcgccatcgacggtgccgacgaggttgaccctgacctcaaccttgtgaaagggcggggtggtgctcttcttcgtgagaagatggttgaggcagcatcggacaagtttattgttattgttgacgagacaaaactagttgatgggttaggaggtagtggtctagccatgccagtggaagttgtgcagttctgctggaagtacaaccttgtaagattgcaggaactgtttaaggaggaaggagtcgaggcaaagctaaggtttgaaggcgacaagccctatgttactgacaactcaaactacatcgtcgatttatacttcaagacgccaatcaag

SEQ ID NO: 100674 - DNA, 241 bp, Zea mays
cgacgactcggctcgctgacggaaccagtctcgggtctgcatcgacttccccttctttggcgctttcaggggtttctctggtactgaaacagttgttccaaggaaccaagatcctggcctagctgaccttccagcaactggggctgctgggaaaaatcctaaccctaagggggttaatgatgggtccaaccttgaaagtattcctccggggaatcccaccagggtggccttggataacttg

SEQ ID NO: 100675 - DNA, 468 bp, Zea mays
aaaaggagccgcgacaggatgcactcctttgggcaccgcgccaacgcggtggcaacgtgcgcggtcaccatactggccgcgatttgcttcgccgcctccttctccgacaacttcaacaccccaacacccactgcctccgttaagatcttgaatctaaactggttccagaaggaggccaacggcaacgacgaggttagcatgacgctgaacatttcggccgacctttcgtctcttttcacgtggaacacaaaacaggtgtttgtttttgtggcagcagagtatgagactccacagaatgctttgaatcaagtttccctttgggatggcattatacctgcaaaggagcatgccaagtttttgatccataccacaaacaagtacagatttattgaccagggaagcaatctaaagggcaaggaattcaacttgacaatgcactggcacattatgccaaagactggcaaaatg

SEQ ID NO: 100676 - DNA, 466 bp, Zea mays
aattgatgctgtcataatgaaggaccgctacacacaaaagcccagaggctttggctttaggacttttgctgatcccactgttgttgacagagtgattgaggatgaacatgttatcaatggaaaaccggttgaaattaagagaacgatccctaagggagctgctcctttgaaagatttcaagacgaagaagatttttgttggtggattaccctcagctctaaaagaagatgaattcaaggaattcttttccaagtttgggaaggttgtggagcatgaaatcatccgtgaccatgcaaccaaccggtcacgtggatttggttttatagtctttgatgcagaaaaagcagtagatgatttattacataagaagggcaatatgattgatctaaatggttctcaggtggagatcaagaaggcagaaccaaagaaaccctctaaccaaccacctcgttcacttgatagtgag

SEQ ID NO: 100677 - DNA, 461 bp, Zea mays
  unsure (1)..(461): unsure at all n locations
cccacgcgtccgcccacgcgtccgcccacgcgtccgttgcacacaggaacgtgcccccagccgtcggttgtcttccaggaaagtttcaccaagagttccaagcggcagctaccccgtcgctcaggtgaactacgagctgaatgtgctgggaacccgagggcccaggcggatgcagtgcgctatgcattccatccccgcatcagcggtggagcccggcggcgtggtgcctgggcaaccgaaagagctcctcccgaggctgttcgacgagtccttccgcagcaccgcaacttcctctttctccaagtactccgtcgcggacagctccatggacctgggcagctgcccgttctccgaggtcgaagtgggcggngggagtctgcgagaaagtgacgagtcggaaaaggagaggccactggttctgcgcaacaaggcgccgaggtggcacgagcagctgcagtgct

SEQ ID NO: 100678 - DNA, 458 bp, Zea mays
cccacgcgtccggttctttgcttcagacgagaggattaaggctgtcaggcagatgattatggctcccacgcttgagctgaggcagcaggcgctcgaccgtctcttgccgtatcagaggtctgacttcgaaggcattttccgtgctatggatggactcccggtgaccatccgactcctggaccctcccctccacgagttccttccagaagggaacatcgaggacattgtaagtgaattatgtgctgagacgggagccaaccaggaggatgccctcgcgcgaattgaaaagctttcagaagtaaacccgatgcttggcttccgtgggtgcaggcttggtatatcgtaccctgaattgacagagatgcaagcccgggccaattttgaagctgctatagcaatgaccaaccagggtgttcaagtgttcccagagataatggttcctcttgttggaacaccac

SEQ ID NO: 100679 - DNA, 457 bp, Zea mays
taaccagaagccacccattggcgtacgcgaggcgatcggagcatcccgtcccgagaggagaaactccggccggcgacgcgggggaaaatggggaagacgccggtgcggatgaaggcggtggtgtacgcgctgtcgcccttccagcagaaggtgatgccggggctgtggaaggacatcaccaccaagatccaccacaaggtcaccgagaactggatctacggcacgctccttctcactcccgtcgtcggcacctaccaatacgtcatgtggtacatagagcaggagaagctttcccacagatactaaatgggatgtcctacaagttgctgcggcttgtcgcagttgaattttccatgatgggttgtataatctgtcaatgtcatttctttgctcaggtttagttcaacccattttcacctctccatatgcatatacggtatctgtgcctggcaaacat

SEQ ID NO: 100680 - DNA, 467 bp, Zea mays
ccacgcgtccgtgcaattggtgcttgtgttggtagtcctgctgatctggcactcattagggtgcaagccgattcgaccctgccagttgcacaacgacgcaactataagaatgctttccatgcactctaccgtatcagtggtgatgagggagtccttgcgctttggaagggtgcaggtccaactgtggtgagagctatggcactcaatatgggtatgcttgcttcctatgaccagagtgtcgagctatttagggacaaatttggcgcaggagaaatttctactgttgttggagccagcgctgtttctggattctttgcctcagcatgcagtttgccctttgactatgtgaagacacagattcagaagatgcaacctgatgcgaatggcaagtacccatacacagggtctttggactgtgctgtgaagaccttcaagagcggtggcccattcaaagtctacactggttt

SEQ ID NO: 100681 - DNA, 431 bp, Zea mays
caatccggggtcgacccacgcgtgcgatccaatctagactctcccctcttcctccctccctctctctatctctcttcggggtccgaatctacggacccaagcgaatcgacacctcaccgacatgggccgcacgctcttcatccgtggcaactggaaatgcaatggaaccacagatcatgtcgcgaacatagtcaaaaccctgaatgaacgacaggttcccccttcagatcttgaccaggtcgttgccagccctacttatgtcttccttcctgtgctcaagagccagctgtgccaagagttccatgatgctgctcataactgctgggtgaagaaaggacgtgctttcactggtgaactcagatctgagatgctcctcaaccttggtgatccctgagtcattcttggacactctgaaacgagaactctgcttg

SEQ ID NO: 100682 - DNA, 458 bp, Zea mays
cacacacacagagagagacaagtggtttccaaagccaagtgtgtactagcagtctagcagccagctagctcgggcggcagcaggcagccatcatgtcggaggagaagcaccaccacttcttcaaccaccacaagaaggacgaggagcagcccgccggcgagtacgggtactccgagaccgaggtggtcaccgccaccggcgagggcgagtacgagaggtacaagaaggaggagaaggagcacaagcacaagcagcacctcggcgaggccggcgccatcgccgccggcgccttcgcactctacgagaagcacgaggcgaagaaggaccccgagcacgcgcacaggcacaagatcacggaggaggtcgctgccgcggcggccgtcggcgccggcggctacgtattccacgagcaccacgaagagaagaaggaccacaaagacgccgaggaggctagcggc

SEQ ID NO: 100683 - DNA, 458 bp, Zea mays
ctaggagcagcagcagcggcggcggcgatggcggcctccatgatctcctcgtcagctctggcggtggcgcctcagggcctgccgcccctcggccgccgcgcctcctccttcgccgtcgtctgctccaagaagaagatcaagaccgacaagccctacgggattgggggtggcctgaccgtcgacgtcgacgccaacgggagaaagggcaagggcaagggcgtgtaccagttcgtcgacaagtacggcgcgaacgtcgacggatacagcccaatctacaacgaggatgactggtctcccaccggcgacgtctacgtcggtggaaccactgggcttctgatctgggccgtcaccctcgctgggatcctcggcggcggcgccctcctcgtctacaacaccagcgccctctccggctaaggatatccaatgcatgcgcttcttgcgattcgtcgtgtaaaatc

SEQ ID NO: 100684 - DNA, 436 bp, Zea mays
attggctcactgaaaatatgcgtacaaattacttcaccgtatcagctatgcacggtgacatgccgcaacaagaaagggatgccattatgggtgagttcaggtctggcgcaactcgtgtgctaataactacagatgtttgggctcgaggactggacgttcagcaggtttcacttgtcataaattatgatctcccaaataatcgtgagctttacatccatcgcattggtcgttctggtcgttttgggcgcaagggtgtggcgatcaatttcgtgcgcaaggatgacatccgtatactgagagatatagagcagtactacagcacacaaattgacgagatgccaatgaatgttgctgatcttatttgagcagcaagaggatcgggaggtgagcttcttgtgttggcttgaggcccttggcgctagtgtggctgtggact

SEQ ID NO: 100685 - DNA, 459 bp, Zea mays
gcgcatcctattgccctcgcgccaccgtcgccgccgctgcagcgagccaccggcctgccgtcgcctgaggtagacaccaagccaccgccatggggcgtatgcacagccgcgggaagggtatctcttcatcggcgctgccgtacaagaggactcctccgatctggctcaagacagctaccaccgaggtggaggagatgattaccaaggctgcgaagaagggccagatgccgtcgcagattggtgttctgctccgtgaccagcacggcatcccgcttgtcaagagcgtgactggtagcaagatcctccgcatcctcaaggcccatgggttggcgccggagatcccggaagatctctacttcctcattaagaaggccgtggcgattaagaagcatctggagaggaacaggaaggacaaggactccaaattcagactcattcttgttgagagcaggatccacc

SEQ ID NO: 100686 - DNA, 453 bp, Zea mays
ggttcggaattcccggggtcggatcaagcctccgggggccccttggatcgatccgatctccgttcgcgctgaagcctgatctccagcgggttcgcagcaggggcgcaggacctcgatcacgaggaggcaggggagcagcatccacaaccacaagccatggcggggagggccaacattcccactaacaactccgccctcatcgcaatcatcgccgacgaggacaccgtcactggcttcttgatggccggcgttggcaatgttgatctgcgcaagaaaaccaactacctcctcgtcgacaacaagacgacagttaaacacatcgaggatgcgttcaaagaatttactaccagggaggatattgctattgtgctcatcagtcagtatattgccaacatgataaggtttctggtggatagctacaacaagcacgtgcctgctattctggagatccca

SEQ ID NO: 100687 - DNA, 464 bp, Zea mays
gcactcgtccggctggcctgaactgctatacttctcaacgtgttggaattgtatttcagtttcctgagagggatttcttagcggatactgtgcttgaagaagttacttttggatggcctaggcaaaaggcagacctcctattaaaagaacagctcgctttaaatcttcaaaatgcttttaactcggttggtctgacaaccatctcattagatgaaaatccgcaagctctaagtggtggatttaagaggcgacttgctttggcaattcaactggttcaaattcctgatctgttgctgcttgatgagccacttgctggtctagattggaaggctcgagctgatgttgtgaatctcctaaaggacctgaagaaacatcatactatactggttgtaagtcacgatctaagggaactatatccactagtggatcgctcatggcgaatggaaatggggggaagtttgaag

SEQ ID NO: 100688 - DNA, 436 bp, Zea mays
gaagaggccaacatcgaggatgtttatacagacgacgagttgaacgaagcagggcagtactagtcgcggaaaaacggacaaataccaaggattaagagggacagggaggaaagatatgcgaggttgaaggataaggacgagatcgagaaagtcaggaatatgaccgaggatgagcgtcgcgaatggcagcggaagaatccgaagccgcttcgtcagacgaaacagaagtggaagtttatgcagaagtattaccacaaaggcgccttcttccaggaaggtgctgatgatgttatccagtcagcgggtaaagaggatatctacacccgtgatttctctgagcccactggagaagatcagatggataagagcatgctgcccaaagtcatgcaagttaaacatttcgtgcgcaatggcaagacgaaatggacgcatcttg

SEQ ID NO: 100689 - DNA, 386 bp, Zea mays
cccacgcgtccgcccacgcgtccgccgcggcgacggtgacgacgaccgcgcgagcgccggcgactccctactgcatcaggtgcctcggccttcgtcgtgctctccgccggcaacgagtatagacgggcgcgcatggccaccttcgagctgtaccggaggtccaccatcggcatgtgcctcaccgagacgctcgacgagatggtctccaacggcaccctcagcccggagctcgctatccaggtcctcgtccagttcgacaagtccatgacggatgctctggagaaccaagtgaagagcaaggttactgtcaagggtcacctgcacacctacaggttctgtgacaatgtgtggaccttcatcttgacagacgcaagcttcaagaacga

SEQ ID NO: 100690 - DNA, 454 bp, Zea mays
gtcatccccgagaagagccgccgtcgcgcaaagccgcttcgacgccgtcactcgtcggggcgcaaccatggtggccgcaaagaagacgaagaagtccacggacaacatcaacaacaagcttcagcttgtgatgaagagcggcaagtacacgctcggctacaagactgtcctcaggaccctcaggaattctaagtcaaagctagtgatcattgctaacaactgtcctccgcttcggaagtctgaaattgagtactatgctatgctggctaaggtgacagtccaccacttccatggaaacaatgttgaccttggaacagcctgtggaaaatacttccgtgtctgctgcctcagcattatcgatcctggtgattctgatatcatcaagactacaccgggcgagcagtaaggatgccacaacagctgtactcggcatctgaattcttaatagctgatg

SEQ ID NO: 100691 - DNA, 427 bp, Zea mays
cccacgcgtgcgcccacgcgtccgcgagttcgcggagccgccgcgcgtgaccagcctgcagaacaccgtgcctctcgcgaccttcagcgacttcggcgacgacgtctacttcgtcgccgaccagcggggctacgaggccggcgtctactacctctccggccagtacctcaagaccgacgataagtctggaaagatcgtcgacccgtgcctgcagctcaacaaggtggtgcgagagatcaagtattccccgggtggcgtcaccgtcaagacagaggacaactcggtgcacagcgcagactacgtcatggtttctgctagcctgggtgtactgcaatccgatctcattcagctcaagcccaagctacctacatggaaggttagggcgatctaccaattggacatggccgtgtacaccaagatcttactc

SEQ ID NO: 100692 - DNA, 467 bp, Zea mays
  unsure (1)..(467): unsure at all n locations
cggttcggaactcgaggcacgcgtccgncggcgcctgagcttttatcccaggccatcgaatacatcaaatacattggtggcctttgcgactggggaatcttacccttgccaaggtgtcaatgaaatctgcaagtctaagactgagaatgtttgagtcaaggctttggactctcttaacatcacactgggcgctgaggatgaactgaaggatgctgctactctggttcgcccagttagcgttgccttcgaggtgatcactggtttcaggctgtacaagagcggagtttacactaacgaccattgcggaactacaccgattgatgtgaaccacgctgttctggctgattgctacggtgtctaagatggtagccactactggctcatcaagaactcatgtagcgctgactgaagcgatgatggttacttcacgattgcaatggtcaagaacatgttctgaattgctacgt

SEQ ID NO: 100693 - DNA, 435 bp, Zea mays
cggacgcgtgggcggacgcgtgggcggacgcgtgggcgccgactctgccgtctccctggcctctttcccctcgtctcgtctgcatccgcctgcgccgccccaagacctcatcacctccccttcgccgtgaaccctaaccccgcgcccctcgccccctccttctcgtcgtcatcgccgcccgcttttccgggcccacatcggctcttctcttccacgagtggttcaagcatggtggtcgtgggctccgcggactccttcaacagcatcttttccaaggtgcaagatgaaaagctaccagctggcttttactacacggcggtgtggtgtggaccatgtaaggcgatcgcacctctagtatcatagctgagcagccagtatcccaagataccggtgtacaaagttgacattgaattggaggactgggaaacaaactcc

SEQ ID NO: 100694 - DNA, 368 bp, Zea mays
tcaaatcacaatgatggcctcggcgacttgtgaatcttaccctcgccaaggtgtcaatggaatctacaagtttaagcaatgagaatgtactagtcaaagttctggactcgattaacatcaccctgtctgctgcagattaactgaaggattctattacactggttcgcccacataatgctaccttccatgtgatcacttgattcaggctgtacattagcacaatttacactaacgaccattatggaactacacctatagatgtcaaccacgctattctcactattctctactgtatcgaacatcgtgatcactactggctcatctagaactcatggagcgctttcttgtgtgatgatacgatacttaat

SEQ ID NO: 100695 - DNA, 461 bp, Zea mays
cggacgcgtgggggaagttcatccgttggatttcaccactaactgtggtaagatcagggtctactgctgggataccgcagggcaagagaagtttggtggcctcagggatggatactatatccatggccagtgtgcgatcatcatgtttgatgtaacctcaaggcttacttacaagaatgttcctacgtggcatagggacctgtgcagggtctgtgaaaacatccccattgtcctctgcggtaataaggttgatgtgaagaacaggcaggtcaaagccaagcaggttactttccacaggaagaagaatctgcagtactatgaaatttctgccaagagcaactacaactttgagaaacctttcctgtaccttgcaaggaagctggctggtgatccgaaccttcactttgttgaagctgttgctcttaagcctccggaagttaccatcgacatggctatgcagc

SEQ ID NO: 100696 - DNA, 454 bp, Zea mays
cccacgcgtccgcttccatcccaggcctttgaatacatcaaatacaatggtggccttgacactgaggaatcttacccttaccaaggtgtcaatggaatctgcaagtttaagaatgagaatgttggagtcaaggttttggactcggttaacatcaccctgggtgctgaggatgaactgaaggatgctgttggtctggttcgcccagttagtgttgccttcgaggtgatcactggtttcaggctgtacaagagcggagtttacactagcgaccattgtggaactacaccgatggatgtgaaccacgctgttctggctgttggctacggtgtcgaagatggtgtcccctactggctcatcaagaactcatggggcgctgactggggtgatgatggttacttcaagatggaaatgggcaagaacatgtgcggtgttgctacgtgtgcattctacccta

SEQ ID NO: 100697 - DNA, 437 bp, Zea mays
gacaaaattcatattatcaaccactaaatgactaatgtcagtgtctactgctagaatgcccaagctcatgaaaagtacggaggccttatgcatgaatactatatccatactcagtgtgcaatcatcatgttagatgtaacctcaatgcttacttacaagaatgttcctacgtggcatatggacctgtgcagggtctgtgaaaacatccacattgtcctctgccgtaataaggttgatgtgaataacacgcaagtcaaagccaagcatgttactttccacaggaagaagaatctgcattactatcaaatttctgccaagagcaactacaactttgagaaacctttcctgtaccttgcaaggaagctggcttgtgatcccaaccttcactttgtataaactgttgctcttaagccttcggaagttaccatcgacatgct

SEQ ID NO: 100698 - DNA, 435 bp, Zea mays
cccacgcgtccgcccacgcgttcgcggacgcgtgggccgccgcaaggagaggtaagttgaggagacatcttcgagaagctgaaatggctcctaaagtttcattagctgctcctgccaagaagggtgatgccaagacccaggccttgaaggttgccaaggctgtgaagtctggggcagccaagaagaagaccaagaagatccgcacgtctgtgacatttcaccgacccacgaccctgaagaaggctagggaccccaagtacccacgaatcagcactaccggaaggaacaagcttgatcagtaccaaattctcaagtacccccttaccacagaatcagcgatgaagaagattgaagataacaacactctggtcttcattgttgacctcaaggcagacaagaagaagatcaaggctgccgtcaagaagatgtatgaca

SEQ ID NO: 100699 - DNA, 447 bp, Zea mays
cccacgcgtccgaacgaacacaagctctcgatctcaccgacaccgaggaagaagagatcaatggcgtccgagcagggagtcgtgatcgcgtgccacagcaaggctgagtttgacgcccacatgaccaaggcccaggaagccggcaagctggtggtcattgacttcactgccgcctggtgcggtccatgccgcgccatcgccccactgttcgtcgaacacgccaagaagttcactcaggtcgtgttcctgaaggtggacgtggacgaagtgaaggaagtcaccgcggcctacgaggtcgaggcgatgccgaccttccacttcgtcaagaacggcaagacggtcgcgaccatcgtgggtgccaggaaggacgagctcctggcccagatcgagaagcatgccgcgcctgcgcctgcgtctgcgtctgcctaaaggagatcagatcagtcg

SEQ ID NO: 100700 - DNA, 437 bp, Zea mays
tgtagctgctgtgggagtctcgttcatgcagtttgccaacaagaactcgatgaggaacagctatgtcatcggactctcgttgttccttggcatctcggtccctcaatacttcaacggatacacttcttcagctggcggccacggacctgcccggacaaatgctggatggttcaacgacattataaacaccgtgtttgcttccgggccgacggtggcgctaattgtcgcttctgtcctggacaacacgctggagttcaggggctacgaggccgaccgggggctctcgtggttccagccgatcctgcgccgccataagggatactcggaccccagaaacgaggagttctacagcttcccaatcagcgtctatgacgtcatcccagaccgatttcggcgctgactccaaatgaccgctgttaccccgcagctgtgcatgt

SEQ ID NO: 100701 - DNA, 462 bp, Zea mays
ctaatgcatacttttcactcttcatggccctgggaaacatacttggatatgccaccggagcatacagtggatggtattcgatatttcctttcactgttacagagtcctgcggcatcagttgtgccaaccttaagtctgcctttcttcttgacattattgttctggtcatcacaacgtacactactgtaacatccgtgcaagaacctcaaacttttggaagtgatgaagcacaaaatccaggtgctgaacaggaagctttcctctgggaactttttgggtcattaagatacttcaccctaccaatttggatggtcttaattgtcactgcccttacttggatggcatggtttccttttaccctctttgatactgattggatgggccgagaaatctatcgaggaagcccagacaacccaggagagacccaaaggtaccatgatggtgtgagaatgggttcttttg

SEQ ID NO: 100702 - DNA, 463 bp, Zea mays
  unsure (1)..(463): unsure at all n locations
gtgctcatgggcgccgtcgaggggtaccgcgtcgccggcggcccgctcggggaggtgggggacccgctgtaccctggcggcagcttcgacccgctcgggctcgccgacgacccggaggcgttcgccgagctcaaggtgaaggagatcaagaacggccgcctcgccatgttctccatgttcggcttcttcgtgcaggctatcgtcaccggcaagggccccctcgagaacctcgccgaccacatcgtcgaccccgtcaacaacaacgcctgggcttacgccaccaacttcgtccccggcaagtgagcgagggcatgatgcttgcatgcgtgtaccgtagacgtaccgtattcctacgtactgcaggttgcaccagtatttgtgaagggagctgtgcgtgggagccagagatggtaccgctagtgtatnnttgtatgcacgccgtggagctgatcaatgaaatatg

SEQ ID NO: 100703 - DNA, 434 bp, Zea mays
cccacgcgtccgcccacgcgtccgctcaaccctatcacctcgctctactatgtcgcgccgtgctgcttctgcttcctcctcgtgccctgggccttcgtcgagctgcccaggctgcgcgccgtcggtaccttccaaccggattttttcgtctttgggacgaactcactctgcgcctttgcgctcaaccttgccgtcttcctgctggtcggcaagacctcggcgctgaccatgaacgtcgcgggagtagtcaaggactggctgttgattgccttctcgtggtctgtgatccgtgacaccgtcacaccgatcaacctgttcgggtacgggatcgcgtttttaggggtgggctactacaatcatgtcaagctgcaggcgctcaaggctaaggaggcacagaagaaagccacacaggctgatgaagaggccgggtcgct

SEQ ID NO: 100704 - DNA, 467 bp, Zea mays
aagggggtcaccaagggctaccgctacatgatgaggtttgtctacgcccatttccccagcaacgcgtccatcaccaactccaacaccgccatcgagataaggaacttcctcggcgagaagaaggtcagaaaggtggacatgcttgacggcgtgaccatcctccgctccgagaaggtcaaggacgagcttattctcgatggcaacgacgtcgagttagtctctcgctccgccgccctcatcaaccagaaatgccatgtcaagaagaaggatatcaggaagtttttggatggtatctatgtgagcgacaagggtgtgatcgaagaggagcagtgagggacaattagttgttatcgcttgagttggaattattgtttggtttgcaattttctcaaggtgaactttgtaatcggttaggatgtgttgtggaccattatcgtatcctacaatattatccgatctgtttaagg

SEQ ID NO: 100705 - DNA, 472 bp, Zea mays
cgccatgcccttctcctccgtctggcactaggtcaacaagcaggaggtgcccatcaacgccgtctggctctcggctctcgtcgcgctctgcatggcgctgccgtctctgggcagcctggtggcgttccaggccatggtttccatcgcgacgatcgggctgtacatctcgtacgcgctgccgatcctgttccgggtgacgctggcgcgcaagtacttcgtgccggggccattcaacctgggccgctacggcgtcctggtcggctgggtcgccgtgctctgggtggccaccatcaccgtgctcttctcgctgccggtcacgtacccggtcaccaaggacacgctcaactacacccccgtcgccgtcggcggcctcctcttcctcgtcctcgcgtcctggctgctcagcgccaggcactggttcaagggccctgtcaccaatctggactgatgaatatgtataattggacatgtt

SEQ ID NO: 100706 - DNA, 436 bp, Zea mays
cgaagtattcaaaccgaaaacattggatccggtgcggactgatcgtgtgcgtgaccggggctagcggcttcgtcgcgtcggatctggcgaagctcatcctctcacggtgccaatacgcggtccgtggcaccgtgcgcgaccctggtgctagcaagaatgcctatctcaaggtgctcgaaggagctgaggaaaggttgcagcttctcaaggctgatctgatggactacaacatcattgcatcagcagttgactgctgtgagggtgtcttccatgtagccagtactgtccttaccgatccacccttcaaccctgaggtggacgtcatagctcccgctgtaataggtacaaccaatgagttaaaggcttgctatgatgcagatgttaggccagctgaggaagcgacttcatgtggagctgagtatgctaatcctattta

SEQ ID NO: 100707 - DNA, 431 bp, Zea mays
gcgagaaccagcccaccccacctgctcgatcggcgcaccgtcccgcaggccgcggggcggtcgtcagccatgatgcagctcctgttctcgctgctggccgcggaggcggcgctggtgctggcgctgctcttccccacgcccgtgcgccgcctggctctgctcgccatcgatcgcgccaagagggggcgcggacccgtcatggccaagaccatcgcgggcaccatgctcctcgtactagtctctgctttctacagcgtcgctaagatccgccgccgcgagggggagctcggacagctcacgcccaccgaccaggtgctcgccagtcgccaccttctcgaggcgtcgctcatgggatactctctgattcttggattaattattgaccgattacatcactatattagagagttgagaatgttgaggaaagacat

SEQ ID NO: 100708 - DNA, 447 bp, Zea mays
caaaattgatggaagaccagtgaaagaagtcattaaggataccaagtggttagaggaagagttcaccctcacagttcaaaagcgtggaggtgtgctcatccaaaaatggggcagatcatcagctgcatcgaccgctgtttcgatagtggatgctattagatccctcgtaactcctaccccagaaggtgactggttttctacaggggtttatacgactggaaatccttatggcatatcagaggatatcgtgttcagcatgccatgcagatcgaagggtgatggtgattacgaactggctagtgatgtgttgatggacgattttctctgggaaccgattaaaaagagcgaagctgaattgcttgctgagaagaaatgcgttgcccatcttacaggagaggggaatgcattttgtgatcttccggaagataccatgctaccaggagaagt

SEQ ID NO: 100709 - DNA, 457 bp, Zea mays
ccgccgtcgctgcagccgcaggcgccagtgcagtctgtcgttgccgcgtcggctcccagcccatgtatggaaatcagtagctctgtggactgtggtcaggaaaaagaacagccaacaaataaacgtccaaggtcagaaagtactacagaatcaagcacaaaagcatccagggagaaaattagaagggacaagctgaacgagaggtatgttccctggtgagacaagacaatggttgcattttagtttgcagtttaatctttttttctcttcatattatcgtattcgtcaactaccactgtacttatgatattctctgtgttagattcttggaattgggtgccattttggagccagggaaaactcctaaaatggacaaaacagctatattgagtgatgctattcgtgtagtatgtgaattgcgtagtgaagcaaaaaagctcaaggattcaaatgagaa

SEQ ID NO: 100710 - DNA, 464 bp, Zea mays
cccacgcgtccggcgaggccgccgacgcccgacggcagggtgcccaggccttcttcgggcccatcgcgaggccatagttgcatcattcgcctgagacgactgcccaccgccaggactgatctcctcactaggcgcgtagaggtgaagagaataacttgacaatgagcagcataggcacaggttacgatctgtctgtcaccaccttctccccagatggtcgtgtcttccaggtcgaatatgctaccaaggccgtcgacaacagcgggactgttgttgggatcaagtgcaaagatggcattgtcctgggtgttgagaagctggtaacctcaaagatgatgctggaagggtcaaaccggaggatccattcagtgcaccggcactctggcttggttgttgctggtttagcagcagatggcaggcaaattgtttcaaggacgaagtcagaagctgccagttatgaaaag

SEQ ID NO: 100711 - DNA, 413 bp, Zea mays
ctcgtcgccttcagcagccccaaccccggcctgcagatcaccgactttgcgctctttggcaacaacctcccgtccgccgtcgtggagaaggtcaccttcttggacgacgcgcaggtgaagaagctcaagagtgtgctcggcggcagcggttaacttgtttttcgagacaatacagtgcaggctgggtatgcatcgtcgccgtcgtcgtcttggtccgtcgtcatcgaatggaacgcgtgtgcttgctgctgcatgcgtgcgtgcacctgtcgtcgcgtgtcaaagtactcgtggtctatttcatcttacccttatttattcatctacttttcattcagggatgtattcagtttccatattgcattttgttgcaatgaaagagtaacatgtgcatctgattggttcaaaatagc

SEQ ID NO: 100712 - DNA, 467 bp, Zea mays
  unsure (1)..(467): unsure at all n locations
cgttagactaggttaggctaggctagggtgtcgaccagctcgcggtaatggtggcctggaggttccatcagtaccaggtggtggggcgcgcgctgccgacgcccggcgacgagcaccccaagatctaccgcatgaagctctgggccaccaacgaagtccgcgccaagagcaagttctggtacttcctgaggaagttgaagaaggttaagaagagcaacggtcaggtcctggccatcaacgagatcttcgagcgtaacccgacgacgatcaagaactatggcatctggctgcgctaccagagcagaaccggctaccacaacatgtacaaggagtaccgcgacacaaccctgaacggcgctgtagagcagatgtacaatgagatggcttctcgccaccgcgtgaggtccccctgcatccagatcatcatgaccgncacagtacacttcaagctgtgcaagagggacaac

SEQ ID NO: 100713 - DNA, 461 bp, Zea mays
  unsure (1)..(461): unsure at all n locations
ggcaacccgagcctgatccacgcgcagagcatcctggccatctgggcgtgccaggtggtgctcatgggcgccgtcgaggggtaccgcatcgccggtggcccgctcggggaggtggtcgacccgctgtaccccggcggcagcttcgacccgctcgggctcgccgacgacccggaggcgttcgcggagctcaaggtcaaggagatcaagaacggccgcctcgccatgttctccatgttcggcttcttcgtgcaggccatcgtcaccggcaagggtcccgttgagaacctcgccgaccacctcgctgaccctgtcaacaacaacgcctgggcctacgctaccaacttcgtccccggcaagtgagcgagggcatatacatactngtatgcgtgtaccgtagacatacgtattcgtatatgtactgcatgagatgtaccagtatttgtgaagaanggagcatgggc

SEQ ID NO: 100714 - DNA, 460 bp, Zea mays
ggagcagccgcagtcccaccgaccccgccgccggtcgccctccatctcctcgccgctgcctctcgtttctctttccaataatcaagatgagccgtggtggtagtgccggtggtggtcaaagttctctgggttatctttttggaagcggtgagccccccaaaccagcagtggcaccagctgcaagtgctccacctgttgagaaaccatctgctgcaaagactgatgcgaccaagcaggttgctgctggggttaccagccaaaccaataactaccacagggctgatggtcagaacactggcaacttccttacggaccgtccttcaaccaaggtccacgctgctcctggcggtggctcttccctgggctacctgttcggtggcaactgatgcccgtgctggtgctcaccaaagtatccttccccgcctgctgcatgctatgtctgaatcgtgaacaccggtgt

SEQ ID NO: 100715 - DNA, 419 bp, Zea mays
ctcgtcgccttcagcagcccgattccctttctgcagatcaccgactttgcgcgctttggaacaacctgccgtggggccgtcgtggagaaggtcaccttcttggacgacgcgcaggtgaagaagctcaagagtgtgctcggcggcagcggttaacttgtttttcgagacaatacagtgcaggctgggtatgcatcgtcgccgtcgtcgtcttggtccgtcgtcatcgaatggaacgcgtgtgcttgctgctgcatgcgtgcgtgcacctgtcgtcgcgtgtcaaagtactcgtggtctatttcatcttacccttatttattcatctacttttcattcaaggatgtattcagtttccatattgcattttgttgcaatgaaagagtaacatgtgcatctgattggttcaaaatagctttgtg

SEQ ID NO: 100716 - DNA, 331 bp, Zea mays
cccacgcgtccgcccacgcgtccgcccattcgtccgccccaaggaaccctttaaaagggggaaggttgcttaacaagaggccccagtcgtggttgaagcaccaaccccagttcttggggagcctatggacttgatgactgctctgcagctcgtgatgaagaagtcaagtgctcatgatggacttgtgaagggtctccgtgaggctgccaaggccatcgagaagcacgccgctcagctttgcgtgcttgctgaggactgtgaccagccagattatgtcaagctggtgaaggcactctgcgcggagcacaatgttcacctggtcactgttcct

SEQ ID NO: 100717 - DNA, 300 bp, Zea mays
ggatcggaacccccgggtcgacccacgcgttcgcgcttccaagcccaaggaggagttgaagagcctcaaggagctcaccggcaagggcttcggcaccatcgacgatcgtgaccatgccgcgaagatcaagagcaccccagaggccgagaaatacttcgcagcaaccaaagatgctcttggcgatgttctcgccaagctaggctagacgcaagggctaataatggccatgtaatttcggacttgcgtttgttcatatggacccggcaaggcaatgtaccattttctgttgatattgtaaaa

SEQ ID NO: 100718 - DNA, 459 bp, Zea mays
caggaatgttgagtttggtgatgactctgagaggccaccacggagaaactatgagcgcgacagcgggactggccatggctatgagatgaagcgtgatggcgcagggcgtgggaactggggcactgccactgatgagcttattgcccaggatgcagaggactctccgaagatggaggaggctgctcctgttgctgagaaacaaggtgagcagatcgatgccccagcagcagatgagaacaaagataacaaggatgctactgcaaatgaggaggaagaaaaggaagaggacaaggagatgactctggaggaatttgagaaaataagagaggagaagaggaaagcactacttgcgttgaaggctgatgagaggaaagttgaagttgacaaggatctgcgttctctgcagccactttcaaacaagaaagaaaatgatgaagttttcattaagctgggttctga

SEQ ID NO: 100719 - DNA, 415 bp, Zea mays
  unsure (1)..(415): unsure at all n locations
ccgcgccgtgatcgggcttgtggccactggcatcgtcggcggcgccttgtcgcaagcggcgcgcgccgagaccgtcaagaccatcaagattggagccccgccgccgccctccggtggactccccgggactctcaactctgaccaggcgagggacttcgacctccccttgaaggagcggttctacctgcagccgctgccgccggcggaggcggcggcgagggtaaagacgtcggcgcatgacatcatcaacctcaagccgctcatcgacaagaaggcgtggccgtacgttcagaacgacctncgnctncgggcctnctacctgcgctacgacctcaagaccgtcatcgcttccaagcccaaggaggagaagaagagcctcaaggagctcaccggcaagctcttcagcaccatcgac

SEQ ID NO: 100720 - DNA, 310 bp, Zea mays
gttcggagttcgaggcacgcgtcaggcgttcgagcttgagaccccagggaggagatgaagagcctaacggagctcaccggcaaggtgttcagcgccatcgacgatcgcgaccatgccgcgaagatcaagagcaccccagaggccgagaaatactatgcagcaaccaaagatgctcttggcgacggtatcgtcaagctaggctagacgcacgggctaataatggccatgtaatttacgacttgcgttggctcatatggacccggcaaggcaatgtaccatattctgctgatattgtaaaaaaactactgag

SEQ ID NO: 100721 - DNA, 455 bp, Zea mays
  unsure (1)..(455): unsure at all n locations
cggacgcgtggttctttggccaatgttccatttctcatccttggcaacaagagggatgtgccatatgctgcctctgaagaggagctacggtatcacctaggccttagcaacttcacaaccgggaagggcaaggtcaaccttggcgactccaatgtccgtccacttgaggtcttcatgtgcagtgttgttcgcaagatgggctacggtgatggtttcaagtgggtctcccagtacatcaagtagggccctcgccgaggcgcatgctcagcccggcgaatttttttgccttgttcgttccggttggttcgtgacgagaacgaacgatggtcgctaggaaagtatcatggaaggtatgaagaggaaaaacagtgcttaacattgttgaacatgtngagtctttagcgtcaaaacaatttatgtcgaactctattctttcgcttttccatacaacggtt

SEQ ID NO: 100722 - DNA, 274 bp, Zea mays
acgcgttcgccgacacgtacgccatctctctcaatcagttaccgcagatccgtcatccggtgagtgtagtccgcacgaacccatggcctccctcgagcttgcctgctcctacgccgctctcatcctcagcgactatggcatctccatcaccgcacgataagatcgccacgatcgttaatgcggccaacatcaaagtcgagtcctactggcctgccctcttcgccaagctcctggagaagcgcaacgtctaggaccttatcctctccgttggatc

SEQ ID NO: 100723 - DNA, 500 bp, Zea mays
  unsure (1)..(500): unsure at all n locations
attcccggggtcgactccacgccgtctcgggcctggggactactcgcggggcttgtcttcgccgactctcggagaccctttcgcctaagaactcgcgagcctggaggggtgatccactgctctngctgggctattgtctgggcgcgcctcgggtgcctgtgttcccggagcctgctcgcccgcaactggcgtcaagnttcggcgagggccgtgtggttcaagggccgggtcccagatcttcagcgagggcgggcttgactacctcggcaacccgagcctgatccacgcgcagagcatcctggccatctgggcgtgccaggtggtgctcatgggcgccgtcgaggggtaccgcatcgccggtggcccgctcggggaggtggtcgacccgctgtaccccggcggcagcttcgacccgctcgggctcgccgacgacctcgaggcgttcgcggagctcaaggtcaaggagatcaagaacggccgncttggcatgttctncatgt

SEQ ID NO: 100724 - DNA, 423 bp, Zea mays
gcacgttcgaggtggcgcagaaggtgtgggccgaaaccttctacgccatggcggagagcaacgtcatgttcgagggcatcctgctgaagccgtccatggtgacgcccggcgcggaggccaaggacagggccaccccggagcaggtggccgcgtacaccctcaagctcctccaccgccggatccccccctccgtgcccgggatcatgttcctctccggcgggcagtcggaggtggaggcgacgcagaacctcaacgccatgaaccaggggcccaacccgtggcacgtgtccttctcctacgcgcgggcgctgcagaacacctgcctcaagacctggggcggccagccggacaaggtcaaggcggcgcatgacgcgctgctgctgcgcgccaaggccaactccctggcgcagctcggcaagtaca

SEQ ID NO: 100725 - DNA, 409 bp, Zea mays
  unsure (1)..(409): unsure at all n locations
cggacgcgtgggccggagcgcacgtcagatcaggtgcgccgcgcccccctcgcctaaggtgcgacgaccatccatcgaacaggaaggatgacgggctccatggatctcccggccaagggcgggttcagcttcgacctgtgccgccggaacaacatgctggagaagaacgggctcaaggtcccgggattcaggaagaccgggacaaccatcgtcggcctcgtctttcaggatggggttgttcttggggcagacacaagggcaactgagggccccatagttgctgataagaactgtgagaaaatccactttatggcaccgaatatatactgctgtggagcaggaactgctgcggacacggaggccgttacagatatggtgagctcccagctacagcttcaccgntatgcaa

SEQ ID NO: 100726 - DNA, 394 bp, Zea mays
  unsure (1)..(394): unsure at all n locations
cgccgccaccatgtcgctgatcgccggtgaggacttccagcatatcctgcgtttgctgaacaccaacgtggatgggaagcagaagatcatgttcgccatgacctcaatcaagggtgtcgggcgccgcttctccaacatcgtctgcaagaaggccgacatcgacatgaacaagagggccggcgagctgacgcctgatgagctggagcgcctgatgacggtcgtggccaaccctaggcaattcaaggtgccggactggttcctcaacaggaagaaggattacaaggacggcaggttctcgcaggtcgtcttcaacgcccttgatatgaagctcanggacgaccttgagaggctcaagaagatcaggaaccaccgtggtctgcgtcactactggggc

SEQ ID NO: 100727 - DNA, 406 bp, Zea mays
  unsure (1)..(406): unsure at all n locations
cccacgcgtccggatggcggcccaggctctcctctccggccggcagctgctgggccggcccgtgcagtcggccgtctctaggtcgtcggcgaggaaggcgcccttcgtcgtcagggccagctccagccctccagccaagcaaggtgccgacaggcagctgtggttcgcgtccaagcagtccctctcctacctcgatggcacgctgcccggcgactatggcttcgacccgctgggcctctcggacccggagggcaccgggggcttcatcgagcccaagtggctggcctatggcgaggtgatcaacggccgctacgccatgctgggcgcggtgggcgccatcgacccggagatcttcggcaagatgggcatcatccncccggagaccgcgctgccgtggttcaagacg

SEQ ID NO: 100728 - DNA, 375 bp, Zea mays
  unsure (1)..(375): unsure at all n locations
gtaccccgacccctcgacaacaatggccaccgtcctaggcagcccccgcgcgccggccgtcttcttctcgccgtcctccctccgtgccgcgccggcgcccaccgccgtggcgctgcctgcggccaaggtgggcatcatgggccgtagcgccagcagcaggggcaggctgcgcgcgcaggccacctacaacgtgaagctgatcacgccggagggggaggtggagctgcaggtgcccgacgacgtgtacatcctggaccaggccgaggaggacggcatcgacctgccctactcctgccgcgcggggtcctgctcctnctgcgccggcaaggtcgtctccggctccgtggaccagtccgaccagagctacctcgacga

SEQ ID NO: 100729 - DNA, 380 bp, Zea mays
cccacgcgtccggatcgcggaccaggctctgctctcccgccgccagctgctgggccgggtcctgcagtacgccgtctctacgtcgtctgccaggaacgcacccttcgacatcagggccaactccagccctccacccaagcaatgtgcctacaggcagactatgttcgcgttcaagcactccctctcctacctcgatggcacgctgcccagcgactatcgcttagacccactaggcctctcggaccccgagggcaccggacacttcatcgagcccaagtggctgacctatggcgaagtgatcaacggccgctacgccatgctgggcgcagagggcgccatcgacccggagatcttcagcaagatgggcatcatgccccccg

SEQ ID NO: 100730 - DNA, 385 bp, Zea mays
gcagattgacagtattccagatgggctagttgattttgaggagtttgttgctgcaacagtacacgtgcatcagctggtggaacatgatactgagaagtggaaatcattgtctcaagctgcatttgataaatttgatgttgacagagatggctacatcacacctgatgaacttagaatgcatacaggaatgaagggttctattgatcccctcctggaggaggctgacattgacaaagatggcaagataagcctagatgaatttcgccggctcttgaagactgcaagcatgagcgcacgcaatgtacaaactcctaggggtgttcgcaagtcatagttttctggtttttgtagttcacataactgaactagagagcagcagcacatg

SEQ ID NO: 100731 - DNA, 430 bp, Zea mays
gagccatatgttgtggagcttgatcagcgagaggatggctcagagattcaggatgccttacttgagatagttggcaggcgtactgtccctcaagtttttgtccatggaaagcacctgggtggttctgacgatactgttgactcctacgaaagtggaaaactggctagacttctaaacatcggagtcaaggacgacctttgagtgacatgctacatcggtcagcctgttcgtttggtttcaatccgtaccggcttctactacttctatattgtttttgtctctatggattacagctacaacagtctaaatagctgattttaatccgaagcgaacagtccaaacagtctcttgttttgagttaccaagggattttttgtgtgactctgattaaagatatgtaactgaaatgtttattataggttataccatt

SEQ ID NO: 100732 - DNA, 424 bp, Zea mays
cccacgcgtccgcccacgcgtccgctaatagcctgctggttgataaccgtgaaagagaatctgggagcatgtacactgattgggatattctccctcctcgtaaaattaaggatgttcacgccaaaaggcctaaggattgggatgacagagaatatattgaagatcctgatgaagttaagccagagggctatgattctatcccaaaacagattcctgatccgaaggacaaaaagcctgacacatgggatgaagatgaggatggaatatggaagcccagaatggtatcaaatccagcatacaagggaccttggaaacgcaagagaattaaaaatcctaactacaagggtaaatggaagaccccatggatcgataatccagagtttgaggatgatccagatctttatgtgctgaagcctttgaagta

SEQ ID NO: 100733 - DNA, 426 bp, Zea mays
cccacgcgtccgctggtcgatggtgcccgccgacaaggcggcggaggccggcggcgacaaggcaccgcagatcgacgtcacgcagttcggctacttcaaggtgctcgggaagggggtgctgccgcccaagcccattgtcgtcaaggccaagctcatctccaaggtcgccgagaagaagatcaaggcagcaggcggcgccgtcgtgctcaccgcctaggtttcagtccttgttcgcctcctggttttgaaatctatatctgaactgatagtgctttcctgtctcagcaatttgtgttaagaaaacctgtagttttaaaatatgtggttcctgcctgttgggcagtgcttatgcggtttttgatgccagttcatatcaaatgtttcacatcaattaaatcgatcctcgctaccaggtgtgctagtttc

SEQ ID NO: 100734 - DNA, 402 bp, Zea mays
  unsure (1)..(402): unsure at all n locations
ctctgtatcgactcgtcattactttggctttggtgctcttgtatctgaggaactttcttacaaactgaaagaaattcccaaggtccgctgggttcttcctgattcatacttggatgtcaaaaacaaggactatggaggcgaacccttcataaatgggcaagctgttccttatgatcctaaatatcatgaagagtgggtgagaaacaatgcccgtgccaatgacagaaaccggcgcaatgataggcctcgcaactttgacaggtcaaggaactttgacaggagaagggagaacatgcaaaactaccagaacagagatgggcctnctgcccaaggtttcaatggcccnccaccttcacctggccagaaccagatgccatcccaccatagtcagggcaacatgtc

SEQ ID NO: 100735 - DNA, 428 bp, Zea mays
cccacgcgtccgcccacgcgtccgcccacgcgtccgcggacgcgtgggttcgccggcgagcagctcgaggacggccgcaccctcgccgactacaacatccagaaggagtccaccctccacctggtgctccgcctccgaggtggcgccaagaagcgcaagaagaagacgtacaccaagcccaagaagatcaagcacaagcacaagaaggtaaagctcgcagtgctgcagttctacaaggtggacgacgccaccggcaaggtgacccgcctccgcaaggagtgccccaacaccgagtgcggtgcgggtgtcttcatggccaaccacttcgaccgccactactgcggcaagtgcggcctcacctacgtctacaatcagaaggcgtaatcccatgcgccgctttgcttcacccgcctacctatcaagcattc

SEQ ID NO: 100736 - DNA, 388 bp, Zea mays
atagaccacagccagtcagccacatcactagctatctgtgcagaggcaatggcgtgcagaggttgagctggtggtggaggtcaagtccccggctgacaagctgtgggcggcgctgcgtgactcgacggagctgttccccaagatcttccccgagcagtacaagagcatcgagaccgtcgagggcgacggcaagtcggccggcaccgtccgcctcctcaagtacaccgaggcggtgccgatgctgacgttcgccaaggagaagcttgagacggcggacgacgagaacaaggtggtgtcgtacagcgtggtggacggcgagctggcggacttctacaagaacttcaagatcacgctgaaggtgactccggccaaggcggagggcgagggc

SEQ ID NO: 100737 - DNA, 347 bp, Zea mays
cccacgcgtccgttttccatagtaatgaaaatgctcttggctcgacatagtctgttctattcgtcccgaaccgaattttcgctgggttgtttgtaagtaaagtaaatagtacacgatggagctcgagaggacagaatttctttttgatcaagggaaagaatctagggttagtgaaaactaataaattaggccaactttgtcagtctatccttaatatagaaatcaaaaggttaaaataagaaaaagtctaattttggaagattggaaaaacttttttgatgaaaagtctatctgaatcaattgttcatatttgatttctatagaagagtgaaatgctttatcgaagg

SEQ ID NO: 100738 - DNA, 413 bp, Zea mays
gcctccccatcgcccgccgctcctccagaagcctcggcaacgtcagcaacggcggaaggatccggtgcatgcaggtgtggccggcctacggcaacaagaagttcgagacgctgtcgtacctgccgccgctgtcgacggacgacctgctgaagcaggtggactacctgctgcgcaacggctggataccctgcctcgagttcagcaaggtcggcttcgtgtaccgcgagaactccacctccccgtgctactacgacggccgctactggaccatgtggaagctgcccatgttcggctgcaacgacgccacccaggtgtacaaggagctgcaggaggccatcaaatcctacccggacgccttccaccgcgtcatcggcttcgacaacatcaagcagacgcagtgcgtcagcttcatc

SEQ ID NO: 100739 - DNA, 410 bp, Zea mays
cgtgtccgaggcagccatcgagacctcatatctggtgctggagtccgccatggccgagctcatgaaccacaggcccgtcatgaagaagctgcaagcggaggtacgggcgtacggagcggagaagaagctggacatgatcagggaggacgacctgagcagcctgccgtacctaaaggcgtccatgaaggaggcgctgcggctgcacccaccggggcccctgctgctgccgcactactccaccgccgactgccagatcgacgggtaccacatccccgccaacacgcgcgtcctcgtgaacggctgggccatcggcagagacccggcggtctgggagaagcccgaggagttcatgccggagaggttcatgcgcgacggctgggacaagtccaacagctacagcggccaggact

SEQ ID NO: 100740 - DNA, 427 bp, Zea mays
catctatggtggccatgttgctgactacatgaagaaccttgctgaagaggagccagagaagtaccagagccacttcagtgcgtacattaagaagggagttgaggctgatgaaatagaagcgctgtacaagaaggtccatgctgccatccgtgccgatccttccattgttaagtcaaccaagcagccaccaaaggagcataagaggtacaaccccaagaagctgacatatgagcagaggaaggccagcctcattgaaaggctcaaccaactcaactcctccggtggtgctgatgacgacgatgaggacgacgagtaaagttaattgccatcgaagtagtgctatctcaatccagcgatcagcaattgtgtactgtcttatgcggggacctgtagtactgcaataggcatttttggtttaaagttttgc

SEQ ID NO: 100741 - DNA, 394 bp, Zea mays
cgccagtccaaccaagtcagcacccgcgcgcggcaaggagttcacgcccatggcgagcaccaacatggcgtcggccacctcgcggttcatgctggccgcgggcgtgcccactgccagtagcggcagcggccgtgtcagcttcgcctcggcgcccaaccggcttggcaggaggcttgtggtccgggccgatgaggagtccccggcagagccggcgcccacggcggaaggggagggcgccgtggccaccaagcccaaggccgagaagccgccgccgatcgggcccaagaggggcgccaaggtgaagatcctgaggcgggagtcctactggtacaacgggatcggcaacgtcgtcaccgtcgatcaggatcctaacacccgttacccggtggtggtg

SEQ ID NO: 100742 - DNA, 409 bp, Zea mays
cccacgcgtccgaattaagcccattactgttagcttcaaagagggtcttggtcaaaaattcaggcaaccttcaggaacaggaattgacttttcagtgtttgaagaatcagatttattaaagcagggggacatggatgtatatccacttgcagttaaagctgaaacaacattgtctgttgatcacccaccagaaggggatgaccaaaagatgataactcctaactcacagatcacccaggccgtttttgaaaagaaagaaaatggggattatcaagtaagagttgtttgccagatcctctgggtcaatggaactaggtatgaactgcaagaaatatatggcatagggaactccatggaaggtgatgctgatgcaaatgatccagggaaagaatgtgttatttgcctctca

SEQ ID NO: 100743 - DNA, 418 bp, Zea mays
gtggcggtggggccaagaaaatgatagaagacagagctgcggaaaacatagatgccatttttgggcttcatatagctgactctgtgcctattggtgtgctggcatccaggccagggcctattatggctgggagtggattctttgaggccgtaataagtggaaagggaggacatgctgcacttcctcatcacactatagatccgatattggctgcctcaaatgttattgtgagccttcagcaacttgtttctcgagaagctgatcccttggactcacaggttgtgacagttggaaagtttcaaggaggtggagccttcaatgtgatccctgattcggtaactataggtggcaccttccgagcctttctgaaagagagttttaatcaattgaagcaacggattgaagaggtgattgtgtc

SEQ ID NO: 100744 - DNA, 413 bp, Zea mays
ggactttcatcggcggaagcttcaggttcttgctgaagcaggcccggatttgattgcggttgaaacgatccccaacaaattggaagctcaggcatatgttgaactccttgaggaatgtaacattaatatcccttcatggctttccttcaactcaaaagatggagtgcatgttgtgagtggtgattcgttaattgaatgcgctactattgctgacaagtgtgcaaaggttggtgcagtcgggataaattgcacacctccaagatttattcatggactgatactctccattcgaaaggtcacagacaagcctattctgatatatcccaacagtggtgaaagatatgatggtgaaaaaaaggagtgggtggaatccactggtgtgtcagatggtgattttgtttcgtacgtaaatg

SEQ ID NO: 100745 - DNA, 421 bp, Zea mays
cccacgcgtccgcccacgcgtccggacgggcgtgtcggtgtgggaggcgctggtgctggagatcgtgatgaccttcgggctggtgtacacggtgtacgcgacggcggtggacccgaagaagggcagcctgggcaccatcgcccccattgccatcggcttcatcgtgggggccaacatcctggtgggcggcgccttcgacggcgcgtccatgaaccccgccgtgtccttcggccccgccctcgtcagctgggagtggggctaccagtgggtgtactgggtcggccccctcatcggcggcggcctcgccggcgtcatctacgagctgctcttcatctcccacacccacgagcagctcccctccaccgactactaaaagccgaagccgaccgacccaggggtgcgcagcgcagcgcagctagca

SEQ ID NO: 100746 - DNA, 426 bp, Zea mays
cggacgcgtgggggcggtggcgcctcagggcctgccgcccctcggccgccgcgcctggtccttcgccgtcgtctgctccaagaagaagatcaagaccgacaagccctacgggattgggggtggcctgaccgtcgacgtcgacgccaacgggagaaagggcaagggcaagggcgtgtaccagttcgtcgacaagtacggcgcgaacgtcgacggatacagcccaatctacaacgaggatgactggtctcccaccggcgacgtctacgtcggtggaaccactgggcttctgatctgggccgtcaccctcgctgggatcctcggcggcggcgccctcctcgtctacaacaccagcgccctctccggctaaggatatccaatgcatgcgcttcttgcgattcgtcgtgtaaaatcagggtgtctgtctat

SEQ ID NO: 100747 - DNA, 411 bp, Zea mays
gcgcgcgtatgcgctccagcagcccatggcctccatggcgttcgccctgtcgggcgcgttcaagggcctatccctggcacccaccaccaccacctctttcttcccgcgctgcgaccgagcctcgctctccgtcggcggcagcagcgggcgtgccggccgtgccggtgccggcgcggcggctcaccatgcagatagcgcacaagaagggagccgggagcaccaagaacggccgcgactccaagggacagcgcctgggggacaagatatacggcgaccagctcgccaagcccggggccatcatcatccgccagcgcggcaccagggtctatcctggaaataacgttggaatgggcatggatcacacactcttcacttcgatagatggactcgtcaagtttgagaagtatgggc

SEQ ID NO: 100748 - DNA, 378 bp, Zea mays
gacgacttgtttcattgattcttgaagagatcgagcttcttttgcaccacaaggtcgaggatgtcttgcaactgcggatcaagctgcggctgcggctcaagctgcaagtgcggcaagaagtaccctgacctggaggagacgagcaccgccgcgcaggccaccgtcgtcctcggcgtggccccggagaagaaggccgcgcccgagttcgtcgaggccgcggcagagtccggcgaggccgtccacggctgcagctgcggtggcaactgcaagtgcgacccctgcaactgctgatcacatcgatcgacgaccatggatatgattattatctatctagcttgtggtggtggttgaacaattgtaagcgagtccgatcttgct

SEQ ID NO: 100749 - DNA, 411 bp, Zea mays
gccgccgcctccgacatcgtctcttcgtccccacgagcaaccgataatccgccggcgctgagatgttggtttatcaagacctcctatctggcgacgagctcctgtcggattcattcacctacaaggagctcgagaacggcgtcctgtgggaggtcgagggaaagtgggtcacccaaggtcctgttgatgtagacattggtgccaatccatccgccgagggtggtgaggatgaaagcgttgatgacacagccgtgaaggtggttgatattgttgacacattccgtctacaggagcaacctccttttgacaagaaatcatttgtctcttacataaaaaaatacatcaagaatctcactgctgtgttggagccagagaaagcggatgagttcaaaaagggtgtcgagggtgcaa

SEQ ID NO: 100750 - DNA, 412 bp, Zea mays
gtgtccccttcgattctgtctgcaaactttgcgaagcttggtgatcaggtaaaagctgtggaggtggcaggatgcgactggattcatgtcgatgtcatggacgggcgctttgtgccaaacatcacaattggacccttggttgttgatgctctgcgtccagtgactgatcttccgttggatgtacatctgatgattgtggaacctgagcagcgagtccccgattttatcaaggcaggtgctgatattgttagtgtccactgtgaacagacatcgaccatccatttgcaccgaacagtcaatcagattaaaagtctaggagcaaaggcaggagttgttttgaatccagcgactccactcactgcaattgattacgttcttgatgttgttgacctggtgctgattatgtctgtga

SEQ ID NO: 100751 - DNA, 429 bp, Zea mays
cccacgcgtccgtccacgcgtccgctcatcacgccgccactgatctgctctgttgctggtgactaggagcagtagcgagagggattctggatggccaagtcgaacaaccacactgcgcataaccagtcgttcaaggcgcacaagaacggcatcaagaagcccaagcgccaccgacagacctccaccaaggggatggacccgaagtttctgaggaacttgaggtactcaaggaagggcaacaagaagagtggcgaggctgactccgaggagtaagatgatggtgattgagactgtggcgacaaatgcatctcttgtatcgctaagagtcttagctgtgaacttagttctcacttatgtgtgactgtgatcaaaggacttgtgtatgatcaaaggagatccatcaggtggtaccgaactggattttatgtt

SEQ ID NO: 100752 - DNA, 424 bp, Zea mays
aagattgctaatgaaactggaaagccatggctgtggtgggattatgtgcatgatttcgcacttaggtgcccaatgaaggataagaaatacaatcatgactgtgccagcgatgttatcaagtcacttggattggacatcgagaaaataaacaagtgtgttggcgaccctgaagccaatgaggaaaacgtaattttaaaggcagaacaagatgcccaaattggtcatggtaaaaggggagatgtcacaatactaccaacccttgtcatcaacaacaggcaatacagaggtaagctggacaaagttgctgtcctgaaagcgatttgttcaggattcgaggagacaactgagcctgctgtttgtttgagcgaagaggttcaaacaaatgagtgtttggagaacaatgggggttgctggctggacaaag

SEQ ID NO: 100753 - DNA, 423 bp, Zea mays
ccggttcggaattcccggctcgacgcacgcgtccgaagagtcctaatgaaactcgtaagccatggctgccgtggcattatgtgcatgatcaggactgttttacccaatgaaggataagaaatacaatcatgactgtgccagcgatgttatcaagacacttgcattgaacatccacaaaatcaacaagtatgttggcaaccctgaagccaatgaggaaaacgtaattttaaaggcagaacaagatgcccaaattggtcatggtaaaaggggagatgtcacaatactaccaacccttgtcatcaacaacaggcaatacatatgtaagctggacaaagttgctgtcctgaaagcgatttgttcatgattctaggaaacaactgatcctgctgtttgtttgatcgtaaaagctcaaacaaatgattg

SEQ ID NO: 100754 - DNA, 334 bp, Zea mays
aattccggcggcgacccactcgtgcggcttctagtacatcaaaggcgttttgttttatcctgtgccttttgacatctatgggtaggttttaactgcaacaatgaagaataagagaaagaatatgctgaactattaccagtctgagattgacacaatatacaaaaagctggaggcgcataacagtgctgccagagctaagtgaatagatgtgccctattcgaccatcatctgaaaacaagggaaacgacaccgttgtaaatttcacattaatattgcgaagtaacaactcatggctatgagtaaggaataaaatgtatattgtgcctttgtctat

SEQ ID NO: 100755 - DNA, 416 bp, Zea mays
cccacgcgtccgcttatcgcaacgcgagcagcagttgcattggaggcgaggaggagccacgccggggctcaaggaatggccgctctccgccacctcgctgccggccccacctgccaccaccaccaccacggcgtcgcggcagccaccgcctccctccggctccatcgcctccccctccccttccgcccccttcgctcccgctccggctccttcaccagggtttatgcgatctccagcaatgacatcagggtcggcaccaacgtcgaggtcgacggcgcgccatggaaagttctagagttcctccacgtcaagcctggaaaaggcgctgctttcgtcaggacaaaactgcgtaactatgtaactggcaacacggtcgagaaaaccttccgtgctggaagtacgctacaggaaccatc

SEQ ID NO: 100756 - DNA, 308 bp, Zea mays
gcttcgagtacatcaaaggcgtagtgttggatcctgtgccttttgacatcgagagggatttggtgactgcaacaatgaagaagaagagaaagaatatgctgaactattaccagtctgagattgacacaatatacaaaaagctggaggcgcagaagagtgctgccagagctaagtgaagagatgtgccctattcgaccatcagctgaaaacaagggaaacgacaccgttgtaaatttcacattaatattgcgaagtaacaactcagggctatgagtaaggaataaaatgtatattgtgcctttgtctat

SEQ ID NO: 100757 - DNA, 409 bp, Zea mays
gtcatgactacgctggacatcctctcgtcgcactcgcccgacgaggagtacatgggggagttcgcggagccgtcgtggctggcggagcccatggtgaaggcggcgttcgagaagttcggcggcaggatgaaggagatcgaggggttcatcgacgagtgcaacatcaacctggacctcaagaaccgctgcggcgccgggatcgtgccgtacgagctgctcaagcccttctccaagccgggagtcaccgggaggggcatccccagcagcatctccatctgatccatcctcagcatgcattagtccaattaattaaatcggaggttgtactattattgcatgcagaggctgcttgtcgaataaaacgtactatatgtacgattgtattgtacatgtgtgtcaatgcaacaag

SEQ ID NO: 100758 - DNA, 418 bp, Zea mays
ggcaagctgaggctaaccgcatcagggatgagtaccccgatagaattcctgtcattggtgagaaatgccgagaggagtgacatcccagacatcgacaagaaaaagtaccttgtccccgccgacctcacagtgggacagtttgtgtacgtggtgcggaagcgcatcaagctcagcgccgagaaggcgatcttcatcttcgtgaagaacaccctcccaccaacagctgccctgatgtctgccatctacgaggagaacaaggacgaggacgggttcctctacatgacctacagcggcgagaacacctttgggctgctatgagtggcgccgcgccgtcgtggatcgacgtccgacaatgccccttctactgtaaatacttaaaaaaaaataggcgtctcaagaatccgtgtacataataata

SEQ ID NO: 100759 - DNA, 404 bp, Zea mays
gtcaatgagaagctgcacaacctgcatggtgtggcaacaaggtgcaatgatcctcaggtgacagacttcatcgagagtgagttcctcgaggagcacgtggaagccataaacaagatctccaagtatgtcgcccagctgaggagagtgggcaaggggcacggggtgtggcacttcgatcagatgctgcttgaggaagaggcctaaaaagaagaacggacagatgaatgaaggaaacaagtgtgtaatgtgttgatcaggcggaggaataataatgggtcaactgacaactctgggtcggtggatttgtagttggtttgggttttttagttgtagaacggtgttgccctcctagagagggatgaacacattatgcatgcgatgtgtcaattcggtcggtgctatgc

SEQ ID NO: 100760 - DNA, 426 bp, Zea mays
gtcagcacccgcgcgcggcagggagtcaagccccatggcaggccccaccttggcgtgggccacctcgcggttcatcctggccgcgggcgtgcccactgccagtagcggcagcggccgtgtcagcttcgcctcggcgcccaaccggcttggcaggaggcttgtggtccgggccgatgaggagtccccggcagagccggcgcccacggcggaaggggagggcgccgtggccaccaagcccaaggccgagaagccgccgccgatcgggcccaagaggggcgccaaggtgaagatcctgaggcgggagtcctactggtacaacgggatcggcaacgtcgtcaccgtcgatcaggatcctaacacccgttacccggtggtggtgcggttcaacaaggtgaactacgccggcgtgtctaccaacaactatgc

SEQ ID NO: 100761 - DNA, 410 bp, Zea mays
cccacgcgtccgccatttctacccggagacctccagccgtccgcccctgaaccctcgggcttctccgtcccgcctcggcactcgacggccgccggcacacaccgcgcagtctcgagacaggaaccggaggaacgaggatggaggatgactcgccgctgacgaagacgatgaagggtgcggtgacaggactcgccgcggggaccatctggggcaccgtcgtcgccacctggtacgacgtgccccgtgtggagcgccacgtcgcgctccctggccttatccggacgctcaagatgtgcggcacctacggtgccaccttcgccaccatcgggggcctctacatcggcgtcgagcagctcgtgcagagccagcgcaagaagcgcgacttcgtcaacggggccgtcggcgcgttc

SEQ ID NO: 100762 - DNA, 406 bp, Zea mays
cgatcatgtcggcctactgcggcaagtacgcggatgagctcatcaagaatgctgcctagatcggcacccctggcaagggtatccttgctgctgatgagtcaactggcaccattggcaagcgcctttccagcatcaatgtcgagaacgtggaggagaaccggcgggctctccgtgagctcctgttctgctgccctggtgccctccagtacatcagcggtgtgatcctcttcgaggagaccctctaccagaagaccaaggatggcaagccttttgtcgatgtcctcaaggagggaggcgtcctccctggcatcaaggtcgacaagggcaccattgaggttgttggcaccgacaaggagaccaccacccaaggccacgatgacctcggcaagcgctgcgctaagtacta

SEQ ID NO: 100763 - DNA, 439 bp, Zea mays
ggtttcggaattcccgggtcgacgcacgcgtccgcttactcagagataattaatgagagcctgatcgagtccgtggactcgttgaacccgttgatgcatgctcgcggtgtggccttcatggtcgataactgctccacaactgctcgtttgggatctaggaagtgggcaccacgcttcgattacatcttgacccaacaggcgtttgtgactgttgacaagaaagcaccgatcaaccaagacctcatcagcaacttcatgtctgaccctgtccacggtgccatcgaagtctgcgctcagctgaggcccactgttgacatctcagtgaccgctgatgctgatttcgtgcgtccagagcttcgacagtcttcataagcttgtatggatccgcagtgtgactgcaatggctagtttgcaagaacttaatatgcctgggcttttg

SEQ ID NO: 100764 - DNA, 293 bp, Zea mays
gaaatgatcgaaagtggtgtcattaagctagatgacaagcagagcgaaagcaagtgtgctcttgtttacgggctgatgaatgagcccccgggtgctcgtgctcgtgttgtgttgactggtttgactgttgctgaacatttccgcgatactgaaggacacgacttgcttgatgttatcgacaacgtgttcacggtgactgacgctgactactgcggttttatctctccattgacgctccccaacgtgaccaagatccttgtcatctacatcaactgcctgtacctccttatgtt

SEQ ID NO: 100765 - DNA, 364 bp, Zea mays
agctggcccaaggtccgtggtgtggccatgaaccccgtggagcatccccacggaggaggtaaccaccagcatatcggtcacgcctctactgtccgccgcgatgctccccctggccagaaggtcggtctcattgcggctaggaggactggaaggctcagaggccaggctgctgccacagcctccaaggctgacaaggctacctagagtattgttgttcttgttttatttatccctctgctgtgatttattagatggttaaaaggacgtgttccggtatggatggtactatggtgaaacattgtgtcagcttttgtggtctctatggattatgaagtatgcctaaagaagttttttggtgctcaat

SEQ ID NO: 100766 - DNA, 418 bp, Zea mays
ggtaactcaagaactgttcttatgcatgcagcagccataagcattgctactagcgtcgcctgcacgtgctgtgtcgtttccagggtttcatgcggggcgaagcagctggtctctgccgcctgaacgccgccggaatctgcgaggcctccccgagctgcgtgcgtcgtcggataaggcagccggcacggcaatgccggttccgcttgctccgtacccagctcctccggcgccattcacgccgcccaatggggcccagagccagctcgtctgcaccgggtgccggaacctcctcatgtacccagctggtgcgacgtcggtctgctgcgccgtctgcagcaccgtcaccgccgtgccggctccaggaactgagatggcgcagctagtgtgcggaggatgccacacccttctcatgtacata

SEQ ID NO: 100767 - DNA, 425 bp, Zea mays
cccacgcgtccgggaggaggaagacgatgaggggatggaagtggacggggaggcggaggatgagccggggtggccgtgtggggcgccggaggcggggcccggcgagacgaggccggcagcgatcctcgtggcggacgcggcggaggtcgacttccccgtcatctacgtcaacgccgccttcgaggccgccacggggtaccgcgcgcacgaggtgctcgggcggaactgttgatgctgaagctgtttctattgcgttccagaagagaggttattttgatgatacaaagtcgtgctccagttccaagtctaatgattccttagagttggttgacattcaaatttaggatcctagtggtgtttgggaaacagttctatggatttagagtcaaggggagatttgttgtaatatgcctctaattcctttt

SEQ ID NO: 100768 - DNA, 422 bp, Zea mays
gcagaaaaggagatcaaagaaaaaaagtcatcaggcaaaaaggtgacaaagggtgaaggagaatccgttgaagcagttcttcccagcaaggatgatctgaggaagaccattactgaaatcctcaagaaagttgacttcaacacggcaactttcagtgacatccttaagaagcttgacaatcactataaaatggatctggccccaaagaaagaagccatcaaagttatgatccaagacgagttaaccaagttatcagaggaggacgaaggagagggagccggagacaccgagaagaaacagcagcagcctcaggcgaaggagatcgaggcatctcgttgattatcgccgcaccaactcgagaacctcacccctgatcgtgtatgttatggggcatgatgtgtatgcagccttcacaccttttt

SEQ ID NO: 100769 - DNA, 411 bp, Zea mays
cccacgcgtccgcccacgcgtccgcccacgcgtccgagagctccacccccgtgatcgacggcaagcagtactacgccgtgtccgtgctcaccaggacggcggacggcgacgagggcggcaagcaccagctcatcgcggccaccgtctccgacggcaagctctacatctgcaaggcgcaggccggcgacaagaggtggttcaagggcgccaggaagggagtcgagaaggccgccttctccttcagcgtcgcatgatgatgtaattttatttcttcgatgggatgggatgcacgcactacgtagagagcttggctaggccaggcctggctgagcacgcttgtgtgttccttcgactgtacatgagaacaaagactaaggagagctccattcccgtacaaggatcgatttcttc

SEQ ID NO: 100770 - DNA, 425 bp, Zea mays
cccacgcgtccgaaaaaatggaattgaaccccttcatgcttactataactagttattggggttttctactggctgctttaactataaccctagctctatttattagcttgaacaagatacgtcttatttgaaatgaattgaatagaagaatctttcttttggattcttggtattctagactcttttccacactaattaccaatttttttcttggtcattgagattcgtgggtagtttagactattatttagagatagatcgtacctctttttttatcccctcgaacaaatcgaaatgattgaagtttttctatttggaatcgtcttaggcctaattcctattactttagcgggattattcgtgactgcgtatttgcaatacaggcgtggggatcagttggatctttgattgagtaatatttcttt

SEQ ID NO: 100771 - DNA, 405 bp, Zea mays
  unsure (1)..(405): unsure at all n locations
ccgaggtcgcgnagaacgatcacagccatctggttctcaaagaggatgacgttataggtagcttagagactgatgacgtgaaagacatgaagcctctgaacgaccgtgttctaatcaaggttgctgaagctgaagacaaaactccaggaggcctactgcttacggaaactgccaaggagaagccatctatcggaacgtgtgtagcggatggcccaggctccctggaactggactgcactgagttcgagacgaaacttgccctattagtgttgtgcatgatcatgacccaacctgtaaggggtttttgatatcgatttggtcccatggcctaatcctttacatcttcgaaagccttaatgtgaacatatggtttactttcagaatcccttcgtgtgtccttttttt

SEQ ID NO: 100772 - DNA, 507 bp, Zea mays
  unsure (1)..(507): unsure at all n locations
ccggtcgacccacgcgtgcgctcctctccgcttccaagatgtcttatcgaggacgtggaggttctgctggtaacgagttccgtatgtcactggttctaccaatcccaaccactgtnaactgngctgataacacatgagccaagaacctttacatcatttctgtgatgggaatcaaggggcgctctatacagtcttatttttgtctttgtttgttacattgttatagtatcttttataatatgtaattttttctcttttttatatagttacttctctctttcttattttttttatcatactataatttttttctactcttttataattttattactatttattgttgtttgttgtattatttctatactatttttatttatttcttcttattcataataattattatttattttattattcatttttatactattttattcatcttcatctttatttctttataataatttttattgttatatatattctttaattatattatattat

SEQ ID NO: 100773 - DNA, 394 bp, Zea mays
cggacgcgtgggggacatacatggtgtgcattcagaagtcttcgctgatgataattcaagctgggactccatggtgcgaaactactggtctttgctatccccacttatattttcagaccatccaaagagacctggtgatgaagacccacagccaccatttaacatgctaaggaacgttttagatatgaatgctcactttggtggatttaatgctgctttactgaagtctggaaagtctgtatgggtgatgaatgttgttcctacaaatgccccaaattatctaccactaatatttgaccgtggttttattggggttcaacatgattggtgtgacgcatttgcaacttacccaagaacatatgatatggtgcatgctgatggctttctatcactt

SEQ ID NO: 100774 - DNA, 367 bp, Zea mays
  unsure (1)..(367): unsure at all n locations
tggagattcagagttgactgcagtcattattaaggatatcacggctttaattctgctggggtagacctacaagctctctgcaattcacaaaatgagagngcagtctctccaaggacacatcaaatcattccactacagtcgtggacaacctaaaaaatcgtctgatgagtgcaacaaaagaatttaaagaagttcttaccatgcgaacagagaatttgaaggttcatgaaaatagaaggcaaatgttctcttcgtcagctgcaaaggacgcgtcaaatccattcatccgtcaacgaccccttgttgctagggatccatcagagtcatctgtgcccccagcaccatgggccagctactttgcatctac

SEQ ID NO: 100775 - DNA, 319 bp, Zea mays
ggcggtacatgcaattctgaaggacctgtttgaggctatcaatgaaacacatgagctgaagcagttcacccttcgtgtggaagtaggcatgcacttttgagtcattggatagaatgagggatgaaagcagaaaatacataaagctagttgacatggaatgcactcttgacagtgattcttcaggaagcttcccaggatgttgagaggggggaatcaagccactctatttgatagattaatgactctatcttaacaatggcaactgtctgcatagtaatatgggtgtcgacttgagaactcatcaaaattattgttattg

SEQ ID NO: 100776 - DNA, 319 bp, Zea mays
gggctactttgggcctttgcagaagccaattatatcagattcattttattggtgatctctgcaatcttctgtggttatgtttaccagtgtcctccattccgattaagctaccaaggactaggcgagccgttgtgtttcgctgcatttggtcctttggcaaccacagccttttacttctcaaacagcagcttaaatacttcgagcggaggagcggctcttctccctctcactaaaacaggtatagcttcatctgttctcgtcgggctgacaactactctgatactcttctgcagccatatccatcagatcgatggagatc

SEQ ID NO: 100777 - DNA, 339 bp, Zea mays
cggacgcgtgggcaagtacggcgcgaacgtctacggatacagcccaatctacaacgaggatgactggtctcccaccggcgacgtctacgtcggtggaaccactgggcttctgatctgggccgtcaccctcgctgggatcctcggcggcggcgccctcctcgtctacaacaccagcgccctctccggctaaggatatccaatgcatgcgcttcttgcgattcgtcatgtaaaatcagggtgtctgtctataatctagcctccatggatgctcaaccttcgtcatgtaacaataatcagtgctactcttcattacataatttggatgctatatatataaaa

SEQ ID NO: 100778 - DNA, 404 bp, Zea mays
gtcgaagcgaggcaggggaggttcggcggttaacaagttacgcatgacgctggggctgcgggtgacttttacggtgaactgcagcttacaacactctccctcactaaaacttacaacatttcttcatgatcataaactccaccaccaactccttctccacaatcttagtctgcaacttggtctacacagaacctaaaaacaacaaattttaatgatgaatcaatgcaaatgtgcactgaagctaatcaacataagtccatcaaaccatccactaacgttgaattcacaaattgtatagccacttccttgaccagaaagttttgtataagagctgattttgcatgggttgtcttttttgcatttggtgtaattttaaaaaaattaaaaatttgcttgatgtgttt

SEQ ID NO: 100779 - DNA, 363 bp, Zea mays
gccagttgcagcaatggatgctattgctaaaatcgtctaagttgcaccaatcagggtttatgaagttgcaaccttttataccatgtttaacaggactaaggttggtaaataccaccttctggtgtgtggaactacaccttgtatgattcgtggttcacgtgaaatcgaagagacgttgttggagcaccttggagttaaacgaaatgaggtgaccagtgatggtttattttctgttggagaaatggagtgcatgggttgctgtgtgaatgctcctatgattgctgtggctgactactcgaaaggctcatagggttacacatataactactatgaggacctcacttcaaaactagttgttgagat

SEQ ID NO: 100780 - DNA, 299 bp, Zea mays
  unsure (1)..(299): unsure at all n locations
gcccacgctcgccacgcgtcgaaagatcaagtattcccggagccgagggatacttggacaccaaagatgcctgcgantcctgccaagctagcctagatgagctatagatggttaacgatgccacgtattcggacttggtttgtcatatggccgcaatgttccgtttttgttatatattcaagtttttacatgtcatttgtgcagtttactttttatttattttttatataatattgtttttctattttttttttttatttatttttttatcttattttttttattttattttttttgtt

SEQ ID NO: 100781 - DNA, 342 bp, Zea mays
cccacgcgtccgcccacgcgtccgctcgtttagaacctctaaaatttcccccactcgccagtcgcaggagcacctgtagcagtcatggacgccagcggagccggtagcaaggggaagaagggggcggccgggcgcaaggcaggcggccccaggaagaagtcggtgacgcggtccgtcaaggccgggctgcagttccccgtcggccggatcgggcgctacctcaagaagggccggtacgcgcagcgcgtgggcactggcgcccccgtctacctcgccgccgtcctggagtacctcgccgccgaggttctggagttggcagggaacgcggctaaagacaacaag

SEQ ID NO: 100782 - DNA, 373 bp, Zea mays
  unsure (1)..(373): unsure at all n locations
cccacgcgtccggttgaaaggaaggacttcaactcatatggtagccgaagaggaaatgatgagatcatggctaggggaacctttgccaacattcgtcttgtgaataagttcttgaagggtgaggttggacccaagacaatccatgttccatctggggagaagcttgcagtttttgatgctgctatgaaatacaagaatgaagggcatgacactattatcctggctggtgccgagtacgggagtggaagctctcgggattgggctgcaaagggcccaatgctgcagggagtgaaggctgtgatagcaaagagcttcgagaggattcaccgcancaatcttgctggcatgggaatcatccctctatgctacaaag

SEQ ID NO: 100783 - DNA, 388 bp, Zea mays
cacgcgcgcctcggcaaaccctccgcctcctcgcccatcctcccctccatcccggcccagccgcagggccatggactctgctgccggcgcaggccgccaccgcgttcgaatcgcagtcgtcggcgacgtgcacaatgattgggcccttgaggaagattcaaaggcgcttcgatttcttcagccggatttagtgctttttacaggcgattatggaaatgagaatgttgaacttgtcagaagcatttcagatcttcagttaccaaaggcggcaattcttggcaatcatgattgctggcacacacatcaattctcagagaagaaggtcgatcggtgtcggcttcagctcgcaagccttggtgagcagcatgttggatacaaatgtttggac

SEQ ID NO: 100784 - DNA, 284 bp, Zea mays
gactttgttggccaaggcaattgccaatgaatgccaagctaacttcattagtgtgaaggtcctgaactgcttaccatgtggtttggtgagagtgaggccaatgtcggagatttttgacaaggctaggcagctgctccatgtgtctcttttgatgagctcgactcattgctactaaaggaagcaggtggtgacccggggtctctgatgggtgtgaacactcttactgagatggatggctgatgccagaaacgtttatatcgggcactaaaccgacatatgaccac

SEQ ID NO: 100785 - DNA, 498 bp, Zea mays
  unsure (1)..(498): unsure at all n locations
cccacgcgtcctgccacgcgtnccggaaccttcaactttttcttcggcttaaaaggggtatggcaaatgtttgaaaagactctgactggaaaaaactataacccttgaggttggagaagctcggacacccatcgacaaatgtgaaaggcgaaagatccagggacaagggaggggcattncccctcggaccaaagcagcgtcttgatctttccgccggcaaaacaagcttggaaggattggccgcacccctagctagactactaacatccaaaagggagaaggcaccctccaccttgtgcctccgtcttccgtggtggtcaagtaagtcattgggtcgtttaaagcttgccgatgttgcctgcgtcgtctgggtgccctctctccatatggaggttgtcaaagtatctgctgttcgtgtcatgagtcgtgtcagtgttggtttaataatggaccggttgtgttgtgtgtgcgtactacccagaactatgacaaatcatg

SEQ ID NO: 100786 - DNA, 339 bp, Zea mays
  unsure (1)..(339): unsure at all n locations
gccgccgcggcatacggagaagcagccaacgtgttcggcaagcccaaggcgagcacggagtacatcgcgtacagcggcgacggcttcaagctgctgatcccgtccaagtggaaccccagcaaggagcgggagttccccgggcaggtgctccgctacgaggacaacttcgacgccaacagcaacgtgtccgtcatcatccagcccacgtccaagaagaccatcgccgactacggctctcccgaggagttcctctcccaggtcgactacctgctcggcaggcaggcctacngcggcaagaccgactccgagggcgggttcgagaccggcgccctggccacc

SEQ ID NO: 100787 - DNA, 425 bp, Zea mays
  unsure (1)..(425): unsure at all n locations
cccacgcgtccgaatctccccagcaatccctagcagaagccttccatcctcactcgctcgatggcccgcacgaagcagacggcgaggaagtccaccggcggcaaggcgccgaggaagcagctggcgactaaggcggcccgcaagtctgcccctgcgaccggcggagtgaagaagccccaccgcttccgccccggcaccgtcgcgctccgggagatccgcaagtaccagaagagcacggagctgctgatccgcaagctgccgttccagcgcctggtgcgggagatcgcgcaggacttcaagaccgacctacgcttccagagctctgctgtctccgcgctgcangaggcggctgaggcctaccttgtcgggctcttcgaggacaccaacctttgcgccatccacgccaagcgcgttaccatcatgcc

SEQ ID NO: 100788 - DNA, 468 bp, Zea mays
cccacgcgtccgttcacgcgtccgttctatggcaattgtatgcggtacaacattctacaactgctgaagaatcttagatttcactcaaatggaaaagagatcacagataatgacatattggcatgggccaataagaaagtaaaagattctggaaagcaccactcttatatgcaaagtttcaaggataaaagcctttcaagtggcacctttttccttgacttactaagtgctgtggagcctcgagttgtgaattggagccttgtgaccaaaggggaaaaagacgaagagaagcaaatgaatgcttcatacatcatttctgtggctaggaagcttggttgctccatttttttgttaccagaagatatattggaggtgaaccagaagatgatgctaactctgacagctagcattatgtacttgtatttgaaaaggccaacattacaatcattggactctgaaaactggagt

SEQ ID NO: 100789 - DNA, 100 bp, Zea mays
gagcccttgaaaaccttgtatgatgctgttcaatccatcaaacctacagttctgatcgggacatctggagttggaaggaacattcacaaaagaaatcatt

SEQ ID NO: 100790 - DNA, 250 bp, Zea mays
ggaaacctcgaggaggcagcaatggtggatgtttggatcgaggtggaggctaaccagtacgccggtgcactgaatcccatgctcttccaggtcctcatcagtcctatgcttgcgggaaccaccgaccagaaagttgtggattagaaccttgagaagctgaaaaaggtgctagaggtgtacgaggcacgcctgaccaagtgcaagtaccttgctggagacttcctcagcctcgccgacctgaaccatgtgt

SEQ ID NO: 100791 - DNA, 259 bp, Zea mays
cttcattcttgaaagttcacacttactgaattggtacgggcatggtcattaggttaagctgatgtgctcctactgcaaacatcatactgagtctgaagttccagatccttattatggaggccctcagggatttgaaaaggtgctggacttattggaagatgcttgcgagtcgctgcttgatagtatcgtcgcaaacaatgcaagcatttctgggtgacatcgatgtaaatctccacatacagacatctattttcagacg

SEQ ID NO: 100792 - DNA, 258 bp, Zea mays
  unsure (1)..(258): unsure at all n locations
cctccctcgagcccgagcaaacatgggcggtctcggagccggcggcggagcggagatggcggagaataagcgaggcgccggcactcgcaaggatgaggtggtgacacgcgagtacactatcaacctccacanacgcctccacggatgcacctttaagaagaaggcaccaaatgccatcaaggagatcaggaagttcgctcagaaggccatgggtactactgatgtccggattgacgtgaaactcaacaagcacaattt

SEQ ID NO: 100793 - DNA, 288 bp, Zea mays
cggaattcccgggtcgacgccacgcgtccgcgacgacgcactcgtacaccggctacctgaggctgctggacgcgtcccaccgcggccgcctgctgtcccgcgcgggggcgctgaacatcgtgccgacgagcacgggcgccgccaaggccgtggcgctggtgctgccgcatctgaaggtgaagctgaactgcatcgtgctgcgggtgccgaccgcgaacgtgtccgaggtggacctggtgatctacaccgtgaagactggcatgacggtcaaggacgtgaacgcggttt

SEQ ID NO: 100794 - DNA, 386 bp, Zea mays
  unsure (1)..(386): unsure at all n locations
acgcgtccgcgttgcgcaactcctgtcagagcggttaattccttttgttgcccttgatgttagaagggaggcggttgcagttgggcgtgcacttgaccttccggtatattttggggatgctggaagcagagaggtactgcacaaagttggagctgaaagagcttgtgctgctgcaattactttggatacccctggtgcaaactatagagctgtctgggcattgaacaaatatttcccaaatgtgaagacatttgttagagcacatgatgttgatcatggtgttaatttggagaaagctggtgcaacagcggttgtccctgagaccttggagccaagtctttagctagctgctgctgntcttgcacaagcaaaaactcccaatgtca

SEQ ID NO: 100795 - DNA, 286 bp, Zea mays
cgccgccgcagccatccgcttgttctcttcggttcagttctcgagtttccaggatgagggtaagagctgcctatctgcttgctgttctgggtggaaacacttccccgactgctgatgatgttaagagcattctggaatcagttggtgctgaagctgatgaagaaaaactagagttcctgctcacagaactcaaagacaaggacataacagaagtgattgcagctggaatggaaaggttatcctctgtgccttcaggtggtggtgcaattgacatgggagctccagc

SEQ ID NO: 100796 - DNA, 377 bp, Zea mays
cggaattcccgggtcgacgccacgcgtccggtcgctgttgactggtttaaagatgcaaagcgaatggatcatgttgctagaagaaagggctgtgcagttcaagtagcggctgagaaggggctctttgcattggctataaatctacaagttcctggcactacaaactacagtatggttttctactttgttacgaagaaactgataccaaactccttattgcaacgctttgtggatggtgatgacgaatttcggaatagtaggttcaagttgataccatcagttcctaaaggctcatggattgttcgacaaaatggtggcagcactacttgtctattatgaaaaagctgtgacattacctatatacgtagctcaaatta

SEQ ID NO: 100797 - DNA, 282 bp, Zea mays
cggtctcggaattcccgggtcgagccacgcgtccgctatggtgtctacttttgcggacatgtaaggtgaagaaacattcgattcatcattccgtggccatgctaatgaagttgtggaggaaagaattgctgacaatgatgtaattctggtaaaaggcccaaagaccaccaacgcggtcttaatattactaagggccccaaatgcctacttccttgttaagattgaacggtccttgcataatgccctgtccatgtgaaagagaaccttgaaatcaaatatggt

SEQ ID NO: 100798 - DNA, 435 bp, Zea mays
cccacgcgtccgccgagctggccgtccgccgcgtcgccgcgctcgcgggggaccgctgccgcaacctgtctttccacaagattgatctccgtgacaagggagcactggaaatggtttttgcttctacaagatttgaagctgtcattcacttcgctggattgaaagctgtgggtgaaagcgtacagaagccattactttattatgacaacaacgtcattggcacgataaatcttctagaagttatgtctgttcacggttgcaagaagttggtgttctcatcatcagctgcagtttatggatcacccaaaaactcaccctgcacagaaaattttcctcttactccaaacaatccatatggcaaaacaaagctcgttgttgaagatatttgcccggatatctaccgttcaaattctgaatggaagaacattttactta

SEQ ID NO: 100799 - DNA, 308 bp, Zea mays
cccacgcgttcgggcgctcgggagggaccgcacttcgtgggagaagccggaggagttgattccgtagctgttcgtgcaggaaccgggcgccgtggacgtccacatgaaaggcaaggacctcatgttcatcccgttcggctccggccggaggatctgccccgggatgaacttcggattcgcgaccattgagatcatgctggccaatctcatgtaccattttgattgggaggttccgggctctgcagcaagggtgtccatggactagtcctttgggctgactctttcactgaaggagaagctttttcttg

SEQ ID NO: 100800 - DNA, 396 bp, Zea mays
gcagagcatccttgccatctgggcctgccaggtcgtgctcatgggcgccgtcgagggcgtaccgcatcgccggcggcccgctcggcgaggtcgtcgacccgctctaccccggcggcagcttcgacccgctcggcctcgccgacgaccccgaggccttcgccgagctcaaggtcaaggagctcaagaacggccgcctcgccatgttctccatgttcggattcttcgtccaggccatcgtcaccgggaagggcccgctcgagaacctcgctgaccacattgccgaccccgtcaacaacaacgcttgggcctacgccaccaacttcgtccccggcaagtgagggaagcgccgccggtgacctttaggtgtccggatgcatgttagcgcacgctggtttt

SEQ ID NO: 100801 - DNA, 405 bp, Zea mays
cagctgttgaaacagattgccaccatctatgtccatatctcaaggggcgacaaggaagctgtcttcccagctgcaatctcgaaagatggcagagcatacaacgatcagttgtttgctagtgcagctaatattctgtggaagattgggggtgatcccaaaatcatacaggagtttatgcagcttgctggtagggcaaaagctgctgcttctgaagctatggatgctgaggcaatccttggggacattccagacgaattcctggatccaattcagtacactctgatgaaagatcctgtgacactgccatcatcgaaggtcacagtggatcggcccgtaattatcaggcatctgctgagtgattctacggatccatttaaccgctcccaactcactcaagacatgctg

SEQ ID NO: 100802 - DNA, 273 bp, Zea mays
gcccgtggtacggccccgaccgcgtgctgtacctgggcccactgtccggcgagggcgggagctacctgacgggcgagttcccgggcgactacggctgggacaccgcggggctgtcggcggacccggagacgttcgccaagaaccgggagctggaggtgatccactcccgctgggccatgctgggcgcgctcggctgcgtctttccggagcttctcgcccgcaacggcgtcaagttcggcgaggccgtgtggttcaaggccggctcctaaatct

SEQ ID NO: 100803 - DNA, 398 bp, Zea mays
gggttttgctgctctccgaccccgagctccgaaggccgcagcatcaggcgcgccgccgctcgcgtgtgaccgagatggcgctgccgaatcaggggaccgttgattaccccagcttcaagctcgtcatcgtcggcgatggtggaactggtaaaactacatttgtgaagaggcatctcactggagagtttgagaagaaatatgaaccaaccattggtgtggaagttcatccgttggatttcaccactaactgtggtaagatcaggttctactgctgggataccgcagggcaagagaagtttggtggcctcagggatggatactatatccatggccagtgtgcgatcatcatgtttgatgtaacctcaaggcttacttacaagaatggtcctacgtggcat

SEQ ID NO: 100804 - DNA, 441 bp, Zea mays
cccacgcgtccgctgacatagtcaccatggcaaagggaattggcaatggcctaccattgggggcagttgtgacaactcctgagattgcaagtgtgttagctcaaaaaatccaatttaacacatttggtggaaatccagtttgttctgctggtgggttagctgtgcttaaggttcttgacaaggagaaacgccaggcacattgtgctgatgttggatctcacttgttggagcgtctaaaatcgcttcaggagaagcacgaaatcataggtgatgttagaggaaggggactgatgcttggggtggaactcgttacggacagaaaggagaagacccctgccaagtcagaaaccattgaactgtttgagaagctcagagatctcggggtactagttggaaagggcggtctgcatggtaacgtcttcagaataaaaccaccgatgt

SEQ ID NO: 100805 - DNA, 373 bp, Zea mays
caagaaccgggagctggaggtcatccactcccgctgggccatgctgggcgcgttgggctgcgtgttcccggagctgctcgcccgcaacggcgtcaagttcggcgaggccgtgtggttcaaggccgggtcgcagatcttcagcgagggtgggctggactacctcggcaacccgagcctgatccacgcgcagagcatcctcgccatctgggcctgccaggtcgtgctcatgggcgccatcgaggggtaccgcgtcgccggcggcccgctcggagaggtcgtcgacccgctctaccccggcggcagcttctacccgctcggcctcgccgacgaccctgaggccttcgcggagctcaaggtgaaagaactcaagaac

SEQ ID NO: 100806 - DNA, 426 bp, Zea mays
cccacgcgtccgcccacgcgtccgggcgagcggagggaagggactcaacgcgactggggagggcttccggcggagggacgagtggaggaggcaccctatggcggggaaccagctgcgccacgccacacccgggctcggcatcgccatcgtcgccttcgggatctacctcgtcggcgaggccgcctacaaccgcctctaccgccccttcggcgacaaccaccactagatcgccggcaggatccgtgactcgctggagccaactttaccaagcactggtgctgttgatgtttttacagttttgagctcataaggtcagccatgaccatattgtaatctgtgaccaggtagacttgcccactggtccgtccaactattgtcttgggaccctgtgttaatccttgctatatggaactgacagggctcatg

SEQ ID NO: 100807 - DNA, 442 bp, Zea mays
ctgctgcagcgcctccgccgccgccgccgcatctaacgcagttccctccgccgcagggcgaggcaagatggttctccagaacgacattgatctgctcaacccgccggcagaactcgagaagctcaagcacaagaaaaagagactcgtccagtcgcccaactccttcttcatggatgttaagtgccaggggtgcttcagcataaccactgttttcagccactcccagactgttgttgtgtgccctggctgccaaactgtcctctgccaacccacaggaggaaaggcaaggctcactgagggctgctctttccgcaggaagggagactagagcggatgtggtcttcaagttttgctctatgccagatactagcgtcatgaactgcctttagctaagaattttcataaatggttctcgagcagctatgtgttgcatgttggctac

SEQ ID NO: 100808 - DNA, 410 bp, Zea mays
ggattcccgggtcgacgccacgcgtccgccggccgaaggcgagggcaggcggtgtgtcgcgatggcgttcgtcgacgcgcgcttgagagagagtgcctcctgcatccgcgtcatccccgacttcatcaaaccagggatcatgtaccaggacatcacgacactgctgctcgaccccaaagcgttccgtgacaccatcgacgtcttcgttgagcggtacaaggaccaaaggatcaccgtagttgctggtgtggaagctagagggttcatttttggtcctcctatcgctctagccatcagtgcgaaatttgtacctttgaggaagcctaaaaaatttccaggcgaggaaatctccgaaaaatattctcttgaatacggaactgacaagataaatatgcattttggagctttac

SEQ ID NO: 100809 - DNA, 282 bp, Zea mays
tgcattcatatgcttgactgcaaattctctcgcggagcttcctgctggcagtgttggtggaagtgcttccttgcctagacaatctcacattctctacagatatccatcactgaaagtagttaacttcagaggaaatgttcagacacggttaaggaaactcactgaaggagatgtgtctgctacattgttggcgctggctggattaaggcagctaaatattgcagaaaatgcaacagctgtactatcagtggaagaaatgcttccggcagttgcccaagtgct

SEQ ID NO: 100810 - DNA, 336 bp, Zea mays
aagaatgttgttgggtctgagagagtttagtttgatgatgaagggaaagacctcttaggtggttatgtggagatgagagatgacacacctgggtacggttcatcccacgctgaagatgattcacatggttttgttgttcacgattatcgtgttgagtccggtgaagattttgatgaaaaatcaggccactcttcatatcctgcacacagcaggagctgagatactggcgcctcatgcaaatgttggttgaagaagcatatcacatgctcgtataaccaagcataggaaacaaatgctatctggtctgttgaggttgcagctgcactagttggcatt

SEQ ID NO: 100811 - DNA, 266 bp, Zea mays
  unsure (1)..(266): unsure at all n locations
ccttcctcgaccccaagggccgcggctgctccaccggctacgacaacgccgtcgggcgccccgccgggggcagaggtgacgaggaggagctccagaaggagaacatcaagaacgccgtctnctncaccggcaacatcacgttgagcgtcaccaagagcaacccggagaccggcgaggtcatcggcgtcttcgagagcgtgcagccgtccgacaccgacctcggggccaaggcgcccaaggatgtcaagatccaaggggtctggtac

SEQ ID NO: 100812 - DNA, 363 bp, Zea mays
caactagtaccccttcatgtccatggtctcctgcagaaaccagccattgttcaaggagggcaagggatgcggctcctgctacaagattcggtgcaggaaggacccgtcctgctccgggcggacggagacggtgatcatcaccgacatgaactactacccggtgtccaagtaccacttcgacctcagcggcacggcgttcggcaggctggccaagcccggcctcaacgacaagctccgccactcgggcatcatcgacatcgagttcaccagggtgccgtgcgagttccctggcctcaagatcgggttccacgtggaggagtactcgagccccgtctacttcgcggtgctggtggagtacgagga

SEQ ID NO: 100813 - DNA, 279 bp, Zea mays
ccgacgcgtccgcggacgcgtggttcgtgcaccaacatggcgtcagccacctcgcgggtcatgctggccgcgggcgtgcccactgccagtagcggcagcggccgtgtcagcttcgcctcggcgcccaaccggcttggcaggaggcttgtggtccgggccgatgaggagtccccggcagagccggcgcccacagcggaaggagagggcgccgtggccaccaagcccaaggccgagaagccgcctccaaacggtcccaataggggcgccaaggccaagatc

SEQ ID NO: 100814 - DNA, 231 bp, Zea mays
ctcgtcgccttcagcagccccaacccctgcctgcagatcaccgactttgcgctcttggccaacgacctcccgtccgccgtcgtggagaaagtcaccttcttggacgacgcgcatgtgaagaagctcaagagtgtgctcggcggcagctgttaacttgtttttcgagacaatacagttcatgctgggtatgcatcgtctccgtcggcgtcttggtccgtcatcatttaatgg

SEQ ID NO: 100815 - DNA, 330 bp, Zea mays
cccacgcgtccggagaacatggggagcctcgacgcagatttccacgacatggcgagcgaggccttggacgcccacgacaacttcggcatcgagatagctatgcgggagttcagggacttgttcgaggggatccagtccatgacctactgctgcggtaacttcggtgatgacaagggtgccagggtcattgtcaaagccttcccacacataaaatgcactgtgctggcccctcccaagatcattgccaccaaaccggccgatggagcgatgataaactatgtcgaaggtgacatgttcagtttcattccacctgctcaaactgtcttgcgc

SEQ ID NO: 100816 - DNA, 432 bp, Zea mays
cggacgcgtgggcggacgcgtgggccgtcgctggcggagcagatggagaaggccgcagtgtttgacttcaacctgacgctcccggcgatcgcgaccgagttcctgctgctcatggtggcgctggacaagctctacttcacgccgctaggcaagttcatggatgagcgggacgccaagatccgcggtgagctcggcgatgtcaagggcgcctccgaggaggtgaagcagctggaggaccaggcggcggccatcatgaaggcggcgcgcgccgagatcgcggcggcgcttaacaagatgaagaaggagaccaccgcggagctggaggccaagctggacgaggggcgcagccgtgtggaggccgagctcgtagaggcgctcgccaacctcgaggcgcataaagaggaagctgttaaggcgctcgacgcccagatc

SEQ ID NO: 100817 - DNA, 443 bp, Zea mays
atcttgcttcaccacctcttgtgttgcttatgcacttgccggaactgttgatattggttttgagaaagagcccattggatttggaaaggatggcaaggaagtctacttcagggatatatggccctcaacagaagaaattgcgcaggttgtccaatccagtgtgctgcctgacatgttcaagggcacctatgaggctatcacaaaaggcaacccaatgtggaaccagctaactgtcccagaagcgtcactctactcatgggattccaaatccacttacattcatgagcccccttactttaaggacatgaccatgtccccacctggcccctctacagtgaaagatgcctactgcttgctgaactttcgagacagcatcactacagatcacatttcacctgcaggaagcatacacaaagacagtcctgctgctaagtatttgatgg

SEQ ID NO: 100818 - DNA, 438 bp, Zea mays
ctggttctgatgtacgtggtgatcctgcatcagcactactagaagttcttgaccctgagcagaacaaagcattcaacgatcactatttgaatgtgccgttcgacctgtcaaaagtcatatttgttgcaactgccaataggatgcaacctataccccctcctctgttagacaggatggaaatcattgagctgccaggctacacacccgaagagaagttaaaaatagccatgaaacatctcataccaagggtattggagcagcatggcttgagtacgacaaatcttcagattcctgaggctatggtcaaactggtcatcgagaggtacacgagagaagctggtgtgcgcaatcttgagcggaacctagctgcattggctcgtgcagctgctgttaaggtcgcagagcaaggtaaaactcttagaactggcaaggaaatac

SEQ ID NO: 100819 - DNA, 365 bp, Zea mays
ggctcggcagctaacgacctgcagccaaccatctaccagcgactcagcgagcgagagcagcacacacgcagctagctaggagcagcagcagcggcggcggcgatggcggcctccatgatctcctcgtcagctctggcggtggcgcctcagggcctgccgcccctcggccgccgcgcctcctccttcgccgtcgtctgctccaagaagaagatcaagaccgacaagccctacgggattgggggtggcctgaccgtcgacgtcgacgccaacgggagaaagggcaagggcaagggcgtgtaccagttcgtcgacaagtacggcgcgaacgtcgacggatacagcccaatctacaacgaggatgactg

SEQ ID NO: 100820 - DNA, 293 bp, Zea mays
cccacgcgtccggatttgtagagctttggcttaccttcacaactgcgtaggagtgtggcacagagatatagagccacaaaatattctggtgaacccacatacccatcagctgaagttgtgtgacttcggcagtgccaaagtcttggtacaaggggaaccaaatatttcatatattcgttctagatactacagagccccagagctcatatttggggctactgagtatacaacagctattgacgtgtggtctgctggttgtgtacttgctgagcttcttctaggtcagcctgatt

SEQ ID NO: 100821 - DNA, 242 bp, Zea mays
ggaattcccgggtcgagccacgcgtccgtgggtgtcaagtcggtgattgcaaagagcttcgagcggatccaccggagcaacttggtggcggtggggatcattcctgtctgctttcaagcaagagaggatgccgattcactcggcctcaccagacgtgagcgctacaccatccaccttcctaccagcaccggcgagatcagtcctggtcaggacgtgaccgtcacgacccacgactgaagatc

SEQ ID NO: 100822 - DNA, 328 bp, Zea mays
cgtaccggtccggaatgcctggacccacgcgtccggcgtcgggagtgggtcgctcatcttcaggctggtgcaggcattgttgccgacagtagcgcggatgacgaacaacgtgaatgcgagaataaggctgctgcactagctcgggccatcgatcttgcagagtcagcttttgtagacaaagaatagtgtgctatggttatcgtttagttcttgttcatgtttcttttacccactttccgttaaaaaaagatgtcattagtgggtggagaaaagcaataagactgttctctagagaaccgaagaaatatggaaattgaggttatggctt

SEQ ID NO: 100823 - DNA, 336 bp, Zea mays
ggaattcccggctggagccactcgtccgctcaagcactataatagaagtacttgttattcttacataagactcataacaagagtagaaattattacgaaaacgggggtaacgtgtgcttcgacaactttggtgacaaggtgaagaattggttgacctttaatgagccctatacatttacttcattttcctatggaaccactgtctcatgccccatgacgatgctcacctgtactagactgtaccatctcaactgataattcactcgtctaaccttacattgctgaccacaacattcttctagcccacgcttaggctgttgatctttactacaagta

SEQ ID NO: 100824 - DNA, 409 bp, Zea mays
cccacgcgtccgcccacgcgtccgggttctccagcggatcggcgtcggcatggtcctggccgtggtggccatggtcgccgcggcgctcgtcgagtcgcggcggctccgcgcggagcccgccctgctgagcatcttctggctcctgccgcagtacgtcctgctgggggtctccgacgtgttcaccgtggtggggatgcatgagttcttctactcgcaggtgccggcctccatgaggaccaccggcatcgggctctacctcagcgtcttcggcgtcggcggattcctcggcgcgtacctcatcaccctgctcgagatggccacggcgaggcccggcaacgcccgcagatggttctctgacgacccgcgggaggcgcggatagataacttttactgggtcttggctctcctc

SEQ ID NO: 100825 - DNA, 383 bp, Zea mays
acgcgtccgctcaagcactagaagagaagtacggcggattcttagataagactcataagaggattggaaatgattacaaaaacttcgctaaggtgtgcttcgacaactttggtgacaaggtgaagaattggttgacctttaatgagccccagacatttacttcattttcctatggaaccggggtctttgccccaggacgatgctcaccgggactagactgtgccatcccaactgggaattcactcgtcgaaccttacattgctggccacaacattcttctagcccacgctgaagctgttgatctttacaacaagtattacaagggcgagaacggccgcataggtcttgcatttgatgtaatgggtcgtgtgccatacggaaca

SEQ ID NO: 100826 - DNA, 253 bp, Zea mays
cccacgcgtccgcaagaagaccatcgccgactactgctctcccgaggagttcctctggcacgtcgactacctgctcggcaggcacgcctactgcggcaagaccgactccgagggcaggttcgagaccggcgccgtggccaccgccaacgtcctggagagctccacccccgtgatcgacggcaagcagtactacgccatgtacgagctcaccaggactgctgactgctactagtgcagcaagcaccagctcatc

SEQ ID NO: 100827 - DNA, 394 bp, Zea mays
ccaagggtccagagattagaactggatttttgaaagatgggaagcctattcaattgataaaaggccaagaaatcacaatttctacagactatagcattcagggtgatgagaaaatgatatcaatgagctacaagaagcttgctgttgatctgaagccaggcagtgtcatattgtgtgctgatggtaccatcactcttactgttcttcactgtgataaagaacaaggcttggttcgctgccgctgtgagaacactttcaagcttggcgagaggaagaatgttaatcttccaggagttattgttgatctccccacactcacagacaaggacaaggaggacatccttaaatggggtgttccaaacaagattgacatgattgccttgtcaattgttcg

SEQ ID NO: 100828 - DNA, 374 bp, Zea mays
gttgcagccctacagcgaggtgttcggcctccagcggttccgcgagtgcgagctcatccacggccgctgggccatgctcgccaccctcggcgccctctccgtcgagtggcttaccggcgtcacctggcaggacgccggcaaggtggagctggtggacgggtcctcctacctgggccagccgctgccgttctccatctcgacgctcatctggatcgaggtgctcgtgatcggctacatcgagttccagcgcaacgccgagctcgacccggagaagaggctgtaccccggcggctcctacttcgacccgctcggcctggcggccgaccctgagaagaaggagcggctgcagctggcggagatcaagcacgcgcgcc

SEQ ID NO: 100829 - DNA, 341 bp, Zea mays
cgaattcccggctcgactccacttcgtccgcctagctcaaaagggatacaaggtggctaatgtcccaatcgtgatgggagtggacgtgccaaagtccctttttgagatcaaccagtacaaggtttttggactgacaataaacccagcgatccttcatgcgattagaaagaccagggccaagactctaggttttgatgggcgtcagagcaattacgctgagatggaccatgtgaggcaggaactggtccatgcgaatcaaatctttgctcagaatccatcgtggccagtcattgcggtcactggaaaagctatcgaggtaacaactgctgtcatcttgggga

SEQ ID NO: 100830 - DNA, 389 bp, Zea mays
ctaccagcgactcagcgagcgagagcagcacacactgcacgcagctagctaggagcagcagcagcggcggcgatggcggcctccatgatctcctcgtcagctctggcggtggcgcctcagggcctgccgcccctcggccgccgcgcctcctccttcgccgtcgtctgctccaagaagaagatcaagaccgacaagccctacgggattgggggtggcctgaccgtcgacgtcgacgccaacgggagaaagggcaagggcaagggcgtgtaccagttcgtcgacaagtacggcgcgaacgtcgacggatacagcccaatctacaacgaggatgactggtctcccaccggcgacgtctacgtcggtggaaccactgggcttctgatctgggc

SEQ ID NO: 100831 - DNA, 361 bp, Zea mays
gtgaaacaaagatggtcctatgcatgcgcaaaacaacttattgagaggcttgtatttgctgaaggtgcagaaaatggccttgatttcacaatcgtgagacctttcaattggattggaccaaggatggacttcattcctggtgttgatggtcctagtgaaggtgtgcctcgggttttggcttgcttcagtaacaatctgctccggagagagcccttgaagcttgttgatgggggtcagtctcagagaacctttgtctacatcaaggatgccatcgaagctgtagtgctgatgattgaaaatcctgctcgagccaatggccacatcttcaatgttgggaatccgaacaatgaagttaccggta

SEQ ID NO: 100832 - DNA, 438 bp, Zea mays
aaccatctcgactcgtggggaagtttcgctctcgccggcgtcgacagcctagggttcgaggaacgtccgtccgtccgtccggggaaggagcggtagggaggctgagatgatcgaggtggtgctcaacgaccgcctggggaagaaggtgcgggtcaagtgcaacgaggacgacaccatcggcgacctcaagaagctggtggcggcgcagacggtgacgcgctccgagatgatccgcatccataagtggtacaacatctacattgaccatattatccttaaggactacgatgttcacttctgcattgtcctttagctctactacaactgatctagttgttcttttttttttatacttgttattgttgttcttatattttaattttatttgttctatttctttttttttttgttttttctttattttttttttctttattt

SEQ ID NO: 100833 - DNA, 387 bp, Zea mays
gtccggattcccgggccgcagctgaggcggcggaggggagggtgccgtggccaccaagcccaaggccgagaagccgccgtcgatcgggcggaagaggggcgccaaggtgaagatccttaggagggagtcctactggtacaacgggatcggcaacgtcgtcaccgtcgatcaggatcccaacacccgctacccggtggttgtgcggttcaacaaggtgaactacgccggcgtgtccaccaacaactacgccttggacgaggtctcagaggtgaaatgagtggggccggccggctcaagggcttcgcgctagctaccgtgtgattgatttgtagtagttgtgaaatgaggctgtgaagctgcatgctgtgcttgctagcgtcacaacat

SEQ ID NO: 100834 - DNA, 362 bp, Zea mays
gatttagctgccgatgcgggaacatgtactgttcggtgcaccgctactccgacaaacatgactgtcagttcgactatcggactgcagcaagggacgcgattgccaaggccaatcctgtggtgagggcggagaagctcgacacgatctgaggcgggcatagcgggagcgaaatggttgcaatctgcaagaattcaacatgctgtctatgctgcgttatcattgaaacttgccattcttgtctgctgctgcgtcccgtgcggttcaatactgtgatgcacacatcatctaggcagccgcaagaattccatcaaaatggtttcccgtgttggctatgacgcgtaagctcaattcagttattcatg

SEQ ID NO: 100835 - DNA, 392 bp, Zea mays
ccgcgtgcgaaccaagcagaccccagcagaagaagcgaagtcgtcgccggagcaggaggaagagcgagcagcaagatgtcgtggcaggcgtacgtcgatgaccacctgctgtgcgacatcgaaggccagcacctcagcgccgccgccatcgtcggccaccacggcagcgtctgggcacagtccgagaacttccccgagttaaagcctgatgaggttgctgggatgataaaggactttgatgaacctggaactcttgcaccaactggtctttttgttggaggtacgaagtacatggtgatccaaggtgaacctggagttgtcatccgaggaaagaagggcactggacgcattactatcaagaaaactggcatgtccctgattatcggtatcta

SEQ ID NO: 100836 - DNA, 384 bp, Zea mays
cccacgcgtccgagccactgcacttgctaacgccccaccagatcagcagagacttatgcttggtgagaacctgtatcctcttgttgaacagctggaacgtgagcaggctgccaaggtcactggcatgcttttggagatggatcagacggaggttcttcacctgctggagtcgccagatgctctgaaagccaaggttgctgaagccatggaggtccttcgctctgcccagcatctccagcagagcaatgtttctactgagcagcagctggctaatctatcattgaatgatggcgtcgtctccagctgaacgttaatgtttctgatgtttcggaagtgctgccagtttttgcttgaatactaccctaatctgagtgtaatgacttt

SEQ ID NO: 100837 - DNA, 266 bp, Zea mays
ggcgaggccgtgtggttcaaggccgggtcgcagatcttcagcgagggtgggctggactacctcggcaacccgagcctgatccacgcgcagagcatcctcgccatctgggcctgccaggtcgtgctcatgggcgccatcgaggggtaccgcgtcgccggcggcccgctcggagaggtcgtctacccgctctaccccggctgcagcttcgacccgctcggtctcggcgacgactctgaggccttctcggagctcaaggttaaagagct

SEQ ID NO: 100838 - DNA, 364 bp, Zea mays
gctcgatctactactactactagctggtacacatactagccagcctgccagccagcttgccatggcgcccaccgtgatgatggcctcgtcggcaaccgccgtcgccccgttccagggtctcaagtccgccgccagcctccccgtcgcccgccgcagcaccaggagcctcggcaacgtcagcaacggcggaaggatccggtgcatgcaggtgtggccggcctacggcaacaagaagttcgagacgctgtcgtacctgccgccgctgtcgacggacgacctgctgaagcaggtggactacctgctgcgcaacggctggataccctgcctcgagttcagcaagctcgggttcgtgtaccgcgagaac

SEQ ID NO: 100839 - DNA, 407 bp, Zea mays
cccacgcgtccgcccacgcgtccgctgatccgtccactcctattatcatgattggtcctgggacagggctggctccttttagaggcttcttgcaggaaaggttagcattgaaacaatctggggcagaattgggcacttcaatccttttctttggatgcaggaaccgtaatatggactacatatatgaagatgagttgcaaactttccttgaggagggggcgctttctgagctaattgttgcattctctcgggaagggccaacgaaagaatatgtgcagcataagatggtggaaaaggccacagatatttggaacatcatctcaaatggtggttacttatatgtttgcggtgatgccaagggaatggctagagatgtacacaaaatgctttataccatagtccaagag

SEQ ID NO: 100840 - DNA, 409 bp, Zea mays
cttaactggtgatgatttatgggctgctgtgggcgaagctggtaaaaacctttacgctaaaggagaattcaaagagtcgcaggtggcagaccttgatgtctatttgttgaagaaggttggacttttccctgatgttatagagaggaaaacattgcgccatctcgaaaaaggagataatgtctcagctctcatcactggagaattctataccagagataaatttccaggatttggaagaccctttgtgttcaatgcagagatttttaaaagagttggacgtacatctgaagccaaagattcagctcgagtggctctgaaatcaccatggtggacacttggctgcagttacgaagaggctgctgaactagctgggtgggaggatgagcagctagagtttataagagagaag

SEQ ID NO: 100841 - DNA, 337 bp, Zea mays
cgcgtgcgaaccaagcagaccacaacatgaagaagcgtagtcgtcgccggaaggaaaggcgcggagcaagatgtcgtggcaggcgtacgtcgacgagcacctgatgtgcgagatcgaaggacagcatctcagcgccgccgccatcgtcggtcacgacggcagcgtttgggcgcagtccgagagcttccccgagttaaagcctgaggaggttgctggtatcataaaggactttgatgaacctggtactcttgcaccaactggtcttttcgttggaggtacaaagtacatggtgatccaaggtgaacctggagttgtcatctcaggaaagaagggcact

SEQ ID NO: 100842 - DNA, 370 bp, Zea mays
acttctacgtcgtccttgagcgtgctgggtaccgtgtcgcccgtcgccgcaggtgcaagtcccgtgttgggatccagcacagggtcactaaggaagacgccatgaagtggttccaggtcaagtacgagggtgtgatcctcaacaaggcccaagccaacacctcctaagcctaagcgtcaccataagatattagaccctcttggtctcttctagtgcttcgagttaatggagtatatctggcggtgggatttgtattagaagaaaatcagatgcattatcatttttgcctgtactggtcctactggagttagttggatccatgtttttgtgtgtgtcgaatacattgatgttactactgttctacctcgac

SEQ ID NO: 100843 - DNA, 398 bp, Zea mays
cccacgcgtccgcccacgcgtccgcccacgcgtccgcctcctagcacagctagcgcctgctccccttcgcctgtgatcatgtcttgcagcagcggcaagtgcgactgtggctccagctgctcctgcggcagctcatgcaactgcatgtcccctaacgtggagaccgccgccgccagcagcatcaagaccacggtcctcgccgcgccgaccaccaaggccagcgccggcggcttcgaggcggccaccgagggcggcggctgcgactgcaacacctgcaactgcggcaccagctgcggctgctcctgctgcagctgcaactgagccggtcaggcgatggcgcacgagagtcgagaggacgacgacgagtcgtataaatataatagcggcgtctaaataag

SEQ ID NO: 100844 - DNA, 307 bp, Zea mays
gcggcaccaacatggtcgactacgccatggacatccacagtccctctacgaccgacgacgtgcccgaggacatggtgaagcgccgtgccaggtcgctccaggctcaggtcgctcgaggaggccgaccccgctcgtcgccttctccgaacccgcgctcgtcaggagtcaggcccgacaacagtcaacatccacatgctcagagcgatccagatcggcctgacagatggagctctgatcagtatgccaattcagtttgagtgtggtaactactcatgggctgctgattacctttaccagtattgtgctt

SEQ ID NO: 100845 - DNA, 451 bp, Zea mays
ctcggccgccggatccggcgtcgtcgttcctcggaacttcaggctcctagaagagcttgaacgtggagagaagggcattggagatgggacagtgagctatggaatggatgacgcagatgacatctacatgcgatcatggactggcactattattggccctcataataccgtccatgagggtcgcatctaccagctgaagttgttctgcgacaaggactaccctgagaagccaccatcagttcgatttcattcaagaataaacttaacatgcgttaatcatgaaactggagtggttgacccgaagaagttcagcgttctgggtaactggcagcgtgattactcaatggaatacatcctaacccatctcaagaaagagatgacatcgccacagaaccgcaagctagttcagcctgcggaagggacattcttctaaagatggcagcaactcatg

SEQ ID NO: 100846 - DNA, 444 bp, Zea mays
gccgccgtcaccgccccttccttcgccgcaccagcgccagcccgcgccgtggtcagaaggaggtccttcaccgtgcgcgcctctctccgcaaggccaccggcaccgccgccgtggcaatggctgccagcgccctgcttgccggcggtgccatggcccaggaggtgctgctgggcgcaggcgacggcgggctcgtcttcgagcccagccagttcaccgtcaaggccggcgacaccatcacattcaagaacaacgccggcttcccgcacaacgtcgtcttcgacgaagacgaggtgccgagcggcgtcgacgccaccaagatctcgcaggaggagtacctcaacgcgccaggcgagacctactccgtcaccctcaccgtgccgggaacctacggcttctactgcgagccgcatcaaggagccggaatggtcggcaagatcaccgtc

SEQ ID NO: 100847 - DNA, 433 bp, Zea mays
cgacaagaaggcgtggccgtacgtccagaacgacctccgcctccgggcctcctacctgcgctacgacctcaagaccgtcatcggttccaagcccaaggaggagaagcagagcctcaaggagctcaccggcaagctcttcagcaccatcgacgatcttgaccatgccgcaaagatcaagagcaccccggaggccgagaaatacttcgcagcaaccaaagatgcgctcggcgacgtactcgccaagctagcctagatggaagctaatagatgggttaacgatggccacataatttcggacttgtgtttgttcatatggagccggcaaatgtaccgtttcctgttcatattatatcccaagttcttgacaagtacctttgcgggcggatggaacatcagaaacattttccagcagccttaacaagtgatccacgta

SEQ ID NO: 100848 - DNA, 441 bp, Zea mays
cgccagtccaaccaagtcagcacccgcgcgcggcaaggagttcacgcccatggcgagcacgaacatggcgtcggccacctcgcggttcatgctggccgcgggcgtgcccactgccagtagcggcagcggccgtgtcagcttcgcctcggcgcccaaccggcttggcaggaggcttgtggtccgggccgatgaggagtccccggcagagccggcgcccacggcggaaggggagggcgccgtggccaccaagcccaaggccgagaagccgtcgccgatcgggcccaagaggggcgccaaggtgaagatcctgaggcgggagtcctactggtacaacgggatcggcaacgtcgtcaccgtcgatcaggatcctaacacccgttacccggtggtggtgcggttcaacaaggtgaactacgccggcgtgtctaccaacaactatgc

SEQ ID NO: 100849 - DNA, 445 bp, Zea mays
  unsure (1)..(445): unsure at all n locations
tgctaattcagtccagaatggcggatcccacaatattttactgagaccacccagtcaaggttctagtttgggatcatatgatccatttctgcagcaataccagcagcctcagcctcaaaatcatttcagattgcagcagatgtcttcagctgcacattcatatcgggatcagattcaaaagattcaggcgggaccgacaccacctgatccatatggcttgttaggatttttgggtgttataaggatgaatgatgctgatttagcatctcttgctttaggaatagatttgacagcattgggtttgaacttgaactcgccagataatctatacaagacatttggctcaccctggtcgaatgacccagcaaaaggagatactgattttcgaattccagcttgttacctctttgacaaaactcctncactacagaccttactttttcag

SEQ ID NO: 100850 - DNA, 405 bp, Zea mays
ggaaccgcccttgtggtacagacggcgagggtgtatcccggagcttttgtgctcgagttccacgttgggattgtcgtcgcgtttgtgttcctgctcctgagcctgatgggcaccctgttggtggtcacctgggctaggtttcgggtgcccaggtgctggggatactgccttatgggcatgtacatcttgttcaccgttgtcagtattgccatcgcgagttattcaggatgatatgtcatcctttttttttttgtgaagatagccggccgctgatagattgtggtatatagttagcatgcgcaatctgtctgtctggttcaatgcctacgtatgctgattttggcggtgccggtgtggcacgcggaatttaatgtgatatttaatttgctgccgcattttaaaaat

SEQ ID NO: 100851 - DNA, 326 bp, Zea mays
acactccgcgctagctgaggacggtacagcggcacagaggtgcgacgtacggcgacgacgacgcatgcgccacacatggcatcccagctctccggcgccgtgccccggttccacggtctacggggctacgccgcgcccaggtccgcggaggcagcgctgccgtccgtgagggtggtcaggacgaggtcgtcgtcgcatggcatacgctgcgactacatcggctccgccaccaacctgatcatggtgactacgacgacgctgatgctgttcgcggggcagttcgggctggcgccgtccgagaaccgcaaggcgacagcggtgctgaa

SEQ ID NO: 100852 - DNA, 461 bp, Zea mays
cccacgcgtccgcccacgcgtccgggcacttatgtatcacgcgatcccgctgtcccagcagctggagtacttcagggagtaccagacgaagctggcggcggtggccggcgccgggcaggcgcgctccatcctcagcggcgcgctgtacatcgtcagtgccggcgccagcgacttcgtgcagaactactacataaacccgctgctgttcaagacgcagacggtcgaccagttctccgaccgcctcgtggccatcttcggccgcaccgtgcaggagctctacggcatgggggcgcgccgcgtcggcgtcacgtcgctgccgccgctgggctgcctgccggcgtacatcacgctgttcgggcacggcgccggcgggtgcgtgtccaggctcaacagcgacgcgcagagcttcaaccggaagatgaacggcaccgtggacgcgctggcgcggcggtacccggacc

SEQ ID NO: 100853 - DNA, 448 bp, Zea mays
cccacgcgtccgcccacgcgtccgcatggttgctgctggtgacacattgcttggtttgggtgagaaagagcggttaggcctgttgcagtatgccgacgacgagtctaaagaagagaggtactgggaaaccttggatgctgatttgcgttactggaccagatccctgcgcccagtgcagtggtatcctggtcatattgcaaaaacagagaaagaattgaaggaacaattgaggctcatggatgtcgtcatagagatccgtgatgctaggattcccttgtccaccagccatcctaagatggactcatggctaggcaaccggaaaaggatcatagtcttgaatcgcacggacatgatctcaactgaggatatgaatgcatgggctacttactttggtaatcagggcatcaaagttgttttctccaatggccagctgggtatgggtacaatg

SEQ ID NO: 100854 - DNA, 415 bp, Zea mays
ctttgttttttgtttactttttttgcttttaatgacaatgaacacaattattccttggggattgagcgaatagtttacatcatggtacaaaccgaaaaccaacgtgcgctcacatgcatccggacacctaaaggtcaccggcggcgcctcccttacttgccggggacgaagttggtggcgtaagcccaagcgttgttgttgacggggtcggcaatgtggtcagcgaggttctgaagcgggccctttccggtgacgatagcctggacgaagaatccgaacatggagaacatggcaaggcggccgttcttgagctccttgaccttgagctcggcgaaggcctcggggtcgtcggctaagccgaacgggtcgaaactgccgccggggtagaacgggtcgacgacctctccgagcgggc

SEQ ID NO: 100855 - DNA, 381 bp, Zea mays
ggcggccggacggcggggcgccgtcgctggcgtccgacgcgttgggggcgcggccgtgggccttcgcggggttcggcggcctgctggcgggcttcgccaggcgcgggctcaacctgacggacctggtggcgctgtcgggcgcgcacaccatcggcgtggccagctgctccagcgtcaccccgcgcctgtaccaagggaacgccaccagcgtggacccgctgctggactccggctacgcccgcgcgctcatgtcctcgtgccccaacccgtcgcctgcgtccgccaccgtgggcctggacgccggctcgcctgccaggttcgacagccggttctacgcccgggtgcgcctgggccagggcacgctggcctgcgacgccgagc

SEQ ID NO: 100856 - DNA, 434 bp, Zea mays
gaacttattacaattgaagaggatctttatgcatcacttggacttcatttcaggactctggacatggcaactggggatctgggtgcaccagcctaccggaaatttgatatcgaggcgtggatgcccggcctagagcgttatggtgagatctccagtgcatcaaattgtaccgactaccaaagtaggcgactaggcatccgttaccgcccatcaccctcggagcctccatcaacgagcaccaagaaagggaagggagctgcctcaggccctacgcagttcgtccacacgctcaacgctacagcagtggcggtgcctcgtctgatagtttgcattctagagaattttcagcagggcgatgggtcgattgtggttccagagccactaagaccctatatgggtggactagagttgctctccccaaaattcaagtgacc

SEQ ID NO: 100857 - DNA, 438 bp, Zea mays
  unsure (1)..(438): unsure at all n locations
cccacgcgtccggtggatttctactctgggctaatttatagggcaatgggattccctacagaattttttcctgtgctgtttgctattcctcgcatgggtggctggctagcgcattggaaagagtcactcgatgatcctgacactaagattatgaggccccaacaggtatacaccggcttctggcttaggcactatacccccgtcagagaacgagtgctatcaagccagagtgaggaacttggtcaggttgccacctcaaacgcaactaggcgccgncgtgctggttctgccctgtagaagctgcagcgtataaacgcaccggcatactcaataaacatcgaccacttttgtgcttgaaaaggccacaaatgctttttagcttggttggagttgtaagccttttgttgtcgagtatataggcaataatgcagtgagaac

SEQ ID NO: 100858 - DNA, 431 bp, Zea mays
ccttggtttagaattggtcttgatgcaagattgtttgattctacaacgagagatcatgtgcctagtgacatggatttggctttgaattccttaaatagcaatatggtcgagtgtaattcagcggcagagaaactgactattttgaatgcttttgatatcatctccctgtctaacgggtttgatctctctggtatatttgagaactcaaacaaggagtctaaattcatgtctaccaacacagctatgacaattatcaccaagctaatggaagttgcaaagagcttggatctgaaggttataacaaaaactggtgggttgttgaatatggaagctgccaaatcaggaataaaaagtgtgatgtctataaatgctgagatatttcaaatcacaccaaattatcatctcgtggagatcaagaaaatcaatggtga

SEQ ID NO: 100859 - DNA, 338 bp, Zea mays
ctctatgaaagatgttccaacatatctacctgaaggcacaatattgccctgtgagctccgacgagaagatgtaagagatgcattcatatgcttgactgcaaattcgctcgcggagcttcctgctggcagtgttgttggaagtgcttccttgcggagacaatctcagattctctacagatatccatcactgaaagtagttaacttcagaggaaatgttcagacacggttaaagaaactcaaggaaagagatgtgtctgctacattgttggcgctggctggattaaagcggctaaaaatggcagaaaatgcaacagctgtactatcagtggaagaaatgc

SEQ ID NO: 100860 - DNA, 438 bp, Zea mays
actcgaagaagccgcgtgcgttatcctttgagcagtttgggcgctgagcaagtccagtgagagagggagagcggcgagaggatggctgggatggcatcgctgcagggcgccatggcgtcgctctccatctccgcgctaggcgcggcgacggcgagcagcagcagcttctggggcaaccggctcgccacctactccgcgccgcagcctggggtaaggtttatggtcaagatatgcccaattgaaatgagacttaagagatgggagcgaaagaagtgtaaaccaaacagtcttcctgtgctgcacaagatgcatgttaggatcggggacacggtacaggttattgcaggccgtgagaaaggaaaggttggagaagtcacacgccttttcaagcacaacagcacggtgatcgtgaaggacctgaacttgaagtcgaagcac

SEQ ID NO: 100861 - DNA, 425 bp, Zea mays
gtgcggccccctttttttttttttttcctgaaagaaacgattatatatgtctgtcatcgggtataatgtatgtacatcgatagaatgacgacgagccaaacgattcgattgatctccgcaatactacgtacaatgcaatgcaaactcatcaccaccagattgcttgagctgaacaatacaatgaaggatcatcatcagtagacttcgacgttccattgctcgatcttcttgagctgcttcttgtagtccaaccagttgatcccgtccttggctgcgaggtcgagcatgatgtcgtcgatgcccttctccatgcccttgagcccgcacatgtagacgtaggtgttgtccttcttgagcagctcccacagctcctccttgtactccgccatgcgcgtctggatgtacatcttctgcccggacgcgtt

SEQ ID NO: 100862 - DNA, 388 bp, Zea mays
tgctcatgggcgccgtcgaggggtaccgtgtcgccggcggcccgctcggggaggtggtggacccggtgtaccctggcgggggcttcgacccgctcgggctcgccgacgacccggaggcgttcgccgagctcaaggtgaaggagatcaagaacggccgcctcgccatgttctccatgttcggcttcttcgtgcaggctatcgtcaccggcaagggccccctcgagaacctcgccgaccacatcgccgaccccgtcaacaacaacgcctgggcttacgccaccaactttgtccccggcaagtgagcgagggcatgatgcttgcatgcgtgtaccgtagacgtaccgtattcctacgtactgcaagttgcaccaggttttgtgaagggagc

SEQ ID NO: 100863 - DNA, 440 bp, Zea mays
cccacgcgtccgcccacgcgtccgtgttgatgttgtgcaacaagtggatccttattttgggcagcgcccaaattgtgcgggtgagattggtctttctgctctacagaaagttgttgttgctgttcgaatccttgcttacggtattccggctgatgccgttgacgaatacgtacgtattggggaatctactgctcatgaggcattgaaacacttttgcacggtcgtccaaaccgcgtttgctccgtattatctctgtgcaccaaatgcagaagatatcgcacgccttctccaagttggcgagtcacgtgggtttcctgctatgcttggtagtgttggtaactgcccaagttcatggaacgggatgtttacagggcgtggtaaacatcctaccatgatcttggaagcttgtgcgtcgtatgacctgtggatatggcatgcat

SEQ ID NO: 100864 - DNA, 439 bp, Zea mays
ggagcaaactgcttcaaacacaggagaatatgttcatctgacaaaggagcttctgatcagctgtgagagtatcgagtggcaggtagatgagctagaaaagacaatctcagttgcatcaagggatccggcatactatggacttgatgaagttgagctttccagacgaagaaactggactggttcttctcataagcaggtcggtacagtcaagagagctattgaaaagggcaagagcaatgcagcaacttcaaaataccaggatacaagcaggaccaaccactattctgccgaagataatgatgactttctttcttcagaatcagatagacagcttctactcatgaggcagcaggatgaagaacttgatgagctcagtgaaagtgtccaaaggattggtggcgtgggactaaccatacacgaagagctgtctggacaggaa

SEQ ID NO: 100865 - DNA, 435 bp, Zea mays
aggttttgcatatggacagaaatgactactatggaggagattccacctcactcaaccttggtcagctctggaagaggtttagaggggaagacaagcccccagcacatctaggtgcaagcagagactacaatgtggacatggtgccaaagtttatgatggcaaatgggacattggttcgaaccctcattcacaccgacgtgacaaagtacttgtcattcaaagctgttgatgggagctatgttttcagcaaagggaagatttacaaggtccctgccactgatatggaggctctgaagtcccctttgatgggcctattcgagaagcgcagagcaaggaacttcttcatttatgtccaagattacaatgaagctgatccaaggacacatcaaggattggaccttactagggtgacaactagagaacttatagcaaaat

SEQ ID NO: 100866 - DNA, 391 bp, Zea mays
ggaacttcctcggcgagaagaaggtcagaaaggtggacatgcttgacggcgtgaccatccgtccgctccgagaaggtcaaggacgagcttattctcgatggcaacgacgtcgagttagtctctcgctccgccgccctcatcaaccagaaatgccatgtcaagaagaaggatatcaggaagtttttggatggtatctatgtgagcgacaagggtgtgatcgaagaggagcagtgagggacaattagttgttatcgtttgagttggaattattgtttggtttgcaattttctcaaggtgaactttgtaatcggttaggatgtgttgtggaccattatcttatcctacaatattatcgtatctgcttaagaatatgaagcttgtttatcaaaaa

SEQ ID NO: 100867 - DNA, 449 bp, Zea mays
ccaccacctcgccggccacactcgtctttctcacgagccacaggcacaggcagggtctcgagctcagtccacccatggcaggggatggcagtcatcgttcgccgtggcaacagtcccgtcgctggcggacccggcggccaagaagcggtccggtggcgtcacgtacgtggagggcatgaacgcctacagcggccttaaggggctcaacaaggtgaacatgctcggagtgcgcaagaccgccgactactccttcgccaaggtcgtggcgtcgctcagccccgcgtggaggaagcggcgcggctgcgcgttctgcgcccagatgaacgccgacgccgagatcttcaagatcgacgacaccatgaacggcctcgtgctcgtcggcgtcgccgtcgggttcgtgctgctccgggtggaagccgacgtcgaggagtccgagtagggtgcgtggg

SEQ ID NO: 100868 - DNA, 289 bp, Zea mays
cccacgcgtccgctgaagttgaggatgttatttcgatgagcttgacagttgtgaagtcgctcctgaaaaattataacattgacccaaagtgcattggacgtttggaagttggcagtgaaacagtaatagacaagagcaagtctataaagacatggctgatgcagatatttgaggaatctggcaatactgatattgaaggagtggacttctcaaatgcgtgctatggtggaacagctgcattggttaattgtggtaactgggttgaaagcaacttatgggattggcctta

SEQ ID NO: 100869 - DNA, 461 bp, Zea mays
cgccaccccaagctgaaggcgttctacaggtcgatatcgccccggcacttcttgaacggtgactgggacaccggaggcagctgcgacaacaccagccctctggccaagggagggagcggcgtccacctcgaccgttcggaggacgccgacgccgagggcgccgtgaggggcaccggggtcaggctcctggacgtcactgccctatcgcggctgagggacgaagggcatatttcacggtacagcatcaaggccacttctggcgttcaggattgcctgcactggtgccttcccggcgtgcctgacacctggaacgagatccttgcggcccagctatagcctgtagctgaatttgaagatgccaagggttatgtcgaattgtttatgggtgaagctcgtatatacagtaactaccacggagtactacgtcgttgccggagacccaatgctgctggtagtgaaac

SEQ ID NO: 100870 - DNA, 436 bp, Zea mays
ctgatgtcgaggacaagaagcagaaggccgtatgcatggagaattacagaaagaaatatgaggatggacgggacaccttatctgatattgatgttgagagggaagaggagtgtgggatttgcatggagatgaacagcaaagttgtgttgcccaactgcacccatgctatgtgtatcagatgttaccaggactggagttcaagatcgcagtcctgcccattctgccgtgacaacctgaagaagacctgtcctggtgacctgtggatctatgttgaggaccaagatgtggttgacatggagacggtgtctagcgagaacctcagacggctgttcatgtacataagcaagctgcctctgattgtcccagacgtcatcttcagtgtgtatgattcccacatcaaatgacttccgacgcgacctttccgacgaccttcagc

SEQ ID NO: 100871 - DNA, 436 bp, Zea mays
  unsure (1)..(436): unsure at all n locations
cccacgcgtccgcccacgcgtccgcgcaagccggagaaggtgttcgtgcgcaccatcacgagccagttccaggccctcgtcggcatctcgctgctggagatcctgtccagccactcctccgacgaggtgtacctcggccagcgcgacaccaaggagtggacgtcggacgccaaggcgcaggaggcgttcaagcggttcggcgcgcggctgaccgagatcgagaaacgcgtcgtcaccatgaacgcggaccctcgcctcaagaaccgcaacggcccggccgagttcccctacacgctgctctaccccaacacctncgacacgaagggcgacgccgncggcatcaccgccaagggcattccaaacagcatctccatttgagttttgtctgtctgagctgaggacgtacggtcgtcgcactagttggttgcgtttcccc

SEQ ID NO: 100872 - DNA, 407 bp, Zea mays
cgacgaggccgaggactacgtggtcatcaagcacgccgcgctcttcacgtccacggtcatgagcctgctcctggcgcgccccaacgtcaagctgttcaacgccgtggccgtggaggacctcatcgtcaggggagggcgcgtcggcggcgtcgtcaccaactgggcgctcgtgtccatgaaccacgacacgcagtcctgcatggaccccaacgtcatggaggccaaggtcgtggtcagctcctgcggccacgacgggcccttcggcgccaccggcgtcaagaggctccaggacatcggcatgatcagcgccgtgccggggatgaaagcgctcgacatgaacaccgccgaggacgagatcgtgcgcctcacgcgcgaagtcgttcccggcatgatcgtcaccggaatgg

SEQ ID NO: 100873 - DNA, 404 bp, Zea mays
cccacgcgtccgcagcgccatggtcacgtcgacgaccgccgccgccgtgctgtccccggcgtccgtggccgggcttcgcctggcgccgactccccgggcgcgcgtggcgttccgcgcggcgcgggcgcggcggtccgtggcggcgcgcgcggagctgagcccgtcgctggtgatcagcctgagcacgggcgtgtcgctcttcctgggccgcttcgtcttcttcaacttccagcgggagaacgtggcgaagcaggtgcccgagcagaacggcaagacgcacttcgacgccggcgacgagcgcgccaaggagttctagggcctgctcaagtccaacgaccccgtgggcttcaacctcgtagacgtactcgcctggggctagatcggccacatcgacggctactaca

SEQ ID NO: 100874 - DNA, 434 bp, Zea mays
ccgatggggagctccccgccgacgcgactgccaccaagaagcagctcttcatgcgcctgtgcgaccccgccagacccgtcctcctcgccgacggcctcacgagcatgtggctggacagggccaccgtcgccaagtgctacatgctgtccgccaggaagctgaccatcatatggggtgatacgccgcagtactggcaatggatccccctcaccgactccaggttctcagaatgcgcagaactccagcacgtttgctggctggaaatccgcggcaagataccctgcgacatgctgtaccggaacaccacttacgccgactacatggtgttcaagatgtccgacgaatcctatgggctggactatccgctccaggaagcttaagttagcatcggggcaaccaggtccactcgtcaagtctgcctaaggtacgttgac

SEQ ID NO: 100875 - DNA, 431 bp, Zea mays
  unsure (1)..(431): unsure at all n locations
cccacgcgtccgcggacgcgtgggtgctgacaaggtggactacggctacaaattttttgagaaagaggtccctgttgatgctgtcttccagaaggatgagatgattgacatcattggtgtgaccaaaggtaaaggttatgagggcgtggtcactcgttggggtgtcacccgccttccccgcaaaacccacaggggtctccgcaaggttgcttgtatcggtgcatggcatcctgctagggtctcctatacagttgcccgtgctggtcagaacgggtaccaccaccgcaccgagatgaacaagaaggtttacaagatcggcaaggctggacaagagacccacgatgccttcacagagtttgacaggaccgaaaaggacatcactcccatgggtggcttnccccactatggtatcgtgaanggtgactacctga

SEQ ID NO: 100876 - DNA, 368 bp, Zea mays
catcagtttgcttgcctatcacaattgatgttggtacaaataacgagaaactgcttaatgatgagttctacattggactccggcaaaaacgtgcgactggcgaggagtatgatgagcttattgaagagttcatgtctgctgttaagcaattctatggtgagaaagtcctcattcagtttgaggactttgccaatcataatgcctttgatttgcttgaaaaatatagcaagagccatcttgttttcaatgatgatatccagggcacagcatcagtggtccttgcaggtttgttagcagcactcaagatggttggtgggaccctggcagagcagacttatttgttccttggtgcttgggaggctggaact

SEQ ID NO: 100877 - DNA, 439 bp, Zea mays
ggttgctctagatccgttcatcctggtggttttgcgaggtcgaaagcggcgagcgaattagaagatgctggacaagctgtgggacgacgtggtggccgggcctcgcccggagacgggcctcgagaagctccgcaaggccaccaccgcccgtccgctcgtcatcaacaaagacgcggacggtggcagctacaagcgggcgcagtcgatgccgtcgaccccgacgacgccggtgacgccgtcgtcgtcgtcgtcgtcgacgacgccgcgcggcgccggcaacgtgtggcgcagcgtcttccacccggggagcaacctggccaccaagggcatgggcgccaacctcttcgaccggccgcaggccaactcccccaccgtctacgactggctctacagcgactagaccaggagcaaccaccgctagatcgggcgagatggatgg

SEQ ID NO: 100878 - DNA, 429 bp, Zea mays
ggttgaggcaccagcagaagaggaagcaccaaagccaaagccaaagaatcctcttgacttgctgccaccaagcaagatggtccttgatgactggaagaggctatactcaaacacaaagactaacttccgggaggttgccatcaaaggtttctgggacatgtactgacccagagggctactctttgtggttctgtgactacaagtacaatgatgagaacaccgtctcctttgtgaccctgaacaaggttggtggattcctgcagcggatggacctgtgccgcaagtacgcctttgggaagatgctcgtgataggctctgagccacctttcaagctgaaggccctttggctcttccgtggccaggatgttcccaagtttgtaatggacgaggtctatgacatggagctttacgagtggaccaaggtggaca

SEQ ID NO: 100879 - DNA, 439 bp, Zea mays
cccacgcgtccgccttcatcgcgcggcgcgtgctgaaccggcgcgtgaagccgtacctgccggacttccgcacggcgttcgagcacttctgcatccacgcggggggccgcgcggtgatcgacgagctgcagcgcagcctgggcctgtcggacgaggacgtggaggcgtcgcgcatggcgctgcaccggttcggcaacacgtcgagcagctcggtgtggtacgagctggcgtacatcgaggccaagggccggatgcgccgcggcgaccgcgtgtggatgatcggattcggctccgggttcaagtgcaacagcgcggcctgggagtgcatcgcgccggcgcgcaccgccgaggggccctgggcggagagcgtcagccgctaccccgtggacatccccgaggtgctcaagcactagccgctatcccgtggacatcaggccgg

SEQ ID NO: 100880 - DNA, 424 bp, Zea mays
cccacgcgtccggagcaagccagttccccctgtcaattgttcttgtcggggttggtgatggaccatgggacatgatgcaccagtttgatgacaatatacctgctcggtcatttgacaatttccagtttgtgaatttcacggagattatgtcgaagagcatagcagctgacagaaaggaggcagaatttgcattgtcagcgctgatggaaatccctacacagtacaaagcaacaattgatctccaactcttaggccgtcgccaaagaataaccccaagaattgctctgccaccaccaacaaggaccgcgtattcgcggtccagtagctttagccaacagtctggtgtttattcgcgatcaagtagctttgaccaacaaacaagtggcgcctctcagcaacgttctgagaagcttgaacagcagaa

SEQ ID NO: 100881 - DNA, 312 bp, Zea mays
ctagcctggaattgttggaaggaaaggagcttccgggagttgttgccttgaatgaagccgccactgtgactgtatgaagcatgctttcattttgtttcgtcttcgtcttcatgtgccgttgtatacttgctacattctcgcttgcacctccccagccgctcgctcgaaatgtaagagaccaatgttttatagagccaatggaaatcgtttgaacaacgacgacccaaatagtatgtgctttaccgagtgatctttcctcggtaacgtaactagtgatataaaaaacattcaaaggcaaaaaaaaacaacatg

SEQ ID NO: 100882 - DNA, 445 bp, Zea mays
cccacgcgtccggacgaggagcagcccgccggcgagtacgggtactccgagaccgaggtggtcaccgccaccggcgagggcgagtacgagaggtacaagaaggaggagaaggagcacaagcacaagcagcacctcggcgaggccggcgccatcgccgccggcgccttcgcactctacgagaagcacgaggcgaagaaggaccccgagcacgcgcacaggcacaagatcacggaagaagtcgctgccgcggcggccgtcggcgccggcggctacgtattccacgagcaccacgagaagaagaaggaccacaaggacgccgatgaggctagcggcgagaagaagcaccaccaccttttcggctgaccgtagtaccggccggcgcgcgaccgagctagctagcttcggcgcacacaaccacacacctgtttaattctgtactgcatgc

SEQ ID NO: 100883 - DNA, 458 bp, Zea mays
  unsure (1)..(458): unsure at all n locations
cccacgcgtccgccgcctctctcaatctgataccgcagatccgtcgtccggtgagtggaagccgcacgaacccatggcctccggcgagcttgcctgcacctacgccgctctcatcctcagcgacgatggcatcgccatcaccgccgagaagatcgccacgatcgtgaaggcggccaacatcaaggtcgagtcctactggccggccctcttcgccaagctcctggagaagcgcaacgtcgaggacctcatcctctccgttggatctggtggcggagctgctccagttgctgctgccgcacctgctggtggtgctgcggctgctgctgccccggctgtcgaggagaagaaggaagaggccaaggaggagtctgatgacgacatgggcttcagcctgttcgactgaggagacccnctcacccagccattagcaaaattcacttgtgctgtcaaagactatc

SEQ ID NO: 100884 - DNA, 435 bp, Zea mays
  unsure (1)..(435): unsure at all n locations
gagctcgccatgtgggacaagctcggggcggtcgtcaggctcagctatggcattgggatctacggggccatggcactcgccgggagattcatatgccaaatggccgggatagactgcacggggggcttccatccgtctctcacggcactcgtcgagggtcttggctatgcagctccaccaatcatggctctgctcttcatcctcgatgatgaagttgtcaagtattcgcctcacgcgcgtgccatccgtgatgtggaggatgaggagcttcgcagcttcttctgtggcatgtcaccatggcagttcatcctcatcgtggctgctagctcaattggcgaggagctgttctaccgcgccgncattcaaggagcactggccgatattttcctgagaagcacggagctaatgaaggatgctcgagggattgcatcactg

SEQ ID NO: 100885 - DNA, 345 bp, Zea mays
ctcgacttccgccccgagcgcttcctgcccgggggcggcgcggagaaggtcgacccgcgggggaactgcttcgagctcatcccgttcggcgccggccggaggatctgcgcggggaagctggcgggcatggtgttcgtgcagtacttcctgggcacgctgctgcacgcgttcgactggcgcctgcctgacggcgaggagaagctggacatgagcgagacgttcggcctcgcgctgcccaaggcagtgccgctccgcgccgtcgccacgccacggctcgtgccggaagcctatgcctgagcctgagttagctgtcagagttcttcacgcgtgctgtcccaacaagca

SEQ ID NO: 100886 - DNA, 421 bp, Zea mays
  unsure (1)..(421): unsure at all n locations
gcgccattgtacaagttgatgctgctccattcaagcagtggtacctcactcactatggagtggacatcggtaggaagaagaaggtgcctgttgctaagaaggatgcgactgagggacaagagggtgaggctatagctgaggaaacaaagaagagtaaccatgtgcagaggaagattgagaagcgacagcaggaccgtgcactcgacactcatattgaagagcaatttggcagtgggagattgttggcctgcatttctgcccgtcctgggcagtgtggccgagctgatggctacatccttgagggtaaagagctcgagttctacatgaagaagctccagaggaagaagggcaagggtgttgcatcttagagcattcttttagctagaactgcanaatatcttctacttgggggattttggtg

SEQ ID NO: 100887 - DNA, 321 bp, Zea mays
  unsure (1)..(321): unsure at all n locations
ggcggcgtgggcgccacgctgcacgccatcacgtcccgccacccgcacatctccggggtcaacttcgacctgccgcacgtcatctccgaggcgccgccgttccccggcgtgcgccacgtgggcggngacatgttcgcgtccgtgcccgccggcgacgccatnctcatgaagtggatcctncacgactggagcgacgcgcactgcgccacgctgctcaagaactgctacgacgcgctgccggaaaatggcaaggtcatcgtcgtcgagtgcgtgctgccggtcaacacggaggccacccccaggcgcaaggcgtgttcaacg

SEQ ID NO: 100888 - DNA, 381 bp, Zea mays
gccggcctcgtcgccacgctgcacgccttcacgttcggcgacccggacatgtcggggggcaacttctacctgccgaacgtcatttcagaggcggcgccactcaccaccgtgcgccacgtggccgcggacatgttcgcgtccatgccctccggggactcgattctcatgaaggcgatcctgcacgagtggagcgacgcccactgcgccacgctgctcaagaactgctacgacgctctcgccgcgaatggcaaggtcatagccgtcgagtgcgtgatgccggtcaacacggacgtcaccgacaaggcccacggcgtgttacacgtcgacatgatcatgctcgtgcacaacctaggcggcaacgagccatacgagcgcgagttc

SEQ ID NO: 100889 - DNA, 289 bp, Zea mays
cggacgcgtgggcggacgcgtgggcggctacgtctacgtcggtggaaccactgggcggctgatctgggccggcaccctggctgggatcctcggcggtggcgccctcctcgtctacaacaccagcgccctgtccggctaaggatatccaatgcatgcgctgcttgcgattcgtcatgtaaaatcagggtgtctgtctataatctagccttcatggatgctcaaccttcgtcatgtaacaataatcagtgctactcttcattacataattttgatgctatatatatatacc

SEQ ID NO: 100890 - DNA, 396 bp, Zea mays
  unsure (1)..(396): unsure at all n locations
cccacgcgtccgcgctagctgaggacggtacagcggcacagaggtgcgacgtacgacgacgacgacgcaggcgccacacatggcatcccagctctccgccgccgtgccccggttccacggcctccggggctacgccgcgcccaggtccgcggtggcagcgctgccgtccgtgagggtgggcaggaagaggtcgtcgtcgcagggcatccgctgcgactacatcggctccgccaccaacctgatcatggtgacgacgacgacgctgatgctgttcgcggggcggttcgggctggcgccgtccgcgaaccgcaaggcgacggcggggctgaagctggaggcgcgcgactccggcctgcagacgggtgaccccgncgggttcaccctcgccgacacgct

SEQ ID NO: 100891 - DNA, 369 bp, Zea mays
cgaggcccagtcccgcggcggccgtggaggcggcggcggtgggtacggtggtggccgtggaggcggcggctacggcggtggcgggcgccgtgatggcggtggcggctacggcggtggcggcggctacggtggcggcggcggctacggtggtggtggcggcggctacggcggtggcaaccgtggcggcggctacggcaacttcgacgggaactggaggaactgagcggtggggcccgcgcggtcaagttatcctgttcgctaccgtgatgtttaccctagtccagagggtttatcttcgttcgtgtcgtgtttgttgttgcccatctgtgtttttgattgcaaggtcgctctgtgtcagttgttagtgct

SEQ ID NO: 100892 - DNA, 400 bp, Zea mays
  unsure (1)..(400): unsure at all n locations
atccccggctcgacccacgcgtgcgccacacttcagcggatacatccagtacatgcttctcgtaatgttggggaaactgatgagggattgagcagcttcgcattgggttgcgtaaacctgcgaaagcttgaactcaggagttgctgcttcagcgagcgagcactggcccttgcaatactacatatgccttccctgaggtacgtatgggttcagggctacaaagcgtctcaaaccggccgagacctcatgctcatggcaaggcccttctggaacatagagtttacacctnccaatcctaagaacggaggttggctgatggaagatggggagccttgtgtagatagtcacgctcagatacttgcataccactccctcgcccgtaagaaggctgactgcccac

SEQ ID NO: 100893 - DNA, 400 bp, Zea mays
ggaagatgcaaaatcgaaggaaatgctcgataagttgcatgaagcactgaaagagaaagatgaagaaatggagcatattgattctatgaaccagacccttattattaagcaacgaagaaccaatgatgagctggaagaagccaagaaagaactgactactgacctagttaatatgtcatcagctcgatccattgttggtgtcaaaaaaatgggtgagcttgacaataaagctttccttgcctcttgcaaagagaaaacagcagacgagttgtcattgtcaattctgtgctcgaaatgggaagatgagatcaggcaaccagaatggcatcctttcaaagttatagatgttggtggacaggcaaaggaaataattcgggaggatgatgagaagctgcaagct

SEQ ID NO: 100894 - DNA, 399 bp, Zea mays
gggaaaggttatcctctgtgccttcatgtggtggtgcaattgacatgggagctccagcagcggtagctggcggtggcgcagcacctgctgaagaggcaaagaaggaagaaaaggttgaagagaaggaagagtctgatgaagatatgggtttcagcttgttcgattaaaacaccactgccagtttacagtttctctcgcgaatggtctcacaatattcgctggtttccacaaaataagattgtcaatagctactacgtacttatgctattctgcatgtgatgtacgagtgtgcatcttcaagaatctttaagttgaatggtcccataataatattgataacaatgtaaattgtatgtcctgtacgtactttggtatcgcgacatctcagtgtgcatcttc

SEQ ID NO: 100895 - DNA, 374 bp, Zea mays
cgtgcttgccgccggtaccgggctgggcgcggcgctgctgctggcgctggggccggcgcgcgcggcgtacgaggagtacgtgagcgagacgaaggaggtgatcgggaaggtgcggtcgacgatcgggctggacaagtcggacccgagcgtggccgacgcggtggcggagctccgggacctgtccaactcgtgggtggccaagtaccggcgggagaagtcgctgctggggcgttcgtcgttccgggagatgtactcggcgctcaacgccgtgtctggccactacatcagcttcggccccacggcgcccataccggccaagcgccgcgcccgcatcctcgaggagatggacaccgacgagaaggcgctccaacggg

SEQ ID NO: 100896 - DNA, 404 bp, Zea mays
ccaaaatgaagagttttctgtgatagggaaagaaccaaaggatgaagttcagatgtacacatggaaggatgccactctccgtgagcttactgatcttgtgaaagaggttgctcttccagcaaggaaaaggaacgcgaggctttcttttgcatttgtatacccagacaagaatggtcgttttgttgtcagacaggtgggttcgaccttcgcttatggccatggaagaggtgatgatgccaaaactcttgcagagcttgggttccagattggcgattatctgagcgtcgcgatcatgtaactgcagattggcgattacctgagcgtcgcgatcatgtaagccggtgcccgcaatgagttccggtgactgcaccggatagaactgatgtgatgtaaaaaatgcattg

SEQ ID NO: 100897 - DNA, 410 bp, Zea mays
agaggatgaagatttcgttgcagacaaggatgatagtggatctcctactgatgactcaggtgatgaggaatcagatgctagtgatagtggtggtgaaaaggagaaatcatccaagaaggaagcaagcagttcaaagccagttcagaaaagaaagcataagggcagggatgacgaaggacaagagaagaaaaaaccaaagaagaaaaaagatccgaatgctccgaaacgagccatgaccccgttcatgtatttctcaatggctgagcgaggaaacatgaagagcagcaacccagatttgcctacgactgagatcgcaaagaagcttggggagatgtggcaaaagatgtcaggcgaagagaaacagccttacatccagcaggcccaggtcgacaagaaacgttatgaaaaag

SEQ ID NO: 100898 - DNA, 385 bp, Zea mays
gatgattcaataagcagtgaagttgatgacatcgatattatccctaacgaggaaatgcttttgattcttagtgagaaaggctatgctaagcgaatgaaccccgacacattcagtttacaacatcggggaaccataggaaagtctgttggaaagatgcgaatgaatgacagcacgtcagatttcattgtttgccagacgcatgaccatgttctttatttcagtgacaagggaattgtatactcagcacgtgcttataagataccagaatgtactagaactgctactgggactccgttggtacagttgctacctttatctgatggagagcggataacctccatcattcctgtgagtgaatttggtgagaaccaatatctagtgatgc

SEQ ID NO: 100899 - DNA, 401 bp, Zea mays
cccacgcgtccgcccacgcgtccgatcgtctctcccacacccctctgccccaacccaggaaaaccctcgaaaagcggcggcggcgcgacatggcggaggtcgaggctccagctgctgcggttgcggcggcgacccctgaggtggcgacggtgaccgagggcggagccgctacggaggcgaagggtccgcataagctgcaccgccagtggaccttctggtacgacatccagtccaagcccaagcccggcgctgcgtggggcacctccctcaaaaaggcgtacaccttcgacaccgtcgaggagttttggggcttgtatgatcatgttttccgtccaagcaagttgcctggaactgctgattttcacctattcaaggctggagtagagccaaaatgggaagac

SEQ ID NO: 100900 - DNA, 365 bp, Zea mays
gccagcccccaagctacctgaccggcgagttccccggcgactacggctgggacaccgcggggctgtccgccgacccggagactttcgccaagaaccgcgagctggaggtgatccactgccgctgggccatgctgggcgcgctcgggtgcgtgttcccggagctgctcgcccgcaacggcgtcaagttcggcgaggccgtgtggttcaaggccgggtcccagatcttcagcgagggcgggcttgactacctcggcaacccgagcctgatccacgcgcagagcatcctggccatctgggcgtgccaggtggtgctcatgggcgccgtcgaggggtaccgcatcgccggtggcccgctcggggaggtg

SEQ ID NO: 100901 - DNA, 394 bp, Zea mays
cgcgtttttataagggtttcggcggaggcgcccggtcgctggcgatggccgacgacggcgggagccacgagggcagcggcggcggcggaggcgtccgggagcaggaccggttcctgcccatcgccaacatcagccggatcatgaagaaggccgtcccggccaacggcaagatcgccaaggacgctaaggagaccctgcaggagtgcgtctccgagttcatatcattcgtgaccagcgaggccagcgacaaatgccagaaggagaaacgaaagacaatcaacggggacgatttgctctgggcgatggccactttaggattcgaggagtacgtcgagcctctcaagatttacctacaaaagtacaaagagatggagggtgatagcaagctgtctac

SEQ ID NO: 100902 - DNA, 418 bp, Zea mays
  unsure (1)..(418): unsure at all n locations
cccacgcgtccgcccacgcgtccgcccacgcgtccgggtggccgtcattggcagcggcgactggggcagcgtcgcctcccgcctcatcgcctccaacaccgccaagctgccctccttctatgatgaagtaaggatgtgggtgtttgaggaaatactgcctacaggcaggaagctatctgagtccattaacgaacagaatgagaactgcaaatacttgccaggtataaagcttggaacgaatgttattgccgaccctgacttggagagcgcagtcaaagacgcgaatatgctggtttttgtgacgccccatcaatttgtggagggtatatgtaagaagcttgtanggaagctaacaccaggagctgaggctatctccctcatcaagggcatggaggtcaagatggaaggccatgcatga

SEQ ID NO: 100903 - DNA, 343 bp, Zea mays
  unsure (1)..(343): unsure at all n locations
ctgccatctaccagcgactcagctagcgttagcagcacacacgcacctacctaggagcagcatctccggcnctggaaacggcggcctacatgatctcctcgtcagctctggccgtggcgcctcacggtctgccgcctctcagtcgccgcgcctcctgcttcgccgtcgtctgctccaagaataagatcaagaccgacaagccctactggattggaggtggactgaccgtcgacgtccacgcctaccgaagaaaggccaagggcaagggcgtgtaccagtttgtcgacaagtacggtgcgaacgtcgaccgatacagnccaatctacaacgatgatgactggtc

SEQ ID NO: 100904 - DNA, 402 bp, Zea mays
cggacgcgtgggacgtcgacatgatcatgctcgcgcacaaccccggcggcaaggatcggcaggagcgccagttccgcgagctcgcaaagggcgccggcttctacgggttcaaggccacctacatctacgccaacgcctgggccatcgagttcatcaagtgaaccaccgtcgccgcgatgagatggcatggctgccacatgctttgcttgcttggtcctcgtatcgtacgtcgccgtcgtcgtcttcttctggttattgcgctgctacctcgctgctctcgcgtatgcatgtacttttgcttaattgtctttcttcatatcatgcactctggctggcctagactgcccccgatccatggtggccggtacgtcttgtcgagctcttgcatgtcgtggattctaa

SEQ ID NO: 100905 - DNA, 404 bp, Zea mays
caaggataggatggccagccaaccagccgcggccaacgctaggccagcgaccgtgcagatccgcgggcaacccgtcaaccagaagacgtcttgctgctcgtcctaagattgcctcatttctttggttccttgtgactatttctacggtttgtgcgcgcacgcaaatgtatttgcattattcctgatagcatctattcgttggccagatgattagagagctgaaaatatgttaagaacaataccatagagagaagttcctcagtgctctcgcagcttaaggagcaaacagcaacactttacttcgttttttatactttattatagccgcactgtttattactcgggctacatttgtgaacagcgactgtaatatttttttactctatattcgtagtgagatgaat

SEQ ID NO: 100906 - DNA, 407 bp, Zea mays
cccacgcgtccgcaccatttcttccttgtctctgtctcaacacggcgccgccgcttctgccgccgggagccgagcccaagcctaagcgaaagccatggcgattggttctctgatcgcctctactttcgccagatctagccatgccctccccgctgccgccgcttcggccatctctcaggctcccagatcccagcacaccgcatctcctctactctccggccttggagcagcggctcgtgctttcagctcaagggctctatggaagggagcattcgttgacgctttcctgtctagaattaagaagaacagagaaaatatgaatggcaagaagatttggtctcgtagatcctctattttgccggaatttgttggttcctctgtgctcatttacaatgggaaaactcatg

SEQ ID NO: 100907 - DNA, 357 bp, Zea mays
cccactcgtccgctggcctcactggccgtaagatcatcatcgacacctacggtggctggggagcccacggcgggggcgccttctccggcaaggacccgaccaaggtggaccgcagcggggcctacgtcgcgaggcaggctgccaagagcatcgtcgccgccggcctcgcccgccgtgccatcgtccaggtctcctacgccatcggcgtgcccgagcccctgtcggtgttcgtggacacgtacggcaccggcgcgatccccgacaaggagatcctgaagatcgtgaaggagaacttcgacttcaggcccggcatgatcatcatcaacctcgacctcaagaaaggcggcaacgggcgct

SEQ ID NO: 100908 - DNA, 441 bp, Zea mays
  unsure (1)..(441): unsure at all n locations
tgacaagttcgccgtaggaaccgaggctgtggcaaagaagctggcagaactcagcggcgggggcgtcacaactatcatcggaggtggagactccgtcgccgccgtcgagaaggtgggagttgctgacgttatgagccacatttccacgggtggtggcgctagcctggaattgttggaaggaaaggagcttccgggagttgttgccttgaatgaagccgccactgtgactgtatgaagcatgctttcattttgtttcgtcttcgtcttcatgtgccgttgtatacttgctacattctcgcttgcacctncccagccgctcgctcgaaatgtaagagaccaatgttttatagagccaatggaaatcgtttgaacaacgacgacccatatagtatgtgctttaccgaagtgatctttcctcggtaacgtactagtgatataaaa

SEQ ID NO: 100909 - DNA, 404 bp, Zea mays
gtcgccggcggcccgctcggagaggtcgtcgacccgctctaccccggcggcagcttcgacccgctcggcctcgccgacgaccctgaggccttcgcggagctcaaggtgaaggagctcaagaacggccgcctcgccatgttctccatgttcgggttcttcgtccaggccatcgtcaccggcaagggcccgctcgagaacctcgccgaccacctcgccgaccccgtcaacaacaacgcatgggcctatgccaccaactttgtgcccggcaagtgagggggtggaggcgccaccgtccaccggccaccgctgcggatatctaggtgttcggatgcacgtgagcgcgcactggttccagtttgtaccatgatgtaaattacttacccgtaccaggttcaatcggcaag

SEQ ID NO: 100910 - DNA, 433 bp, Zea mays
ccaaaatattaataaacgctagttgctatgaaaaccatttgcctttttgactcttcgacgccgtctactagtgaggaacttgcattgatctttctgcatagtacagtactacttgctttctttacagtaaagtattagctagtatctgatgtgtgtctccaatttatatatatttttggaacctcatgtgtggccgttgtgagatctttctcgatggtagatattgaggacttgttttcaaatgcttcgagttaagaataagacaacataaaaagtgttaaatattaaagtccttcgcctatcaagacattatgtctcttcgggtataataaattcttgacgaaggttaatgaaggaaaaagccttcgtgaacacaatggatgataaggaagaattcatatacgaaatacgaaaaattatatagatatcatta

SEQ ID NO: 100911 - DNA, 388 bp, Zea mays
ctcgctcattaaaggaacagtattgatgactacctcatatggcgcatatatcgacatgcaaggcaagtctactgcttttttgcccttagatgaggcatgtcttcttgatatcgataatgttgaagaggctggcattcgttctgggttagtagaagaattcatgataattgatgagaacccacgtgatgaaactttgattctaagtttgcaagcaattcagcaagaacttgcatgggaaaggtgccggcaacttcaggccgaagatgtcgttgtcacgggtaaagtaattggtggaaacaaatgaggtgtagtagctcttgtggatgggcttaagggtttccttacattttcgcaagtgtcatcgaaaacaaccgccgaagagctgctt

SEQ ID NO: 100912 - DNA, 408 bp, Zea mays
cgcgatgcgagcccaaggggacactgcatatggagctaacctggaggcacgcttgaaggacaaagactatccgatagcccagtccctctcaaccttgggtctctctctgatgaagtggcgtcgggaccttgctctgggcgcaaacttgcagtcccagttttccatcggaagggggtcgaagatggcagttcgacttggtctgaacaacaagctgagtgggcagatcaccgtcaggacaagcacctcagagcaggtccagattgcacttctgggtctcgtaccggttgcagcctccatttaccggagtttccggcccagtgaaccatcctttgcttattagcttgtcaggagtctcagtttaattatttcatgatcacatcgtttctcttagcaattttgcttttcata

SEQ ID NO: 100913 - DNA, 366 bp, Zea mays
cggacgcgtgggcgaccgaggcggtgcctgcgcaggagcagcaggccaacggtagcggggagcagaagacgcggcactccgaggtctgtcacaagagcctgctcaagagcgacgacctctaccagtacatcctgtacacgagcgtgtacccgcgggagccggagagcatgaaggagctccgcgagatcaccgactagcacccatggaacctgatgacgacctccgtcgacgaggggcagttcctgaacatgctcatcaagctcatcggcgccaagaagaccatggagatcggcgtgtacaccggctactccctgctcgccacggcgctcgcccttccggaggacggcacgatcttggccatggaca

SEQ ID NO: 100914 - DNA, 413 bp, Zea mays
  unsure (1)..(413): unsure at all n locations
cccctccgagcctcagttcgcatccacgcgcgccgccgccgcctcgcagctcgacgctgaccgcgcagccatggcggaacagactgagaaggctttcctcaagcagccaaaggttttcctcagctcaaagaaatccggcaaaggtaagaagcctggcaagggcggcaaccgattctggaagagcattggccttggcttcaagactcccagggaagcaattgaagggacctacattgacaagaaatgcccattcactggaactgtttctatcagaggcagaattattgctgggacatgccacagtgctaagatgaacagaactatcattgttcgcaggaactacctncactttgtaaagaaataccagaggtatgagaagaggcactccaacattcctgctcacatcttcccat

SEQ ID NO: 100915 - DNA, 422 bp, Zea mays
  unsure (1)..(422): unsure at all n locations
gtcggtgttcagcggcgatgagaccgcccccttcttcggcttccttggcgccgccgccgcgctcgtcgtctcatgcatgggggcggcgtacgggacggccaagagtggcgtcggcgtggcgtccatgggtgtcatgcgcccagagctcgtcatgaagtccatcgtgcccgtggtcatggctggtgtgctgggtatctacggtctcatcatcgccgtcatcatcagcactgggatcaaccccaaggccaagccatactacctctttgacggctatgcccacctgtcgtccggccttgcctgtggtcttgctgggcttgctgcangcatggccattggcatcgttggtgatgctggtgtcagggcgaacgcncagcattcaaagctgtttgtgggcatgatcctcaatctcattttcgccgaac

SEQ ID NO: 100916 - DNA, 399 bp, Zea mays
  unsure (1)..(399): unsure at all n locations
ggggagattgtcaaaggagtctgctcaaacttcctgtgtgacttgaaacctggcgccggtgtgaagatcacagggccagtgggcaaggagatgctcatgcccaaagaccccaatgcaacagtcatcatgctcgcaacggggaccggtattgctccgttccgctccttcttgtggaagatgttcctggaggagcacgaggactacaagttcagcggccttgcgtggctgttcttgggagtcccgacgagcgacagcctgctgtacaaggaggagctggagaagatgaaggagatggcgccggacaacttccggctggacttcgcggtgagccgggagcagacgaacgcggccggggagaagatgtacatncagacgcgcatggcngagtacanggaggag

SEQ ID NO: 100917 - DNA, 424 bp, Zea mays
  unsure (1)..(424): unsure at all n locations
gaattcccgggtcgacgcacgcgtccggtgggttggcttctcctccccctccggttcgggttcgggttcgtgaggttctccgggggtcggtttcgtgggtgagcggatcgagatggcggcgtcngatgttgagtaccgctgcttcgtcggcggcctcgcctgggccacggacgaccactcccttcacaacgccttcagcacctacggcgaggtcctcgagtccaagatcatcctcgatcgggagacgcagaggtcccgcggcttcggcttcgtcaccttctccacggaggaggcgatgcggaacgccatcgagggcatgaacggcaaggagctggacggccgcaacatcaccgtcaacgaggcccagtcccgcggcggccgtggaggcggcggcggtgggtacggtggtggccgtggaggcggc

SEQ ID NO: 100918 - DNA, 383 bp, Zea mays
cgacatcgtcccttcgtccccacgagctaccgataatccgccggcgttgagatgttgggttatcaggatctcctatctggcgacgagctcctgtcggattcattcacctacaaggagctcgagaacggcgtcctgtgggaggtcgagggaaagtgggtcacccaaggtcctgttgatgtggacattggtgccaatccatccgccgagggtggtgaggacgaaagcgttgatgacacagctgtgaaggtggttgatattgttgacacattccgtctacaggagcaacctccttttgacaagaaatcatttgtgtcttacatcaaaaaatacatcaagaatctcactgctgtgttggagccagagaaagcggatgagttcaaaaa

SEQ ID NO: 100919 - DNA, 420 bp, Zea mays
accggttcggaattcccggtcgactcacgcgtccgcctcgatcgggagacgcagaggtcccgcggcttcggcttcgtcaccttctccacggaggaggcgatgcggaacgccatcgagggcatgaacggcaaggagctggacggccgcaacatcaccgtcaacgaggcccagtcccgcggcggccgtggaggcggcggcggtgggtacggtggtggccgtggaggcggcggctacggcggtggcgggcgccgtgatggcggcggcggctacggcggtggcggcggctacggtggcggcggcggctactgtggtggtggcggcggctacggcggtggcaaccgtggcggcggctacggcaactccgacgggaactggaggaactgagcggtggggcccgcgcggtcaagttatcctgttcgc

SEQ ID NO: 100920 - DNA, 397 bp, Zea mays
ggggcaggcgaagcgactgtcgcgaggcaaggccatcgtccgccatgacgctctccctgtccacctctttcctctccatccccgccgccgcgaggaccaccgcccgcaccctacgctccgtcgtcccctcccaggggatgcgctgctcgatgcgcaagaaggggttgcacccggagatctacgaggacgcgaaggtgtactgcaacggcgagctggtgctggtgacggggggcacaaagccggagtacacggtggacgtgtggtccggaaaccacccctactatgtcggcgacacctcggcgctcgtggtcatggacagccagatcgagaagttccgcaagaagtggggccacatcaaggagtactggcccgaggaccagtggagggagatgcaccc

SEQ ID NO: 100921 - DNA, 169 bp, Zea mays
aatacccgttccgacgccactcgtccgccagagctgacagacatttagatagatgaattcgaggagactactattcatgatgttaagatcatctaagaagagattcgcaggaagcaagctcacgctgcccacgaggcatacgagcaggacgactacatccaaaccacca

SEQ ID NO: 100922 - DNA, 439 bp, Zea mays
  unsure (1)..(439): unsure at all n locations
aattcccgggtcgacccacgcgttcgtccacgccttcgctgatggcacgcaagattaaggacacagactcttaagaagaactcagggaagcctggcccgtgttcgacaaggaccagaaccggttcatctctgctgctgaacttcgacatgtcatgaccaacctaagggagaaactgacggacgaagaagtggatgagatgatccgtgaaaccgacgtggacggtgatggccagatcaactacgaggagttcgtgaaggtgatgatggccaagtgagatgatgtgcctgttttgaagctagttcctctcttgatggtagtagctagtctagtgttggagactgactgcatttggtccgccttgttcctctcgctgcatcaatggacatatccgtttgttttctcccaagggattttaccatgtcngtaatttcgttcaaa

SEQ ID NO: 100923 - DNA, 374 bp, Zea mays
cccacccggggccaaatttaccaagaagaacctccaaacgaaaaccgggaaaaaggccacctcttcaagcggcaccataacgttgaccgtcaccaaaagcaaccctgatacccgctaggtaatcggagtcttctaaagcgtgcatccgtccgacaccgacctcggggccaatgcgcccaaggatgtcaagatccacggggtctggtacgctcagctcgagtgattcgagtgtctaactgctaggtgtccgaccgccgtcatggatcttgggaaggtgtatgtataccatggaaaactttggagagcagaggaggaatcgtgtatgtaatgtacttgttaatgcaaattcgggctgtcgcttttttaaataaaaa

SEQ ID NO: 100924 - DNA, 400 bp, Zea mays
cggacgcgtgggccggcgactacggctgggacaccgccgggctgtccgccgaccccgagacggtcgccaagaaccgcgagctggaggtgatccactcccgctgggccatgctcggcgcgctcggctgcgtcttccccgagctgctctcccgcaacggcgtcaagttcggcgaggccgtctggttcaaggccggctcccagatcttcagcgagggcgggctggactacctcggcaaccccagcctgatccacgcgcagagcatcctcgccatctgggcctgccaggtcgtgctcatgggtgccgtcgagggctaccgcattgccggcgggccgctcggcgaggtcgtcgacccgctgtaccctggcggcagcttcgaccccctcggactggccgacgaccc

SEQ ID NO: 100925 - DNA, 387 bp, Zea mays
gatatctgtgggtacagcaccaagaaggttcacactatcctgaccaaggatggcaagagccacttgatcaagaaggatgtgccttgtgagactgatcagttgactcatgtttacactttgatcatccgtcctgatgcaacatacagcattctcattgataatgaagagaagcaaactggcagcatctacgagcattgggatattcttccccctaagaaaatcaaggacccagaggctaagaagcctgaggactgggatgacaaggagtacattcctgaccctgaggacaagaagccagagggctatgatgatattcccaaggaaattcctgaccctgatgctaagaagcctgaggactgggacgatgaggaagatggtgaatggact

SEQ ID NO: 100926 - DNA, 387 bp, Zea mays
cggacgcgtgggccggcgactacgggtgggacaccgcggggctgtcggcggacccggagaccttcgccaagaaccgcgagctggaggtgatccactgccgctgggccatgctcggcgcgctcgggtgcgtgttcccggagctgctcgcccgcaacggcgtcaagttcggcgaggcggtgtggttcaaggcgggctcccagatcttcagcgagggcgggctggactacctcggcaacccgagcctggtccacgcgcagagcatcctggccatctgggcgtgccaggtggtgctcatgggcgccgtcgaggggtaccgcgtcgccggcggcccgctcggggaggtggtcgacccgctgtaccctggcggcagcttcgacccgctcgggc

SEQ ID NO: 100927 - DNA, 392 bp, Zea mays
agcaaaggcagcacactcagctatccagcaaaagagatcgagacgcaggagtcatgggcaccgtcagcgccgccgtggtgaccaccatcgttgcccgcgccgcgatcgccaggcccaatgctctagggctgcctgcgctgagggcgaggagcgagagggtgcggtgcagctacgccaaggacgcggccccagtcagcaccaagggcgcaggcgcgtcgctgctcgccgcagcgggcgcggtgaccgcgtcggcggggcccgcgctggcgctcgtggacgagcgcatgtccacggagggcaccgggctgagcctcgggctcagcaacaacctgctggggtggatcctcctgggggtcttcggcctcatctggtccctctacaccatctacacc

SEQ ID NO: 100928 - DNA, 369 bp, Zea mays
gaattcccggctcgacccacgcgttcggcatcagaaagatctctgcgcacatcgctgcagccgtggctgcaaaagcctactagctcgggctgccgacccgtctgcctgccccaacgaccctgtgaaatatgccgaaaactggatgtacacttccgtctaccgaaactaccggtaatgctggcgggaatcaattttgccagtattaaaaaatctatcaacgcgggatggtactctgttgtttatagtccctgctgctaaccacccttgttgctggtgctgctggagaggcattgtacctgtccatgcatatatgatatatatatgttgtaacgttgtgaaagcaaacaatcttgggtaccaatgtttgtt

SEQ ID NO: 100929 - DNA, 408 bp, Zea mays
caaggatggagattggatgcttgttggcgatgtaccatgggagatgttcgctgactcttgccgcaggctcaggatcatgaaaggatcagatgcaattggacttgctccaagggcagctgataagtccaagaatcgcaactagaatggttgcttcttacagtccagagcaagagggagatatccagtgactgtagggatctttgtggaagccggaaaacgtctaacagtttcaagaagaattctgccttatggtctgtaccacatgtttttgctgctacgcaagtaaagaactccacgtctgtcaatgttagttttacaacatcgtctacggacaaaaaaaaaaccccccgctatttgattgttgctaagccttcgtacgacgtgtaaatggtttggtacaatgagtgc

SEQ ID NO: 100930 - DNA, 370 bp, Zea mays
cgcacgggagccacggagagcaaaggcagcacactcagctatccagcaaaagagatcgagacgcaggagtcatggccaccgtcagcgccgccgtggtgaccaccatcgttgcccgcgccgcgatcgccaggcccaatgctctagggctgcctgcgttgagggcgaggagcgagagggtgcggtgcagctacgccaaggatgccaagaacgcggccccagtcagcaccaagggcgcaggcgcgtcgctgctcgccgcagcgggcgcggtgaccgcgtcggcggggcccgcgctggcgctcgtggacgagcgcatgtccacggagggcaccgggctgagcctcgggctcagcaacaacctgctggggtggat

SEQ ID NO: 100931 - DNA, 400 bp, Zea mays
cccacgcgtccgcagaacctggtcaagctgatcagagtgctcggcgacgcccaggtcggtggtgacgatatcacagaggagctgaagagcgtgctgaacagcgctgcccctgaagtacgccgtccttactgcaactgtctgatcgatgtatgccgcaaccacggcttccctccacagagggcaagggaagtcttccaccttgcccagacctatggtttgtactccaagcttcagagcaggaaggacgaggagtggtcgctggacctgcggtcgctctcggttggtgcagccaagacagcgtttgatgactggatgcagactgtctcggagcgctgggcgcagcagaaggacttgccagagtccttcagcgtgtacaccggatccagcacccacaagtttg

SEQ ID NO: 100932 - DNA, 401 bp, Zea mays
gaaaggccgagaagcgctttatccggccgtacgtagcgataagagtggtgcacccgtagcggcacggcatggcggccacggcgtactccgtggcgctcctcggcggcgcacgcctgccggccgccttcctccctcgacgcagcagcgtgtgccaccaccagcttcgcctccaagacgcaccgaggctgatctccctgcaccgtgccagggccgcttccgaggacacgtcggcctccggcggcgacgagctcatcgaagacctcaaggcaaagtgggacgccgttgaggacaagcccaccgtcctcctgtacggcggcggcgccgtcgtcgcgctatggttgacgtccgttgtcgtcggcgccatcaacgccgtgccgctgctccccaagatcctggagctc

SEQ ID NO: 100933 - DNA, 243 bp, Zea mays
gcgcctcctccttcgccgtcgtctgctccaagaagaagatcaagaccgacaagccctacgggattgggggtggcctgaccgtcgacgtcgacgccaacgggagaaagggcaagggcaagggcgtgtaccagttcgtcgacaagtacggcgcgaacgtagacggatacagcccaatctacaacgaggatgactggtctcacaccggagacgtatacgtcggtggaaccactgggcttgtgatct

SEQ ID NO: 100934 - DNA, 396 bp, Zea mays
gcgccactgtccagtgcgcgcgtcaagcttgcttagctagccgccatggcctccctcggcggcgtctccgtgaagcccgtggccatcaagggtctcgccggcagctccatctccggaaggaagctcgccgtcgccaggccgtcggcccgctccatccgcaggccccgcgcagccgccgtggtggccaagtacggcgacaagagcgtctactttgacctcgacgacatcggcaacaccaccggacagtgggacctctacggctctgacgcgccctcgccctacaacccgctacagagcaagttcttcgagacgttcgcggctccgttcaccaagagaggtctgctgctcaagttcctgctgctgggcggcggctcacttctggcctacgtcagcgcg

SEQ ID NO: 100935 - DNA, 385 bp, Zea mays
cccacgcgtccggggcgtgccaggtggtgctcatgggcgccgtcgaggggtaccgcggggccggcggcccgctcggggaggtggtcgacccgctgtaccctggcggcagcttcgacccgctcgggctcgccgacgacccggaggcgttcgccgagctcaaggtgaaggagatcaagaacggccgcctcgccatgttctccatgttcggcttcttcgcgcaggctatcgtcaccggcaagggccccctcgagaacctcgccgaccacatcgccgaccccgtcaacaacaacgcctgggcttacgccaccaacttcgtccgctgcaagtgagcgagggcatgatgcttgcatgcgtgtaccgtagacgtaccgtattcctacgtact

SEQ ID NO: 100936 - DNA, 285 bp, Zea mays
ggcctccggggctacgccgcgcccaggtccgcggtggcagcgctgccgtccgtgagggtgggcaggaagaggtcgtcgtcgcagggcatccgctgcgactacatcggctccgccaccaacctgatcatggtgacgacgacgacgctgatgctgttcgcggggcggttcgggctggcgccgtcggcgaaccgcaaggcgacggcggggctgaagctggaggcgcgcgactccggcctgcagacgggtgaccccgccgggttcaccctcgccgacacgctggcctgc

SEQ ID NO: 100937 - DNA, 457 bp, Zea mays
agccacgcgtccgcaggggttcgcttcatgccagttcgtgtccacctcgctcatcaaagcaaaagcggccgttggctcctcagttctaggtccactgaagatcatccaggatgctggcgagatggatttggtgtcatggggagtcgccatctctgcgttcgtgaagcatggcttgggtcaagaggcactgtctctcttcaactcgtgcagagttgactgcccagagaagcctgatgagttcatcctgggcaccatcctgaatgcatgtgcaaacgccgcgttgataaggcagtgcagatgcatccattcgctcgttgtcaggacaggacacagcaagcacttgtgcgtgtccagtgctttggttgatgcctatgcgaaatgcggtgacatcactgctgccaaaggcgctttcgctacgggttcgaccaaggacgccatagtgtacaacaccatgctg

SEQ ID NO: 100938 - DNA, 417 bp, Zea mays
  unsure (1)..(417): unsure at all n locations
gatgtcctcgcggggcctttggtttcacttgcgtatcctgtgtgtgcctctgttagagcaattgaaacaaaatctgctgtggatgatcagcaatggctcacgtactgggtgctgtactcatttatcactctattcgagctcacctttgctccggtactcgaatggcttcctttctggtcttatgcaaagctgttcttcaattgctggttagtattgccacagttcaatggagctgcacatgtatatgagcattttgtgaggccaatgattgtaaatcagcaagttgtaaacatctggtatattccaaagaaggatgaatcaagtagacctgatgatgtaatttcagctgcacagaggtacattgagcaaaatggatcaaaagcgtttgagaatctngttaacaagtttaagagttcg

SEQ ID NO: 100939 - DNA, 384 bp, Zea mays
  unsure (1)..(384): unsure at all n locations
cttccgatgttcgacacgtttgagtgctgtcttagaggggatggactacttgtggcaactggtgcttatggtaatagatttcgtgttttcggtcgtcctccgggaagcatagaggcaacaactttggaagcaagtaggaacccaatgaggcgtcagattgcaaatccagcaaggcccacacggacactaacttcttttgcccgtggtgttcggagaggtggagaaaatcaaggcgttgatgctaatgggaattcactcgacttctcaacgaagctgctccacctcgcatggcacccgaccgagaattctattgcatgtgctgctgcanatagcttgtatatgtattatgcgtanagaatgccctacagaaaaatntgttttttg

SEQ ID NO: 100940 - DNA, 367 bp, Zea mays
ggacggctccggtgggccacggacgggggcaagtacaaggtcaactacgggtacgcgcggttcgcgtccgacttctcggagctggccgtcgtcggctcccgcgccgacccggtgctccgcgtcccgcgccgggacggcgccgcccaccaggacctcctcgcgctcatgacggccgactacgccgtcgtgacgccgcggaagcgcgcggccatgcgcgcgttcagggcgcggcagatgacgtacacggtgtgctacgacgccgtgcggtacgcggacgggccgttccccgagtgcgacaactcggacgaggagagggagtccttctcggcctggggcgagtccaagaccgtcgtcatgaggccacgcg

SEQ ID NO: 100941 - DNA, 344 bp, Zea mays
gacccacgcgtccggccgccgagctacctgacgggcgagttcccgggcgactacggctgggacaccgcggggctgtcggcggacccggagacgttcgccaagaaccgggagctggaggtgatccactcccgctgggccatgctgggcgcgctcggctgcgtcttcccggagcttctcgcccgcaacggcgtcaagttcggcgaggccgtgtggttcaaggccggctcccagatcttcagcgagggcgggctggactacctcgggaacccgagcctcatccacgcgcagagcatccttgccatctgggcctgccaggtcgtgctcatgggcgccgtcgagggcta

SEQ ID NO: 100942 - DNA, 432 bp, Zea mays
  unsure (1)..(432): unsure at all n locations
gccgcggcggcggcagcgggcggttggtcgccgtgcggtccagcgggccggccacgccgtcggagatctccgacaaggtgtctgagagcatcaagcaggcggaggagacgtgcgcggacgaccagaagggcgacgccgagtgcgcggcggcgtgggacgaggtggaggagctcagcgccacggccagccacgcccgcgacagcctcaaggagaccaacgccaacgacccgctcgagaagtactgcaaggagaacccggactccgaggagtgccgcatctacgacaactagctatagtcgtagctatatagggcgtggaatgatactctcgatcggcgcgtcatacgtggaatgaacttgtatgaagctatacctcaatgcttctctacctgccgncgncgncgcagcagcaccccgtatgatatgatacaca

SEQ ID NO: 100943 - DNA, 415 bp, Zea mays
gtccagatcgcgtgattccgcatcccgttcgcgagcgcgacacacgctgacagctcagggctgaccttcccgacggcctccagctccatcttgattcttgaggcgaagccccggtgcgtaagagtctgccatggccagcgagaataaggtctttgggttcgaggaagtcgccaagcacaacgtcaccaaggactgctggatcatcatcgccggcaaggtgtatgacgtcactccgtttatggatgagcatcctggtggagacgaggttttgctagctgtaaccgggaaagatgctacagctgatttcgaagatattggccacagtgattccgcaagggacatgatggagaagtaccacatcgggcagatagatgcttcaacaatcccagcaaagcgtgctcatgtgcaggcccag

SEQ ID NO: 100944 - DNA, 340 bp, Zea mays
cgctggcggagcagatggagaaggccgcactgtttgacttcaacctgacgctcccggcgatcgcgaccgagttcctgctgctcatggtggcgctggacaagctctacttcacgccgctaggcaagttcatggatgagcgggacgccaagatccgcggtgagctcggcgatgtcaagggcgcctccgaggaggtgaagcagctggaggaccaggcggcggccatcatgaaggcggcgcgcgccgagatcgcggcggcgcttaacaagatgaagaaggagaccaccgcggagctggaggccaagctggacgagggacgcagccgtgtggaggccgagctcgt

SEQ ID NO: 100945 - DNA, 337 bp, Zea mays
cggcaagcagtactacgccgtgtccgtgctcaccaggacggcggacggcgacgagggcggcaagcaccagctcatcgcggccaccgtctccgacggcaagctctacatctgcaaggcgcaggccggcgacaagaggtggttcaagggcgccaggaagggagtcgagaaggccgcctcctccttcagcgtcgcatgatgatgtaattttatttcttcgatgggatgggatgcacgcactacgtagagagcttggctaggccaggcctggctgagcacgcttgtgtgttccttcgactgtacatgagaacaaagactaaggagagctccattcccgtac

SEQ ID NO: 100946 - DNA, 355 bp, Zea mays
cggacgcgtggggcggcgtccgggagcccgtggtacggccccgaccgcgggctgtaccggggcccactgtccggcgagccgccgagctacctgacgggcgagttcccgggcgactacggctgggacaccgcggggctgtcggcggacccggagacgttcgccaagaaccgggagctggaggtgatccactcccgctgggccatgctgggcgcgctcggctgcgtcttcccggagcttctcgcccgcaacggcgtcaagttcggcgaggccgtgtggttcaaggccggctcccagatcttcagcgagggcgggctggactacctcgggaacccgagcctcatccacgcgcagagca

SEQ ID NO: 100947 - DNA, 419 bp, Zea mays
ttttgtcacgactttgttaatgagccagctcaagtcgagctcgagccagctcgttagctcgaacgagcaaaccatttgtctgcaaaacaaagcctgcacttgtgttggatgaactaataaatgataaactgtgttaatttggtgttgaattgacgtggtatgtgaaattatgagtattattactcttttctagtgtaagattggtctagaattaactagtaattgattatattgttatatatgtatattatttttttgttgtggctcgcgagctaaacgagccagctcgagctcgcaaacgagccgagctgattctctagctcggtttcttaacgaaccgagccatcttgttacattaatgagccagctcgccgagccggctcaatatctagccctatcaggcacacatggttaggatc

SEQ ID NO: 100948 - DNA, 445 bp, Zea mays
gccgagaagcgctttagccgtagccgtagccgtagcgataagagtgagctagctggtgcgacaccggcatggcggccacggcgtactccgtggcgctcctcggcggcgcgcgcctccccgccgctccgcgctccgccctcctccctcggcgcagcgtctgccagcttcgcttccaagatgcaccgaggctctccctgctccgtgcgaaggccgcttccgaggacacatcggcctccggcgacgagttgatcgaggacctcaaagcgaagtgggacgccgttgaggacaagcccaccgtcctcttgtacggcggcggcgccgtcgtcgccctctggctgacgtccgtggtcgtgggcgccatcaacgccgtgccgctgctccccaagatcctggagctcgttgggctcggctacaccggctggttcgtgtaccgctaccttctctt

SEQ ID NO: 100949 - DNA, 335 bp, Zea mays
gcccccggccctgcagcccggaagagcatatggagcagagggcagtgctgtggtgcatggttccatcagaacagtaggaagaagcgacctcgcagatcacgagatgggcctacgtcagtggcagctgtcatccagcggtgggctgagcgcaacaagcatttggagtatgaggaatctgaggaggcaaagcgaccaagaaaagcacctgcaaagggttcaaagaaaggctgtatgaagggaaaaggggggcctgacaatactcaatgtggataccgtggagtgaggcagcgtacttgggggaagtgggttgctgaaataagagagccaaatcgtgt

SEQ ID NO: 100950 - DNA, 447 bp, Zea mays
ggcgccggcgtgctcgtgatctcaacccaaggcgtgcctccgctccggtcacccgtcggtccacgcaaccatgtcgaggaggaagaccagggagcccaaggaggagaacgtcacccttggacccactgtccgtgaaggagagtatgtctttggtgtcgctcacatctttgcatccttcaatgacaccttcattcatatcactgatttgtctgggagggaaactctggttcggatcaccggtggcatgaaggtgaaggctgaccgtgacgagtcgtcaccttacgctgctatgcttgctgctcaagacgtcgcacagcgctgcaaggagcttggcattactgcactgcacattaagcttcgcgccaccggaggcaacaagaccaagacccctggacctggtgcccagtctgccctcagggcgcttgctcgttccgggatgaaaatcgg

SEQ ID NO: 100951 - DNA, 446 bp, Zea mays
cggacgcgtgggtggtgatccgttcaggaaaggtgttgaacagggcccgcagatggaggacgagcaattcaaaaagatcttgcgctacattaggtatggtgttgacggtggagctacccttgtgacgggtggtgataggttgggtgacaagggtttctacatccagccaacgattttctcagatgtccaggacggcatgaagattgctcaggaggagatatttgggcctgtgcagtcgatcctcaagttcaaagacctcaatgaggttatcaagagggcaaacgcgagccagtatggattggccgccggcgtgttcaccaacagcctggacacggtcaacaccctgacgcgcgcgctcagggccgggactgtctgggtgaactgcttcgacgtcttcgatgctgcgattccgtttggcgggtacaagatgagcggcatggggaggg

SEQ ID NO: 100952 - DNA, 389 bp, Zea mays
caggaagatgccggcggggcacgggctgcggtcgcggacccgcgacctgttcgctcgggccttccgcaagaaggggtacatcccactcaccacgtacctgcgcacctacaagatcggcgactacgtcgacgtcaaggttaacggcgccgtgcacaagggcatgccgcacaagttctaccacggccgcaccgggagcgtctggaacgtcaccaagcgcgccatcggcgtcgagatcaacaagcaggttaatggccgcatcatcaggaagcggatccatgtccgcgtggagcatgtgcagccctcccgttgcacggaggagttccgcttgaggaaagccaagaatgaccagctcaaggcggatgccaaggcccgcggtgaggtgatcagca

SEQ ID NO: 100953 - DNA, 389 bp, Zea mays
  unsure (1)..(389): unsure at all n locations
gcagaagttgcggttgtacttttcttcctccgccgtcggctcagatctgtgcgtgcgggctagcgatggcgtcgttctcggaggctcccccagggaacccgaaggcgggcgagaagatcttcaagaccaagtgcgcgcagtgccacacagtcgagaagggcgccggccacaagcaaggtccaaacttgaatggtctttttgggaggcagtcgggtaccaccacaggctactcctattccgcgggaaacaaaaacaaggctgtgatctgggaggagaacactctgtatgactacctgcttaaccctaagaagtacattcctggaaccaagatggtcttccctggggctgagaagcccgaagaacgtgctgatctcatngcgtaccctgag

SEQ ID NO: 100954 - DNA, 445 bp, Zea mays
cccacgcgtccgttagagtatgctcgaggtggacatgcatcaacatgcggggatgtttgacagttttggaatagtacttgtagagatgcttacagggagaaggccaattgatcatgtgtttgtggacgaactaaacattgtcaaattcgtggagaggagcttccctgataaaatattggatgtgattgatgtttcattacgtgatgacttcaagagtgcccaaataaacatggtaacagagagtgagacctaccgatgcttgttttctctactgcaagtagcactttcttgcacacgtgagattcctggtgaacgaacgaccatggaagaagcagctagcagaattggttcaatcaagaccacgtatgctaaaggaattgaaaacgcaagcaggcattgaattgaaaccacctctatgttgagcgaacgtacgtggggatggaca

SEQ ID NO: 100955 - DNA, 449 bp, Zea mays
gccaggtcgtgctcatgggtgccgtcgagggctaccgcattgccggcgggccgcgtcggggaggtcgtcgacccgctgtaccctggcggcagcttcgaccccctcggcctggccgacgaccccgaggccttcgccgagctcaaggtgaaggagctcaagaacggccgcctcgccatgttttccatgttcggcttcttcgtccaggccatcgtcaccggcaagggcccgctcgagaacctcgctgaccacatcgctgacccagtcaacaacaacgcatgggcctacgccaccaacttcgtccccggcaactaagctcaacggctatgctatgcaacttcattgtctttcggatcggagagggtgtacgtacgtggattgattgatgctgcgagatgcatgtgtgtcttttgtttcacgttgcattgcataggcaagtcgagatgatgagt

SEQ ID NO: 100956 - DNA, 391 bp, Zea mays
cccacgcgtccggaagttttggaagtaaccgcattgagatcagtgttcgggttggtgcgcaagttgtctactcgaaatatgcaggcacagaattgaaattcaatgacgccgaccatctcattttgaaagaagatgacataattggtattcttgacagtgatgatgtgaaggatatgaaaccactgaatgatcgcattctgattaaggttgctgaagctgaagaacgaactgctggtggtttgctattgacgcaggcaactaaggagaaaccttctgttggatcagtggtagccgttggcccaaggccgttgggcgaggacggcagcaggaatcccctgtcgatcactcctggaagcaacgtgatgtattccaagtatgcggggagtgagtt

SEQ ID NO: 100957 - DNA, 433 bp, Zea mays
tgatagcttgctccaggacgtacgtacgtacgtagatcgatccatcgagcgctagctagctgacgaccatggcgtccctctcctctgccgccatcaccgccccttccttcacggccgcgcccgctcgcgcagtggtcagcaggaggtccttcaccgtgcgtgcctctctccgcaaggccactgccaccgccgccgtggccgttgccgccagcgtcctgcttgccggcggcggcgccatggcccaggaggtgctgctgggcgcaggcgacggcgggctcgtcttcgagcccagccagttcaccgtcaaggccggcgacaccatcaccttcaagaacaacgccggcttcccgcacaacgtcgtgttcgacgaagacgatgtgccgagcggcgtcgacgcctccaagatctcgcaggaggagtacctcaacgcgcc

SEQ ID NO: 100958 - DNA, 445 bp, Zea mays
  unsure (1)..(445): unsure at all n locations
cgctgggctgcgtgtttccggagatcctggctaagaacggcgtcaagttcggcgaggcggtgtggttcaaggccggcgcgcagatcttctcggagggcgggctggactacctggggaaccccaacctggtgcacgcacagagcatcctggccatctgggcgtgccaggtggtgctcatgggcttcgtcgagggctaccgcgtcggcggcggcccgctcggggaagggctcgacaaggtgtaccccggcggcgccttcgacccgctgggcctcgccgacgacccggacaccgncgncgagctcaaggtgaaggagctcaagaacggccgccttgccatgttctccatgttcggcttcttcgtgcaggccatcgtcaccggcaagggccccatcgagaacctcttcgaccacgtcgccgaccccgtcgccaacaacgcctgggcata

SEQ ID NO: 100959 - DNA, 425 bp, Zea mays
ggaaaccctagccgccatatctcacgatccactcgagcaccaagccgagggaaggtgaggagcgatggcacgcggcgtggtgtccgcgaagggcggcgcggtcgcgggcacgaagaaggggtcggtttccttcacgatcgactgcaccaagccagtggaggacacgatcatggacgtcgcctcgctcgagaagttcctgcaggagcgcatcaaggtcgccgtcggcaacgctggcaacctcggcgactccgtcaccatctctcgcgagaagaccaaggtcaccgtcacctctgacggacccttctacaagaggtacctgaagtacttgaccaagaagtacttgaagaagcacaacgtgcgggattggctacgcgttgttgctgccaacaaggaccgaaacgtctatgagctccgctacttcaaca

SEQ ID NO: 100960 - DNA, 399 bp, Zea mays
cccacgcgtccgcatctaccagcgactcagcgagcgagagcagcacacactgcacgcagctagctaggagcagcagcagcggcggcgatggcggcctccatgatctcctcgtcagctctggcggtggcgcctcagggcctgccgcccctcggccgccgcgcctcctccttcgccgtcgtctgctccaagaagaagatcaagaccgacaagccctacgggattgggggtggcctgaccgtcgacgtcgacgccaacgggagaaagggcaagggcaagggcgtgtaccagttcgtcgacaagtacggcgcgaacgtcgacggatacagcccaatctacaacgaggatgactggtctcccaccggcgacgtctacgtcggtggaaccactgggcttctgatc

SEQ ID NO: 100961 - DNA, 426 bp, Zea mays
gacccacgcgtccggggtcacaaagatcatacaacgctataacaaggttattgtctgtgtggaagacggggcgagttttgtcgcagacgctgctatagtaaccgtccctctcggggtactcaaggcaaacatcatcaagtttgagcctgagctaccgaaagagaagctctcggcgatcgccgaccttggcgtcggtatcgagaacaagatagctctcaagttcgacactgtgttttggcccgacgttgaagtgataggtagggtggccccgacgtcaaacgcctgtggctactttctcaaccttaacaaagccacaggaaacccggtcctggtgtgcatggtggccggaaggttcgcgtacgagatcgagaagctgtcggacgaagagtccgtgaacttcgtcatgtcccagctcaggaacatgct

SEQ ID NO: 100962 - DNA, 376 bp, Zea mays
gttgctactggcatcgccgtgacctcgatcgccttctcctacgtcgacggcgccggccgaacccaatctgctggtcgctggggcggttccggtggagaaactgagccggtgatccagctcggcgactccgaggtgctcacggagctgtccgggacgatcggcaacgtctacggccacaccgtcataacctccatcaagttcgtcacaagcctcaagacctacgggcctttcggagcatggggggacgggagtgacactccgttcgcggtccccgtgcagcaagggagtgccatcgtcggcttctttgcacgagctgggatctacctcgacgcagttggcgtttacgtgcgatccctgtgatgatgactgacgacag

SEQ ID NO: 100963 - DNA, 393 bp, Zea mays
cccacgcgtccggccgcaaggggcaacggcacaccccaactgacctgacccacgagggatccgcagatgaagatcattccggtcccttgcctggatgacaactatgcctacttaatcgtggacgagagcaccaagaaagcagcggccgttgaccctgtggaaccggagaaggttctcaaggcggccggcgaggtcggcgcctacgtcgactgcgttctcaccacccatcaccactgggatcatgctggtggcaatgagaagatgaggctgcaggtgccagggataaaggtatttggaggatccctggacaatgtgaaaggctgcactgatcaggtggagaatggaatgaagttgtcacttgggaaggacattgagatactatgcctacacacg

SEQ ID NO: 100964 - DNA, 271 bp, Zea mays
cccacgcgtccggcgccgccttcaagttcgccatcgacaaggacgtcaggaacttccaggtcgtaaaaaaaatgtccaacgagtggccattcttaagggtaaccttgaacctgctgaaaatggttttcgccaagggaaaccccggctttgccggtttgattaacaagctgcttgtggcggaggaactcaagccttttggaaagcagttcagggacaattacttgaagacacagcagcttttcctccaaatcgttgggcacaaggatattct

SEQ ID NO: 100965 - DNA, 296 bp, Zea mays
cactcctctcgtccgcgcttgtttgttcgcgtcttctccctgtagggaactccgttacggggccccggctgtgcgtggcgtcagcacgccccgcgggcaggagggtgaggctgctgagcgtgaggtgcgagcagggagccaagggcggtggcgggctggacgtgtggctgagccgcggggcgatgctgggcttcgtcggagcggtggccgtggagctgaccaccgggaaaggcgtgcttcagaatgtgggattgaccgcgccggtgccgacgctggcgctggcgctcaccggcgcg

SEQ ID NO: 100966 - DNA, 416 bp, Zea mays
gttcatcatggacaactgcgaagagctgatccctgagtggctgagcttcgttaagggtattggtgactctgaggaccttgccctcaatatctctcgtgagactcttcagcagaacaagatcctgaaggtgatcaggaagaaccttgtgaagaagtgtgttgagctcttctttgagattgctgagaacaaggaggactacaacaagttttacgaggctttctccaagaacctcaagcttggcatccacgaggactcgcagaacaggaccaagatcgccgagcttctgagataccactccaccaagagtggtgatgagctgaccagcctcaaggactacgtgaccaggatgaaggagggacagaatgacatatactatatcactggtgagagcaagaaggcagtggagaactccccct

SEQ ID NO: 100967 - DNA, 402 bp, Zea mays
  unsure (1)..(402): unsure at all n locations
cccacgcgtccgatgcacttgacatgttttgaagaaatggtggcgcataacaaatacggttgtccaatatgctctaaaacagctcttgatttgacacatcattgggaaatgttggatcaagagatcgaagccacgatcatgcctcttgtgtatcgctacaagatttgggtgctttgcaacgattgcaacaaggtctcagaggtgaactttcacgtgattggccacaagtgcagccactgcagatcgtacaacacccgaacgacatcgcgccctgcagatttatcgggaagcagctcaccttcaacagactcatccgacaacaacatatagagaagaaaccattgacagagccaatatgattgaagaaccgaaggaggaaatattgtttcggngcgtgcgtgc

SEQ ID NO: 100968 - DNA, 445 bp, Zea mays
cccacgcgtccggccaagcaagctaatactctgtactggtctcctgctgggcgcttcagagttcttgctggactgaagggtttcaacgggcagctggaattctacaatgttgatgaactagagacaatggcaacaggagagcattttatggcaacagatatcatgtgggatccaactgggagatatctcgcgactgcagttacctcagttcatgaaatggagaatggctttcaaatatggtccttcagtggcaagcatctttacaaggtgtcaaaggatcatttctatcagtttatatggcgcccgagaccgtcctcactactgacggccgagaaggaagaagagatctcaaggaacctgaagaagtatagcaagaagtacgaacaagaagaccaggatgcattcaatcagttgagcgagcaggaccgcaagaggcggacacagc

SEQ ID NO: 100969 - DNA, 425 bp, Zea mays
  unsure (1)..(425): unsure at all n locations
gcgagatgtatgcaagagataatactggtgattatgtccttcgacttggtgctgaccggtcatctgagaacttaacattgctggaaactggtgagcctatctattccccgacactgcaggaaggccccatcatgacagcagagcttataaaagaaacagaggagctagtgttacggacaggaagtcttggtgctggatgctctcaacttctatcagatatgcaggctttcaaggcagcaaatcctggttgtgtcctggaagactttgttagatggcactctccacccgattggtctgaggattgtgctgcaaacagtaccacagttggggaaggctcatctagacgtgggcggttaagtgataggatgcanacaaaagaaggtaacttgtggaaggaactgtgggaggctgcaaaacctatacct

SEQ ID NO: 100970 - DNA, 395 bp, Zea mays
aacgccttcagcacctacggcgaggtcctcgagtccaagatcatcctcgatcgggaggggcataggtcccgcggcttcggcttcgtcaccttctccacggatgaggcgatgcggaacgccatcgagggcatgaacggcaaggagctggacggccgcaacatcaccgtcaacgaggcccagtcccgcggcggccgtggaggcggcggctgtgggtacagtggcggccgttgaagccgctgctacggcggtggctggcgccgtgatggcggtggcggctaccgcggtggcagcggctacagtggcggccgcggctacggaggtcgtggcggcagctacggcggtggcaaccgcggctgcggctacggcaactccgacgggaactggacgaactgaac

SEQ ID NO: 100971 - DNA, 433 bp, Zea mays
  unsure (1)..(433): unsure at all n locations
cccacgcgtccgcccacgcgtccgggcagatctgagttagccggcggatgcgatccgggcgcgtgctgctgtgtgtgtgtcggtggagatggccacagcttacgctcccatggcgagccaggtgatgaagagcagcctcgtcgtgcactcgaggccgaggggcctgtcaggcgctgctgcgctcacgaggcggcccggccggttcaccgtcaaggccatccagcccgagaaggcaacgtaccaggtggtgcagcccatcaacggcgacccgttcatcggcagcctggagacgccggtcacctccagcccgctcgtggcgtggtacctctccaacctcccggcctaccgcaccgtcgtgagcccgctgctgcggngcgtcgaggtcggcctcgcgcacggctacctnctcgtggggcccttcgcgctcacgggc

SEQ ID NO: 100972 - DNA, 343 bp, Zea mays
aaaggagcggcggcgaggtctatggcgtcgacggcggggtacctggcgcggcgggcggggcagaaggagcgggtgcgcctgctctaccgcagggcgctcaaggacacgctcaactgggccgtccaccgccacctcttctaccaggacgcgtcggatctccgggacaagttcgaggccaaccgacacgtggataacctggacgtggtcgataggctcatcgacgatgcggaggctcagtacaggaacttccagcaccccgatccctacattgttccatgggcaccaggcggcactaaattcacaagataccccccttcacctcaggggatcgagatcatctaca

SEQ ID NO: 100973 - DNA, 434 bp, Zea mays
  unsure (1)..(434): unsure at all n locations
cggacgcgtgggcggacgcgtgggcggacgcgtgggcggacgcgtggggcgccacaggtgaccggaaaaccacggccggcgttcctgcttctctacccggtccgaattgctgaccggatcaacccgagaccttgcaggattatcgatctgattgcggcatgatccgcttcatcctgctgcagaaccggcaggggaagactcgactggccaagtattacgtcccgctcgaggactcggaaaagcacaaggttgaatacgaggtacaccggctcgtggtcaatcgggaccctaagttcaccaacttcgtcgagtttcgcacacacaaagttatctataggagatatgctggactgtttttttcaatatgtgtggacataactgataatgaattggcatacttggaatgcattcactnngttgtcgagatattggac

SEQ ID NO: 100974 - DNA, 377 bp, Zea mays
  unsure (1)..(377): unsure at all n locations
aggacttcctcctcaccgcgaggaggaatgatgcccgctcagtgaagatcaagaggagcaaggatgttgtcaagttcaaggtgcgctgctccaagtacttgtacacgctctgcgtcttcgatgctgagaaggcaaacaagttgaagcaatctcttcccccaggtttgaccgtcgaggaggtctgattggatacatggcaacgccgggttgaactacccaagcttctttatcagtagcagagcatgctactcatgtacttttggaacctaagctattagacctgtcagtgttggatgtgtggatcttgcatttttgtggagaaataccaatttacctcgttcaaggatgcaaaanacactaaaagagaaaaaaaanac

SEQ ID NO: 100975 - DNA, 428 bp, Zea mays
cccacgcgtccgagatgattatggctcccacgcttgagctgaggcagcaggcgctcgagcgtgtcttgccgtatcagaggtctgacttcgaaggcattttccgtgctatggatggactcccggtgaccatccgactcctggaccctcccctccacgagttccttccagaagggaacatcgaggacattgtaagtgaattatgtgctgagacgggagccaaccaggaggatgccctcgcgcgaattgaaaagctttcagaagtaaacccgatgcttggcttccgtgggtgcaggcttggtatatcgtaccctgaattgacagagatgcaagcccgggccatttttgaagctgctatagcaatgaccaaccagggtgttcaagtgttcccagagataatgggttctctgtgggacaccacagaactgggc

SEQ ID NO: 100976 - DNA, 405 bp, Zea mays
ggaattcccggctcgaccgcacgcgtccgacgactcgttcgacatgatcatggactgctgcactcgatctgaggcagcacgcgctcgggcctgtcttgacgtatcagagggcggacttctaaagcatcttccacactctgtatgcactcccggataccatgcgactcctggaccctactctccaccagttccttccacaagggaacatcgactacattgtaactgaatgatctgctgagaccgtagccaaccatgaggataccctcgcgcgaatcgacaaactttcaaaagtaaacccaacgcttggcatccgagactgcaggctcggtatatcgtgccctgcatcgacaaagacgcaaactccctccatctttgaagctgctatcgcaatgaccaaccaaagtg

SEQ ID NO: 100977 - DNA, 439 bp, Zea mays
ggaaggagggcgggtacgaggtgatcaaggcggccatcgagaagctgaagctgcggcagagggagcacatcgcggcctacggcgagggcaacgagcgccggctcaccggcaggcacgagaccgccgacatcaacacgttcagctggggcgtggccaaccgcggcgcgtcggtgcgcgtgggccgggagacggagcagaacggcaagggctacttcgaggaccgccgcccggcgtccaacatggacccctacgtggtcacctccatgatcgccgagaccaccatcatctggaagccctgagcgccgcggccgttgcgttgcagggtccccgaagcgattgcaaagccattgttccttccgttccgtttgcttattattgttattatctagctagatcatctgggggtcaggtcgtcgtggtgtgccaaaacagaacacag

SEQ ID NO: 100978 - DNA, 424 bp, Zea mays
cggcaacaacaacaatgggagcgccaacggcacttctgtggctgacaagcgcttcaagacattgccgacgagtgagatgctaccgaggaatgaagtccttggtggatacatctttgtctgcaacaacgataccatgcaggaggatctcaagaggcagctttttggtttgccagcaagatatcgtgattcagtccgagcaatcactcctggcttgcctcttttcctctataactacacaacccaccagcttcatggggtatttgaggctgccagttttggtgggtccaatatcgatcctactgcatgggaggataagaagtgtaaaggtgaatctagattcccagcgcatgtgaggatctgcattaggaagctgtgcaagccgttggaagaggattccttcaggccagttttgcaccattatgat

SEQ ID NO: 100979 - DNA, 437 bp, Zea mays
  unsure (1)..(437): unsure at all n locations
cacgcgtccgcgaccgttcgctcgcgcaggggctcaagggtgacccggcgtacctggtggtggagcaggacaagacgctggccacctacgggatcaacgccgtgtgcacccacctcggctgcgtcgtgccgtggaacggcgccgagaacaagttcatctgcccctgccatggatcccagtacaacaaccagggcaaggtggtccgcggaccggcgcctctgtcgctggccctggttcacgccgacgtcgacgacggcaaggtcctcttcgtcccgtgggtggagaccgacttcaggaccggccaggacccgtggtggagtgcatgaggaggatcatccgatacaagcggtgctcagtgctcataggctntctccgagggcgttgttgctacaaattcacttgcctcttgccttcanattatatatattacacacact

SEQ ID NO: 100980 - DNA, 414 bp, Zea mays
  unsure (1)..(414): unsure at all n locations
gccaccctcggcgccctctccgtcgagtggctcaccggcgtcacctggcaggacgccggcaaggtggagctggtggacgggtcctcctacctgggccagccgctgccgttctccatctcgacgctcatctggatcgaggtgctcgtgatcggctacatcgagttccagcgcaacgccgagctcgacccggagaagaggctgtaccccggcggctcctacttcgacccgctcggcctggcggccgatcctgagaagaaggagcggctgcagctggcggagatcaagcacgcgcgcctcgccatggtcgccttcctcggcttcgccgtgcaggccgncgncaccggcaaggggccgctcaacaactgggccacccacctgagcgacccgctccacactaccatcttcgacacgttc

SEQ ID NO: 100981 - DNA, 443 bp, Zea mays
cccacgcgtccgcccacgcgtccgggaggcggcgctggtcgggggacggaaccacagggacgcgacgcaggacctgtacgactccatcgcggcggggagcttcccggagtggacgctgtacgtgcaggtgatggacccggacacggaggagcagtacgacttcgacccgctggacgacaccaagacgtggccggaggacctgctgccgctccgccccgtggggaggctggtgctggacaggaacgtggacaacttcttcaacgagaacgagcagctggcgttcgggccggggctggtggtgccagggatctactactcggacgacaagatgctgcagtgccgggtgttcgcctacgccgacacgcagcgctacaggctgggtcccaactacctgatgctgcccgtcaacgcgccgcgctgcgcgcaccacaacaaccactacg

SEQ ID NO: 100982 - DNA, 415 bp, Zea mays
gtttatcttctcccctcctctgcccccatctcgcttctcgcacacggcagccggattgcgaagcgcaccccctcggccccagccaaaagcatcgcagtttctaatcgtttggagagcacacaagaatgtcgttcgtgcagctctctggtgctggagtcgctgcagtggccttcacgaacaagagcctagtctctcggcacgcagcgctacgggtctgctcgtcgaggcgctcgatccgtagcctggtcgttaaggctgcaactgtcgtcaccccaaagtacacttcactgaagcctctgggagatagggtgcttgtgaagctcggtgccgcagaggagaagacagttggtggcattttgcttccatctactgcccagactaaacccacaggaggtgaggttgttgctgttggagc

SEQ ID NO: 100983 - DNA, 411 bp, Zea mays
cccacgcgtccggccgcctcaccgcctctctcaatctgataccgcagatccgtcgtccggtgagtggaagccgcacgaacccatggcctccggcgagcttgcctgcacctacgccgctctcatcctcagcgacgatggcatcgccatcaccgccgagaagatcgccacgatcgtgaaggcggccaacatcaaggtcgagtcctactggccggccctcttcgccaagctcctggagaagcgcaacgtcgaggacctcatcctctccgttggatctggtggcggagctgctccagttgctgctgccgcacctgctggtggtgctgcggctgctgctgccccggctgtcgaggagaagaaggaagaggccaaggaagagtctgatgacgacatgggcttcagcctgttcgactg

SEQ ID NO: 100984 - DNA, 453 bp, Zea mays
  unsure (1)..(453): unsure at all n locations
ggcgcctccgaggaggtgaagcagctggaggaccaggcggcggccatcatgaaggcggcgcgcgccgagatcgcggcggcgcttaacaagatgaagaaggagaccaccgcggagctggaggccaagctggacgaggggcgcagccgtgtggaggccgagctcgtagaggcgctcgccaacctcgaggcgcagaaggaggaggctgttaaggcgctcgacgcccagatcgcctcgctcagtgatgagatcgtcaagaaggtgctcccatccgcgtgatgaaaccaaaccggccctgccttatcctacgactatagttacatgaacatcataaattaatgataattgtgaagaaattggccgatgactccgacactgtactcatgaaagattattggatgggttgtgtccaccgnctgtgttgggtgtggatgggtgtagactcgcagtgatctt

SEQ ID NO: 100985 - DNA, 428 bp, Zea mays
gtgaagcacgagcagaagcttgactgcggtggtggctacgtcaagttgctgggtggtgatgtagaccagaagaaatttggtggagacacatcttacagcattatgtttggaccagatatctgtgggtacagcaccaagaaggttcacactatcctgaccaaggatggcaagaaccacttgatcaagaaggatgtgccttgtgagactgatcagttgactcatgtttacactttgatcatccgtcctgatgcaacatacagcattctcattgataatgaagagaagcaaactggcagcatctacgagcactgggatattcttccccctaagaaaatcaaggacccagaggctaagaagcctgaggactgggatgacaaggagtacattcctgaccctgaggacaagaagccagagggctatgatgatat

SEQ ID NO: 100986 - DNA, 352 bp, Zea mays
gtggcggcgagcgcgggcggggcggcggcgcagcagtgcagcgcggcgcagctggcggcgtgcgccccggcgatcatcagcgggtcgccgcccacggcgtcgtgctgctccaacctgcgcgcgcaggagccgtgcttctgccagtacgcgcgcaacccggcgtacagcagctacatcaacagccccaacgcccgccgcacgctcacctgctgcggcatcgccgtcccgagctgctagggcgctagctcgtgcctcgtggtgtggatgaataaaaagatgcatgtcgatctctgcttactgttatcgtatctgtagtacctcgtgtgatatgaacaatatgtattatttaaaa

SEQ ID NO: 100987 - DNA, 332 bp, Zea mays
acgacaccaagtcgaggagctcgagggctccaatcatggccggcgtgaagtccatcgtggtcgggctcaagcccgccgcggcagtgccgcaggccgtcgtcggctcatcgtcggcgaagcggttgcagctggccgcgcccgagggccgacgcgccgctctgctcggcttggcggtcgtcttcgacgtcacggccaccatcgggtcggccaaggccacgatcttcgatgagtacctcgagaagagcaaggccaacatggagctgaacgacaagaagaggctggccaccagtggcgccaactttgcgcgcgcctacaccgtggagttcggcagc

SEQ ID NO: 100988 - DNA, 383 bp, Zea mays
  unsure (1)..(383): unsure at all n locations
cccacgcgtccgcccacgcgtccgcggacgcgtggggtcgtcgttcgccgtggcaacggtcccgtcgctggcggccccggcggccaagaagcggtccggcggcgtcacgtacgtggagggcatgaacgcctacagcggcctcaaggggctcaacaaggtgaacatgctcggggtgcgcaagaccgccgactactccttcgccaaggtcgtggcgtcgctcagccccgcgggcaggaagcggcgcggcggcgcgttcggcgcccagatgaacgacgccgtcgagatcttcaggatcgccgtcaccatgaacggnctcgtgctcgtcggcgtcgccgtcgggttcgtgctgctccgggtggaggccgccgtcaaggattccgagt

SEQ ID NO: 100989 - DNA, 438 bp, Zea mays
gataacgacaggaaacctggtctccctgtcggagcagcagattctagactgcgacgagtcagacgggaaccagggctgcaacggtggctacatggacaacgccttccagtacgtcatcaacaatggcggcgtcaccactgaggacgcctacccttactctgcagtccaagggacgtgccaaaacttccagccagccgccaccatcagcggcttccaggacctgcccagcggcgacgagaacgcgctcgccaacgcagtcgccaaccagccggtgtctgttggcgtcgacggcggatcgagtcctttccagttttaccagggtggcatatacgacggggatggctgtggcacggacatgaaccatgcagtgaccgcgatcggctacggcgccgatgaccagggaagccagtactggatcctcaagaactcctggggcac

SEQ ID NO: 100990 - DNA, 360 bp, Zea mays
cccacgcgtccgagattgagaagtctaccttcagcatcttcccacttcaaaacgtctggatgcgcaaggtgaagatactcaaggcccccaagttcgatcttgggaagctcatggaggttcatggcgactacaaagaggatgttggtgtgaagcttgagaggcctgtcgagggagatgaggctgtgcaggaggttgctgctgccgagtagtttgtttgctacttctatatctaggctgagtctggacatgaggttgcttatgacgtgaacttagagttgtctacttgttttcatccgcccctaagattttgtctggaaacaagtttaaaattaagattattctcaacaagtgtttaagatt

SEQ ID NO: 100991 - DNA, 354 bp, Zea mays
gccgacgaccctgaggccttcgcggagctcaaggtgaaggagctcaagaacgggcgcgtcgccatgttctccatgttcgggttcttcgtccaggccatcgtcaccggcaagggcccgctcgagaacctcgccgaccacctcgccgaccccgtcaacaacaacgcatgggcctatgccaccaactttgtgcccggcaagtgagggggtggaggcgccaccgtccaccggccaccgctgcggatatctaggtgttcggatgcacgtgagcgcgcactggttccagtttgtaccatgatgtaaattacttaccgtaccagggttcaatcggcaaggaagaattgttgtgttcaaaaa

SEQ ID NO: 100992 - DNA, 427 bp, Zea mays
  unsure (1)..(427): unsure at all n locations
gccgatttgagagaaaaggctataagcttgttgccatcaagctgattgttccatccagagaatttgctgagaagcactaccatgatctcaaggaaaggcctttcttcagtgggttgtgtgattttctcagctctggccctgtgcttgcaatggtttgggaaggagagggtgtcatcaagtatgggagaaaactaattggtgccacagacccacagaaatctgaaccaggaaccatcaggggtgatcttgccattgttgttggaagaaacatcattcatggaagtgatggcccagagacagcgaaggatgagatcgctttatggtttgaacccaaggagctggtctcttacaccagcaatgcggagaagtggatctatggngtgaattaacgagagagtcaatctggttnttttccttcttttgatct

SEQ ID NO: 100993 - DNA, 444 bp, Zea mays
cggacgcgtgggcgctcggcgcgcgccttgtcgagcgcgcggagtttccgatcgggttcatgggcggtttctgtgtttctgccgcgcgacttggcttgcctgatgttggcctcatttcctatggagaaatggtagatcaagggcgtctcatcaatgaagctgtttcaatcccagtgattggtgatggagacaatggttacggaaactctatgaatatcaagagaaccataaaaggatatatcaatgctggttttgctggaattatgcttgaggatcaggtggcacctaaagcatgtggacatactgaaagaaggaaagtcatatcaagggaggaagctgtcatgcacataaaagctgctgtagatgctaggaaagagagtggctctgacattggtattgtagcaaggacagattctcgccaagctatttctcatgatgaagcat

SEQ ID NO: 100994 - DNA, 393 bp, Zea mays
gacgtggtctacaatgcatcaaacactgagcttgtgaggacacaaacccttgtgaagagtggcattgtgcaagttgatgctgccccattcaagcagtggtacctcactcactatggagttgacattggtaggaagaagaaaacccctgctgcaaagaatgataatgctgacggacaagaggttgaggcagcagctgatgaaacgaaaaagagcaaccatgtcacgaggaagcttgaaaagcgcaaggagggacgtacccttgacccacacattgaggagcaatttggcagtggacggctgctggcatgcatttcttcccgccctggacagtgtggccgtgctgatgggtacatacttgagggtaaagagcttgagttctacatgaagaagcta

SEQ ID NO: 100995 - DNA, 413 bp, Zea mays
cggcctgtaggcgatcgtgaggagcggagccgtggacgtggtggtgcccggggtgctggcgatcggctgcttccccatctacctcaccctctacggcacctccaacgccggcgactacgaccgcgacggctgcctccgcggctacgacggcctctcctcctaccacaacgcgctgctgccgcagagcactgtccggcctgcagaggacgtacgcgcacgcccggatcatgtacgccgacttctacacccaggtcacccacatgatccgggccccttacaacttcgggctcaagtactgcctcaaggtctgctgctgcgccagctggcagggccaggacggctacagcaacgaggcgcggtgcggcatggccggtgccagcgcctgcgccgacccgggcaactacctcatctgg

SEQ ID NO: 100996 - DNA, 229 bp, Zea mays
  unsure (1)..(229): unsure at all n locations
tcgacccgcatcttaccccgagcggcaagctgtcgaacccgcttcggcgctcgaccgacgacctccgaggggccttcgccgagcctcaaggtcaaggggagctcaagaaccggccgactcgccatggttctccatgtntcgggattcttcgtccagagccatcgtcaccgggaaggggcccgctcgagaacctcgctgaccacattggcgaccccgtcaacaacaacgc

SEQ ID NO: 100997 - DNA, 401 bp, Zea mays
taccggtctggaatcacgcgtccgaccaagcaggcgcaggatggcgtggcgactgcggtcgcgacggaggcgccagcgtcggggaaggagtgcttcggggtctgctgcaccacctacgacctcaaggcggaggacaagaccaagtcgtggaagaagctagtgaatgttgctgtgtcaggcgcggccgggatgatatcaaatcacctgctgttcaaactcgcttctggtgaggttttcggacaagaccaaccaatagcacttaagctactcggctcagaaagatcgtttcaggccctcgaaggtgtagctatgggactggaggactcgctgtatccactgctgagggaagtcagcattggcatagatccttacgtagtctttcaagatgtagaatgggccct

SEQ ID NO: 100998 - DNA, 170 bp, Zea mays
  unsure (1)..(170): unsure at all n locations
attggagctggtcgcattggctccgnctatgcacgcatgatgattggcgggttcaagatggacctcatgtactacgacctggattaggccacacgtcttgagaatttcgtcacagcatatgggcaggtccttaaagccaacggtgaagaacctgtcacctggaaaaaggc

SEQ ID NO: 100999 - DNA, 393 bp, Zea mays
ggatctcgcaggtgaacatcgagggcttcggttgcgggcgggcgctgccagacgcaggcgggcgcaaggtgtactggcgcgccgacccagactacgccatgagcgtccgccacgggaaggtggtgctggcaccggctaaccccaaggacgagtaccatcactggctcaatgacatgcggtggagcaccagcatcaaggacgaggaaggttacccggcgttctgactggtgaacaaggccaccgcagaggccatcaagcactcgctggggcagtcccacccgatgcgcctggtgccctacaacccggacttactggactagtccgtgctcgtgacggagagcacgcgacgtctacaacagctttcgctgcgtacgcatgggcaacaacatctac

SEQ ID NO: 101000 - DNA, 424 bp, Zea mays
ctcgctcattaaaggaacagtatttatgactacctcaaatggtgcatatatcgacatgcaatccaagtctactgcttttttgcccttagatgaggcatgtcttcttgatatcgataatgttgaagaggctggcattcgtcctgggttagtagaagaattcatgataattgatgagaacccaggtgatgaaactttgattctaagtttgcaagcaattcagcaagaacttgcatgggaaaggtgccggcaacttcaggccgaagatgtcgttgtcacgggtaaagtaattggtggaaacaaaggaggtgtagtagctcttgtggatgggcttaagggtttcgttccattttcgcaagtgtcatcgaaaacaaccgccgaagagctgcttgagaaagaatgcctctgaagtttgtaaaggtcgatg

SEQ ID NO: 101001 - DNA, 434 bp, Zea mays
cccacgcgtccgaggacctttacatcaacggtgctatccagctggatgttgccgggagcaggaaggctgttgtgatccacgtcccataccgcttgcgtaaggccttcaggaagatccatgtcaggatcgtcagggagctggagaagaaattcagcggcaaggatgtggtaattgttgccacaaggaggatcgtgaggccgcccaagaagggttcagctgttcagcgccctcgcaccaggactctgactgctgtccatgatggcatcctggaggatgttgtcttcccagctgagattgtggggaagcgtgtcaggtaccgtctggatggtgccaagatcatcaagatcttcttggacccaaaggagaggaacaacacagaatacaagctggacacctacactacggtctaccgcaggctgtgtgggaaagatgtg

SEQ ID NO: 101002 - DNA, 442 bp, Zea mays
gcggtcgacgatcgggctggacaagtcggacccgagcgtggccgacgcggtggcggagctccgggacctgtccaactcgtgggtggccaagtaccggcgggagaagtcgctgctggggcgtccgtcgttccgggagatgtactcggcgctcaacgccgtgtcgggccactacatcagcttcggccccacggcgcccatcccggccaagcgccgcgcccgcatcctcgaggagatggacaccgccgagaaggcgctccaacggggcaggtaggccaaatcccagcgaagctggcccgttgcaggaacgcgagtgcccagctcggcgacaacgctaccattttgtttttgtaactactgcgatgcattcgtcgtcgttgttttcgcggctgggagcgtgtgttgtgactgtggagtaaaaagttaccgagcttttgagctgagt

SEQ ID NO: 101003 - DNA, 342 bp, Zea mays
  unsure (1)..(342): unsure at all n locations
cccacgcgtgcgtgtcaacaaagtttagtcacatcggctactgcaangttaagtgaagacattgtcaaccaatgtgtaaatcccatcttgaaaggataatcttctacaacaagagtcactaagcttgctgcattggcagctctatgtgcacaatacgaatcagagttcatgcccaacatgagcatcgttgttaaagcgctttcgcctctccttcaacaaagacctgcaccaaccaccgaatagccagctccacaacctgggagctcataccattcacatgtccatgcacccctaggcataagccatctccgaaaccattcaatcagcacattctataaatca

SEQ ID NO: 101004 - DNA, 402 bp, Zea mays
  unsure (1)..(402): unsure at all n locations
cggacgcgtgggctcacgagcgattgcggttgcggaagtaagaggcgatggngcactccggcgtgtggaactcgcaccccaagaactacgggccccgatcccgcgtctggcgggtctgtgcgaaccctcatggactgatcaagaagtacgggctgatgtgctgcaagcagtgcttccgcagcaacgccaaggacattggcttcatcaagtaccgctgaagtcagctgggcgggctatctgaatgccatctcttggacagtgtagtagaggcgatgccacaattttaattactgtcatttagatgttcccttcagaactctgctatntaagtccgccatgtttgtgatggagaacttaagctntgnttgntatactgattatgagttacctgtgctttgctta

SEQ ID NO: 101005 - DNA, 417 bp, Zea mays
  unsure (1)..(417): unsure at all n locations
atctattctccagtccacccattccattccactacccactcccagaatttacgcgaacgcacacgcacccacacgacacatccagatgatgcttagggtttccccgtccccggccgccgcggtgccaacccagctctccggtgcgcccgcgacccctgctcccgtcgtcagggtggcggcgccgcgcggcgtcgcctcgccggccgctggcgccgcgtgcagggccgcgggcaaggggaaggaggtgctcagtggggtcgtgttccagcccttcgaggagatcaagggggagctcgccctcgtgccccagtcccctgacaagtcgctcgcgcgccacaagttcgtcgatgactgcgagggcgncctcaacgagcagatcaacgtggagtacaacgcctcgtatgcataccactccct

SEQ ID NO: 101006 - DNA, 393 bp, Zea mays
gcctcactggcctcgacatgaacaaagtttttatcttcgtcaagactaatgctgatgggggcgcatcatgtgtcaaggacgtgacgaagctctatgtcatctctgaaatcatccccgagatggagatctgcgattctgactcccaaccctgtggctactccatgaatgcgatccatggctctgcattctccacaatccatgtgacgcccgaggtcggtttcagctacaccagttacgaggttatggacttggatgccactgctctgacgtatggcgaccttgtcaagagggtccttcggtgctttggcccctcagagttttacgatgtcgtgaccatctctcacgagagttgccatgcctggacatggggaaaggcacttggtgcccaggtct

SEQ ID NO: 101007 - DNA, 428 bp, Zea mays
cccacgcgtccgacactaacgaacgaactcttgctccgatcacgagctagctgaggtcgaggatggcggctgtgctgaacagcacgaagacgccgcaggtggtggccgtgctggtggtggtggcgctgctggcttcgtccgcgtcggcggcgatcacctgctggcaggtggggtcgtcgctggcgccgtgcataccgtacgcgacggggagggccagcgcgcttcccgcgtcgtgctgcatcggcgtcaagagcctcaacagcgcggcgcggaccaacgcggaccggcaggcggtgtgccgctgtctcaagagcctcgtcaacagcgtcaagagcgtctacatgggcaccgtcgccaccatgcacggcaagtgcggcagttccgtcagattccccatcagcatgtacaccgactgcaacaagatcagc

SEQ ID NO: 101008 - DNA, 303 bp, Zea mays
cccacgcgtccgctcgattacaaactgtgtactatgttaatgtaatgacatagtttgggtgatacagatcgtagtgatgttggttgaagctgtttgtatgaactgtttcctactatcttgtatgaattatgatgtctgatgtagtttgtatgaactatgtcatattatgttgaatgaagctattgcatgcccttaaaatgtaacacccgacgtctagttgaatctctccagttacgaggttatgggcttggatgccactggtctgtcttatggtgaccttgtcaagagggtgcttctgtgctt

SEQ ID NO: 101009 - DNA, 447 bp, Zea mays
  unsure (1)..(447): unsure at all n locations
gccgagtcgaagaaggagctngatgcgcttcttgcagatgactcccttgcaaacgttccggtcctcatggtgggcaacaagattgacatgccatacgcggcttcagaggaggagctgaggtactacctcggcctgagcaacttcacaaccgggaagggcaacgtgaacttggccgactccaacgtccgccccctggagatcttcatgtgcagtgtggtgcgcaagatgggctatggcgaaggcttcaaatggatgtctcagtacatcaagtgagtcgctgctgtcctcttttgtccatggcgctgctgctttcgcaggagggttgaaatcaagtctggtcgtgacatggcagctgcatggaaaggtttatggtagctagtgataggcaaagcttgtaagtcggtgttaatcctagatatgtgatgtggggtctactttctcttctga

SEQ ID NO: 101010 - DNA, 465 bp, Zea mays
cccacgcgtccggtttcattgattcttgaagagatcgagcttcttttgcaccacaaggtggaggatgtcgtgcaactgcggatcaagctgcggctgcggctcaagctgcaagtgcggcaagaagtaccctgacctggaggagacgagcaccgccgcgcaggccaccgtcgtcctcggcgtggccccggagaagaaggccgcgcccgagttcgtcgaggccgcggcggagtccggcgaggccgcccacggctgcagctgcggtggcaactgcaagtgcgacccctgcaactgctgatcacatcgatcgacgaccatggatatgattattatctatctagcttgtggtggtggttgaacaataataagcgaggccgagctggctgccatacataggtattgtgtggtgtgtgtgagagagagagaaacagagttcttcagtttgctatctctctctgcaatgttttt

SEQ ID NO: 101011 - DNA, 289 bp, Zea mays
  unsure (1)..(289): unsure at all n locations
cccacgcgtccgnccacgcgtccggccactcgtccggccacgcgttcggccacgccttcggccacgcgggcgggttaatcgggccggcggcggcggcgaaacagcacatcgctcttttgatctcagccattgccgaagtggagcaaccccaggacgcggtgaagctcttcaaccggtggaccttcgacgatgtccaagtgaacgatatcttgctgaacgactacctggctgtgactgcggcgaaacacgcgacatttctggcggacttcgcggggcgctacttcaagaa

SEQ ID NO: 101012 - DNA, 309 bp, Zea mays
cccacgcgtccgccgagctgctctcccgcaacggcgtcaagttcggcgaggccgtctggtggaaggccggctcccagatcttcagcgagggcgggctggactacctgggcaaccccagcctgatccacgcgcagagcatcctcgccatctgggcctgccaggtcgtgctcatgggtgccgtcgagggctaccgcattgccggcgggccgctcggcgaggtcgtcgacccgctgtaccctggcggcagcttcgacccactaggtctggccgacaacatcgaggcctttgccgagctcaaggtgaaggagc

SEQ ID NO: 101013 - DNA, 451 bp, Zea mays
ttcccgggtcgcgccacgcgtccgggctaaggaaaagggtgtctcccttatgttgccaaccgatgttgtcatcgctgataaggttgctcctgatgctaacagccagattgttccagcatctgcaattcctgatggttggatggggctggatattggcccagattccattgctgcattcaacgcagccctggaaacaacccatactgtcatctggaacgggcccatgggtgtttttgaatatgacaagttcgctataggaactgaagctgtggcaaagaagttggcagaacttagccgcatgggtgtgacaactatcatcggaggtggagactctagtcccggctttgagaatgtctgagttgctgacgttatgagccacatttccaccggatgtggttccagcttggaaatgttggaaggtaaggagctttcaggagttactgcattggat

SEQ ID NO: 101014 - DNA, 432 bp, Zea mays
gcaggaggacaagtggtggttgccctgtccaagagtgccgcccaaggggctgtctgaggacgcgaggaggaagttgcagcaaagcagggattgtgcaaaccagatactcaaggcggccatggcgattaacagcgatgtgctcgccgagatggaaatccccgaagtgtacctggagacactgcccaagaacggtaaatcttgcttgggtgagataatttatcgatacataacagctgagcagttctcaccagaatgtctcctagattgcttggatctatcatccgagcaccacacacttgaagtggcaaacagaatagaaggtgccatccatgtttggaaactgaaaggccaaaaaaagtcgacacctcaagccaaatcaaagatatcttggggtggaaaagtgaagggtcttgttggagataaggagaagag

SEQ ID NO: 101015 - DNA, 423 bp, Zea mays
gagttcagcaaggtcggcttcgtgtaccgcgagaactccacctccccgtgctactacgacggccgctactggaccatgtggaagctgcccatgttcggctgcaacgacgccacccaggtgtacaaggagctgcaggaggccatcaaatcctacccggacgccttccaccgcgtcatcggcttcgacaacatcaagcagacgcagtgcgtcagcttcatcgcctacaagcccccgggcagcgactagaccgcgcccgccggccgccccccgccggctagctagctagctagctcctgcgtgagctagtagctagtgccatgcgtcgtctctgtcgttcggttttgcttccggtcaccgtgtaccctttgcttgcttgggttcttcttttcttttttccttttttttcttcttttccccggccat

SEQ ID NO: 101016 - DNA, 253 bp, Zea mays
cgactcaaaggtgaaaacgcaacactgttccagcaactttcagatgccaaccaacaggtcagtactgcagtcacagacaacagaatcctcaaatccgatgtagaagcgttaagaattaaagtaaatatggcagaggatatggtaccgagaagtgctgtatcgtgtggcctaggcgaccttggcctggcaccatacgtgaactcaaggaaaatgtgccaagctttgaatgtgctcacagggttggattaactag

SEQ ID NO: 101017 - DNA, 327 bp, Zea mays
gtgagcgcaggaggaagtctgtccgtgtttgcatcgtgagccaagacctatctgttagcaacttggtgattgtgaagaagggtgagaatgatctgcctggtctgactgacactgagaagccaaggatgaggggtcccaagagggcctccaagatcagaaagctgttcaaccttaacaaggatgatgatgtacgcaagtacgtgaacacataccgcaggacattcactaccaagaacggcaagaaggtcagcaaggcacctaagatccaacggcttgtgacacccttgacccttcagaggaagcgtgctagaatcgctgacaagaaga

SEQ ID NO: 101018 - DNA, 271 bp, Zea mays
ggcacgccgacctcaaggacgcgccctgttggcccaagatgcagaccgtggccgaactggtcaaggcctgcaccaccatcatctggatcgggtccgcgctccacgcggccgtcaaacttcggcagtacccgtacgccgggtaccttccgaaaccgccgtccgtcagccggaagccgatgccgacgccgggcagcgacgagtacgcggagcttgagcgcaagccggaaaaggtgttcgtgcgcaccatcaccagccagttccaggccctcgt

SEQ ID NO: 101019 - DNA, 368 bp, Zea mays
cacctccccgtgctactacgacggccgctactggaccatgtggaagctgcccatgtgcggctgcaacgacgccacccaggtgtacaaggagctgcaggaggccatcaaatcctacccggacgccttccaccgcgtcatcggcttcgacaacatcaagcagacgcagtgcgtcagcttcatcgcctacaagcccccgggcagcgactagaccgcgcccgccggccgccccccgccggctagctatagctcctgcgtgagctagtagctagctagtgccatgcgtcgtctctgtcgttcggttttgctttcgggtcaccgtaccctttgcttgctgggttcttccttccctttttcctttttttttcttt

SEQ ID NO: 101020 - DNA, 437 bp, Zea mays
gtgaattatgtgctgagacgggagccaaccaggaggatgccctcgcgcgaattgaaaggctttcagaagtaaacccgatgcttggcttccgtgggtgcaggcttggtatatcgtaccctgaattgacagagatgcaagcccgggccatttttgaagctgctatagcaatgaccaaccagggtgttcaagtgttcccagagataatggttcctcttgttggaacaccacaggaactggggcatcaagtgactcttatccgccaagttgctgagaaagtgttcgccaatgtgggcaagactatcgggtacaaagttggaacaatgattgagatccccagggcagctctggtggctgatgagatagcggagcaggctgaattcttctccttcggaacgaacgacctgacgcagatgacctttgggtacagcagggatgat

SEQ ID NO: 101021 - DNA, 433 bp, Zea mays
cccacgcgtccgcccacgcgtccgggaaaacagatctttgggagtgtcacggcacaggatgttgttgacataataaagtcacaacttaatagggatgtcgacaagaagctggtgacggttccagaaatccgtgaaatcggagagtatgttgcagagatcaagcttcacccagacgtgacagcgcgagtaaggctgaatgtctatgcgaaatgagctcagcagttacagaacctcgagtaatggactttggcgaagcctgatgtttgccagtgcagagattttgctgaaagtgccatgtgctgcggtagacatgatgcctgttctggccgtgacttgcctggttttgatacacaattcacttgctcactgcgcattctattccctatcatgtgaagtcaagttttcaacaattatatctgttgatttgaagtgg

SEQ ID NO: 101022 - DNA, 435 bp, Zea mays
caggaagcactggatgggatgacgattatgcttttgttgcctggaaggacagtcgtgggaactacaaggggcatatccaaaagcttagggctcaaaaagtgtctcattcgctctctgatcttgctgactccagttcagatctgcaagcattctcgcagggtctttctacgctattagataagatggatccctctcagagagcgaagtttgttcaggaagtcaagaaggtccttgattgatgataccaacacatccaacacaatgtgtgcatgtcacatctttttgttctagtacatacatagaaggatattgcttggtcttgattgatcatgtctgatttaagtcgactattatttcttggaattttcttttggacctggtgctatggttgatggatgtatattggatatgtgcgttctgccaagtgtaagcaca

SEQ ID NO: 101023 - DNA, 383 bp, Zea mays
gcagcacactcagctatccagcaaaagagatcgagacgcaggagtcatggccaccgtgagcgcggccgtggtgaccaccatcgttgcccgcgccgcgatcgccaggcccaatgctctagggctgcctgcgctgagggcgaggagcgagagggtgcggtgcagctacgccaaggacgcggccccagtcagcaccaagggcgcaggcgcgtcgctgctcgccgcagcgggcgcggtgaccgcgtctgcggggcccgcgctggcgctcgtggacgagcgcatgtccacggagggcaccgggctgagcctcgggctcagcaacaacctgctggggtggatccttctgggggtcttcggcctcatctggtgcctctacaccatctaca

SEQ ID NO: 101024 - DNA, 453 bp, Zea mays
cccacgcgtccgccatctagagctccctaactgcaccggccgccacaccaccgtacccggaccgctcgacaacaatggccaccgtcctaggcagcccccgcgcgccggccttcttcttctcgccgtcctccctccgtgccgcgccggcgcccaccgccgtggcgctgcctgcggccaaggtgggcatcatgggccgtagcgccagcagcaggggcaggctgcgcgcgcaggccacctacaacgtgaagctgatcacgccggagggggaggtggagctgcaggtgcccgacgacgtgtacatcctggaccaggccgaggaggacggcatcgacctgccctactcctgccgcgcggggtcctgctcctcctgcgccggcaaggtcgtctccggctccgtggaccaatccgaccagagctacctcgacgacggccagatcgccggcggctgggtgc

SEQ ID NO: 101025 - DNA, 404 bp, Zea mays
  unsure (1)..(404): unsure at all n locations
accggttcggaattcccgggctcatcgactgcgacacggacggcaacaacggctgcaacggcggcctcatggactacgccttctcctacatcgcacacaacggcggcctccacacggaggaggcctacccgtacctcatggaggaaggcacctgccagcgcagcagcagcagcgagaagaagtggccgggatcgtcggaggacgccaacgacgatgccgcggtggtcaccatctccgggtacgaggacgtgccgaggaacaacgagcaggcgctgctcaaagcgctggcgcaacagcccgtcagcgtcgccatcgaggccttcggcaggaacttccagttctacagcggcggcgtcttcgatgggccctgcggcacgcagctgggccacngggtagcggccgtc

SEQ ID NO: 101026 - DNA, 523 bp, Zea mays
  unsure (1)..(523): unsure at all n locations
ccggtctcggaanttcccgggctcgactccacgtccgtccgaaacgagtgatagctcaggaaccagtttgaatctttgtgggtgannaaagtgagccctgcagaatcgccgggggagaagcgtggcnncttgtgatctcatccatagngtgaagaaatttctagtagtccccttgggacctagtattnngattaagtgcctatcctnngtttataatcattcntnntcccagaccacggctttgagaatngctttttgactttggcttggcattcanngcttgtgatnncagagctgatagtnntcttcggtaccttccatcttcataatcannggatggnnttgatcaagtcagaattcatcttcagatgtttccaagactgaaaaaggaatttttggctctgtgtactnattagggaaattctttgagagattagncacttaaaattcctttgaatacaatccccttttctcgatgtacccttctatatataatcgtattgcttgattcatctacatgttt

SEQ ID NO: 101027 - DNA, 301 bp, Zea mays
accgtcgtcgctacgttccaggggctctaggacaccggcaggctccccgtcttccttcgctggtccataagcctcggcagcgtcagcaacgagatggaaggatccggtgcatgcatgtgtgtacgttctacggtaacaagaagttttagacgctgtcatacctgccggcgctttcgatagacgacctgctgaaccatgctgactacctgctgttcaacagttggataccctggcttgagttcaccaaggtcagcttcttgtaccgtcgagaacgttacctatattgagctactaccactgg

SEQ ID NO: 101028 - DNA, 406 bp, Zea mays
cccacgcgtccgcaccactccgcgctagctgaggacggtacagcggcacagaggtgcgacgtaggacgacgacgacgcaggcgccacacatggcatcccagctctccgccgccgtgccccggttccacggcctccggggctacgccgcgcccaggtccgcggtggcagcgctgccgtccgtgagggtgggcaggaagaggtcgtcgtcgcagggcatccgctgcgactacatcggctccgccaccaacctgatcatggtgacgacgacgacgctgatgctgttcgcggggcggttcgggctggcgccgtcggcgaaccgcaaggggacggcggggctgaagctggaagcccgcgactccgggctgcagacgggtgaccccggccggttcaccctcggcgacacgct

SEQ ID NO: 101029 - DNA, 414 bp, Zea mays
cgaacttttggagaaatgccacccattgtgcatgtttgacagcattgcatcacttgctgttgctcaaaacatgcgtgagctttatagattggttctagtcgatacaccactggccccttacttctcagagtgcattacatctgaggatttggatgacatgaatattgagattatgaggaacactctctacaaagcatatcttgaggacttctacaaattttgccagaaactaggtggtgcaacagctgagatcatgtgtgatctcctttcatttgaagctgacagaagagctgttaacattacaataaatagtattggtactgagttgacaagagatgaccgcaagaagctgtactccaactttggtttattgtatccatatggccacgaagaattggccgtttgtgaagatgt

SEQ ID NO: 101030 - DNA, 459 bp, Zea mays
  unsure (1)..(459): unsure at all n locations
gcgagaacggccgcataggtcttgcatttgatgtaatgggtcgtgtgccatacggaagatcatttctagatgaacaggccaaagaaaggtccatggacattaacctaggatggttcttggagcctgtggttcgtggtgactaccccttctcaatgagatcgttagcgagggaacgactacccttcttcagtgacaaacagcaagagaagcttgtgggatcctataacatgttgggaataaactactacacctcaatattctccaaacatatcgacatctcaccaaaatactcgcctgttctcaacactgacgacgcctacgctagtcaagaaacgtatgggcctgacgggaaacccattggtcctcctatgggaaatccgtggatctacttatacccagaaggcctaaaagatatccttatgatcatgaagaacanatatgggaacccacctatctaca

SEQ ID NO: 101031 - DNA, 453 bp, Zea mays
cccacgcgtccggccctcaccaagaggacacaagatggtgggacagaggtggttgaaggaaaggcgggaaaaggctctgcaacgttgtccatggcatatgctggtgctgtttttgcagatgcatgtttgaagggtctgaatggagttccagacattgtagagtgctcttttgtgcaatcaactgtgacagagttgccattctttgcctctaaggttcggctcggcaagaatggagtggaggaagtgcttggtctgggtgagctcaacgagttcgagaagaaggggctggaaaacctcaagggccaactcaagtcttccatcgacaagggtatcaagtttggccacgggaactaggcaccttgcgtccttgcccggcttctaacaattgatgcccccccttgcatttttgtttgactgcctatttttcctgccccccgtatggttggggcaatg

SEQ ID NO: 101032 - DNA, 391 bp, Zea mays
  unsure (1)..(391): unsure at all n locations
cccacgcgtccgtcgacgctgcacctggtgctccgcctcaggggaggcgccaagaagcgcgagaagaagacgtacaccaagcccaagaagatcaagcacaagcacaagaaggtgaagctggccgtgctccagttctacaaggttgacgacgccaccggcaaggtcacccgcctccgcaaggagtgccccaacgccgagtgcggcgcgggggtcttcatggccaaccacttcgaccgccactactgcggtaagtgtggcctcacctacgtctacaaccagcaagcgtaagatgcccctnctttctggtgggaaagaaaatgggaagtcttgctaagtgataatcctttttggtttggtttggtttggtggaatggtaggaagttcttggaac

SEQ ID NO: 101033 - DNA, 404 bp, Zea mays
  unsure (1)..(404): unsure at all n locations
gagccgnacgtcgggaggggcctgctcaacaccaggatcaccggcgaccaagcgcccggggagaggtggcacatggtcttcagcacagaaggcgaggtcccctacagagagggccagtccatcggcgtcatcgcggatggcgaggacaagaacggcaagccgcacaagctcaggctctactccatcgccagcagcgccctcggagatttcggcgactccaagacggtgtcgctgtgcgtgaagaggctggtctacaccaacgatcagggggaggtcgtcaaaggagtctgctcgaacttcctctgggacttgaagccaggcgctgaagtgaagatcacagggccagtgggcaaggagatgctcatgcccaaagaccccaacgcaacaatcatcatgctcgcaac

SEQ ID NO: 101034 - DNA, 465 bp, Zea mays
ggccaccgtcctaggcagcccccgcgcgccggccttcttcttctcgccgtcctccctgcgtgccgcgccggcgcccaccgccgtggcgctgcctgcggccaaggtgggcatcatgggccgtagcgccagcagcaggggcaggctgcgcgcgcaggccacctacaacgtgaagctgatcacgccggagggggaggtggagctgcaggtgcccgacgacgtgtacatcctggaccaggccgaggaggacggcatcgacctgccctactcctgccgcgcggggtcctgctcctcctgcgccggcaaggtcgtctccggctccgtggaccagtccgaccagagctacctcgacgacggccagatcgccggcggctgggtgctcacctgccacgcctaccccacctctgacgtcgtcatcgagacgcacaaagaggaggagctcaccggcgcataatcattcatgcccat

SEQ ID NO: 101035 - DNA, 461 bp, Zea mays
cgcagttccatcttccgctcactcccttcatcgcgctcggcacacaggcgacggcgggggagctcatgctagggctctcagcgaaggcatcagctgcttcccctcccgcctctcgccaatcgcctcccgtcctccgcacaccggccggtgatcctgcgtcttttcattcgtaaatcatactccaggtatctgcatcgcaggggaaatggcaagcaaagcaggtggtgatggcaaagaagccataaacgagcaagtagttgccaacacttatgccaacatgcgtaccgaaatgaaccagctctataccaagatcacagagctggagatggaggtcagtgagcactccctcgtgattggtgcgatcgagccgctggacccctcaaggcgctgttacaggatgattggtggggtcctggttgaaaggaccatcaaggaaagcctgcctgctgtgaagcgcaaca

SEQ ID NO: 101036 - DNA, 451 bp, Zea mays
cccacgcgtccgaattgcgactcagagaggaagtagtgtgggtgatgctggaggcgcgggtgatagagtgcttaatcagctactgaccgagatggatggcatgaacgccaagaaaactgtgtttattattggtgctacaaacaggcctgacatcattgatcctgctcttctgaggccagggcgtcttgaccagctgatctacattccactgcctgatgagcagtctaggctccagatcttcaaggcctgcctaaggaagtcccctgtggcaaaggatgtggacctgaatgctcttgctaagtacacacaagggttcagtggagcagatatcacagaaatttgccagcgtgcgtgcaaatatgcaatcagagagaacattgaaaaagacattgaaagggaaaggcggatgaaagacaaccctgatgcgatggatgaagatgaagtggacgag

SEQ ID NO: 101037 - DNA, 344 bp, Zea mays
ggccgcactgtttgacttcaacctgacgctcccggcgatcgcgaccgagttcctgctggtcatggtggcgctggacaagctctacttcacgccgctaggcaagttcatggatgagcgggacgccaagatccgcggtgagctcggcgatgtcaagggcgcctccgaggaggtgaagcagctggaggaccaggcggcggccatcatgaaggcggcgcgcgccgagatcgcggcggcgcttaacaagatgaagaaggagaccaccgcggagctggaggccaagctggacgaggggcgcagccgtgtggaagccgagctcgtagaggcgctcgccaacctcgaagcgc

SEQ ID NO: 101038 - DNA, 414 bp, Zea mays
ccgccctgctgcacgggaaccgcgcctccggccggacgccgctggactgggagacgcggtcggcgatcgcgctggcggcggctcgcggcgtggcgcacatccactccacggggcccacggcgtcgcacggcaacatcaagtcctccaacgtccttctcaccaagaactacgaggcgcgcgtgtcggaccacggcctccccacgctcgtcggcccctccttctcgcccaccagggtgtccggctaccgcgcaccggaggtcaccgacatccgccgcgtctcgcagaaggccgacgtctacagcttcggcgtcctcctgctggagctgctcacggggaaggcgcccacgcacgccgtcgtcaacgaggaggggctcgacctgccgcgctgggtgcagtccgtcgtgcgggaggagt

SEQ ID NO: 101039 - DNA, 463 bp, Zea mays
gacttggtacaacccaaaatcaccattccttttggttcgcacaaccaaaaaattattgggaaggtctacaggaagataaaaaaatacggaattgtatcaagaactatatacaaaagaataggaaaaaaggctcgaatagaaaaatggaatcagactcaagttctgaagtaattacacatatagaaattcaaaaagaaatcgatacaatccacgtcataatccatattggattccccaacttattaaagaaaaagggagcaatcgaagaattagagaaagatctccaaaaggaagtaattctgtaaaccagagacttaatattgctatcgaaaaggttaaagaaccttatagacaacctaatattcttgcggaatatatagctttccaattaaaaaatagagtttcattccgaaaagcaatgaaaaaagctattgaattaactaaaaaagcggttataaaggga

SEQ ID NO: 101040 - DNA, 437 bp, Zea mays
cccacgcgtccgcggacgcgtgggtccaggggctcaagtccaccgccagcctccccatggcccgccgctcctccagaagcctcggcaacgtcagcaacggcggaaggatccggtgcatgcaggtgtggccggcctacggcaacaagaagttcgagacgctgtcgtacctgccgccgctgtcgacggacgacctgctgaagcaggtggactacctgctgcgcaacggctggataccctgcctcgagttcagcaaggtcggcttcgtgtaccgcgagaactccacctccccgtgctactacgacggccgctactggaccatgtggaagctgcccatgttcggctgcaacgacgccacccaggtgtacaaggagctgcaggaggccatcaaatcctacccggacgccttccaccgcgtcatcggcttcgacaacatcaag

SEQ ID NO: 101041 - DNA, 446 bp, Zea mays
  unsure (1)..(446): unsure at all n locations
gctgcacaagagctcagagaatctgggctctccgatgtcatcttccatcagctggacatgaccgacgctgcgagcgtcagtcggctggctgagttcctcaaggctcgttttggaaagctagatatcctggtaaataatgccgcagttggtgctgttgagtacgtccaagatcctgctgacagtgcaacgaaagaggaagagcccattgtcagccctagatatggaccaaaggcttcagtgcatgtttaagagagtccgggagacctacgacgctgcgacagaaggcatcaagacaaactactatggcataaagcatgtgatcgaagccttgctgcctctgcttcaagcttcctccgatgggaggatcgttaacgtctnctctgagttcggcctgctaaggctgatcaacaacgaggagctaaggcaggagctaaacgacgtggaga

SEQ ID NO: 101042 - DNA, 385 bp, Zea mays
cggaattccggtcgacccagcgttcgccagcgtccgcccacgcgtccgcggcgagctctctaagaggtcgggtggaactaccatggggccatcagggaacttgaggagaagaggaacgagaaggtcaaggttgcctacgagaggaagaagcaattggccaagctgcgtgtcaaggccgagaaggcagccgaggagaagttggggtctcagttggagattcttgcccctatcaagtactgaggagctgtgctttgtcatcagttttggggaacatctagtctttggtttaagtgttctgtaacagtttgtgacagtataatctggaaaaccgtgttataattctgccactgctatttgaacacattttctagctggagaatgaact

SEQ ID NO: 101043 - DNA, 395 bp, Zea mays
caccactccgcgctagctgaggacggtacagcggcacagaggtgcgacgtacgacgacgacggcgcaggcgccacacatggcatcccagctctccgccgccgtgccccggttccacggcctccggggctacgccgcgcccaggtccgcggtggcagcgctgccgtccgtgagggtgggcaggaagaggtcgtcgtcgcagggcatccgctgcgactacatcggctccgccaccaacctgatcatggtgacgacgacgacgctgatgctgttcgcggggcggttcgggctggcgccgtcggcgaaccggcaggcgacagctgggcttaagcctgaagcccccgacttccgcctgcaaacgggtgacccccgcgggttcaccctcggcgacacgctt

SEQ ID NO: 101044 - DNA, 462 bp, Zea mays
cccacgcgtccgagatgatgcttagggtttccgcgtctccggccgccgcggtggccaaccatgtctctggtggggccgcggcgaccacggctcctgccagggtgacggcgcagcgcagcggcgtctcgctgtccgccgccgccgccgccggcaaggggaaggaggtgctcagcggggtggtgttccagcccttcgaggagatcaagggggagctcgccctcgtgccccagtcccccgacaggtcgctcgcgcgccacaagttcgtcgacgactgcgaggcagccatcaacgagcagatcaatgtggagtacaacgcctcgtatgcgtaccactccctcttcgcctacttcgaccgcgacaacgtggccctcaaaggatttgccaagttcttcaaggaatccagcgacgaggagagggagcacgctgaaaagctcatggagtattagaacaaacgcggaggca

SEQ ID NO: 101045 - DNA, 372 bp, Zea mays
agcttcgaccccctcggcctggccgacgaccccgaggccttcgccgagctcaaggtgagggagctcaagaacggccgcctcgccatgttttccatgttcggcttcttcgtccaggccatcgtcaccggcaagggcccgctcgagaacctcgctgaccacatcgctgacccagtcaacaacaacgcatgggcctacgccaccaacttcgtccccggcaactaagctcaacggctatgctatgcaacttcattgtctttcggatcggagagggtgtacgtacgtggattgattgatgctgcgagatgcatgtgtgtcttttgtttcacgttgcattgcataggcaagtcgagatgatgagttggcgttgtacac

SEQ ID NO: 101046 - DNA, 446 bp, Zea mays
aaactccaaaggaggcccccaagccaaaggtggttgaggtaccagcagaagaggaagcagcaaagccaaagccaaagaatcctcttgacttgctgccaccaagcaagatggtccttgatgactggaagaggctatactcaaacacaaagaccaacttccgggaggttgccatcaaaggtttctgggacatgtatgacccagagggctactctctgtggttctgtgactacaagtacaatgacgagaacaccgtctcctttgtgaccctgaacaaggttggtggattcctgcagcggatggacctgtgccgcaagtacgcctttggcaagatgctcgtggtaggttctgagccacccttcaagctgaagggcctttggctcttccgtggccaggaggttcccaagtttgtaatggatgaggtctatgacatggagctctacgagtgg

SEQ ID NO: 101047 - DNA, 389 bp, Zea mays
cttggtgatcaggtaaaagctgtggaggtggcatgatgcgactggattcatgttgatgtcatggatgggcgctttgtggcaaacatcacaattggacccttggttgttgatgctctgcgtccagtgactgatcttccgttggatgtacatctgatgattgtggaacctgagcagcgagtccctgattttatcaaggcaggtgctgatattgatagtgtccactgtgaacagacatcgaccattcatttgcaccgaacagtcaatcagattaaaagtctatgagcaaaggcaggagttgttgtgaatccagcgactgcactcactgcaattgattacgttcttgatgatgatgacctggtgctgattatgtctgtgaatcctgggtttgg

SEQ ID NO: 101048 - DNA, 449 bp, Zea mays
  unsure (1)..(449): unsure at all n locations
ggaacataagggggagatgaaggttgtggtcaggacagttatttcactcaccaaggaggaggagaaagaactcaaggaaaccttgcaggatatccttggggaaaacaaaactattttggttgaacagaagattgactacagcatcatgggaggattagtgattgaattcgggcagaaggtgcttgatatctcaatcaggaacagggcgaagcaaatggaggcgttcttgaggcaaccacttgacttctaacagccttttggataaaagaagcatcatcggaatgcagaggctgtcctgttgaaggttttcctgtgtctgcaattttaatctgtccttttgaataaaatgtttcctctaacaagtgaagggcactgtttntattgtctcgtgggccacagatgcctgctgaacaatttatgttcatttcttcttttcttaaagaagcatg

SEQ ID NO: 101049 - DNA, 354 bp, Zea mays
  unsure (1)..(354): unsure at all n locations
atggagacatgctcacaatctggtgaccgcgaattgtcagaggacttgcttgtctattggattgagcagggtaagaaagaatgcttcgcttcttgcctcttcatttgctatgacctgatccgaccggatgtcgctcttgagcttgcatggatgaacaacatgatggactttgccttcccgtacctgttgcagttcattcgtgaatacactagcaaggtggatgatttagtgaaggacaagattgagtcgcagaaggaagaaagagccaaagagaaggaggagaaagaccttgtggctcagcagaacatgtatgcacagctgcttcctctcgctttgcccgccccgncaatgcct

SEQ ID NO: 101050 - DNA, 358 bp, Zea mays
cggacgcgtgggtatccttctatccccattcccatcccgagacaggagaaggcaaggatgctgctcctgagctcccccttcgtgtccgtgtcgccgccgccgccgccgctcagctcccatggcgctcgcccggcgctgcggatcgaggcggccaggcagctgacggggcgggtggtgacgaccaaggcggacaagacggtcggggtggaggtggtgcgcctggctccacaccccaagtacaagcgccgggagcgcatcaagaagaagtaccaggcgcacgaccccgacaaccagttcaaggtcggcgacgtcgtcgagctccaacccttccgtgccatcttcaagaccaagcactttc

SEQ ID NO: 101051 - DNA, 348 bp, Zea mays
cccacgcgtccgcccacgcgtccggcacccttttgcggcttgcagctaaagtcgatgcgatcaaggatacactggagaacgatgagcagaaggttggagctgaaatagtaaggagggccctgagctacccacttaaattgattgctaaaaatgccggtgtcaatggcagcgtcgtcactgagaaggtcctttctaacgataacttcaagtatggttacaatgctgctactggacagtacgaggacttgatggctgctggtatcattgatcctacgaaggtttgtggccctaaagcttttcctatccttctgcttgaatactatagttagttggcttggaacttcggtc

SEQ ID NO: 101052 - DNA, 468 bp, Zea mays
  unsure (1)..(468): unsure at all n locations
ccgcgtgcgaaccaagcagaccacaacaagaagaagcgtagncgtcgccggaaggaaaggcgcggagcaagatgtcgtggcaggcgtacgtcgacgagcacctgatgtgcgagatcgaaggacagcatctcagcgccgccgccatcgtcggtcacgacggcagcgtttgggcgcagtccgagagcttccccgagttaaagcctgaggaggttgctggtatcataaaggactttgatgaacctggtactcttgcaccaactggtcttttcgttggaggtacaaagtacatggtgatccaaggtgaacctggagttgtcatccgaggaaagaagggcactgggggcattactatcaagaaaaccggcatgtccttgattattggtgtctacgacgagccaatgactccagggcaatgcaacatggtggtggataagctcggcgattacctgatcgagcaaggcttcttaa

SEQ ID NO: 101053 - DNA, 467 bp, Zea mays
cccacgcgtccgtggactacctcgggaacccgagcctcatccacgcgcagagcatcctggccatctgggcctgccaggtcgtgctcatgggcgccgtcgagggctaccgcatcgccggcggcccgctcggcgaggtcgtcgacccgctctaccccggcggcagcttcgacccgctcggcctcgccgacgaccccgaggccttcgccgagctcaaggtcaaggagctcaagaacggccgcctcgccatgttctccatgttcggattcttcgtccaggccatcgtcaccgggaaggggccgctcgagaaccttgctgaccacattgccgaccccgtcaacaacaacgcttgggcctacgccaccaacttcgtccccggcaagtgaaggaagcgccggcggtgacctttaggtgtccggatgcatttgagcgcacgcctggtttcggtttgtaccatgatggtaactatt

SEQ ID NO: 101054 - DNA, 468 bp, Zea mays
  unsure (1)..(468): unsure at all n locations
cgaggcggggatgacgagcccaatggtggccaccccggtccagttccacacaaccgggcgcctcagcttctgctccttttcctttcccagcgcatcagggaggcggcgattcgcggcggtgagggcgtccgcggagacgatggcgacggagaagctgggcatcaaggtggagcgcaacccgcccgagtcccgtctctccgagctcggcgtccgccagtggcccaagtgggggtgcgagaagagcaagttcccgtggacctactccgccaaggagacgtgctacctgctgcaggggaaggtgaaggtgtaccccgaaggccacggngaggagttcgtggagatcggcgcgggagaccttgtcgtcttccccaagggcatgagctgcacctgggacgtcgccgaggccgtcgacaagcactacaacttcgagtagccgccgtcgncgactagccctgcggggctcgatgt

SEQ ID NO: 101055 - DNA, 313 bp, Zea mays
actgcacagtgcaaaactgtatcaagttttcaggacctttggctacaacctcagttgccgctaatgcaaaatttgaaattagaagccccaagcgtgtgcagatcaaatttgatgaagggattgttggtacaccacagttgaccgactccattgtgctaccagagaagtttgagttatttggacagaacatcgacctgagtccactgaaaggcatattttcttccatcgaaaatgcagcatcctcggttgcaaagaccatatctgagcagcctccgctgaaaataccgatcaggacaaacaatgctgaatcgtg

SEQ ID NO: 101056 - DNA, 466 bp, Zea mays
  unsure (1)..(466): unsure at all n locations
ctcaaaaaagagttctgctgcaatggtactgtagtccaggatccagagctaggccagggcattcaactgcaaggtgatcagcgtaaaaatgtcgctacttttctagtccaggccggaatcgtgaaaaaagatagcatcaagattcacggattttagactgcaaatttgaagtgcttgtgtgtgcctatcatatgataccatatgataccaggtattgaagcttcggaagcttgttggccttcgtaacatcagtagtcgttattcatctgaatatgtgtcattatttcatttgataagactggtattgatgcaagttgtccttgcagtatgttttgtaagtgttacctgcatgaaagtatcgtttgtctgcggagctgtctgctactgatattgaataacaagagagattgcntgttgtaattcgtctatgaattattatgaactttccccagacttgagctttaca

SEQ ID NO: 101057 - DNA, 323 bp, Zea mays
  unsure (1)..(323): unsure at all n locations
cttacggaccgtacggcagggacgagggcaccccgttccgtgtcaaggtgatgaacaacggccacgtcgctggcttctttggccgctctggagattgcctggacgcgatcgggctctacgtgaaccccaactaataactaaaacgatggatcggatcatctgcatgcatgcatatgcagtatgcatgctgcttgcctgcctgtaacgaatatgaatgcataaaataacgcccctgctgctcccatgcatcagcagtgtgtaccactatggtatatatatatatattatactggaatttcgctaaccgaataaaaacatanatt

SEQ ID NO: 101058 - DNA, 456 bp, Zea mays
cccgcctccccaccgccgtgcggttccagcgccagcgggggctcaccaccaccgcgctgctgaagaccgccgacctccagcccaaggagcagggcaagcccgagacgctcgactaccgcgtgttcctcgtcgacggcgggggccggaaggtgtcgccgtggcacgacgtcccgctgcgcgccggggacggggtgttccacttcgtcgtcgagatacccaaggagagcagcgccaagatggaggtcgccaccgacgaggccttcacgcccatcaagcaggacaccaagaagggcaaccttcgatacttacccgtccaacatttactgggactatggggtacttcctcaaacatgggaagacccaacttctgcaaattctgaagttgaaagagcatttggggataatgatcctgttgatggtggtgagataggtgaaaggcgtgccaatgtcggggat

SEQ ID NO: 101059 - DNA, 385 bp, Zea mays
gtgggatcggggacggcgacggtggcagcaaccgcgccgccacggacgcccactaccggcagatgatcgaggcggacccgggcaactcgctgctcctggtcaactacgccaggttcctcaaggaggtggccggggacgcggcaagggcgcaggagtactgcgagcgcgccatcctcgccagccccggcgacgccgaggcgctgtcgctctacgcgggcctcgtttgggagaccagccgcgacgctggccgcgccgaggactactacagccgcgccgtccaggccgcgcccgacgactgctacgtcctgggctcttacgccgggttcctgtgggacgccgaggaagacgaggaagagaactccgagcccttgccaccgccttcgct

SEQ ID NO: 101060 - DNA, 436 bp, Zea mays
taccggtctcggaattcgagccacgcgtccgtccacgcgtccgacggatctcagttttacataactactatcaagacaagctggttggatggggagcatgttgtcttcggcagggtgatccaaggaatggataccgtgtacgccatagaagggggcgctgggacttacaatggcaagccaaggaagaaggcggtgatcaccgacgctggtgagatacccaaggagaaatggggtgatcaggaagcgtagggtgttttctacttcttgtcaccttcaaatcaggtagccatgtacttcttttttccttgacctccatggtgtgccacggttcagcaagacttccggaatgttgtatatcgtagctagcttatggccagtcgaattgactctgatcccttgagttgtgatgtggagacgcatacatctgaaaaatctt

SEQ ID NO: 101061 - DNA, 439 bp, Zea mays
ggcgcatcatcgacatcacgcacgcgtacgtgccggaccttctggcgttcgcgccgggggctgtcacggtgcccttggtccacctcaaggagtccatggcgaacgggtccgagtacaacctgtcggagctgcggttggagtgccacatgggcacccacgtcgacgcgccaggccacatgaaccaaggccacttcgccgccggcctcgacgtggacacgctcgacctcgacgtcctcaacggacctgcgttgctggttgatgttccgagggacacaaatataacagctgaagcgatggaattcctgaatatccctagaggagttcgccgagttctattcaggacgctgaacactgacaggaagttgatgtggaagaagggaggtgacatgagctatgttgggtttacagaggatggcgcacagtggctagttgacaacac

SEQ ID NO: 101062 - DNA, 412 bp, Zea mays
cgcgtccggctccttgtgtcctcttctttgatgagcttgactcaattgctactgagagaggaagcagtgtgggtgatgctggaggtgcggctgatagagtgcttaatcagctactgacagaaatggatggcatgaatgccaagaaaactgtgtttattattggagctacaaacaggcctgacatcattgaccctgctctgctgaggccagggcgtcttgaccagctgatctacattccactgcctgatgagcagtctaggctccagatcttcaaggcctgccttaggaagtcccctgtggcgaaggatgtggacttgaatgctcttgctaagtacactcaagggttcagtggagcagatatcacagaaatttgccagcgtgcgtgcaaatatgcaatcagagagaacattga

SEQ ID NO: 101063 - DNA, 410 bp, Zea mays
cgcctttaaccgagtttgaccaccctgagaaaggagatgctctgtacgctatggagctggctctggccctggaaaagctggtcaatgagaagctgcacaacctgcatggtgtggcaacaaggtgcaatgatcctcagctgacagacttcatcgagagtgagttcctcgaggagcaggtggaagccataaacaagatctccaagtatgtcgcccagctgaggagagtgggcaaggggcacggggtgtggcacttcgatcagatgctgcttgaggaagaggcctaaaaagaagaacggacagatgaatgaaggaaacaagtgtgtaatgttgatcaggcggaggaataataatgggtcaactgacaactctgggtcggtggatttgtagttggtttgggttttttagttgta

SEQ ID NO: 101064 - DNA, 459 bp, Zea mays
ccgggcggacgcgactcgtgcgggggatgtcataaagtgactacgacctttcgctcccggcgatcgcgaccgagttcctggggctcatggtggcgctggacaagctctacttcacgccgctaggcaagttcatggatgagcgggacgccaagatccgcggtgagctcggcgatgtcaagggcgcctccgaggaggtgaagcagctggaggaccaggcggcggccatcatgaaggcggcgcgcgccgagatcgcggcggcgcttaacaagatgaagaaggagaccaccgcggagctggaggccaagctggacgagggacgcagccgtgtggaagccgagctcgtagaggcgctcgccaacctcgaggcgcagaaggaggaggctgtcaaggcgctcgacgcccagatcgcctcgctcagtgatgagatcgtcaagaaggtgctcccatccgcgtgatgaa

SEQ ID NO: 101065 - DNA, 436 bp, Zea mays
ctcaggcattaccgtcagaaacatccacgtgttaacttgaaggcaataaagaattgggcaaggcagattcttcatggattggattacctgcatagccaccaacctccgattatccatagagacttgaagtgtgataatatttttgttaatggaaaccatggagaagttaagattggagatcttggactagctacagtaatgcaaacacctagggtgaggagtgttattggtaccccagaattcatggcacctgaactttatgatgaaaattatgatgagcgtgttgatatttactcatttggaatgtgtttgttggagatctttactcttgaatatccatacagtgaatgtacgaatccagctcagatttttaagaaagtatccacaggtgttaaacctgctgcattggctagaatttctgatctttaagtaaagc

SEQ ID NO: 101066 - DNA, 430 bp, Zea mays
cccacgcgtccgcgcagaccaaagagcacattctcctcgccaagcaggtcggcgttccgaagatcgttgtcttcctcaacaagaaggacatggtcgacgacgaggagctgctcgagctcgtcgagctggaagtccgcgagctgctcagcaactatgagtacgacggcgacgaggtgccaatcgtcgctggctccgccctcaaggcgctcgaggccctcatgggcaaccctaccctgaagcgcggcgacgatgagtgggtggactgcatcttcaagctggttgattctgtggattcctacattccagtgccacagcggcagaccgacctcccgttcttactcgctgttgaagatgtcttctccatcaccggtcgtggtacagttgccactggccgtatcgagcgtggcaccgtcaagattggtgacacagt

SEQ ID NO: 101067 - DNA, 395 bp, Zea mays
gaaacaagttggaaattattactctaccaagatatggagcttcaccatgaaatcgccctgttgcaagcatgaaattgtcatacagacagacccaaaaaatactgaatatgtcataatcagtggggcccagaagaagacagaagattttgatgttgaggatgcagagacattgctgctgccagcagatgaagatcgagacaagcttgcggatcctatgtaccggcttgaacaccaggaagaggatcttcggaagaaaaaagaagctgagccagttttagttcgccttcagcgactctcggacagccggcactctgatgattatgccctgaacagagcactccgcgatcgtcttaggagccaaaaaaagagagttgctgaagagaagaagtccgcga

SEQ ID NO: 101068 - DNA, 414 bp, Zea mays
cccacgcgtccgagaagcaggaggcgctcgaccggcttggcgccgacgccttcgtcgtcagcaaggacgccgaagaaatgaaggcggctgcgagcaccatggacggcatcatcaacacggtgtcggcgaacctcaccttggccccgtacatgggcctgctcaagcccaacggcaagatgatcatggtcggcctgcccaccaagcctctcgagatcccgccctttgatctcatcattgggaacaagaccctggccgggagctgcatcggcggcatgagggacacgcaggagatgatcaacgtggcggccaagcacggcgtgacgacggacatagaactggtggccgcggactacgtgaacacggtcatggagcgcctggccaaggctgacgtcaggtaccgcttcgtcatcgaca

SEQ ID NO: 101069 - DNA, 401 bp, Zea mays
  unsure (1)..(401): unsure at all n locations
gggtacccgcgatgaggcccgccgccgccagtaccggcgggttccatctcgtgctccgcgcggcgcacaggctgcctcctagtcttcctagcatcagtagccgaagaggtgtaaggatacgagcggcggcggcagcaggcggtggcggcgcgctgctggggcgtcccatggaggacgtgtacaaggtgcgcgtggagcgaggcgaggtggcgcgggcacggatggaggcgctgcgggtcatggagacgtggtcgtcgtggcgcacgggtggccggtgccggatgccgtgggactggcaggtcgaccagctcgtgtacatcgtgtccggngaggtgaaggtcatccccgccggcgctgtccacggcgacgactacatgcacttcgtggccggngatctggtc

SEQ ID NO: 101070 - DNA, 438 bp, Zea mays
gagaaacccgcggtaccggagcccatctaggctcagctggccgccgcgggggccgggaaggactcggacatcttcgctgttgtcatgattggttcaagacagtacatagtgatgccgggcaggtatatatacacacagagactgaaaggtgccaatgtcaatgatcagatcatattaaacaaggtgctactggtgtcaactagagaaaaagcttacattgggatgccagtggtgaccaatgctgctgttcacgcagtggttgaagaacagggacgggatgataaagttatagtgttcaagtacaagaagaagaagaagtaccagaggaaacttggtcacagacagccaaacacaaggttaagaatcacaggcataagtggatacgaagagtaccctgctgacccaatacttgaccctgctgcagctttaaattaaact

SEQ ID NO: 101071 - DNA, 332 bp, Zea mays
gaacggcaagacgcacttcgacgccggcgacgagcgcgccaaggagttctggggcctgctcaagtccaacgaccccgtgggcttcaacctcgtcgacgtcctcgcctggggctcgctcggccacatcgtcgcctactacatcctcgccacctccagcaacggatacgaccccaacttcttctgagcggccggctgcgggcatgttcttgagcctgcctgtattctactccgtgtgtgttgagccatatatctgatgctcaaggattggttaatctgaacaagtggtgcaactgcgcgtgtacatggatttgctcttcctctaaaaagaaact

SEQ ID NO: 101072 - DNA, 475 bp, Zea mays
cggtttggaatcgccggctggacccacgcgtgcggggagcgtatgtttgaccatgtcctattgcgagtgaaagggttggaaatcagggagagggccgaagatgggaactgtcgattcagagctgttgctgatcaagtttatggagacgcataagcttatgacatggctaggcagatgtgtgttgattatatggaaagggaacgggatcatttctctcagttcataactgaaattgaaagttttacattatactgtaagaggaaaaggagagataaggtttatggcaacaatgttgagatccaggcatttgcagagatgtacaatcgtcccattcacatatattcctacagtacagagcccattaatatttttcaaggaagctataacacagacgttccttcaattagattaagttaccatcatggtaatcattacaattcagtggttgatccccgactgcagacagttggggcag

SEQ ID NO: 101073 - DNA, 451 bp, Zea mays
ggcagcagcaaccgcagtcgcgagggccaagcaggggggacaaggaaaggggccgacggggaggaaaaaggaagaacgcgtggcggagccatggggcttggccttggcgtgcgggcggcgcccttcacgtacgcggcgcacgcactggccgtcgcggcggcggccatggttctcgtctggtccatccagttccgcggcgggctcgccatcgagtccaccaacaagaacctcatcttcaacgttcaccctgttcttatgcttatcggttatgttattatcggcggtgaagctataatggtgtacagggtacttccaacatcgaatcatgacacaactaagctgatccatctaattctccacgggattgcacttgtccttggtgcggttggaatatactttgctttcaaaaatcacaatgagagtgggattgccaatctttacagcctgcact

SEQ ID NO: 101074 - DNA, 438 bp, Zea mays
cccacgcgtccgctgtgaagcacttctctgtggagggtcagctggagttcaaggctgggctctttgttcctaagagggccccatttgatctcttcgacacaaggaagaagcaaaacaacatcaagctctatgtgcgcagggtgtttatcatggacaactgtgaggaactgatccctgagtggctgagttttgttaagggtattgttgactctgaggaccttcccctcaatatctcccgtgagactcttcagcagaacaagatcctgaaggtgatccggaagaaccttgtgaagaagtgtgttgagctcttctttgagattgctgaaaacaaggaggactacaacaagttttatgaggctttctccaagaacctcaagcttggcatccatgaggactcgcagaacaggggcaagattgctgagcttctgagataccact

SEQ ID NO: 101075 - DNA, 435 bp, Zea mays
gccacgcgtccggtgaagcgccagctgttcaacaacttcgcggggctcttcttcgggctgcccttcaccaagctcaacccggacttcgccctgacagtcaaggacaagttctcgccggaaagcaagctgctggttgtctgccaggaaggtctcaggtcagcagctgctgcagatgcactggagaaagaaggcttccaaaatattgcatgcatcacatcaggtcttcaaacagcgaagccaggaacgtttgaatctgtggtgaaaagtgagctgcagaacgcggtgaaagctgtccttgtgaccattcaagggaagatttctgcagtccttgggactgtattgattagtgcctacctgtttataacattctttccagaccaggctgacaagctttttgacttggctggcatcagcttgtgatcagagctgacgttc

SEQ ID NO: 101076 - DNA, 436 bp, Zea mays
  unsure (1)..(436): unsure at all n locations
cgaaacaaccaatgcctccaccaaaaatcggaatgttagtgcgtagacttataccagttgcatacaaagtgtacaatgcaagaattttgctgatcaacaacttgaagaggcttatgaaagtagtaccagtaaaaggctgcaagtattgcagcgagatacatgttggatctgttggacatcctttccgaacatgccgaggaatgtcatcagatcaacgtagaggagaacatgactggngaagtactctagtggaggcagttttcttacccgtcgaagcctatcatctagaggaccgtctagggaatcgcattcctcatgatcagaggtttactgtaccccgcattcccgctctcgtggaactttgcatccaagctggagttgaccttcccgagtaccccacaaagcgtcgaagaaagcctatcattaaaatcggaag

SEQ ID NO: 101077 - DNA, 391 bp, Zea mays
ccgacgccgaagccgccgccgcctccgtcgccgtcgtcgtcgtccacgccgtgccctgcgccggcctactcgccgtcgccgtacacgccgacgggtaagtgccccgtgagcacgctcaagctgctcgcgtgcgtggacgcgctcaacggcctcgtgcacgccgtcatcgtgaccaacgtcagcgacacctgctgccacgtgctctccggcgtggacgacctcgacgacatgctctgcctatgcaccaccatcaaggccaaggcgctcagcgtcagcctcgtgctccacgtcaccatctaggtgcatcgtaacgagagcggcaagcatgtgccgtccagcttacagtgcccgtaatcacatcagctgcatatatgtgctactatgatgtatg

SEQ ID NO: 101078 - DNA, 387 bp, Zea mays
cccacgcgtccgcccactcgtccgaaattttcgattcatgggctactgagctcagcccggctgattttgaggagtttagcctgccttatctaaagcagatagtggatagtgttagggaaacacatcctaacttgcctctgatactctacgcaagtggatctgggggcttgctggagaggcttcctttgacaggtgttgatgttgtcagcttggactggacggtcgatatggcagagggcaggaaaagattgggatctaacacagcagtccaagggaacgtggatcctggtgttctttttggatccaaagagtttataagcaggcggatttacgacactgtgcagaaggctggcaatgttggacatgtactgaaccttggccatggca

SEQ ID NO: 101079 - DNA, 363 bp, Zea mays
ctttgagggtgagcgcagtatgaccaatgactgccgtcttctcggcaaggtcgacctcaacggcattgcgccagctccaaggggcacaccccagatcgaggtgaccttcgaggtggacgccaacggtatcctgaacgtgaaggcggaggacaagggcacgggcaagtcggagaagatcacgatcacgaacgagaaggggcggctgagccaggaggagatcgaccgcatggtgcgggaggcggaggagttcgcggaggaagacaagaaggtgaaggagcggatcgacgcccgcaaccagctggagacgtacgtgtacaacatgaagaacacggtgggcgacaaggacaagctcgcggacaagct

SEQ ID NO: 101080 - DNA, 425 bp, Zea mays
ggccaccgatttatttgcagcgtactgttggcatgtagtggatagacagtaaactacacatgcctaatacatagggtatcgtctttataaagatgagagtgctctccacactcatgcagattccgcgaagccaatcctgtcgttgccgaagtcgaacaccgtgtggtaagctcccatgaagacgtccccaagaatccagagaggaccacgcggcggtggcacgtcatacgccatgaacccactgatgcagacggtttggcctccttgctccagcttcacaatgtactgctggggtgttagggtgaaggtcttgtttgcgatggtgaacgcaaggctgggcatcttggagatctcctggcagctgactgttgactctccgttggggctcggcagacgctcacacagctggttagcgtactgcagta

SEQ ID NO: 101081 - DNA, 101 bp, Zea mays
cagcagttctctgctggatgtgatgtattcattgttgcaatcatggccgggcattggcgacctctatacctgctacaaaactactgcaacgcctataaaaa

SEQ ID NO: 101082 - DNA, 232 bp, Zea mays
  unsure (1)..(232): unsure at all n locations
gccgtctacgaccagaaggtcgtcccgttcatcacggaggagttcggctacaccaatgtgcaccaggttcccaagatcgagaagattgtggtgaactgcngtctgggccccgaaggcagggacttccaagggcttgattgccgccttgaagaacctggccttaatcaccggccattggcccttaaggaccaaggccagaaattccgtggccagtttcaaaatccgtgaggga

SEQ ID NO: 101083 - DNA, 309 bp, Zea mays
cggaattcccgggtcgacccacgcgtacgggatcatgacatgggggaggaaggctgtctatttggccagtctcacctgattggcgcgggcagggtgatttatactttgtgcagagagagaagatatggagtcgacaggaaagattttgatggagcgctatgaggtgtagaggctactggggaaaggcacatttggcaaggtgcactacccagagaatcttgagtccaacgagagtgttgtcattaagatgatggacaaggacaaagtgctcaaggccgtgctttctgagcagataaggcgggagatcac

SEQ ID NO: 101084 - DNA, 414 bp, Zea mays
gcatgactggtctggacaagaagaaagcttgtgtctttttcaagactaatgctgatgggaacacaacatgtgccaaggaaatgacaaagctctctggcatctctgaaatcatccccgagatggagatctgcgattttgacttcgaaccctgtggctactccatgaatgcgatccatggctctgcattctccacaatccatgtgacgcccgaggacggtttcagctacgccagttacgaggttatgggcttggatgccactgctctgtcttatggtgaccttgtcaagagggtcctccggtgctttggcccctcagagttttccgttgccgtgaccatcttcggcgggcgtggccatgccgggacatggggaaaggcacttggtgcaaaggtctatgactgcaacaacatggtgg

SEQ ID NO: 101085 - DNA, 386 bp, Zea mays
cgcattgaggggtatgaagttcatggactggttgtggacaagagaagagaaagagatagctattgtcagtcacagtggtttcttgtttcacaccttaagcatgtacagcaaggagtgccatccaaccataagagacgaagttagcaagcactttgcaaactgcgagctacggtcgatggtgttggttgacagaagcatgcttgggtcatattcctcaagattcaactatgctggcaagaatccaaccggactagatgtgccaagtgatattgcagataagaagcaggttgacgaagctcagaagaactaaggcaaccttgaaagcataccatatatgacttggattatcaagaaattctgacctttgcgaagcttgtttgctttga

SEQ ID NO: 101086 - DNA, 439 bp, Zea mays
cccacgcgtccgcagacatcgtggcataaggcccaagcagatctgctaaaagcggaaaaggaccagattgcaaatttaactgacattttcgggataccagagacccagcttaagttcataatcgaagcttggtcacagattatagaatgcaggcgagtgttgaaatggacatatgcttatggctactatctggatgataagatcaagagtgaattttttgagtatctgcaaggtgaggctgagtctggtttggaacgcctgcatcagtgcgctgagaaagacttgcaaaattttttgccgtctgtgaaatctgacagcactgaaacaacgacacctacagtggctgaatttggtgaattccgcgtgaagcttgctggacttacaagcgtgactcggaattactttgagaaccttgttcaagctttggaagctgggttgg

SEQ ID NO: 101087 - DNA, 243 bp, Zea mays
  unsure (1)..(243): unsure at all n locations
cgccactgtccagtgcgcgcgtcaagcttgcttagctagccgccatggcctgcctaggcgccgtctccgtgaagcccgtggccatcaagggtctcgccggcagctccatctccggaaggaaactcgccgtcgccaggccgtctgcccgctccatccgcaggccccgcgcagccgccgtggtggccaagtacggcgacaagagcgtctactttgacctcgacgacatnggcaacaccaccggac

SEQ ID NO: 101088 - DNA, 453 bp, Zea mays
  unsure (1)..(453): unsure at all n locations
ggcttcaagctgctgatcccgtccaagtggaaccccagcaaggagcgggagttccccgggcaggtgctccgctacgaggacaacttcgacgccaacagcaacgtgtccgtcatcatccagcccacgtccaagaagaccatcgccgactacggctctcccgaggagttcctctcccaggtcgactacctgctcggcaggcaggcctacggcggcaagaccgactccgagggcgggttcgagaccggcgccgtggccaccgccaacgtcctggagagctccacccccgtgatcgacggcaagcagtactacgccgtgtccgtgctcaccaggacggcggacggcgacgagggcggcaagcaccagctcatcgcggccaccgtctccgacggcaagctctacatctgcaaggcgcangccggcgacaagaggtggttcaagggcgccaaggaaggg

SEQ ID NO: 101089 - DNA, 373 bp, Zea mays
cccacgcgtccgttttttttttttttttttttttaacggggcaaattaagatctgctggtggcataacattacgacaatagttcatccgttcgacaacaaattttggcacaacttccacaggttcagcacttgaacaatctaagttaccaacacaaggcattttaagttcagagaaaagtgagaaataaacacatggccatttctagtccatctttactccaacaaaaccttagatgctgctcgggtacatgaacactctgaccttgcgccccatggactcaggcgggaggttggacttgaacttggcacggacgacgcccgagtttccgtgcggacgggtgaccttgccccagatgcacctgtagcgggtct

SEQ ID NO: 101090 - DNA, 438 bp, Zea mays
ggccaagtcaaatgtggttattaacctcataggacgagagtatgaaacaaggaactacgagcttcgaagaagtaaaccaacttatgcctgaacagcttgcaacaattgctaaggagcatgggggtatcataagatttattcaggtttcttgcctaggggcgtcaccgtcttctgaatctagaatgttgaggacaaaagctgcaagagagcaatcagtcttcaaagaattccctgaggctacaatcatgaggcctgctaccatgattggcacagaagatcgaattctgaacagatgggcacaatttgcaaagaattggggtttcctcccgcttgttggtggtggatctactaagattcagcctgtgtatgtaatcgatgttgctgctgctattgtgaactccctcaaggatgacggcactagcatgggaaagatatatg

SEQ ID NO: 101091 - DNA, 440 bp, Zea mays
  unsure (1)..(440): unsure at all n locations
gtccctgccggctccgggaacgccggcggcgggacctacgcgaaggacaggctgggcgacgacgtcacggtggatgcgtggctcaacacgcacggtcccaacgaccgcacgctcgcgcaggggctcaagggtgaccccacgtacctggtggtggagcaggacaagacgctggccacctacgggatcaacgccgtgtgcactcacctcggctgcgtcgtgccgtggaacggcgctgagaacaagttcatctgcccctgccacggatcccagtacaacaaccagggcaaggtggtccgtggaccggcgcctctgtcgctggccctggttcacgccgacgtcgacgacggcaaggtcctcttcgtcccgtgggtggagaccgacttcaggaccggcgaggacccatggtggaaggcatgangatgatccggaaccagccgtgc

SEQ ID NO: 101092 - DNA, 415 bp, Zea mays
cccacgcgtccgcggacgcgtggggttctctttgatgagattgagaaggcacatccagatgttttcaacatgatgcttcagatcttagaagatgggcggttaactgatagcaaggggcgcactgttgatttcaagaacacactattgatcatgacatctaatgtcgggagcagtgtcattgagaagggaggtcgcaagattgggttcgaccttgattatgatgagaaagacacaagctataacaggatcaagagccttgtgactgaggagttgaagcagtacttccggccagagttcttgaacagattggatgagatgattgtattccggcagctgactaaattggaggtgaaagagattgcagacattatgctgaaagaagtgtttgacaggctgaaggccaaagacattaatc

SEQ ID NO: 101093 - DNA, 422 bp, Zea mays
cccacgcgtccgcagtcatgcacactaacgaacgaactcttgctccgatcacgatctagctgaggtcgacgatggcggctgtgctgaacagcatgaagacgccgcaggtggtggccgtgctggtggtggtggcgctgctggcttcgtccgcgtcggcggcgatcacctgcgggcaggtggggtcgtcgatggcgccgtgcatgccgtacgcgacggcgagggccagcgcgctccccgcgtcgtgctgcatcggcgtcaagagcctcatcagcgcggcgcggaccagcgcggaccgccaggcggcgtgccgatgcctcaagagcctcgccaacagcgtcaagagcgttaacatgggcaccgtcgccaccatccgcggcaagtgcggcgtctgcgtcggattccccatcagcatgtgcaccgac

SEQ ID NO: 101094 - DNA, 445 bp, Zea mays
cccacgcgtccgacgaggcaaagatctcggacttcgggctcgccaagctgctgcagcaggaccaggacctgcacaccaccaccagggtgctgggcacgttcggctacttcgaccccgaatacgcgctgacagggaagctgacgctgcagagcgacgtgtacgcgttcggcgtggtgctgctggagctgctgacggggcggcgggccatcgacctgagccaggggccgcaggagcagaacctcatcgtcggcatccaccaggcggtgggcgaccgcaagaagctgcgcaaggtggtggaccgggacatgcccaggggctcctacacgctggagtcggtgtccatgttcgccgcgctcgccgcgcgctgcgtctgctttgacagcgccggcccgccgcccatgcaggactgcgtcaaggagctccagttcatcatgtacgctaacat

SEQ ID NO: 101095 - DNA, 464 bp, Zea mays
  unsure (1)..(464): unsure at all n locations
cagcgtcgtcgggctcaagcccgccgcggcagtgccgcaggccgccgccgcctcatggccggcgaagcgggtgcagctggccgcgcccgagggccgccgcgccgctctgctcggcctggcggccgtcttcgccgtcacggccaccaccgggtcggccaaggccacgatcttcgatgagtacctcgagaagagcaaggccaacaaggagctgaacgacaagaagaggctggccaccagtggcgccaactttgcgcgcgcctacaccgtggagttcggcagctgccagttcccctacaacttcactgggtgccaggacctcgccaagcagaagaaagtccccttcatcagcgacgacctcgagattgagtgcgaggtgaaggagaagttcaagtgcggctccaacgttntctggaagtggtgaagcagctagcagcagcgtctgatgggaatggaggagatcatca

SEQ ID NO: 101096 - DNA, 448 bp, Zea mays
gtgaaggatacatcagacaagcttaaacaagctagcgaggcggatcatcgcgttgaagggagcgctaccaaaaagattgctgatgcaaagctagctaaagatttccaagcagtcctaaaagaattccagaaagctcaacgattagcagtagagagagaagctgcatatgcaccttttattactcaagcgggcctgccacagagctacaactcaagtgaagtgaacaatggtgctgataagttggcagagcagcgcacgcagcttctagaatctagaaggcaggagttggtcttcttggacaatgaaatagtgttcaatgaggccatcattgaggagagggatcagggaatacaagagattcaacaccaaatcactgaagtaaatgaaatcttcaaagatcttgctgtgctagtccatgatcaaggagcaatgatagatgacattgatt

SEQ ID NO: 101097 - DNA, 369 bp, Zea mays
gcggggctgaccccgtgcaaggagtccaaggcgttcgcgaagcgcgagaagaactcgggcaagaagctcaccgcgtcgctgaagaagtacgcgcccgacagcgcccccgcgctcgccatcaacgccaccatcgagaagaccaagcgccggttcgagaactacggcaagttcgggctgctgtgcggcgccgacggcctgccgcacctcatcgtcagcggcgaccagcggcactggggcgagttcgtcaccccgggcctgctcttcctctacatcgccggctggatcgggtgggtcggcaagagctacctcatcgccatcagcggcgagaagaagcccgccatgagggagatcatcatcgacgtcgagctc

SEQ ID NO: 101098 - DNA, 408 bp, Zea mays
gcgagggcgggctggactacctcggcaaccccagcctgatccacgcgcagagcatccgtggccatctgggcctgccaggtcgtgctcatgggtgccgtcgagggctaccgcattgccggcgggccgctcggcgaggtcgtcgacccgctgtaccctggcggcagcttcgaccccctcggcctggccgacgaccccgaggccttcgccgagctcaaggtgaaggagctcaagaacggccgcctcgccatgttttccatgttcggcttcttcgtccaggccatcgtcaccggcaagggcccgctcgagaacctcgctgaccacatcgctgacccagtcaacaacaacgcatgggcctacgccaccaacttcgtccccggcaactaagctcaacggctatgctatgcaact

SEQ ID NO: 101099 - DNA, 319 bp, Zea mays
aattccggtcgagcacgcgttcgccagcgttcgtcaagcgttcggtgaataacatgcttgatgggaggaacgagctggtaaagtataggcttccaccaaagatggaaaagaaggtgttcaatgaccaaaggtacgtcccatacaccagaaatgtgctccatgacattgaccagtaggccaaggaacaggcattgctgtaccacagtgagaggctggcaattgcttatggtctgattagcaccccagcaaggacttcacttcgcatcattaagaacctgacgatatgtggggactggcacaatgccataaggatcatgtc

SEQ ID NO: 101100 - DNA, 460 bp, Zea mays
cggacgcgtgggcggacgcgtgggcggacgcgtgggcgcccgcccgccgaccagccgccgccgcaccgccaccgcgcgacctcccttcttcgccgcaaaccgctctgggcgcttgaagatggcggtgccgctgttgactcagaagatcgtgaagaagcgggtcaagcagttcaagaggccccacctcgaccgctacaagtgcctcaagccaagctggcgcaggcccaagggtatcgactcccgtgtcaggcggaagttcaagggatgcaccttgatgcctaacattggatatggctctgacaagaagaccaggcactacctccccaacaagtttaagaagtttgtcgtgcacaatgtttctgagctggagttgcttatgatgcacaacaggacatactgcgctgaaatcgcacacaacgtgtccactaagaagcgcaaggaaatcgtggagccgaggccc

SEQ ID NO: 101101 - DNA, 470 bp, Zea mays
gaatatcccggctcgacgccacgcgtccgcggacgcgtgggcggactcgtgggcggtttcgtgggccaggacatgcggagagctcgagggtggtacggtatgacgctgactaaccaatggtgctgcgacgtctgacggaataacagacaggtgacgtgcttgccgactcagacgacgtgcgccaacaggaacgagtacctattatgggacgctttccaccccacagaggcggtcaacatacttgtcggtcggagggcgtacagcgcgtcgctgtcatccgacgtccaccccatggatctgcgcacgctagccaggatctagctgtatggatcatgtaaactcgctaagagaagcacagcttacagagtcttgctttgcacagtgctttgtatcccctcgtgattgtattgcttaccactcgctaatggacgtatggtccctacatctaaactatttatataaacatgata

SEQ ID NO: 101102 - DNA, 456 bp, Zea mays
gggcctgccgcccctcggccgccgcgcctcctccttcgccgtcgtctgctccaagaagaagatcaagaccgacaagccctacgggattgggggtggcctgaccgtcgacgtcgacgccaacgggagaaagggcaagggcaagggcgtgtaccagttcgtcgacaagtacggcgcgaacgtcgacggatacagcccaatctacaacgaggatgactggtctcccaccggcgacgtctacgtcggtggaaccactgggcttctgatctgggccgtcaccctcgctgggatcctcggcggcggcgccctcctcgtctacaacaccagcgccctctccggctaaggatatccaatgcatgcgcttcttgcgattcgtcatgtaaaatcagggtgtctgtctataatctagcctccatggatgctcaaccttcgtcatgtaacaataatcagtggctactt

SEQ ID NO: 101103 - DNA, 470 bp, Zea mays
gggctctcgtggtgatgttaccatcttaccaactctggtaattaacaatagacaatacagaggtaagcttgacaaaggagcagttcttaaagcactttgtgctggttttaaggaaactactgagccagccgtttgcttgagtgaagatatacaaacaaatgagtgcctagagaacaatggtggctgttggcaagataaggctgcgaacatcactgcatgcaaggatactttccgtggaagagtttgcgagtgtccaattgtgaaaggagtaaaatttgttggtgatggctatagtcattgtgaagcttccggatctgggcgatgtgaaattaacaatggaggatgctggaaagataccaagaatggtcggacatactctgcctgtaatgatgatggctgcaaatgcccagatggattcaagggtgacggtaggcacaaatgtgaagatattgatgagtgtaaggaaagga

SEQ ID NO: 101104 - DNA, 339 bp, Zea mays
tctgaacctgatctggtcctaacaacctcggtggctagttgacatatgcgcgggttaagcgctagatatgtcgagcgattgaagatactcatatgagtataatacgattcggatacgcgtaccttcgtggctatgaatacttggtcactgccgtacacttatcactccacggaagatgaagggatgatgaaaagaccgctagtataggccacgtgcttgaactatggtagcaagagctctagacgcaggtgactgtacttaacctggtaagccgaattggatcgtcaaggtacactcatagtaagctattatgcaatacatagtctatgattcttgata

SEQ ID NO: 101105 - DNA, 347 bp, Zea mays
cccacgcgtgcgcggacgcgtgggcgcttctgttatccgtgtcattgctcatacccagattaggaagatgaagggtttgaagcacaacacggctcacctgatggagattcaggtcaatggcggtaccattgctgacaaggtggactacggctataaatcttctgagaaagaggtgcctgctgatgctgtcttccagaaggatgagacgattgacatcattggtgtgaccaaaggcaaaggctatgaaggtgtggtcactcgttggggcgtcacccgccttgcccgcaaaacccacaggggtctacgcacggttgcttgtatcggcgcatggcatccggatagggtct

SEQ ID NO: 101106 - DNA, 406 bp, Zea mays
cccacgcgtccgcccacgcgttcgcggacgcgtgggcactgactttcagtcaaggagacttggaattgggtatggccagaaaaagaatgatgagcagtccaagcagtttgttcatatgctgaactctaccttgactgccactgagaggaccctctgttgtattttggagaatttccaaaaggaggacggcgtcgaggtgccaaaggcactgcaaccttatatgggtggaatagagtttcttcctttcaagcaacctttggatgtcaaacaagcttctgactccaaatcaaacaagtccaaatcaaagggaaatgctgcttgagctggatgaggaacactatgttaatttttgggcctaccagtacacaatacccatagcatgactatggcgttgcaggtttttcgt

SEQ ID NO: 101107 - DNA, 392 bp, Zea mays
gggtatcgtgcggcggtggatggcaacgatctcgtgatgaacctgggattctcccaccctgttcggatggccattcctgaaggcctggcggtcaaggtggaggagaacacaaggatcaccgtgagcggctatgacaagagcgcgatcggtcagtttgctgctaccataaagaagtggaggccacctgagccatacaagggaaagggtatcagatatatggatgaagttgtccgaaggaaggaaggaaaagccgggaagaagaaatagaaagtgttttttttttgcctttcccttacttcatttcatttttcccactgtaatgatcttcgtctgctaaggctgaacctaagaaaaatattgttctgtgctgatcatggcatatagatgtaaaa

SEQ ID NO: 101108 - DNA, 446 bp, Zea mays
acgcgacgcgtgcgccgtgaccggcaccccaagattggggatggcgtgctgattggagcaggggccaccattcttggtaacgtgaaaattggtgccggggctaagattggagccggatccgtggtgctgatagatgtgccggcgaggagcacggcggttgggaaccctgccaggctgattggtgggaagaaggccgagggtgcgaatgaggaggacatgccaggggagtccatggatcacacgtgcttcatacgtcaatggtcggactacaccatttgagagcggttatccaaggtctattgctcttcttttgtatcactagtaatggtgatgtaccaaataccgagtacttgctctttgttgtgtgctatggtttgtgtattgtacttagaagcctagtggtgtttatgatcattgtcagctgagtgtgccatgcctgaatactg

SEQ ID NO: 101109 - DNA, 436 bp, Zea mays
gggtttcgtctcgtgtataaggcgttcggagctcgcaaatcctttcctctctcgcgttcgaggctaggtagccgtcaccatgagccgctcggggcagcctccggatctcaagaagtacatggacaagaagcttcagattaagatgaatgcaaaccgtgttgttatcggcacacttcgtggattcgaccagttcatgaatctggtggtggacaacattgtggaggtcaatggaaatgacaaaacagatattggaatggtggttatcaggggaaacagtgttgtaatgatcgaggcactggagccagttgcgaggtcacagtgaatcattgttctttagcactagcagcgtgaaaactgatgtaaaagatatcagtggaccctgttgtatttgactaatgcttttgcacagcaacataacttcggaggtggaatgtct

SEQ ID NO: 101110 - DNA, 450 bp, Zea mays
caaagaatatggtatggataagctcatccagattgcggcaacccaacttagcgaccagcttcctgaatcaagggaggctgctcgcaacctggcactggaactgcaagcattctatgagaagtctcaggcctcaacttctgacgaacacgaggtcgaggcctctgcctcgccagatgctgaatcatgggaggctttctgccagtccaagctctccgcattaagtgcccaagccattcttcgtgtgacctctactactacaaaagagtgcgtcacctctgccccaaaagaagggttggctgtgggttgctagcacaagccacaggggagatattgcgatttttcaccctgttcgctgttttgctgtacatgcttttggtttgtcctgcggtgcacccagtcgtgaaaaggttaatcattggttcaggagttcaggtgtgaccacggtgttaa

SEQ ID NO: 101111 - DNA, 395 bp, Zea mays
  unsure (1)..(395): unsure at all n locations
gacccacgcgtccggcgtgaagaggaccatcagagtgccggcgatcagctcgaaggtcgccgacatcccttcggacgagtactcgtggaggaagtacggccagaagcccatcaagggctccccttacccacggngctactacaagtgcagcactgtgcggngatgcccggcgaggaagcacgtggagcgggccaccgacgacccggccatgctggtggtgacgtacgagggcgagcaccgncacacgccgggcgcggtccaggggccgagccccctggcgaccgcgtcgccggtgcccgtcgccgtcttcgncggcaacgggctcgttgtctagtctactaaaagctaggattagcttctcgtcttctttggtttttttttggttgagctgatgt

SEQ ID NO: 101112 - DNA, 191 bp, Zea mays
ggaattgccgggtcgacccacgcgtgcgcccacgcgtccgcccacgcgtccgaagcagaccccagcagaagaagcgaagtggtcgggggagcacgaggaagagcgagcagcaagatgtcgtggcaggcgtacgtcgatgaccacctgctgtgcgacatcgaaggccagcacctgagcgccgacgccatcgt

SEQ ID NO: 101113 - DNA, 432 bp, Zea mays
gttcgaggagggcacccgcgaccgcccctacggccactgcctcgtcgccggggtggccaagtaccccaagaaggtggtccgcagggactcggccaagaagacggcgaagaagtcgcgcgtcaagtgcttcatcaagctcgtcaacttcacccacctcatgcccacccgctacaccctcgacgtcgacttcaaggacgtggccaccggcgggcccgacgcgctctccacccgcgacaagaaggtcgccgcctgcaaggccgccaaggcgcgcctcgaggagaggttcaagaccggcaagaacaggtggttctttaccaagctccgcttctagatggtcggcgtcccgaatggtgcccgtcggtttcttgtatgggacacactccaagccatgtctcttttcgtattgccatgaatacttcttcgtgtttagtc

SEQ ID NO: 101114 - DNA, 297 bp, Zea mays
ctcgacgcagatttccacgacatggcgagcgaggccttggacgcccacgacaacttgggcatggagatagctatgcgggagttcagggacttgttcgaggggatccagtccatgacctactgctgcggtaacttcggtgatgacaagggtgccagggccattgtcaaagccttcccacacataaaatgcactgtgctggcccctcccaagatcattgccaccaaaccggccgatggagcgatgataaactatgtcgaaggtgacatgttcagtttcattccacctgctcaaactgtc

SEQ ID NO: 101115 - DNA, 343 bp, Zea mays
tcacgaacatactatcgatttctcggacgcccacgacaacttcggcatcgtgataactatgcgggagttcagggacttgctacacgggatccactccatcacctactgctgcagtaacttctatgattacaaaggatccagggccattgtcaaaacctttccacacataaaatgcactgtgcttgcccctaccaacatcattgccaccaaaccggtcgatggagcgatgataaactatgtcgaatgtgacatgttcagtttcattccacctgctcaaactgtcgtgctaaaacttgtgctgcaccacctgaccgatgaagagtgcgtcaagctcctggctcaa

SEQ ID NO: 101116 - DNA, 417 bp, Zea mays
ggaattcccgggtcgaggcacgagtcacgcgtccgcgcacgcgtccgctcacgcgttcggccacacgtccgtgtaggagtgcgaatacgcttagttcaggccgctggcttggttgtatgtgcctttgatcagcagctagaatctggtgaacgagaagtagcttgagaccgacaacggagatctggccgacaggatatggccggacttaaggagccgatcgaagccaagtaacggctcttcgacggaaatgacattggacacaccaattacgatccatacagcacagtctgctcactcagatgagtaatgactagatctacggccacatgctcatcaatgctggcatgatattggagaataatcagacactggtagagctccgagttccagtcggagacgaccgagtaggctgcatta

SEQ ID NO: 101117 - DNA, 435 bp, Zea mays
cccacgcgtacggtgtatatcaatccttgcagttattgctctaattgcctgcatctgggtgccggaaactttgcataaacacaatggggatgccgatgataattcagttgaaaccgtagaagaatctcttgctggcaccgacactgaagaaaatggaggtggcggatgtctaaaattatttacaaactggccgttgatgtcagctattactttatattgtatcttctctcttcaggatgtggcttatgcagagacattctctctttgggctgtcagtgacagatcgtttggtggattaagctttactaccacagatgtgggcaatgtccttgcgatgtcaggtctcttactttgtctatatcaaatgatgatctatccgttccttgccaaaacggtggaccacatcacattaatccgtgcagtggcgttattgac

SEQ ID NO: 101118 - DNA, 446 bp, Zea mays
  unsure (1)..(446): unsure at all n locations
aaggagattaatctccaggtcacggagaagttccgagatagagttgttgacgaaggtgataacccgagctatggtgccagacctttgcggcgtgctatcatgaggcttctggaggatagtctggcagagaagatgctggctggtgaggtgaaagaaggtgactctgccatcgttgatgtggattcagatggcaaggtgatagtcctgaatggtggtagcggtgttgctgagccactggaacctgctctcagtacctaaccgaggtcaaaatcatcattggtccgaaatatggccttctttacaagtcagctgggtttctcgtgatggtaaaaactagactgacattacttggccgcccattagttgctntatctttcgtttattttcttttttgttggaagtgaggcagtagggttgctatggaaatgaatagatggagaagcatt

SEQ ID NO: 101119 - DNA, 423 bp, Zea mays
ggcgtcaagttcggcgaggccgtgtggttcaaggccggctcccagatcttcagcgagggcgggctggactacctcgggaacccgagcctcatccacgcgcagagcatccttgccatctgggcctgccaggtcgtgctcatgggcgccgtcgagggctaccgcatcgccggcggcccgctcggcgaggtcgtcgacccgctctaccccggcggcagcttcgacccgctcggcctcgccgacgaccccgaggccttcgccgagctcaaggtcaaggagctcaagaacggccgcctcgccatgttctccatgttcggattcttcgtccaggccatcgtcaccgggaagggcccgctcgagaacctcgctgaccacattgccgaccccgtcaacaacaacgcttgggcctacgccaccaacttcgtc

SEQ ID NO: 101120 - DNA, 396 bp, Zea mays
tgaatgagctcaagctcaaggagatcaagaacggcaggctcgccatgctcggcgatccgcggttacttcatccaggggctcgtcaccggcgttggcccgttccagaacctgctcgaccacctcgccgaccccgtcaacaacaacgtgctcaccagcctcaagttccactagaacgttggtgcatcagcatacctgctgccgccgccgccagttgtttgctgtggaaagctagatgcatgcgtgttgtaaaggaacctgaagcgttgcatcggtcatgattcatgcatggccagcctgctgcctgtaacaacaaactagtattgatcttattgagaccggaaactgtattgcacatggtaaatcaatgtacaattcctccctagatgcggacaaaat

SEQ ID NO: 101121 - DNA, 409 bp, Zea mays
gggagattgactgacagcaagggaaggacggtggacttcaagaacacactcctgatcatgacctcaaatgtagggagcagtgtcatcgagaagggtggaaggaagatcggatttgaccttgactctgatgagaaggacagtagctacagcaggatcaagagcctggtcatcgaggagatgaagcagtatttccgacctgagttcctcaaccgtctcgatgagatgatcgtgttcaggcagcttaccaagctcgaggtcaaggagatagcggacatcatgctccaggaggtctttgacaggctgaaggccaaggacatcaatcttcaagtgaccgagaagttcaaggagcgggtggtggacgaaggctacaaccctagctatggtgcacgcccgctgaggcgagccatca

SEQ ID NO: 101122 - DNA, 445 bp, Zea mays
cccacgcgtccgcccacgcgtccgcggacgcgtgggtgtttatatctgcctgcgcaattgctcccagcagttgaggagtgcctctttggtccttttcgcatggcttggcaagattacactagagacttatatctctcagatccatatttggcttaggtctagcatgccaaatggacagccaaaatggcttctttgtttcataccagattatcctatgcttaacttcatgcttactacggcgatctatcttcttctatcataccgtgtgtttgagatcacgaatgtcttgaagtcggcttttatccccagtagggataatagccgtctgtaccaaaatttcgttgctgggatcgccatctcagtgtgcctgtatctctgctcacttattcttctgaagattcctgttgtatagggatgaacatacaccaagcaatcttgatagtag

SEQ ID NO: 101123 - DNA, 400 bp, Zea mays
caacagcccagccgctgtcgccctcgttccgtagtacggcgccgccagatcgtcagggaccatgatcatctccaagaagaaccgccgcgagatctgcaaatacctcttccatgagggggtcttgtacgccaagaaggactacaacctggccaagcaccccaagcttgatgtgcccaacttggaggtgattaagctcatgcagagcttcaagtcgaaggagtatgtgagggaaaccttctcatggcagtactactactggtacctcaccaacgatggcattgagcacctccgcagcttcctgaacctgccatcaaaggttgtgcctaataccctcaagaagtcttccaagcccccgtatcgccccttcggctctggcccacctggtgaccgcccccagggc

SEQ ID NO: 101124 - DNA, 404 bp, Zea mays
cccacgcgtgcgtccacgcgttcgcacacacatgacacagccccactcacccggcatggaggccctgttcgtcagctgaggccatggtttccctcaagccgtataagaggctcgcctcgggagtgctaaaatgtggcaaggggaaagtgtcgattgaccccaacgaggtctacgagatctcgatggctaactcgcgtaagaacattcgtacgctggtgaaggatggattcataattaagaagccgcataatatccactcaaggtcccgggcaaggagggcccatgaggccaagcagaatgcgaggcactctggttacggtaagcgcaggggtaccagagatgctaggcttcccaccaagatcctttggatgcgcacgatgcgtgtcctcatgcgtctgctgcgc

SEQ ID NO: 101125 - DNA, 420 bp, Zea mays
cccacgcgtccgcggacgcgtgggcggacgggtgggcggacgcgtggggtgatgatttccttgcaatgttggaagaaagcaaggagcttacatcatcaacaagatggagcaaagcaatacttatgtttgaagatgatgaaagattcaaagcagttgagcgtccaagggagcgtgaagatttatttgagaactatcttgtggaactgcataagaaggaaaaagccaaggctgctgaagaacacaaaagatatgtagcagagtacagagcttttctagaatcatgtgacttcatcaaggcaagcactcagtggagaaaagttcaggaacgcctggaggacgatgaacgttattcccgacttgagaagtttgatcggttggatatttttcaagagtacattcgacacctagagaaagaagagg

SEQ ID NO: 101126 - DNA, 445 bp, Zea mays
cccacgcgtccgcagcgttggctgatcctctcaaggtcatgatatcaggagctgcggcgtccggcaagggcacacagtgcgagctcatcaagaccaaatatcaattggcgcacatctccgccggagatttgttgcgggcggagatcgctgctggctctgagaatgggaagcgggccaaggaattcatggagaagggtcagctcgtgcctgatgagattgtcgttaatatggtgaaggaacgccttcgtcaaccagacgctcaagaaaatggttggcttttggacgggtacccaagaagctattcacaggccatggccttggaaactcttgaaatccggcctgatactttcattctgttagatgttccagatgaactccttgttgaaagggtggttggaaagcggcttgatcctgtaacagggaaaatatatcatttgaagtattc

SEQ ID NO: 101127 - DNA, 322 bp, Zea mays
agacatcgtataaccataataatattgaactcatgcatttatactagtgacaatgaatcgtgcacggcattttaacgctggaattggtctacatcgtactaaagatttagaaataaccatagaaattgcttgctgttgcaccaaagtgctgtgaactatccattgtcgctttatgcatacattgttggtttacaaatgaaacatagaactctcatcatgtgcatacattattagttactatggtgaccacaatgtcgaaatggtactcaacttgtttatgactgccgcttataggcaactaatatgacattactagcaatga

SEQ ID NO: 101128 - DNA, 349 bp, Zea mays
gccccggcagctacgggttcagcaccaacctcagggcctgctgcggcgccggcggcggcgagtacaactaccagaacggcgcgcggtgcggcatgcccggcgcgtacgcgtgctctgacccggggttcgtcgctcaactgtgacggcatccacctgacggaggcggcgtataggaagatcgccgactggtgggtcaacgggggctacttgcaaccggtcattttgggctaaaagcttgttcgggaaccggggttcggggcttggttgggggtccgttggcccttaaggttagggaaggggatcggattaattgtaatttttttagctggaatctaagcaggcgagaaga

SEQ ID NO: 101129 - DNA, 406 bp, Zea mays
gggaacatcgaggacattgtaagtgaattatgtgctgagacgggagccaaccaggaggatgccctcgcgcgaattgaaaagctttcagaagtaaacccgatgcttggcttccgtgggtgcaggcttggtatatcgtaccctgaattgacagagatgcaagcccgggccatttttgaagctgctatagcaatgaccaaccagggtgttcaagtgttcccagagataatggttcctcttgttggaacaccacaggaactggggcatcaagtgactcttatccgccaagttgctgagaaagtgttctgcaatgtgggcaagactatcgggtacaaagttggaacaatgattgagatccccagggcaactcttgtggctgatgaaatagcggagcaggctgaattcttct

SEQ ID NO: 101130 - DNA, 446 bp, Zea mays
gccatggcgtctcatgatcatcaccactcccactcccacgacgaccaccaccaccattcccacggtgacggcggtggccatgcggctgggggatcgtgggtaggggaggacggacgcgtgtggcactcccacgacggcctcgcgccccactcccacgagcccatctactcccccggcgacttcaccaagcgcgcgccgccgctcgcctcgcgcgacttcgctgaccgcgccttcaccgtcggcattggcggccccgtaggcaccgggaaaactgccctcatgctagcattgtgcagatttctacgcgacaagtatagtcttgcagctgtcacaaatgatatattcacaaaagaagatggagaattcttaattaaacatggagcgctccctgaagaacgtatacgtgcagtggaaactggaggctgccctcatgcggctattcgcga

SEQ ID NO: 101131 - DNA, 381 bp, Zea mays
  unsure (1)..(381): unsure at all n locations
cacggaccacagcggcgttccaacaaatttggtcacaacaaactgttctctgcacatgagctgtgtacaaccctgccacaatgtttggaattcatgtcacttctggccccatccacctgatgtattcagagatcccaatagcagtcggtcaggttcggaggtattaccaaccgaggaagagccaccggatggtgactgcggtcatccacggcgagaaggtgccgctgtacggcgccgggggcagactgatgctgtcgacgagcacgggcggngcggtgcccctgacgctggactaggacctgaccttgacgggctacgtgatcggcaagctcgtgcgggtgacgcacaaagtgcacgtgacgtgcctcgtcgtcgtggacg

SEQ ID NO: 101132 - DNA, 438 bp, Zea mays
catgactggtgcaacaggcacacttggttatatggctccagaggttcttgatggtaagccatacaacaggaagtgtgatgtttatagttttggcatttgtttatgggaaatctattgctgtgacatgccttacccagacctaagttttgccgatgtctcatctgccgttgttcaccagaatttgcgcccagacattcctcgctgctgcccaagcgcatttgcgaatgttatgcggaaatgctgggatgcaaaccctgataaacgccctgatatggatgaagtggtgcagcttttagaggctctggacacgagcaaaggcggtggcatgatacctgatggccaatcatcaggatgcttatgcttcacaaaggctcgtggtccatagatacttttcatggtactcccttcccttggcaacactttccccgtgtaaatgac

SEQ ID NO: 101133 - DNA, 328 bp, Zea mays
gaggtcggtggccccggccggcttcagccgccacggcggcggcctccagcagcacgtcgggcaggagaagttcgaggagggcgacacggtcttacgcgccggcgccaaccaccatcaccaccatggtcaccacggcggccacggcttcgtggtgcgcgagaccagggtcgaagaggacatcaacacctgcaccggcgaggtccacgagcgcaaggagagctatctcgccagcgctaactgatccgaccggctgtcggcatacacgcccgttcgtgcttgcctgcgtgccttatgcatgtctctggttgactggttgtgcaaggtcatc

SEQ ID NO: 101134 - DNA, 415 bp, Zea mays
cccacgcgtccggcgtcaagaggctccaggacatcggcgtgatcagcgccgtgccgggggtgaaggcgctcgacatgaacaccgtcgaggacgagatcgtgcgcctgacgcgcgaggtcgttcccggcatgatcgtcaccggaatggaggtctccgagattgactgcgcccccaggatgggcccgacgtttggcgccatgatgatctgcggccagaaggcggcgcacctggcgctcaaggccctgggcaggcccaacgccgtggacgggaccatgtcgccgacgttgcgcgaggagttgatgattgcgtacaatgacgactaggtcgttgacgcctgagtgcggcaagcatagaagatgatcgacgccagcagcgtcttatcttaattgcccttgtgttcaatgatgaatcgatc

SEQ ID NO: 101135 - DNA, 454 bp, Zea mays
  unsure (1)..(454): unsure at all n locations
gtcggtggagatatcgtcgcctttgtcgtccaggtacacgagcgtcgaggacctcgggccaccggagaaggctgcagagaaggtcctcggtcagtacctgacggagttcatgtccaccaggctgggcgttcggcgtgaatccaacgtcctatcggcgtcatccaaggtcgctgacgatggcaagctctactacgaggttgaggtgaacataaaatcctatgcgagcaacaacgagctggcggtgatgccacaggacagggtgcagagcttggagtgggaccgccgatacctgtcagtgctcggcgtcgagaacaagcggctctacgagctccggctgcagacgcccgagcaggtgttcatgcaggaagaggaggacctcanaagagtcatggactccttcagggtcatcaaggcggcgtagtttgtcgatagtagagtgcacatgttttggttt

SEQ ID NO: 101136 - DNA, 427 bp, Zea mays
cccacgcgtccgcgcagctgaggcggcggaaggggagggtgccgtggccaccaagccgaagggcgagaagccgccgccgatcgggcccaagaggggcgccaaggtgaagatccttaggagggagtcctactggtacaacgggatcggcaacgtcgtcaccgtcgatcaggatcccaacacccgctacccggtggttgtgcggttcaacaaggtgaactacgccggcgtgtccaccaacaactacgccttggacgaggtcttagaggtgaaatgagtggggccggccggctcaagggctccgcgctagctaccgtgtgattgatttgtagtagttgtgaaatgaggctgtgaagctgcatgctgtgctggctagcgtcacaacatcgatcctatgtgtaatagcataatccacataatcatatcatgt

SEQ ID NO: 101137 - DNA, 455 bp, Zea mays
cccacgcgtccgaagatgtggatggcttccatcctctcaacattggcaagcttgcagggaaaggcagagagccactgttcgtaccatgtacgccaaaggggtgcatggagctcttgtcaaggagcggagtcactgttaaaggtaagcgggcagttgtggttggtcgcagcaacatcgtcgggctacctgtatccctgctccttctgaaggcagatgcgaccgtatctgttgtgcactcgcggacccctgatcctgaaagcattgtacgcgaagccgacatagtcatcgcggcagctgggcaggctatgatgatcaaaggtgactggatcaagccaggtgctgcggtcatcgatgtcgggacgaactccgtcgacgaccctacccggaagtccgggtaccggctcgtctgcgatgtggatatcgcagcggcgagcaatgtttgctggtacctgact

SEQ ID NO: 101138 - DNA, 359 bp, Zea mays
gtccagaacctcatcaagggggtcaccaagggctaccgctacaagatgaggggggtggacacccatttccccatcaacgcgtacatcaccaactccaacaccgccatcgagataaggaactttctcggcgagaagaaggtcagaaaggtggacatgcttgacggcgtgaccatcctccgctccgagaaggtcaaggacgagcttattctcgatggcaacgacgtcgagctagtatctcgctccgccgccctaatcaaccagaaatgccatgtcaagaagaaggatatcaggaagcatttggatggtatctatgtgagcgacaagggtgtgatcgaagatgagcactgagggacaattag

SEQ ID NO: 101139 - DNA, 402 bp, Zea mays
acgggaagcggcacctcatggatccagtggatcgcgccgcgatgcagcgacagaaacgaatgagcaaggaccgctagtctgctgcccgggcacgggagaggaagcaggcttatatcgccgagctagaatcgctggtaacgcacctcgatgaggagaatgccgagttgttgagagaacacgaagagcggtaccagaagcggcttatagagctcttggaacggatgacgccactcattctgaggaaaaaaccatcaggagatcttagatgaacgaactcattgcagtggtagattggagccaagctcagtcgccgtctctttacagttataacatagaatttgcccctgtatgtcattgttctatttatatatgcgcgaactaagttgtattatctcagctgaa

SEQ ID NO: 101140 - DNA, 430 bp, Zea mays
cccacgcgtccggagcacctcgtccgcaacccgtttggtcaggttccagctctgcaggagggagacttgtacctcttcgaatcacgagcaatctgcaagtacgctgctcgcaaaaacaagccagagctgttgagggaaggaaacctcgaggaggcagcaatggtggatgtttggatcgaggtggaggctaaccagtacaccgctgcactgaaccccattctcttccaggtcctcatcagtccgatgcttgggggatccaccgaccagaaagttgtggatgagaaccttgagaagctgaagaaagtgctagaggtgtacgaggcacgcctgaccaagtgcaagtaccttgctggagacttcctcagcctcgccgacctgaaccatgtgtctgtcactctcttgctgttcgctacgccctacgcatctgtgc

SEQ ID NO: 101141 - DNA, 443 bp, Zea mays
  unsure (1)..(443): unsure at all n locations
ggctctacaagcaagccacggttggagatgtgaataccgatcgtccgggcatattctgccaaggggacagggccaagtgggatgcctggaaggctgttgaaggcaaatcgaaggatgaggcgatgaatgactacatcaccaaggtgaagcagctccaggaggaggctgccgcctcttaaaagtctcttaatagtgttgccaaacagctatttgtcagatgagctttgtgccatttcctcattagaagtatatcattcgatccattggggatctgtgaaccatgtacctgtttatgtaactntttttttttcgaaagagcgcangaggactgcgcacccatatattaaagtagagggaaaataaagggccataatgatgatatccatctatctatctatgtaactggtttatgtaccatgtacctgtttatgtaactggttacc

SEQ ID NO: 101142 - DNA, 438 bp, Zea mays
gctacgcatggccaccaccgcccgcccgctcgtcatcaacaaagacgctgacggcggcgagctacaagcgggcgcagtcgatgccgtcgaccccgacgacgccggtgacgccgtcgtcgtcgtcgtcgtcgacgacgccgagcggcgtcggcaacgtgtggcgcagcgtcttccactctgggagcatcctggccaccatgggcatgggcgccaacctgttcgaccgggcgcagcccaactccctcaccgtctactactggctctacagcgacgagaccaggagcaaccaccgctagatcgggcgagatggatgtacagtgaagaggccatgtttgctggtccttgtggttatctaaaacgcacgcatgctctattatagctagtcatcactatatatatacttgtgtttgtgtatcgttgatcttgttctgctggtgt

SEQ ID NO: 101143 - DNA, 423 bp, Zea mays
  unsure (1)..(423): unsure at all n locations
gcaaggagcgggagttccccgggcaggtgctccgctacgaggacaacttcgaggccggcagcaacgtgtccgtcatcatccagcccacctccaagaaggccatcaccgagtacggctcccccgaggagttcctatcgcaggtcgactacctgctcggcaagcaggcctacggcggcaagaccgactccgagggcgggttcgagaccgacgccgtggccaccgccaacgtgctggagagctccacccccgtggtggacggcaagcagtactacagcatcaccgtgctgaccaggacggcggacggcgacgagggcggcaagcaccagctcatcaccggcaccgtctccgacggcaagctctacatctgcaaggcgcangccggcgacaagcggtggttcaagggcgccaggaagggcgtcgaga

SEQ ID NO: 101144 - DNA, 361 bp, Zea mays
accggtccggaattcccgggggaaaaagagcgcatgactgctgtgaataatattatcgggaccttcctcggacacaacatcgtcgacagtcacgacctacttctatacctagctgtgctatcatcttgagtcagtctatccattgtttgctcccagtctggtgattaaaagtctgcaaattctgtttgcggaattggcatgcgatacaaattaggcttctttaagtaaatccggttgccggtacacagctgtattaattcacctgtcactgaatggaataccgagatgcaaaaggcacatcactatgcctgactaaaataacacggtgaaggttcagccttgctgtggttgctaaacaaaa

SEQ ID NO: 101145 - DNA, 474 bp, Zea mays
gttcggaattcccgggtcgacccacgcgtacgctggaattcttactgtcttcttctgtggaatagtaatgtcacattacacttggcatagtgtgagagaaagttctagggttaccaccaagcatacttttgcaactttatcattcattgcagaaattttccttttcctctatgttggcatggatgcattggacattgagaagtggaaattagctagtaacagtcctaataaaccaattgctttaagtgcaattattttgggcttggttatggttggaagagcggcatttgtattccctttgtcgttcttatccaacctaagcaaaaaggaagcccgtccaaagatctccttcaagcaacaagtaatcatatggtgggctggtctcatgacaggagcaatgtcaattgcgcttgcctatgacacgtttacagcatctggtcacactgaaatgcgagtcaatgctatcatgatcac

SEQ ID NO: 101146 - DNA, 451 bp, Zea mays
  unsure (1)..(451): unsure at all n locations
gctctgcggcgccgacggcctgccgcacctcatcgtcagcggcgaccagcggcactggggcgagttcgtcaccccgggcctgctcttcctctacatcgccgggtggatcgggtgggtcggcaggagctacctcatcgccatcagcggcgagaagaagcccgccatgagggagatcatcatcgacgtcgagctcgccacccgcctcctccccagggggttcatctggcccgtcgcggcctaccgcgagctcatcaacggagacctcgtcgtcgacgacaaggacatcggctactactagctgctgcacctgtgcttgcacatcgctgctggcgagttgggcagtcgtcgtacgtgggaaacatggcttttggtgtangaggaaggaatggaagtggtctgttgtacttaaagaactagatgaagaagtcttgtataactgaaacttcacccc

SEQ ID NO: 101147 - DNA, 444 bp, Zea mays
gcgccgcgcccgcgccgccgcgctcaacatcgtgcccacgtccaccggtgccgccaaggccgtctcgctggtgctccccaacctgaagggcaagctcaacgggatcgcgctccgggtgcccaccccgaacgtctccgtcatcgacctcgtcgtgcacgtctccaagaagaccctcgccaaggaggtgaaccaggcgttccacgacgccgtggccaacgagctcacgggcatcctcgaggtctgcgacgtgccgctcgtgtccgtcgacttcaagtgctccgacgtctgctacaccatcgacgcctccctcaccatggtcatgggcgacgacatggtcaaggtcatctcctgggacgacaactagtggggctactcgcagagggacgtcgacctcgctgacatctgcgccaaccagtggaagtgaagcgtcgcattgtaatactc

SEQ ID NO: 101148 - DNA, 412 bp, Zea mays
ctagatccatcgcccggggtccgtcatgatcccgacgcggtccgcgcaggcgtcgttgggcgaccgcaccaacgagttccgcgccgccgtcgagagagcgcgccgccacgccgtaccttcctcgtcgtcagcccccgccgcgccgagtagcagctataccgggcccctcaacgggttgatcgcagccacgtaggctcgctcggagttcaacaaccgcgcgttcaagatcgtgctcgggatccaccagacctcacagaagctatcccgccttgcgaaattggccaagagatcatctgtttatgatgaccctacagtggagattcacgagttgactgcagtcattaagaacgatatcacggctatgaattctgctgttgtagacctacaagctctctgcaatttacacaatgac

SEQ ID NO: 101149 - DNA, 448 bp, Zea mays
gagctgtcggcggtgtgcccgtgggcggaccaggtgcgctggcactaccactgggcgagcccgctccactacgccaacaccccccaagtctgcaacttcaagttttctcgggactgccacaattctcgtggccagcaagggatgtgcgtcgtcggggctatcaacaactacacggaccagctctacagctacggccagaagacttcgtataacctgacggagagcctgatgttcctggcacacttcgtcggcgacgtccaccagccgctgcacgtaggcttcgaagatgacgagggcggtaacaccatcaccgtccactggtaccggaggaaagcaaacctccatcacgtgtgggatgtcagcattattgatacggcaatcaaggacttctacaacaagagcatggataccatggtagaggctctcaagatgaatcttaccgatggat

SEQ ID NO: 101150 - DNA, 460 bp, Zea mays
  unsure (1)..(460): unsure at all n locations
cggacgcgtgggttgtaccaagtccacttatgctcaaaagtgaaaatgtacaagaggatggggtctatttattggaaaacggtgaggatggtctagtctacgtaggaaacatggtaaatccggctaccctggaacaaatattcggtgtctcttctttggctgcattaccagcccagttagcattggagcagtttgacaacgaactctcgaggaagattaacgaagttgtaaatgaaattaggcgccagaggtgctcatacttgaggttgagactatgcagaaggggcgaaccatctggagattttttccggtcatttctaatagaggacaaggcacctggcgtcttctcctacgaggagtttctcgtgcatgtccacaggcagatccaaagcaagatgacctgagggccaagcgaatgcaaaagcaacatgaactgaaggtcangctggcaaatgcaaaa

SEQ ID NO: 101151 - DNA, 222 bp, Zea mays
aattcccgggtcgacccacgcgtacgccgacgcgtacgcgtaagcatgcgcacatttgcttttcttcctaacttgccgaaagtagggtgaggatagactgcaacgctgtgcggcgatctcatactactaccgtcctgtcctgatccagctcaccaacatcctagtcaactgcaagcaatgcttaacccaagctgactaccttgaacttaaagatgatcatca

SEQ ID NO: 101152 - DNA, 283 bp, Zea mays
ggcctttccgtgctctcttggatgttggccttattaggactacgactgggaaccgtgtgtttggtgccctcaagggagctttggatggtggcctggatattcctcacagcgagaagaggtttgctggtttcaagaaggatgacaagcagctggatgctgatatccatcgcaagtacatctatggtggccatgttgctgactacatgaggaacctcgctgaagaggagccagagaagtaccagtctcacttcagtgagtacattaaaaagggaattgaggctga

SEQ ID NO: 101153 - DNA, 246 bp, Zea mays
cggacgcgtgggcggacgcgtgggcggacgcgtgggcggacgcgtgggttgcggctgacaaactcatatatgctcgtgagactattaagtcgattgctcgaaagcatggactggtagcaacatttcttccaaagcctgatttggatgattttggatctggttctcacgtgcatctgagcttgtgggagaacgatcagaatgtttttatggggtcaagtaaagatacctttcatggaatgtcaaaac

SEQ ID NO: 101154 - DNA, 398 bp, Zea mays
  unsure (1)..(398): unsure at all n locations
gttctacctgtggttcgacccggccgccgacttccacacctacaccatcatctggaacgacaagaacgtcatcttcaaggtggacgacctcttcgtgcggtgcttcaagcggtacccggacctggcgtacccgggcgggaagcccatgtcggtgcacgccacgctgtgggacggcagctactgggccacgcagcaggggaaggtgaaggtggactggtccgtcgcgcccttcggcgtctgctaccgcggctactccgncgacgcctgcgtgcccgacggcgacgggccgccgctcttctgccccgccggcaccgaccgctggatgagccgccagctcgacgccgtcgagtggggcaccgtcgcctgggccaggcagaactacatgcactacaactact

SEQ ID NO: 101155 - DNA, 381 bp, Zea mays
  unsure (1)..(381): unsure at all n locations
cagccgcagccgctgcttttcgttcgtcttcatcctacgcgagggcgaaaccgagagaccctctccctcctgtactccggccgacacatccaggggcgatgacgctgggtagctccggcgccggatcgagcgtcgtcgttcctcgaaacttcaggctattagaggagctcgagcgtggagagaagggcattggtgatgggacagtgagctatggaatggatgatgctgatgacatctacatgcggtcatggactggtaccatcattggccctcacaatactgtacatgagggtcgcatctaccagctgaangttgtttgtgacaaggactatncggagaagccaccatctgtcagattccactcaagaatcaacatgacat

SEQ ID NO: 101156 - DNA, 417 bp, Zea mays
  unsure (1)..(417): unsure at all n locations
ccggcatcgctccgttccgctccttcttgtggaagatgttcttcgaggagcacgaggaggacaagtacaccgggctggcgtggctgttcctgggcgtcccgaccagcgacaccctgctgtacaaggaggagctggagaagatgaaggagatggcgccggacaacttccggctggacttcgcggtgagccgggagcagacgaacgcggtcggggagaagatgtacatccagacgcgcatggcggagtacaaggaggagctgtgggagctgctcaagaaggacaacacctacgtctacatgtgcgggctcaagggcatggagaagggcatcgacgacatcatgctcgacctcgcagccaaggacgggatcaactgggtggactacaagaagcagctcangaagagcgagcaatggaacg

SEQ ID NO: 101157 - DNA, 391 bp, Zea mays
  unsure (1)..(391): unsure at all n locations
ctccgtcgtcgtcaaggaggcgcgcttcgtcgagtacttcagatcggctacaccggagaccgagtacgggaggatgaacatcggcagccggccagccaagaggaggcccggcggcggcatcacgaccctgcgcgccatcccctggatcttctcgtggacccagaccaggttccacctncccgtgtggctgggagtcggcgccgcattcaagttcgccatcgacaaggacgtcaggaacttccaagtcctcaaagagatgtacaacgagtggccattcttcagggtcaccctggacctgctggagatggttttcgccaagggagaccccggcattgccggcttgtatgacgagctgcttgtggcggaaagaactcaagccctttggggaagc

SEQ ID NO: 101158 - DNA, 365 bp, Zea mays
cggcggctggcatggccagggatggcttggcaagggcgcatggagcgttggctggacgcgagatgggcaaggatgggacatgccaacgctgtggggagaggcttgtctgcattgacattgatccagccgagactgacaactttgcaaattcgctcaccgaactggccattaagcttgaggccagggaagatttcctcagttttcagagctggctacgccgccatggaccattcgatgctgttatagacgctgctaatgtaggcctttacaaaagtaaagatttctgtttttcacaggttaactctgttgtaaatgctatacagagagtaactaaatcaaagaagttgccactgatcgttttgcat

SEQ ID NO: 101159 - DNA, 378 bp, Zea mays
  unsure (1)..(378): unsure at all n locations
cttggcgcaggagcattacaaggatttgaaggataaacctttctttcctaagctgatcgattacataacttctggccctgttgtctgcatggcctgngagggtgatggtgttggtgcatcagctcgganattaataggagctactaaccccctttcaagctgaaccagggactataaggggtgatcttgcagttcaaactggaaagaaccttgtccattgaaatgataatcccgataatggcaagcgtgaaaatgaactgggggtcaaagaaggcgaggtctgccaatgggaatcaagtcaagcaccgtggcttataaaataactattgctaatcatttccagaagtgtatttcaatgtttttttggggtcgtcttga

SEQ ID NO: 101160 - DNA, 430 bp, Zea mays
gctgcacttaaaggaaagctacatgcatttaatcagaacattagtgaccaagttgctggttacatgagagatccaagccggatgattaacaggatgtacttgaccaactctgctgttagtgtatttggaaaggatgtgggagaacctggaacagctgaggaggggcacaatatggaaggtgatcctgaacttattgacgattctgagttttatcaacaacttctcaaggagtttcttgaatcatgtgataagggggcctcagagtcggcaatttatgctctaaaaaagcagcaggttaaaaagaggaagcttgttgatcgtcgtgcttcaaaaagcagaaagatacggtaccatgtccatgagaaggtcactaatttcatggccccagagcccatggttcttccttcaatggctccgaaagttgttgaga

SEQ ID NO: 101161 - DNA, 397 bp, Zea mays
cgcaccccggcgggcccgccatcctctaccaggtggaggccaaggtcgggctggacagggccagtatgcgcgccatccgccacgtcctctccgagtacggcaacatgttcagcgcctgcgtcctcttcatcctcgacgagatgcgcaagcgctccgccgaggacggacaggccaccacgggcgagggcctcgactggggcgtcctcttcggcttcggcaccgggactcaccgtcgagaccgtcgtgctccacagcgtccccatcaccaccggagcggtcaccgcctgattcatcgattcatcaacgatcaaattactcccctctgcgatccaattcgtcgtcggctcgttcgtcattatcttacgtcgtacgtccgcaaataatgtgctctctgcta

SEQ ID NO: 101162 - DNA, 448 bp, Zea mays
cccacgcgtccgcccacgcgtccgcattatggcagggcaacgtttcacaatttaatgaaggctccacttatttgatgggatggttaagagattacctatggttaaactcttcacaacttattaatggatataatccttttgggatgaatagtttatcagtatgggcttggatgttcttatttggacatcttgtttgggctacaggatttatgttcttaatttcctggcgtggatattggcaggaattaattgagactttagcatgggctcatgaacggacacctttggctaatttaattcgctggagagataagcccgtggctctttccattgtgcaagcaagattggtcggattagcccacttttccgtgggttatatattcacttatgcagctttcttgattgcctcaacatcaggcaagtttggttaatttagttattttttttt

SEQ ID NO: 101163 - DNA, 458 bp, Zea mays
ttcgacgccacgcgtacgacgtcttcaaaggattgctggatcagatctcgacgatatatctttggataaggagctccgtccagaagcagttgatgagatcaaaaatttgcgcaagaagtcacaaactgctgatggtgatacgttcatttcggaccctgtgcatgagaaaagagtcagaagaatccacagggcacttgactctgatgatgttgagcttgtgaagttgcttcttaatgagtccgacatcacattagatgatgccaacgcattacactatgctgcttcttactgtgatcctaaagttgtctcagagctgttagatttggcaatggctaacttaaatttgaagaatagccgtgggtacacagcactccacttggctgctatgaggagagaaccagctataatcatgtgtctccttaacaaaggggcaaatgtgtcacaactgacagctgatg

SEQ ID NO: 101164 - DNA, 437 bp, Zea mays
  unsure (1)..(437): unsure at all n locations
gccgccgccaaaatggtgaacgttcctaagaccaagaagacctactgcaagaacaaggagtgcaagaagcacactctccacaaggttactcagtacaagaagggtaaggatagcctgtctgcccagggaaagcgccgttatgaccgcaagcagtcaggatatggtggccagaccaagcctgtcttccacaagaaggccaagaccaccaagaaaatcgtgttgaagctgcagtgccagagctgcaagcactactcacagcacgcaattaagaggtgcaagcattttgagattggtggagacaagaagggcaagggaacatctctcttctaagtttctcatcacccatctcgatgttggatcgaaactgtgggtctactactgttctaaaaactcgtcaaatttcaatgttactagtaagtcttgaagcangtcatgct

SEQ ID NO: 101165 - DNA, 422 bp, Zea mays
cacgaatagattggatctatccggctgcactttagaatattcttagtattatcttggtgaataagaaaaggtgcacgatctcgacaaattacttctgaataacttcagaaatcatatggaagaaccatagcatttcgcgattcattggtaaatttactatgattctctatagaccaataatgtgagaccattaacacggttaaaggctaaactgctggagtccgggcaaaaagggggactctttctacaactacattagcattagtctcgaaatgctttaaacgggaaatagctaacgtagaatttatctgatctagaacactcatatcgattaaataggtagaactatgtactagaaaggcacgcagcccttttttcaatgccaaatcgacgacctatgtatgaaaaaaaaaaataagggc

SEQ ID NO: 101166 - DNA, 396 bp, Zea mays
cagatgctgatataacagttgcagccctgccaatggatgaacaacgtgcaactgcatgtggtcttatgaaaattgatgatgaagggaggatagttgagtttgcagaaaaaccaaaaggagagaagctgagatcaatgatggtagacaccactatattgggccttgatcctgaaagggccaaagaactgccttatattgccagtatgggaatctatgtttttagcaaagatgtgatgcttcgtcttctcagagaaaattttcctgcagcaaatgactttggaagtgaggttattcctggcgcaacagaaattggattaagggtgcaagcttacttatatgatggttactgggaagatattggtactattgaagcattttataatgcaaacttgggaa

SEQ ID NO: 101167 - DNA, 410 bp, Zea mays
gcggctgagccaggaggagatcgaccgcatggtgcgggaggcggaggagttcgcggaggaggacaagaaggtgaaggagcggatcgacgcccgcaaccagctggagacgtacgtgtacaacatgaagaacacggtgggcgacaaggacaagctcgcggacaagctggaggcggaggagaaggagaaggtggaggaggccctcaaggaggcgctggagtggctggacgacaaccagtcggccgagaaggaggactacgaggagaagctcaaggaggtggaggccgtgtgcaaccccatcgtgtcggccgtgtaccagcggtcgggcggcgcccctggcggtgacgctgacggcggtgttgacgacgaccacgacgagctgtagatggttgtagatggtggtggtgacgtgg

SEQ ID NO: 101168 - DNA, 362 bp, Zea mays
cggacgcgtgggctgagcgtccagataactggagggagaatgctggtccagctcaagaggtatttgctagaactgcaattgccatttcaaagtttgaacccgtcacgttatgtgcaagtgccaagcagtaccccaaagtccacgagctgatggaacatcaaaccaacatcagggtcgttgagatgagcatgaacgattcctggttccgcgacatgggccccacttttgtcacctgtaaaggggattcaggaattgcagaacaaacaatagcaggaattgattggcaattcaatgcctggggaggaatctatgacgactggagtcttgacagcgatgttgccaagaaaatagtcgagatcgag

SEQ ID NO: 101169 - DNA, 451 bp, Zea mays
  unsure (1)..(451): unsure at all n locations
atgccaccaaaacattcgacgaagcattggacaccaccaagactgttatttggaacgggcccatgggagtgtttgagttccagaagtttgcagctggcaccgaggcgattgccaagaagctagctgagcttacaaccacgaagggtgtcactaccatcatcggcggtggcgactctgtcgctgctgtcgagaaggctgggctggccgacaagatgagccacatttcgaccggcggcggtgcgagcttggaactcttggaaggcaagactctacctggtgtccttgccctcgatgacgcctagatccgctgctgctgctgctactcaggttctgccagctttgcgtgtcatcttgtttcggaccttggtgtagcactgcaaggctaaggtttactcctncacacatggactttcgaggataggcttgccaccgtgttttgctagatgagtcg

SEQ ID NO: 101170 - DNA, 441 bp, Zea mays
gccagtcaaggtcagcaagaagaactcggctgcagtcaccaagttcctcgatgagctggctaagattgacttccctggagccaaggtggtgagcgaggcggtggccaagtccggcacctcgcccctgcttccggcgatcaccttcatcttggacaaggtcgcaccgtttatccccaaggaggagcccaaggcggagccggcggcggaggccacctcccgggaagtcgccgtggaggagaagaaggaggaggccgagccagctgcagcgactgaggcggcaccggcgccggcagagacaccgtcggaggcggcggtggtagaggagaagaaggaagaagagaagaaggaagaggaggataagccggctgccgaagaagcggcgccgtcagcagaagcagcagctgctgctgaggagaagtgatcctgttgacggatcgagca

SEQ ID NO: 101171 - DNA, 403 bp, Zea mays
gcgccacccacccacccactcgcttcagccgcctccgccgcgcgtaccaagcaggtggagacaggatgccggctggccacggcctgcgctcgcggacgcgcgacctcttcgcgcgccccttccgcaagaagggctacatcccgctcaccacctacctccgcacctacaagatcggcgattacgtcgatgtcaaggtgaacggcgccgtccacaaggggatgccgcacaagttctaccacggccgcaccggtcgcgtctggaacgtcaccaagcgcgccatcggcgtcgaggtcaacaagcaggtcaatgggcgcatcatcaggaagcgtatccatgtccgtgtggagcatgtgcagccgtcccgctgcacagaagagttccgcctgaggaaggcgaagaatga

SEQ ID NO: 101172 - DNA, 197 bp, Zea mays
tcgcggcgccactgagccactcaacgtcgagatcgagacgacccgagtccgccgcgcccgtgcaccaccgaccgtcgaactcccgaaagtaactctatttcttgatcaacatcaacatgtcgcgggaggataatgtttacatggccaagctggctgagcaagcagaacggtacgaggaaatggttgagtacatggag

SEQ ID NO: 101173 - DNA, 346 bp, Zea mays
  unsure (1)..(346): unsure at all n locations
cggacgcgtgggctcgccgcaagaccgtcaccgncatggatgttgcgtacgccctcaagcgccagggccgcactctgtacgggttcggcggttgagcgcatctcttccctcgtctgcagcggctgccggtggcgtttcctcagttccctctgacttgcttggcttgatgtacagagttatcagattaaaatatctctgatgtgcttcggtattgggcggaatcatgggtcccagcagtgctggggaatcaaggatcaagatgtatctttctttgccagaattgaatggtcaaatcgaaatcaagatggatctttctttgcaagtaaaaaactttgctattgggccc

SEQ ID NO: 101174 - DNA, 378 bp, Zea mays
cccgtccacgttcgccacgctcgccatggacccggacaggaagcgggaggtcgttgacgaccgcgacatgttccgcgacggcagggactactacgcgtccgtgggcaaggcgtggaagcgcggttacctgctgttcggcccgtccggcaccggcaagttcaccatgatcgccgccatggccaactacctgggctacgacatctacgacctggagctcacggcggtcaagagcaacacggagctcaagaagctcttcatcgagaccaagagcaagtccatcatcgtcatcgaggacatcgactgctgcatcgacctcaccggcaagcgaaagaagaagaagaaggacaagaacgatactaggaagaagaagaagaagcg

SEQ ID NO: 101175 - DNA, 418 bp, Zea mays
  unsure (1)..(418): unsure at all n locations
gngtactacccacttacccttcatttcagtgaagattacccaagcaagcctcccgaatgcaagttcccacagggttttttccacccaaatgtttatccttcaggaacagtctgcctctcaattctcaatgaggatagtggttggagacctgctatcactgttaagcagattctagttggaatacaagacttgcttgatcagcccaatccagctgatcctgcccaaactgatggttatcacctattcatccaggatccaacagattttaagcgacgtgttcgtctgcaggccaagcattatcctgctctggtctgaggatgttggcataccatagatccatgatccatcctgcacatccgcatagtagttgcaaatgttaaaattatggtctcaaattggatttgacaagacataagtt

SEQ ID NO: 101176 - DNA, 453 bp, Zea mays
caccactccgcgctagctgaggacggtacagcggcacagaggtgcgacgtacgaggacgacgacgcaggcgccacacatggcatcccagctctccgccgccgtgccccggttccacggcctccggggctacgccgcgcccatgtccgcggtggcagcgctgccgtccgtgagggtgggcaggaagaggtcgtcgtcgcagggcatccgctgcgactacatcggctacgccaccaacctgatcatggtgacgacgacgacgctgatgctgttcgcggggcggttcgggctggcgccgtacgcgaaccgcaaggcgacggcggtgctgaagctggaggcgcgcgactccggcctgcagacgggtgaccccgccgggttcaccctcgccgacacgctggcctgcggcgccgtcggccacttcctcggcgtcgcttcgtgctcgggctcaagaacac

SEQ ID NO: 101177 - DNA, 410 bp, Zea mays
cgacaaacatggggaagcctgcgaagatcggagagtggggtggatacgccggcgatcgtcgggatctgagggctactccggaccggctgatcgaggtgaaggtcacggcggacaacagcagctgcatccgctccatctccttcatctacatcggagccgatggcaaaccgtacgaggaggggccatggggtttcggccacgctggcacggagtacaagattgatctgtgcaggttcgacgagagcttgacggagatctccgggaccacgggcccagcctacaacattgacaatctggtcaagtctctcaaattcgtcaccaacaaacgcgcttacggaccgtacggcagggacgagggcaccccgttccgtgtcaaggtgatgaacaacggccacgtcgctggcttcttt

SEQ ID NO: 101178 - DNA, 400 bp, Zea mays
  unsure (1)..(400): unsure at all n locations
cccacgcgtccgctaagctggccaaagctattttcaattcagtgataaattgctgcatgtaggttctagggcttcaaaggttgacactttgttcttttatagcaagggaagtgtctcaatatttttttggtctatgttgatgacattgtagttgctagctctntataggatgctattgatgctatgctccaagatttgagttcagagattgcatcgaaggacctaagacaactccattacttccttggaattgaggtatagaaaactggtgatggcaattacttgtctcagactaagtacacgttagattcgcttttaggttgaaatgatgaattgcaggcctactttgactttgccagtacttcagaaaagttaagaactggtgaangtgaactactag

SEQ ID NO: 101179 - DNA, 412 bp, Zea mays
  unsure (1)..(412): unsure at all n locations
cggacgcgtgggcggacgcgtgggcggacgcgtggggccgcactaccacgccatggaggccaccaaggcgatcaggcccatcctcggngactactaccacttcgacccgacccctgttgccaaggcgacctggcgcgaggccagggagtgcatctacgtcgagcccgaggaccgcaagggcgtcttctggtacaacaagaagttctagccgccgccgctcgcagagctgagaggacgctaccataggaatgggagcaggaaccaggaggaggagacggtactcgccccaaagtctccgtcaacctatctaatcgttagtcgtcagtcttttagacgggaagagagatcatttgggcacagagacgaaggcttactgcagtgccatcgctagagctgccatcaagtacaagta

SEQ ID NO: 101180 - DNA, 433 bp, Zea mays
ctgaaactgaatataagagagattcattccagaaagtcgcagtctgcaagaactaaggtctcagacgaattcaggaaatcaaaaggtttgatactggtcagttcagacgtatctgcccggggcgttgactatcctgatgtcactcttgtaatacaggttggagttcctgcagatagagagcagtacatacatagactaggccggaccggacggaaaggcaaggaagggcaaggactcctactattggcaccttgggaaaaatattttcttggtgctgttaaggatttgtcaatagcagagtctgctgtaccaccagttgattcaagtgttgagacagaaaaatgcggtcagaaaagtagagatgaagagcaaagaatgtgcctatcaagcatggttagggtactacaactcgaacaagaccattggtcgagat

SEQ ID NO: 101181 - DNA, 440 bp, Zea mays
ggcaccgtcgcgctccgggagattcgtaagtaccagaagagcacggagctgctcatccgcaagttgcccttccagcgcctcgtccgtgagatcgcgcaggacttcaagaccgatctccgcttccagtcctccgccgtctctgcgctgcaggaggccgccgaggcctacctcgtggggctctttgaggacactaacctgtgcgccatccacgccaagcgcgtcaccatcatgcccaaggacatccagctcgcgcgccgcatcaggggagagagggcctgagcgaggcgagctcctctcaccgcaggcggcgtcgttgttgcttcgggcctgcttgtaggacttgtgcttctcttggtttcctttctggtggcagtggcatcttcgtaccattgtgctggttcttagaatcttagggatagagagttgttcagttgctgggt

SEQ ID NO: 101182 - DNA, 429 bp, Zea mays
gcctgtggttatcccgcacctgcccgttcacggccactccgtgccgcctgtcaccaaggcgccgccggtagacgttcctgagcacaaaccggcgccggtgcccgtgccggaccacaagcctccgtcgacgccgccggtagacgctcctgagcacaaaccggcgccggtgcccgagccggagcacaagcctccgtcgacgccggcgaacgctgcaccgtcgacgcccacggagccgtcagcgccggttaattcgccgccgaagccagcccccatctaccacccaccggcaaggcacgacgctgccactggcccgtagctcttcaagaggctgctcccgttcttcaagaagttgcccttctttcctccttctgcgatggagagtcagcactagaatgtttggacagtgtttcttggcttttgcaggttatg

SEQ ID NO: 101183 - DNA, 448 bp, Zea mays
cccacgcgtccgcccacgcgtccgcccacgcgtccgggcgaggagcggagcggagaggagggcccttctgcttgtttctccgctttgcaagatgtcgtccccgagcaagcgccgcgagatggaccttatgaagctgatgatgagcgactacaaggtggagatggtgaacgacgggatgcaggaattcttcgtcgaattcaagggcccggccgaaagtatctaccaaggtggtgtctggaaggttcgggtagaactgcctgatgcatacccttacaaatccccgtccatcggcttcatcaacaagatttatcacccgaatgtcgatgagatgtctggctctgtctgtttggatgtcataaaccagacatggagcccaatgtttgatctagtaaatgtttttgaagtattccttccacagctgttgctgtacccaaatccttctgatcca

SEQ ID NO: 101184 - DNA, 432 bp, Zea mays
gcggctctggtcgatggtgcccgccggcaaggccgcggaggcggccggcgcggaccaggcgcccgctcgtcgacgtgacgcagttcggctacttcaaggtgctcggcaaggggatgctgccgtccaggcccatcgtcgtcaaggccaagctcatctccaaggtcgccgagaagaagatcaaggctgccggaggcgccgtcctgctgaccgcttaggtccttttgcatcttgtttcaactatctgcgctaagaaatattctatctttttttgggtggatctatgagaccctggttttgagcacttggtaacgaatatgagttcgattatatcgatgctgcatacctcttgctgcatgtattattcattctatgcagttgcagttcatgtgggctgtgctactgagatatgaaatgttttggcatttttctgat

SEQ ID NO: 101185 - DNA, 411 bp, Zea mays
  unsure (1)..(411): unsure at all n locations
gggaacccgagcctcatccacgcgcagagcatctttgccatctgggcctgccaggtcgtgctcatgggcgccgtcgagggctaccgcatcgccggcggcccgctcggcgaggtcgtcgacccgctctaccccggcggcagcttcgacccgctcggcctcgccgacgaccccgaggccttcgccgagctcaaggtcaaggagctcaagaacggccgnctcgccatgttctccatgttcggattcttcgtccaggccatcgtcaccgggaagggcccgctcgagaacctcgctgaccacattgccgaccccgtcaacaacaaccgctgggcctacgccaccaacttcgtccccggcaagtgaaggaggcgccgncggtgacctttaggtgtccggatgcatgtgagcgcacgc

SEQ ID NO: 101186 - DNA, 335 bp, Zea mays
cccacgcgtccggcaagctagccgcgcgcgcttgttggaggacatcatttgctagatggcgcgtaccaagcagaccgctcgcaagtccactggaggaaaggctcctaggaagcaactcgctacaaaggcagcccggaagtctgcacccacaactggaggagtgaagaagcctcaccgttaccgcccagggactgttgctcttcgtgagatccgcaagtaccagaagagcactgagttgctgattaggaagctgccgttccagaggcttgtcagggagattgctcaggatttcaagacggatctgcgcttccagagccatgccgtgcttgctctgc

SEQ ID NO: 101187 - DNA, 352 bp, Zea mays
  unsure (1)..(352): unsure at all n locations
cacgcctcctacgcgcgcctcctggtgcagcacgccaccgccttcgtcgaggacctcgtccgcgtcggtgcgcgccgcgtcgccttcatcggcatcccgcccatcggctgcgtcccgtcgcagcgcaccatgtccggcggtctcgaccggggctgctcgcagggccacaacgagatcgccgtcgcatacaacgccgggatggtgcagcagctggcggcgctgcgggccaagtaccccgacacgctgctcgtcttcatggacatctacggcttcctctacgacatgatgatgcacccgcgcagctacggcttcacgcagtccaccagaggatgctgcggcacgggcctnctcg

SEQ ID NO: 101188 - DNA, 448 bp, Zea mays
  unsure (1)..(448): unsure at all n locations
gcgacaagagcgtctactttgacctcgacgacatcggcaacaccaccggacagtgggacctctacggctctgacgcgccctcgccctacaacccgctacagagcaagttcttcgagacgttcgcggctccgttcaccaagagaggtctgctgctcaagttcctgctgctgggcggcggctcacttctggcctacgtcagcgcgtcggcgtcaccggacctcctgccgatcaagaagggacctcaggagccgccgcagccgggcccgcgcggcaagatctaagctcagcttctccatttgcatggtctagtagcttgctttgtactgctagcgccggtcgatccgtcgcaatcgtcatggatcatctctctatcttggtggtacgctgntcataatttggtatatttgccattccgctatggtgtactncttggcatacatacaataat

SEQ ID NO: 101189 - DNA, 451 bp, Zea mays
cccacgcgtccgcttcaagtccgggtaccagtagttgcagagctcttcttccaaatggtggatgcacaggaaaaatgtacagtccaaacaacaatatgtcatttcctccaggaggatgcacatcgctgcgtttgcctgtggtggttacaggccaagaatttactcatgttgcgagaagcagacgtgtatatgcccatgcccatgactaccatattaattccatttcaaataatagcgatggagaaacgttcatatcagcagatgatctgcgaataaacctttggaatttagaaattagcaatcagagctttaacattgttgatgtgaaacctgcaaacatggaggatctaactgaggtgatcacttgtgcggagttccatccaactcactgtaatacactagcatatagtagctcaaaaggtactattcggctttatgatctgcgacagtc

SEQ ID NO: 101190 - DNA, 461 bp, Zea mays
gacccacgcgtgcgcccacgcgtccggggccagaaggtcaccgttcactgcaccggctacgggaaggagcgtgagctgtccaagaaattttggagcaccaaggaccctgggcagcagccattcagtttcagcattggtcagggttcagtgatcaaaggatgggacgagggagttatgaccatgcaagtgggtgaagttgctcgtatccagtgcacgcctgattatgcttatggagccggcgggttcccagcctggggaattcaaccaaactcagtgcttgtgttcgagattgaagtcctcagtgcccagtaattcgcatctgtcagctatggaaacgttggccatgcttctcaagtaatgaaataattccgttgtcacctcatgctacatacagcagattggtgttacgagttaaatcctgtgaaactttagcattctgtaaccgtggatgtcgagtttat

SEQ ID NO: 101191 - DNA, 391 bp, Zea mays
  unsure (1)..(391): unsure at all n locations
tgctcgtactcggttccgtgaattcccggcgtcgactccacgtccgtccgtgctttatctccannttccaagnnaagatntgtnngcatccgtgatnngtgaagactgnnnaaaatatgctgtctggtgacaaannacgagaaccccgtgtaagaatcgcnttgattttgnnngtgttgcttcngnnccttgnannagcttnncaaatcncnncagtgacctatgaaacgggcngnaaatactggaaccgctnnntggttaccanntggcacnnctgaggggttcttcnnaatggannaatccctttacatacagnngaaatgcngnnatgtttaccagnncttcgggaaatctgtnnttgtgggaagaaatatactgctnnngtgatatg

SEQ ID NO: 101192 - DNA, 378 bp, Zea mays
cccacgcgtccgcccacgcgtccgcccacgcgtccgggcggcggctacggaggcggtggcggctacggcggtcggcgcgagggtggtggtggcggctacggcggcggcggcggcggctggagggactgatgtgtgggcccatcctggcttcggccgagttatcttatctatctatagtatcgtgttaccgttcgcttctgtcaccgtgttagtgtccgttctacctttggattaggtgttggtacccctgttgttccctttggttgctcccgctatgaaacgagacgagagaagaatgagcaaggtttttgttcgcagctaaaaaaaacttataggcaacctctctattataacttattcaaacggtgaaaggaaaaa

SEQ ID NO: 101193 - DNA, 419 bp, Zea mays
  unsure (1)..(419): unsure at all n locations
cccacgcgtccggcaggagaccctcctcagctagtacctaccggccagtagtcgtcgcgtctgcaggcagatctgagttagccggcggatccgatccgtgcgcgtgctgctgtgtgtgtgtcggtggagatggccacagcttacgctcccatggcgagccaggtgatgaagagcagcctcgtcgtgcactcgaggccgaggggcctgtcaggcgctgctgcgctcacgaggcggcccggccggttcaccgtcaaggccatccagcccgagaaggcaacgtaccaggtggtgcagcccatcaacggcgacccgttcatcggcagcctggagacgccggtcacctccagcccgctcgtggcgtggtacctctccaacctcccggcctaccgcaccgncgtgagcccgctgctgcngggcgt

SEQ ID NO: 101194 - DNA, 294 bp, Zea mays
  unsure (1)..(294): unsure at all n locations
ccacgctcaagcccatcctcgacgagatcgagtccggcggccccgccgccatgatgaagtactggaacgaccctgaggctctgcagaagttcggccgcgcgatgggcgtcggcgtcggcccgtccggcgaggccggcggcgcagagcacgccgaggcggaggacgacgccggggaggaaggcgagtacgaggacgagtccatcgtccaccacaccgncagcgttggcgacgtcgagggcctcaagaaagcgctggaggacggcgcggacaaggacgaggaggactcggaagggc

SEQ ID NO: 101195 - DNA, 363 bp, Zea mays
  unsure (1)..(363): unsure at all n locations
gttttcctcagctcanagaaatctggcaagggtaagaagcctggcaagggcggcaaccgattctggaagagcattggccttggcttcaagactcccagggaagcaatcgaagggacctacattgacaagaaatgcccattcactggaactgtttctatcagaggcagaattattgctgggacatgccacagtgctaagatgaacagaactatcattgttcgcaggaactacctncactntgtaaagaaataccagaggtatgagaagaggcactccaacattcctgctcacatctctccatgcttccgtgtgaaggaaggtgaccatgtcatcattggccagtgcaggcccctgtcaaaaact

SEQ ID NO: 101196 - DNA, 454 bp, Zea mays
gatgaattgaaagaagccttggctgattgcgaagagaagccagaaattattcctggggagcaaggtgtcatagaagttgctcgccatccagatgcagttacagttgtcacagggatagtaggttgtgcagggctgaagcctacagttgctgcaattgaagctggtaaagacatagcattggcaaacaaagagacacttattgcaggtggtccttttgtgcttccccttgcacacaaacacaaagtgaaaattcttccagctgattctgagcactctgcaatatttcagtgtatacaaggcttgtccgaaggtgcacttcgtcgcattattctaactgcatcaggtggtgctttcagggactggccagttgacaggctgaaagatgtaaaagttgctgacgctttaaagcatccaaactggaatatgggaaggaagatcacagtagattctgcta

SEQ ID NO: 101197 - DNA, 425 bp, Zea mays
  unsure (1)..(425): unsure at all n locations
ctacctcgatggcacgctgcccggcgactatggcttcgacccgctgggcctctcggacccggagggcaccgggggcttcatcgagcccaagtggctggcctacggcgaggtgatcaacggccgctacgccatgctaggcgcggtgggcgccatcgccccggagatcttcggcaagatgggcatcatccccccggagaccgcgctgccgtggttcaagacgggcgtcatcccgcccgcgggcacctacaactactgggccgactcctacacgctcttcgtcttcaacatggcgctcatgggcttcgccgagcaccgncgncttcaggactggtaccaacccgggctccatgggcaagcagtacttcctcggcctcgagaagttcctcgccggctccggcgacccgtcctaccccggcgggcccctc

SEQ ID NO: 101198 - DNA, 437 bp, Zea mays
gttgcttctactacacgacgacaaacatggggaagcctgcgaagatcggagagtgggggggatacgccggcgatcgtcgggatctgagggctactccggaccggctgatcgaggtgaaggtcacggcggacaacagcagctgcatccgctccatctccttcatctacatcggagccgatggcaaaccgtacgaggaggggccatggggtttcggccacgctggcacggagtacaagattgatctgtgcaggttcgacgagagcttgacggagatctccgggaccacgggcccagcctacaacattgacaatctggtcaagtctctcaaattcgtcaccaacaaacgcgcttacggaccgtacggcaaggacgagggcaccccgttccgtgtcaaggtgatgaacaacggccacgtcgcttgcttcttttgccgctct

SEQ ID NO: 101199 - DNA, 334 bp, Zea mays
cggaattcccgggtcgacccacgacgtacgaccgtgtccatgttcaacgacatcaacacgcagctggacgtgaaccagacctactacgggaagctgggcgagctccgctgcctgttcgcctacgacgtcgccatctggagtcccgtcaccaggtctttggcaaaggtacggctgccacagcatcagcttgtcgaggactactacctcgggaagcacaggctgagccacgcgcagagcatgatcgggatctcagggctgccacatggcgctcatgggagccctcgacggataccggattgtcgacgggccggttgattaggctattgagccggtg

SEQ ID NO: 101200 - DNA, 458 bp, Zea mays
gcgctgggccgccggcgccggcggcgaagcggaaggagggagggaaggcggtgaacctgttcacggccgtcaaccaggcgctccacatcgccctcgacaccgacccccgcgcctacgtcttcggagaggacgtcgggttcggcggcgtcttccgctgcacgacaggcctcgccgatcggttcggcaagagcagagtgttcaacacgccgttgtgtgagcagggtattgctggatttgccatcggcctagcagcgatgggcaatcgagctatcgcagaaatccagtttgcggactacatatttccagcctttgatcagattgtcaatgaagcagctaagttcaaatatcggagtggaaatgaatttaactggggaggcttaacgattcgaactccctatggtgcttgtgggcatggtggtcattaccattcacagtcaccagaggctttcttctgtcac

SEQ ID NO: 101201 - DNA, 452 bp, Zea mays
cggacgcgtgggttttggtttcaggtggagccgaaccaagacttccatgggctggtatgcgagggcgccaacatgctaccgtccaagttcatggaagatgcatttcgcgatcgccatggaaaaattattaacattaggcatctggatcaagtgatcaagtctgttaacagatggtatcaggagcgtggcctaactgggttggtttcatatgctgagatactttctggagggattctgaggctgcaggtttcagaagctgaggttaataacattagcattcgctttctagacaggaagaccggtgaaccaactgttggaaaaacacagacggaaaccatccttcggcagcttaccaccaagaaagggcaggcttacaatagagcacaagtgaaaagggatgtagaaacaatacttactatgggaatcatggaagatgttacgataatcccaca

SEQ ID NO: 101202 - DNA, 251 bp, Zea mays
ccgagtcctacgagcagtcgcacgcaagtgtcaagagacgaaacggtcgacatggctcgcacgcaatctgccgtagcggtcgccgtggtggccgcggtgctgctgctggcagcggcggcgacgacctcggaggccgccatcacctgcgggcaggtgagctccgccatcgcgccctgcctctcctacgcccgcggcacggggtcccgcccctccgcgtcctgctgtagcggcgtcaggaacctcaagagcgc

SEQ ID NO: 101203 - DNA, 434 bp, Zea mays
  unsure (1)..(434): unsure at all n locations
cgctcgggtgcgtgttcccggagctgctcgcccgcaacggcgtcaagttcggcgaggcggtgtggttcaaggcgggctcccagatcttcagcgagggcgggctcgactacctcggcaacccgagcctggtccacgcgcagagcatcctggccatctgggcgtgccaggtggtgctcatgggcgccgtcgaggggtaccgcgtcgccggcgggccgctcggagaggtggtcgacccgctgtaccctggcggcagcttcgacccgctcgggctcgccgacgacccggaggcgttcgccgagctcaaggtgaaggagatcaagaacggccgnctcgccatgttctccatgttcggcttcttcgtgcaggctatcgtcaccggcaagggccccctcgagaacctcgccgaccacatcgccgaccccgtcaacacaacg

SEQ ID NO: 101204 - DNA, 433 bp, Zea mays
cccacgcgtccgcccacgcgtccgcccacgcgtccgcggacgcgtgggtgggcgcagagaatccccaagcaaacaaacagggtagagggagaggagaggagaggagaggagaggttgggtctgggacaccatggctccgatgaagctgtacggggcggtgatgtcgtggaacgtgacgaggtgcgcaacggcgctggaggaggctggctccgactacgagatcgtgcccatcaacttcgccaccgccgagcacaagagccccgagcacctcgtccgcaacccgtttggtcaggttccagctctgcaagatggtgacttgtacctcttcgaatcacgagcaatctgcaagtacgctgctcgcaaaaacaagccagagctgttgagggaaggaaacctcgaggaggcagcaatggtggatgtttggatcgaggtg

SEQ ID NO: 101205 - DNA, 278 bp, Zea mays
  unsure (1)..(278): unsure at all n locations
ttggagatgattccgtattacaatttggtggaggaactntaggacatccttggngaaatgcacctggtgcagcagctaatcgtgtggctttagaagcctgtgtacaagctcgtaacgaagggcgcgatcttgctcgtgaaggtaatgaaattatcaaagcagcttgcaaatggagtgctgaactagccgcagcttgtgaaatatggaaggagatcaaatttgatggtttcaaagcgatggataccatataaattaaaaaaaaaaaaggacataaaaac

SEQ ID NO: 101206 - DNA, 375 bp, Zea mays
aggctacagctcccgtctctccgccgcttgcttggaaaacgaagaaaccctcctccaccaacccaatccagctacatccgtctgggtgaactccagggccaggagcagttcgccgccttcgttcgcatcacctacgcggttcgatccaactggcaggaaggaacgtgatggccaagacgagctcgttcaagctggagcacccccttgagaagaggcagtctgaggctaatcggatcagagagaagtaccctgacagaattccagtgattgttgagaaggctgagaggagtgacattcctgacatcgacaagaaaaagtacctcgtccctgctgatcttacggttggacaattcgtgtatgttggtaggaagagaa

SEQ ID NO: 101207 - DNA, 456 bp, Zea mays
gcggagctgagctcggcgctggtgatcagcctgagcacgggcgtgtcgctcttcctgggccgctgcgtcttcttcaacttccagcgggagaacgtggcgaagcaggtgcccgcgcagaacggcaagacgcacttcgacgccggcgacgagcgcgccaaggagttcgcggccctgctcaagtccaacgaccccgtgggcttcaacctcgtcgacgtcctcgcctggggctcgctcggccacatcgtcgcctactacatcctcgccaccttcagcaacggatacgaccccaactttttctgagcgggtcgtcgggatgtactctacagacagccgtgtgcgtgtgcttgtcatgtatccgatcaaagttgggtaatttggacaagtagtgcaacttgcagaataatgggtattgtatagtgcagcatgccaacatgaatttgatctgtctctggtctc

SEQ ID NO: 101208 - DNA, 452 bp, Zea mays
cccacgcgtccggaagctgctcgcgctgtacctcactggagacaaggaaggtgctatctccagtctcaaggaatggttgagtgattcagcaattggaagcaatcctgttctgcggttgattgctggaattgtatttatgcatgagcaggactacaatgaggctctcaagcacacacactctggaggaactctggatttgcatgcattgaatgtccagatcttcatcaagatgcatcgttcagactatgctgagaagcaattgaagatcatgcaacaaattgatgaagaccatacacttacacaacttgcaaacgcatggctgggcattgctgttggtggctctaagatccgtgaagcttatctcatattccaagactttgctgaaaagtacccaatgacagggatggttttaaacgggaaggcagtctgctgtatgcacatgggaagctttg

SEQ ID NO: 101209 - DNA, 393 bp, Zea mays
  unsure (1)..(393): unsure at all n locations
acggagctccagaaggagaacatcaagaacgccgtctcctccaccggcaacatcacgttgagcgtcaccaagagcaacccggagaccggcgaggtcatcggcgtcttcgagagcgtgcagncgtgcgacaccgacctcggggccaaggcgcccaaggatgtcaagatccagggggtctggtacgctcagctcgagtgattcaagtgtctaactgctaggtgtccaaccgccgtaatggatcttgggaaggtgtatgtttaccatggaaacctttgaaaagcagaggaggaatcaagtttgtaaggaactggttaatgcaaattcggcctgtcgcttttttaaaagaaataacccatttggatttggaaacctttaaaaaatattcccaaccct

SEQ ID NO: 101210 - DNA, 437 bp, Zea mays
tctagatccgttcatcctggtggttttgtgaggtcgaaagcggcgagcgaattagaagatgctggacaagctgtgggacgacgtggtggccgggcctcgcccggagacgggcctcgagaagctccgcaaggccaccaccgcccgtccgctcgtcatcaacaaagacgcggacggcggcagctacaagcgggcgcagtcgatgccgtcgaccccgacgacgccggtgacgccgtcgtcgtcgtcgtcgtcgacgacgccgcgcggcgccggcaacgtgtggcgcagcgtcttccacccggggagcaacctggccaccaagggcatgggcgccaacctcttcgaccggccggagcccaactcccccaccgtctacgactggctctacagcgacgagaccaggagcaaccaccgctagatcgggcgagatggatggacag

SEQ ID NO: 101211 - DNA, 445 bp, Zea mays
cccacgcgtccgcgacgatgcgctcgccggacggcaagaagctggacatgctagcggaggaggacctcggcagcatgccctacctcaaggcgaccatcaaggagacgctgcgcctgcacccgccggcgccgttcctcctcccgcactactccaccgccgactccgagatcgacggctacttcgtcccagccgggacgcgcgtcctcgtcaacgcctgggcgctcgggagggaccgcacgacgtgggagaagccggaggagttcatgccggagcggttcgtgcaggaaccgggcgccgtggacgtccacatgaagggcaaggacctcaggttcatcccgttcggctccggccggaggatcttgccccggatgaactttggattcgcgaccatggagatcatgcttgccaatctcatgtaccattttgattgggaggttccgggctc

SEQ ID NO: 101212 - DNA, 443 bp, Zea mays
cccacgcgtccgcctcgcccaaatctgttttccactgctttgacggcgagaacgtggagagtgctcctcctcctatgaagaaggactacaagctggctaatcttctctgctgggaggaggaagcggatgccatggaggagaaggcgggagtgcttgatgagtaagacgggcttctggggtcgatttgcttctgagttgtttattttatatcgtcgcaatttcgtggttgtcgtttggttattctgtgaagcagccaagccaggctattgttatgaaaatttgtcgtctgtaagcatgtgaacttccgatgttgccacatgctggatcagtctgaataagtaagtatgcagctctaggtggtcagctgcgtctaccacaatgagcatgaacgtatggagaaatatctgtgaacccattttggttatgaataagatttgtttttt

SEQ ID NO: 101213 - DNA, 431 bp, Zea mays
  unsure (1)..(431): unsure at all n locations
ggccgaagcagtttgggatcggcggcgcccttccgcccaagaaggacctccaccgcttggtcaagtggcccaaggtcgtgcgcatccagcgccagcgccgcatcctcaagcagcgcctcaaggtgcccccggcgctcaaccagttcacacgtaccctcgacaagaaccttgcaacaaacttgttcaagatgcttcttaagtaccgncccgaggacaaagctgccaagaaggagaggctcttgaagagggcccaggttgaaaacgaggggaaaactgttgagtcaaagaaaccaattgttgtgaagtacggccttaaccatgtgacttacctcatcgagcagagcaaggcccagctggttgtcatagctcatgatgttgatccgatcgagctggtcgtgtggctcccggccctttgcaggaaaatggaggtt

SEQ ID NO: 101214 - DNA, 176 bp, Zea mays
ctttcgggctgttcttagccaggaagctgtccctgactagggccctcttctacatcatcatgcaatgcctgggtgccatctgtggagctggagtggtgaagggcttccagcagggactttacatgggcaacggtggtggcgccaaggttgtcgaacctggttacaccaagggtgat

SEQ ID NO: 101215 - DNA, 451 bp, Zea mays
cccacgcgtccgcccacgcgtccgcccacgcgtccggtttttgaatacggttgtcaccgatatccttcatctgcatggtagaaaactacatgcttacaaaggtgactatgacacatttgagaggacaagggaagagcaccttaagaatcagcagaaagcctttgaaacaaatgagaaggccagacagcacatgcagacattcattgacaagtttcggtacaatgcaaagagagcatcacttgttcaatcaagaatcaaggcattggagcgaatggaacatgttgatgcagttgtcagcgatccagactataaatttgaatttccaaccccagatgaccgtcctgggccaccaatcatcagcttcagtgatgcctcatttggttaccctggagggcctaccttgtttaaaaatttgaattttggtatcgacctggacagccgcatagcaatg

SEQ ID NO: 101216 - DNA, 400 bp, Zea mays
  unsure (1)..(400): unsure at all n locations
cggacgcgtgggggagaagcagccaacgtgttcggcaagcccaaggcgagcacggagtgcatcgcgtacagcggcgacggcttcaagctgctgatcccgtccaagtggaaccccagcaaggagcgggagttccccgggcaggtgctccgctacgaggacaacttcgacgccaacagcaacgtgtccgtcatcatccagcccacgtccaagaagaccatcgccgactacggctctcccgaggagttcctctcccaggtcgactacctgctcggcaggcaggcctacggcggcaagaccgactccgagggcgggttcgagaccggcgccgtggccaccgtcaacgtcctggagagctccacccncgtgatcgacggcaagcagtactacgccgtgtccgtgc

SEQ ID NO: 101217 - DNA, 239 bp, Zea mays
gtacacttttttttggttagtcgtctcaagttcagagcgttatgccatgttttgggacgtgattagtacactgttttctaaaagcgattgagctctagtccaatgtattgataatatctgctgttgtcctattgcggtgatgatgatttgccctgttcgctagctgcaatagttcctatttgttgatgaatttgtttgaagcataaacgcagaacatgtcgtaaagaaaacctttctgt

SEQ ID NO: 101218 - DNA, 439 bp, Zea mays
  unsure (1)..(439): unsure at all n locations
cccaaattcaacgtgtttgtcaaaaatgtatctgctcatctgggagtagctgtgcgcacgcattgagttgaagcatgtgattgctgctacaattggtcttaagggtcttggaagcctcctttttattttgagcagctctctcggtgcttatctcctgctgctgtaccttgctttgatcactcctatcatccatgacttctacaactacgatatggagaaggcagaatttgcaggcctctttgcgaagttcacccaggatttggcgctgatcggagctctgctcttctttctgggcatgaagaactccatcccgaagcggcagggcggcaagaagaaggcccncaaggcgaagacgaactagggctgcttagatagctgcacgcctcangtggggtgtatcangagacaggtctatttcgaagcaggcttcacgcgatgc

SEQ ID NO: 101219 - DNA, 320 bp, Zea mays
gttcgtgggtgagcggatcgagatggcggcgtaggatgttgagtaccgctgcttcgtcggcggtctcacctgggccacggacgaccactctctgcacaacgcctttagtacctacggcgaggatctcgagtacaagatcatgctcgatcgggagactcagaggtcccgagggttacgctatgtccccttctccacggaggaggcgatgcggaacgccattaagggcatgaacggtaaggagctgtacggctcgaacatgaccgtgaacgatgcccagtcctgaggcggacgtggatgcggaagcggcgggtacggtggtg

SEQ ID NO: 101220 - DNA, 188 bp, Zea mays
ggagatccacgccgccaacaagctcgccagcaagcaccagcggctcccgctcggcgacgccgcggcgctccccgccagcctcccgcgctgcgacgtgtgccaggagaggccggccttcatcttctgcgtcgaggacagggcgctcctctgccgcgactgcgacgagcccatccacgtccccggcacgc

SEQ ID NO: 101221 - DNA, 245 bp, Zea mays
gcggcacagaggtgcgacgtacgacgactacgacgcaggcgccacacatggcatcccaggtctccgccgccgtgccccggttccacggcctccggggctacgccgcgcccaggtccgcggtggcagcgctgccgtccgtgagggtgggcaggaagaggtcgtcgtcgcagggcatccgctgcgactacatcggctccggcaccaaccttgatcatggtgacgacgacgacgctgatgcctgtcgc

SEQ ID NO: 101222 - DNA, 357 bp, Zea mays
ggaatatccccaggaccgttacaaacgacgagctccgcgacatgttcgctgcgcacggcgccgtcgagcgggccgaggttatgtacgacaagtatacgaatcgcagccggcggtttgggtttgtcacgatgagcacagcggaagaggccaatgctgcagttgaggctctcaatggaactgaggttgtggatggaaaatttaaggggaccgtaccaaaagcgcttttaccgaacatggaccgaccagaaccgaacccaaagcttttgttggaaaatggtcagtccagggttaatgtgggaaatttggcaaaaacggtaccacccgaggttttaaaaacctttttttccaaaaggggga

SEQ ID NO: 101223 - DNA, 413 bp, Zea mays
  unsure (1)..(413): unsure at all n locations
gtcggccgtctctaggtcgtcggcgaggaaggcgcccttcgtcgtcagggccagctccagccctccagccaagcaaggtgccgacaggcagctgtggttcgcgtccaagcagtccctctcctacctcgatggcacgctgcccggcgactatggcttcgacccgctgggcctctcggacccggagggcaccgggggcttcatcgagcccaagtggctggcctacggcgaggtgatcaacggccgctacgccatgctaggcgcggtgggcgccatcgccccggagatcttcggcaagatgggcatcatccccccggagaccgcgctgccgtggttcaagacgggcgtcantcccgccgcgggcacctacaactactgggccgactnctacacgcttctcgtcttcaacatggcgc

SEQ ID NO: 101224 - DNA, 86 bp, Zea mays
caatctaaaacctggttccccggaagaacccttcggccgtggttcgacggaagccttcccggcaacttcggtttggatccttgggg

SEQ ID NO: 101225 - DNA, 347 bp, Zea mays
  unsure (1)..(347): unsure at all n locations
gacacgcttctcatcagggctgtcgctaccacaaatctgtgagaattttgttaaggcagcatatgacccacgaatctcagggatttatctgcacatagagccactgagatgtgggtgggcgaaggtggatgagatcagaaggcacattgtggatttcaagaagtctggtaaatttgttgttggttatatgcctgtttgtggggagaaagaatactatcttgcttgcgcgtgtggtgagctatatgcacctncaagtgcttatgttgccctgtttggcctaactgttcagcaaacatttctcagaggtgtccttgagaaagttggaattgaaccggaaattcaaagaa

SEQ ID NO: 101226 - DNA, 271 bp, Zea mays
cccgggttcagcatgcccggcagcggcagcagcctacccgggttcagcttgcccggcagcggcagcatgcccctcttcggcggcggctccccgggcttcagcggcttcggcggcatgcccgggtcgcccaccgccggctccgtccccgagcacgccaacaagccctgaacgccaacaagcgtggtagtagagtggtgctactgttactgtagtacgtcgtcgtcttcatgcatgcgtggttcggggtttcccctagctccatacgagcagt

SEQ ID NO: 101227 - DNA, 246 bp, Zea mays
  unsure (1)..(246): unsure at all n locations
cctgccgcgcctccaagtactcggagttcttcaagcgagagtgcccgcaggccttcacctacgcgcacgacagcccctcgctcacccacgagtgcgccgcgccgcgcgagctcaaggtcatcttctgccactagagctcggagggctgggctgggctgggcgcgccgcgcccgcccgtgcgccgncgccgccaacaagtgtcgctagtagaggtagtaggatgcctggaatagctgtggccctgtg

SEQ ID NO: 101228 - DNA, 130 bp, Zea mays
attgcgaacccgcggatgatgagcaagcttcaaggcgagatagcgcgagtcgtcagcggcgatcagacgaccatcgctgaaccggacctgaacaaaatgtagtacctgagggcagcgttcaaagaggtgc

SEQ ID NO: 101229 - DNA, 427 bp, Zea mays
  unsure (1)..(427): unsure at all n locations
gaagcaatggcgaaggacaccatggagcacgcatcggagcctaacctgaacctggaaggcttcctggctaacgcttacctgcaccccatcttccgccttttcgaggaagccgggaaagaggaggagacggtggaggtgaggatcgacaaagccgagaagcagcagcatcgccatgaggaggacgaggctcacgcgaggagctcgtcgcagtaccgggaggaggagactcacttcaggagcacgcacgagacgcattaccaccacgaggagagccacgtcagcaggagcacccagtatcatgagggcatccacgtgaggagcgacacggactcgccgtcgncgtcacacttcgtctaccactacgacatccagcagtgatgatgtcgtctctaaacttgntttcctgggtgtcttgtgaatgcttctc

SEQ ID NO: 101230 - DNA, 433 bp, Zea mays
  unsure (1)..(433): unsure at all n locations
gcgcgcttcaccttccccaccccgccgccgccatcgcacgcccgcagccgcatgcgctatgggtgcgtacaagtacgtctcggagctatggcggaggaagcagtccgatgtgatgcggttcgtgcagcgcgtgcgctgctgggagtacaggcagcagccggccatcgtccgcctcacaaggcccactcgccctgacaaggcgcgccgcctcggctacaaggccaagcagggttatgttgtttaccgtgtccgtgttaggcgtggtggcaggaagaggcctgtgcctaaaggtattgtctatggcaagccaaagcaccaaggtatcacccagctcaagttccaaagaacaagaggtctgttgctgangagagggctggacgaaagcttggtggactcaggggtctcaacttctactgggtgaatgaggatagca

SEQ ID NO: 101231 - DNA, 439 bp, Zea mays
  unsure (1)..(439): unsure at all n locations
ggcaaatgggatgttcctctgccaaaggtcaggcctgtagctgaagaagaaatgttcagggttctacgaactggcaagcgaaaaaccaagcagtggaagagaatggttactaaagccacctttgttggagctggatttacaaggaaaccaccaaagtatgaacggttcattcggccaactggtctgcgtttcaccaaagctcatgtgactcacccagagctgaagtgcactttcaaccttgacataatttctgtgaagaaaaacccaaatggtccaatgtacacttctcttggtgttatgacaaggggaacgatcattgaagtaaatgtcagtgagcttggtctggtaactcccgcttgaaaaagttgttggnggaaatatgctcaagttacaaacaacccggagaacgatggctgtatcaaatgctgtttgctagtgt

SEQ ID NO: 101232 - DNA, 203 bp, Zea mays
  unsure (1)..(203): unsure at all n locations
cggacgcgtgggccgcagcccataccgtcgcagagaacgacgtggtcacagggattttgcatgcaagaactgccggagacctgngcacttcgctaaggagtgtccatctgcacctatgtgcaataactgtaaccttccaggccactttgcagcagaatgcaccttacanactgtttgctggaactgcaaagagtctgggcaca

SEQ ID NO: 101233 - DNA, 343 bp, Zea mays
gccttgcagatgagttgatcaacgctgccaagggctcttccaacagctacgccatcaagaagaaggacgagattgagcgtgttgccaaggccaaccgttgagtggagcttgtatcctggtgcacttgcactagaactacgtttctggcagtcgtatttttttcttgtgtttttacccatgtttagactttgagacctatatctaaggttttggttctcagtgaacaatgaaaattactgtgaaatgcagttgttttggtgcagaaatgcgcactgagatattctgcttgtgaatttgtgagtgcttgtggcgtcgccgctggcttgccgatgtaatatttctt

SEQ ID NO: 101234 - DNA, 344 bp, Zea mays
  unsure (1)..(344): unsure at all n locations
accactccgcgctagctgaggacggtacagcggcacagaggtgcgacgtacgacgacgacgacgcaggcgccacacatggcatcccagctctccgccgccgtgccccggttccacggcctccggggctacgccgcgcccaggtccgcggtggcagcgctgccgtccgtgagggtgggcaggaagaggtcgtcgtcgcagggcatccgctgcgactacatcggctccgccaccaacctgatcatggtgacgacgacgacgctgatgctgttcgcggngcggttcgggctggcgccgtcggcgaaccgcanggcgacggcggggctgaagctggaggcccgcgact

SEQ ID NO: 101235 - DNA, 312 bp, Zea mays
  unsure (1)..(312): unsure at all n locations
ncgcgacccctgggtttcaagatgaatggttttagggtttgggctggggaagtaccgaacaggaaattttgaaaaggaatggcaagagaaaacatggggcatgggcctttggattgggattggaaccgtttgcgatggtccttttcgacattccagatattcgactattctggtcgaatgataaacggttcacgttccagttctcagaaggcaagcttggtgtcaagttcaagccattttcaaagtttccttcttggtaccaagatatgagtttctggatcaatggtgcatttacagaaaacaacttatgtg

SEQ ID NO: 101236 - DNA, 244 bp, Zea mays
  unsure (1)..(244): unsure at all n locations
gacgcgccctggtggcccaagatgcagaccgtggccgagctggtcaaggcctgcaccaccatcatctggatcgcgtcggcgctccacgcggccgtcaacttcgggcagtacccgtacgccgggtacctcccgaaccgnccgtccgtcagccggaagccgatgccgacgccggccagcgacaagtccccgaagctgaaccgcaggccgaagaaggtgttcttgcgcaccataaccagccagttcc

SEQ ID NO: 101237 - DNA, 437 bp, Zea mays
  unsure (1)..(437): unsure at all n locations
cggacgcgtgggcggacgcgtggggccgaggttgcgtgcgtgattgggatggcggagccggggctcgaggacagccagccggtggatctgtccaagcacccctccggcatcgtccccacgctccagaatattgtatcaacagttaatttggattgtaaacttgacctcaaagcaatagctttgcaagcaagaaatgcggagtataacccaaagcgttatgctgcagtaatcatgagaataagagaacccaaaaccacggcactgatatttgcatcgggtaaaatggtatgtactggagctaagagcgagcagcaatctaagcttgcagcatgaaagtatgctcgtattattcagaaacttggttttccagctaaattcaaggactntaagattcagaatattggtggctcttgtgatgtaaagtttccaattaggct

SEQ ID NO: 101238 - DNA, 337 bp, Zea mays
cccacgcgtccgcccacgcgtccgcccacgcgtccgcggacgcgtgggtcaaagccgtggaggagctcaaacttgcaagggacatttatgagcatgctgttgttttgagtgtgaaacttgaggaccaagatgcatttgaacgtgatttctgtcagctaaagccttattacatggatacatgtggcataattcccccctcaccagaggagtacccaattttgggactcaatcttctgaggctgttggttcagaatagaattgctgagttccatactgagctggagcttttacctgtcaaggcacttgagcacccttgcatcaagcatgctgtaaagct

SEQ ID NO: 101239 - DNA, 339 bp, Zea mays
gtttactgtgaaagatggctacttttgtcctgccctggccaaagctgtcaaaagggtgaggaaggctgagaaggtgctccttacagtaaagccacaatatggatttggtgagaagggtagaccagcagctggagaggaaggtgctgtgccgccaaatgcttcactgctcattgaccttgagttgatttcatggaagactgtcacagaaattggggatgataagaaaatccttaagaaggttctcaaggagggagaaggttatgagcgtcccaacgagggtgctgttgttgaagtcaaaattatcggaaagcttcaggatggcgcggtgtttacaagaag

SEQ ID NO: 101240 - DNA, 389 bp, Zea mays
ctgaaagacctgtacaagtcctttgtttctgagtaccctatcgagtcgatcgaagacccatttgatcaggacgactggagcacttatgccaaactcactgatgagattggacagaaagtgcagattgtaggagatgatcttctcgttaccaaccccaccagggtcgccaaggccatcaatgagaagacctgcaatgctctcctcttgaaggtgaaccaaatcgggtctgtgaccgagagtatcgaagctgtcaggatgtccaagcgcgccggatggggagtgatggcaagccacaggagtggcgagacagaggacaccttcattgctgacctctcagttggcctgtctacgggccaaatcaagacgggagctccttgcccgtctgagcg

SEQ ID NO: 101241 - DNA, 457 bp, Zea mays
  unsure (1)..(457): unsure at all n locations
accgccgccacttgcttctttgatttgatttcattcggttcgttcggtgcgggtcccgtcctggatctgttgcgcgagagcgcggcagcgcgcgagattcgcccccttctcttctcataggaagcaggaagcaagccgatcgctcgctgagcgccgccgccgatggccgtcgcggtgccgatgaagctctggagggtggagacccgcggcaaggccgccgccgcggggcccgacgaccccctgcgcgtcctggtgacggtgaccgtcctcgggagcgccggcccgttgcgcttcatcgtcctcgagggcgacacggtcgccgcgctcatccgcggcgcgcttcgctgctacgcccgcgagggccgcatgccgctgctcggcaccgaccctgccggcttcgtcctctccaccgncaacggcggatccggcgcacttcgagaagacgagaggatcagct

SEQ ID NO: 101242 - DNA, 422 bp, Zea mays
  unsure (1)..(422): unsure at all n locations
gtttatcctatgcatgctggcgagaaatttaacatggttatagcgcctactctgaatttggatggcaccccagatactggctactatactcaggctggcagaaaaactctggcagacaattatgagtacgtcatgcaagggaagctttacaaaatctcagaagacacatcatccagccaaaacgctaaagtggagatgtatgcatcgttcggcgggcttcttatgctgctcaggggtgacccttccactgccgctagctttgagcttgatcagaggctctttctgctcatccgcaaggtgtaaaactgtggttgctgaccacttangtgtttgccttgctcgccacttatttaatttccatccgtgggtgaagctgttatatactggtgtaagtactggtttctgtatcgccatggatttat

SEQ ID NO: 101243 - DNA, 450 bp, Zea mays
tcgaagggcgttctagtgcgttgtagattcttatccaagacttgtatcatttgatgatgccatgtgaatcgctagaaacatgtgaagtgtatggctaacccaataacgaaagtttcgtaaggggactggagcaggctaccatgagacaaaagatcttctttctaaagagattcgattcggaactcttatatgtccaaggttaatatggaaattctttcagaggttttcccttactttgtccgtgtcaacaaacaattcgaaatacctcgactttttcagaacaggtccgagtcaaatagcaatgattcgaagcacttctttttccattacactatttcggaaacctaaggactcgatcgtatggatatggaaaatacaggatttccggtcctaagcggaaaaggagggaaacggatactcaatttaaagtgagtaaacagaattccatac

SEQ ID NO: 101244 - DNA, 401 bp, Zea mays
ggcggccagcggaggagggcacaggcagcagctaacatccctcactctcggtacctgacctgaccacgagagcaacatgggcggaggacacgacatgcacgggcagcactacggccacaacggcggcgtgaagggcttcgtgtccaacctcgtccacggcggcggcggccatggccatggaagcggctacggccatggccatggaaacggctacggccatgggaatggcggctacggcggcggccacgggtacccttctcccgccgccgtcggcgcgtaccctcattcgcacggcgcgtaccctcacccgcacggcggccacgggtacccttcttccgtcacctaccccgcgcactcggcgcactacgggcacacggggtcgtaccacaccagccacaaca

SEQ ID NO: 101245 - DNA, 474 bp, Zea mays
cgcttgccgactacaacattcagaaggagagcaccctccacttggtgctgggtgtcaggggtggcatgcagatcttcgtgaagacacttactggcaagacgatcacccttgaggtggagtcctcggacaccatcgacaatgtcaaggccaagatccaggacaaggagggcattccaccggaccagcagcggctcatctttgctggcaagcagctggaggatggccgtacccttgcagattacaacatccagaaggagagcaccctccacttggtgctgcctctcaggggtggcatgcagatcttcgtgaagactcttactggcaagacgatcacccttgaggtggagtcctcagacaccattgacaacgtcaaggccaagatccaggacaaggagggcattccaccggaccagcagcggctgatcttcgccggcaagcagctggaggatggtcgcaccttggctgactacaaca

SEQ ID NO: 101246 - DNA, 430 bp, Zea mays
agaggaagaagatgatgtcggaaggcgacgatctgcgtggtgggactcatggacgtgatatgatcgacgtcctgctaggcaacggcaacgacgagctcaccgacgagctgatatctgacaacatgatcgacttcatgatccctgcagaggactccgtgcccgtgctcatcacgctggccgtcaagtacctcagcgaatgcccacaggctctgcagcaactcgaggaggagaacatggagctcaagaggcagaaatcaggcgcgggagaaaccctagaatggacagactacatgtcgctcgccttcacacagcacgtgatcacggagacgctgcggatgggcaacatcatcaacgggatcatgcggaaggcggtgcgagacgtggaggtgagaggccacctggtcccgaagggctggcgcgtcctcgtcta

SEQ ID NO: 101247 - DNA, 449 bp, Zea mays
tccggaattcccgggtcgacccacgcgtgcgtttccctcccttcctgtcgccgcaggccgccagatgcaatttcgccctcgattcgaccccgattcgtccgtccgcgaccgggattccgtccgtcaagcgcggatctgaacgctgcgctccgtgtcgccgctcgaatccgccatgaagggggccaaatccaagggcgccgccaaggccgatgccaagctggcggtgaagagcaagggggcggagaagcccgccaagggcaggaaagggaaggccggcaaggaccccaacaagcctaagagggctcccagcgctttcttcgtgttcatggaggaatttcgcaaggagttcaaggagaagaaccctaagaacaagtctgtcgctgcggtggggaaagctgctggcgacaggtggaaatccctgagcgagtcggacaatgctccctatgtag

SEQ ID NO: 101248 - DNA, 442 bp, Zea mays
cggacgcgtgggcgcgatggcaccgagaaggaccgcctcttccgcgccatcgaaaccgtccccgccgtacgccgcaaggccgactgggccatgcgctggatcgacggcggggagcgctttgccgagcgcctcgttgccttcgcctgcgtcgagggcatcttcttctcgggctccttctgcgccatcttctggctcaagaagcgcggcctcatgccgggcctcactttctctaatgagctcatctcccgggacgagggcctccactgcgacttcgcctgcctcctttatgacctccttcggggcaagctcgatgagtcccgcgtccgcgagatcgttgccgacgccgtcgacatcgagcgtgagttcgtttgcgacgcgctccccgtcgcgctggtcggaatgaacggcgggctcatgagccagtacatcgagttcgtcggcg

SEQ ID NO: 101249 - DNA, 376 bp, Zea mays
tcgcccacgcgtccgcccacgcgtccgcggggtgccgccggacgtggtgaatcggcacaagcagacgccgctgatgctcgcggcgatgcacggcaagaccgactgcgtgctgaagctcctgcaggccggcgccaatatcctcatgttcgactcccagcacgggcggacctgcctgcaccacgcgtcctacttcggccacgtcggctgcctgcaggccatcctcacggcggcgcggaccacgccggtggccaactcatggggtttcgctcggttcgtcaacgtgagagacgaccacggcgccacgccgctccacctcgccgtcaggcagggccgtcccggctgcgtgcaggcgctgctggagaacggtgccatcgtc

SEQ ID NO: 101250 - DNA, 436 bp, Zea mays
ctcgaaaagttggaagcacgccatcatatggtttcaccttcaagtgtgatgagagatctgaaaaaagacgagagttctattcgaagcttgaggagaagattcatgcaagagagttagaaataagcaatttgcaagccaagtcaaaggaaactgaagaagcagaactcaaaatgctgagaaagagtttgaatttcaaggcaacaccaatgccaagcttttataaggaaccaacccctgccaaggttgaattgaaaaagatccccccaaccagagctaaatcaccaaagcttggtcggtctaaaaacaagtccatatcagagactgaagaaaatactactacggaccaacctgcccgtctgagccttgactgaaaggtttctcaaaacggtgtgaaaaaaccaaccccgtcgagttcagcaaaagaagccccagagaa

SEQ ID NO: 101251 - DNA, 409 bp, Zea mays
ctgcgacaaacaaggatttactttgctgcatttggctgctttgtttaaccaaactgaaattgctcttattctcatggaccatggggcaaatgttgaaagcaaaaatgggcaaggggaaactcctttggactgtgctccggcaatgctgcaatacaaaatgcgccaacgggtggaagaactcgcggcttcggcttcgaagggaccactagggtgaactgtgctcgtgctagtttctgctgagttcctcctattccagtttgtgtcaaatgtggtgtcaagaataaaatagttaagtcagctgaaagcttcttgctggtgggacagtgtttggtccgccagtgtataccatctagaaacgttgaatgccagtcacggctcacgcgtgtgaaataatatatattcagcttca

SEQ ID NO: 101252 - DNA, 439 bp, Zea mays
  unsure (1)..(439): unsure at all n locations
ctctacgcccggtaccactcgcaccaccacgcctccatcgtcaccgagcccatcacatgtacgttgcacacaccatcatatgcatgcatgcttgatgaccttcttctacctagctagcttcattagtgcactgcactgcacgcacgcagcggtgatccatccgttcgcggaggagctggtgtacttcaccctgttcgccatcccgctgctcaccatggtgggcaccggcaccgcctccgtggccgtggccaacggctacctcgcctacatcgacttcatgaactacctcggccactgcaacttcgagctcgtccccaggctgctcttcgacgtcttccctaccctcaagtacctcatgtacacgccatcgttccactcgctgcaccacacgcagttncgcagcaactactcgctcttcatgccgttctacgaccacctg

SEQ ID NO: 101253 - DNA, 424 bp, Zea mays
attgccgggtcgacccactcgttcgctcggcctctccgacaagatctggaacaacgggcccatcagcttccagctgcagtggttccagcaggtcacctccgccgtgtgcgggcaggactgcaagagctacctggccaactcgctgttcgtgttcggcgagttcgggggcaacgactacaacgccatgctgttcggcaactacaacgcggaccaggccagcacgtacacgccgcagatcgtgagcgccatcgcggccggcgtggagaagctgctggccatgggcgccacggacgtggtggtgccgggggtgctccccatcggctgcttccccatctacctcaccgtctacggcacctgcaacagcgccgactacgacgcgctcggctgcctcaagaagttcaacgacctctccaccaaccacaac

SEQ ID NO: 101254 - DNA, 444 bp, Zea mays
gttcccagttcccaccgtgtagatggttctggtataaaatgtattgccatgggtgtaacagagattactatatacaggttcgtgatcaaactttgagcagaataaagagcaatattgaactcatagtagcgacaaatggtggaaatagggtggtggtgatcccacactccatgggggtcctctattttctgcattttacgaaatgggtcgaagcacctgctcccgtggggggcagtggtggtccgaactggtgtgagaaccatattaaagctgtaatgaatattggaggatctttcttaggagttcctaaggctgttgctgggcttttctcatctgaagccaaagatgttgccgttgctaggtataaggtaattgattcatttatttaaagcaaaagggaatagcaaaagaatggaatattattggatgctcgacaagcttggc

SEQ ID NO: 101255 - DNA, 436 bp, Zea mays
cccactcgtccgcccacgcgtccggggaggcggatcagatcgagtggagcaggatccagacccctactgatgaggtggtggtgccctactataccgtcgcgtcgcctcccgaagatctcgaggagactaagaagctgctggataagctcgttgtgctcaagcttaactgagggctcgggacgaccatgggctgcactgggcccaagtctgtcattgaagtccgcaatgggttcacattccttgaccttattgtgattcaaattgagtccctgaacaagaagtatggatgcaatgtccctttacttctgatgaactctttcaacacccatgatgacacacagaagattgttgagaagtattccaactccaacatcgaaattcatactttcaatcatagccagtatcctctcattgttaccgaggactttttgccact

SEQ ID NO: 101256 - DNA, 303 bp, Zea mays
gctgctaggatgttacaataaacgctatccacagtaggcatacatgacagtctgagggatgtggatttcttgagtgcttagctcatgcatcatacatagaaagctctgtaaaattttactggtcaagtgatgcctaacactgaccggccatttaaattgaactggtcatcgtatagcatgtttgaaacgcgatctgaactggctactgatcactcgatatttgatgcccatctagctgctgatgtcactgatcaaatgctgcaggagctcttcttgagcaagtaccgatcggtgaaaggagct

SEQ ID NO: 101257 - DNA, 446 bp, Zea mays
  unsure (1)..(446): unsure at all n locations
cggcggtgcagggcccgcggccggaccccgtccgcgccgcggtgctgcgcgccatccagctcggctaccgccacttcgacacggccgcgcactacgccaccgaggcgcccatcggggaggccgtcgccgaggccgtgcgcacggggctcgtcgcctcccgcgaggacctcttcgtcacgtccaaggtctggtgcgccgacgcgcaccgggacagggtgctcccggccctccgccggacgctcagcaatctccagatggaatacgtggacctgtacatggtgcactggcccgtgaccatgaaggccgggaggttcacggcccccttcacgcccgaggacttcgagccgttcgacatgcgggccgtgtgggaggccatggaggagtgccaccgnctgggcctggccaaggccatcggcgtgtgcaacttcttctgcaagaagctcgag

SEQ ID NO: 101258 - DNA, 447 bp, Zea mays
gtttgtagctgggcttacagagctgacccctgatacagttcaagtacttaaatcggcagataaattagagaaggaccttgttaatatcgctgtagaagattctgtggatagtgatgatggaggcaagtcacttatcagagagatgccgccatatgaagctgaaaatgcaattgctaatctggtgaaagtgtggataaaagatagagtagacagactcaagggatgggttgaccggaatttgaagcaagagacctggaatccaggtgccaacagggataattttgctccctcttctgtggagatgcttcgggttattggtgaaacattggatgcatttttccaattgcctataccaatgcatccagctcttcttcctgatctgacagctgggctcgacagaagcctacaactttatgttgctaaagcaaaatctggctgtggaacacg

SEQ ID NO: 101259 - DNA, 387 bp, Zea mays
  unsure (1)..(387): unsure at all n locations
gaagacatggaggcttaccgaatgaagaggattcaccatgacgatcctatgaaagattttctcaactgaaaagtgtggtagataactagatgttcatggcactgtatcacattggttgcaccgtgccttgcatcagtgttgtgttactgtagggtggctacgcctgtcctaaggatatggccagcagaccgtgcatgtggcagtgtgtgttgcacttaaattatgatatgggaggggtaaggctggagatagcttaaccagagtggtggtggtgctgtgatctagtggcagaatgtaagaaactggctacaccttttacaagctgcgtgttggagatgtatggngctgtttgcgttggattgaccgctgcagttgtaatctatagag

SEQ ID NO: 101260 - DNA, 428 bp, Zea mays
caaaaccctaaagccagtgctccttgcaccttgccaccggagcttcccaaagaagcagtggcgaccgacgaagcaccgccgccaatgggcaacaacaacaacacggaatcggcgacggcgacgatggtccgggagcaggaccggctgatgcccgtggccaacgtgtcccgcatcatgcgccaagtgctgcctccgtacgccaagatctccgacgacgccaaggaggtgatccaggagtgcgtgtcggagttcatcagcttcgtcactggcgaggcgaacgagcggtgccacaccgagcgccgcaagaccgtcacctccgaggacatcgtgtgggccatgagccgcctcggcttcgacgactacgtcgcgcccctcggcgccttccttcagcgcatgcgcgacgacagcgaccacggcggtgaagagcg

SEQ ID NO: 101261 - DNA, 407 bp, Zea mays
ccgctttcggtggcttcaagagccggacccaggtcccatggcttgttgacaagtacatgaaaaaggaaattaaggtggacgagtacattacgcacaacatgaacctggctgacatcaacgacgccttccacctgctgcacgaaggtggctgtctgcgttgtgtgctggcaatgcagatttgaaattcctaagctaagcagtttttgttttggaactagaactcctttttgcctcgttaggcctggacccgctgtataatgctatgttgtgttggatggctgacgatggttactgctgtgttgctagcaatgtggtacttgatctgtatcacggatgcaaataagtgctgtttctaaaacactccctctcggtgaataaggggttgtttggtttgaggaatcattcca

SEQ ID NO: 101262 - DNA, 465 bp, Zea mays
gccgccgccgcttcccctgcgccccgagccaagatgaatgttgaaaagctcgagaagatggcaggtgctgtgcgcactggggggaagggtagcatgcgcaggaagaagaaggcagtccacaagactacgaccacagatgataaaaggcttcagagcaccctgaaaagaataggagtgaacaccattcctggtattgaagaggtcaacatctttaaggatgatgttgttattcagtttgtgaatcctaaagtgcaagcttcaattggtgctaatacatgggtggtcagtggaactccacagacaaagaagctgcaagatctgcttccgtccattatcaaccagctcggccctgacaacctagacaacctgcggaggcttgcggagcaattccagaagcaggcccctggtgcttcaggtgcagaggctggcgccagcgctggtgctgctcaggacgatgacgatgac

SEQ ID NO: 101263 - DNA, 371 bp, Zea mays
gtcagctagctgctgcctacccccagcaatttcttccattcaaccaactggcagcattgaactctgctgcttatttacaacagcaacagctaccaccattcagccagctagctgatgtgagccctgttgccttcttgacacaacaacagttgttgccgttctacctgcacgctgcgcctaacgctggcaccctcttacaactgcaacaattgctgccattcaaccaacttgctttgacaaacccaacaacgttctaccaacaacccatcattggcggtgccctcttttagattgcctaatgagttatagttcaataatgaagttttttggatgatgtttgggctttccagaaattaagacagttcatttct

SEQ ID NO: 101264 - DNA, 403 bp, Zea mays
cgagccgtgccactgcgagggaaggagggagagaaaaaggggagcccgatccaatcccaatcccctcccgccgcgtcacatcgccgccgtcctcgtgccccgttacctctaaaaccctagcggggagccgccgagccggggatgaagatccagtgcaacgcgtgcggggccgcggaggcgcgggtgctgtgctgcgcggacgaggccgcgctctgcgtcgcctgcgacgaggaggtgcacgccgccaacaagctcgccgggaagcaccagcgggtgccgctcctgacggacgccgccgtcgctgccgccgcagcggcgccggccgtgcccaagtgcgacatctgtcaggaggcttctggatacttcttctgcctagaggaccgtgcactactttgtagagact

SEQ ID NO: 101265 - DNA, 456 bp, Zea mays
aacaatacctctctccggtgacagccgcgggatttcaatacccaactatacaatcctacatggtacaagaggccatccaagcaagcatcttacggtcattagcattaaccctccaacaaccatatgctctattgcaacagccatccttagtgcatctgtatctccaaagaatcgcggcacaacaactacaacaacagttgctaccaacaatcaatcaagtagttgcagcgaaccttgctgcttacctccagcaacaacagtttcttccattcaatcaactagctggggtgaaccctgctatctacttgcaggcacaacagctactaccatttaaccaacttgtcgggagcccttatgccttcttactgcaacaacagcttctgccattccatctgcaagctgtggcatacattgttgctttcttgagacaacaacatttgttgccattttacccac

SEQ ID NO: 101266 - DNA, 448 bp, Zea mays
gaatttcttgttaaggccagagttgcttaccgacaagatcaatgagaaatgggggctcttagttctctgctctgcatctaatccaacagggtcagtatatccaaaggagttgcttgagaaaatagctgatatagtcaagaagcatccgaggcttttggttttatctgatgaaatttatgagcatattatctatcagcctgcaaaacacacaagctttgcttcactacctggaatgtgggaaagaacattaactgtaaatggtttttctaaggcttttgcaatgactggttggcgtcttggttaccttgcagcccctaaacattttgttgcaacatgtggaaagatccaaagccagttcacctcaggtgccagcagcatatcacagaatgcaggggttgccgctctgaatcttggctatgctggtggtgaagcagtatcaactatggtc

SEQ ID NO: 101267 - DNA, 465 bp, Zea mays
gctcgaagttgaaaatatacccaatactgcagaaggtttaccttgaaagagggttgaggaaaccagaaattgatgcatttgcagaggagctgaggccgcatcaaaaagctttattaccagataagtcgactgtgcttgaccgagcaatgatcgagcataatctccttagtgccagtaaactttacacaaatatcagctttgatgagcttgggacattactggggattgatccaaggaaggctgagaagatagcatctcggatgatttatgaggatagaatgcggggctcaattgatcaggttgaggctgtgatacattttgatgatgacacggaagagctgcagcaatgggatcagcagattgctggactgtgccaagccctgaacgacatccttgacagcatgtcaagcatgggaataactattccggtgtgaataaatatctcatgctgtcggtcgatggtgc

SEQ ID NO: 101268 - DNA, 469 bp, Zea mays
ctttgtttttgtctttgatagctctgagaacgagcttgccatgctcgaccgcgtacaagtgtttgttgaaacattggacagatgcttcaagaatgtatgcgagcttgacatcgtatttaacttcaacaaggtaccatatgtccatatgatcctactttttttatccttttatactagaatagtgtgcctatcgaggatgcatggtttctatcctgctgaaaattccatttatgattcttcaggtgcatgttttatgcagcagaaaaggtgggacacagaagctgcatcaccatttttgacagcagttgggttatctgtatcaaattacgcctttttatgcacatgtcatatgcagtgctgtgcatatctgaaagtttgagtataacaaatgcctgaatccaagaatccctgttatgcagaatagctataccattatctatccatctaattaattatcgtgggtgtaata

SEQ ID NO: 101269 - DNA, 335 bp, Zea mays
tcgtcaccgacttcaccggtgacagcaagtcgagcatcttctacgcctatgccgggattgccctgaacgaccacttcatcaagctggtctcttggtacgacaacgagtgggtctacagcaaccgcgtcgtcgacctgatccggcacatgttcaagacccagtagagagagatattgctgcctccctatcgtgggtcgaacccaatggcctgtggtcgcagactattatgtgctgcttagttatgctgagaataaatgtgaacggtgcccctggacgctggatccatgctggatttggacactttgtcttatgtgtgtttaacttatctgctaccg

SEQ ID NO: 101270 - DNA, 405 bp, Zea mays
  unsure (1)..(405): unsure at all n locations
cgcagacagtccaagatggactcagtttcgtggcgagcttgaagcgcgtgttcgcctgcgagcctgacaagtacgacgagatcatcgccaccatgcgccagttcaagtccgggagcattcgtagtgcggttgtggttgagcgtgtgaaggtgcttctggaaggtcaccctggtctcctccgccacttcaaccagttcctgccatggggttacataagggctcatggaccagtcgggaggatcagcgtctgatgcagccagggcagggaagcgcgtgtggctacctaaacaagcctaaacctactagctggtgctttccatcgcatgaatggcanaatgggacaagagtatctggttggcccgtcatgactgctattctgcatgggcagtaccattaagacatgta

SEQ ID NO: 101271 - DNA, 389 bp, Zea mays
tcgcccacgcgtccgacaggatccaacaggcaatcgcagctggcatcttacctttatcacccttgttcctccaacaatcatcagccctattacagcagttacctttggtgcatttattggcacaaaacatcagggcacaacaactacaacaacttgtgctagcaaaccttgctgcctactctcagcaacagcagtttcttccattcaaccaactagctgcattgaactctgcttcttatttgcaacaacaacaactaccattcagccagctatctgctgcctacccccagcaatttctttcattcaaccaactgacagcattgaactctcctgcttatttacagcagcaacaactactaccattcagccagctagctggtgtgagccct

SEQ ID NO: 101272 - DNA, 455 bp, Zea mays
gaaaggcgtaagatgtaagagaataactagatgcattggttctgttgggctggatgtcccaggtggcactgcagtcttgccttcaactgcattgatgcttgctgtgcctgcacagattgctggatgcaaaactattgttcttgccacaccacctagccgtgatggtagcatatgcaaggtacacttgatatggaactgcaccgggattcttttttaaacaattggttgatggagcattatatacttgtttcctgcaggaggttctttactgtgcaaagaaagctggtgtgacacacatattgaaagctggaggagctcatgcaatctcagcaatggcatggggaactgcatcttgcccaaaggctgagaagatttttggacctggtaaccagtatgtaacagctgccaaaatgattcttcagaacagtgaagctatggtatctatagacatgcct

SEQ ID NO: 101273 - DNA, 459 bp, Zea mays
gttgcgtgagcatcatcagtgcggcggcggccaccatctggagctggtctgggcgtcgtcgtcaaggttccggctgccgatgatgatgtcgtacgcgccgcataacgagcacttgctgcaggaacagacactgaacaacgctcgtccggctcctgagaagaggcagcgggttccgtcggcgtataacagattcatcaaggaagagattcgcaggatcaaggcgaacaaccccgacattagccacagggaagccttcagcacagcagccaagaactgggcacattatccgaacatccatttcggcttaaactccggccgaaagggtggcaagaataagctcgtggactaggctgtcgcggcggtggcggtggctccgaagaagatccaaggtttctactgatcgatgccggtcgatcgatggatcagcgctcgtcgtcatcaactggccggacgggtgtg

SEQ ID NO: 101274 - DNA, 353 bp, Zea mays
gactagttctaggtacgatgctgttcagtccatcaaacctacagttctgattgggacgtctggagttggaagaacattcacaaaagaagttgttgaggccatggcttccttcaatgagaggcctatcatcttttcactgtcaaatccaacctctcattctgaatgtactgctgaagaagcatataactggactcagggtcgtgtaatatttgccagtggcagtccatttgaccctgtggagtacgatgggaaggtttttgtacctggacagtcgaacaacgcctacattttccctggatttggcctcggtcttgttatctctggagccatccgtgtccacgaggacatgcttc

SEQ ID NO: 101275 - DNA, 390 bp, Zea mays
cccacgcgttcgctacaattccaccagctactgggatgagtttgtgtggggtggtgcgtggatgtactttgccacagggaacaattcatacctcacggtcgccacagccccaggaatggcgaagcatgctggagcctactggtttggaagtccaaactatggagtatttacctgggatgacaaacttccaggagctcaggttcttctcagcaggttgcgactcttcctaagtccagggtacccttacgaagaaatactgaggacattccacaaccaaaccgacaatgttatgtgctcatatctgcctctattcaattcattcaacttcactaaaggaggactaatacaactcaaccatggaaggcctcagccacttcagtatgctgtcaa

SEQ ID NO: 101276 - DNA, 357 bp, Zea mays
cctgcctagttctaggtacgatgctgatcagtccatcaaacctacagttatgaattgggacgtctggagttaggaagaacattcacaaaagaagttggtgaggccatggctttcttcaatgagaggcctatcatctttttactgtcaaatccaacctctcattctgaatgtactgctgaagaagcatataactggactcagggtcgtgtaatatttggccagtggcagtccatttgaccctgtggagtacgatgggaaggtttttgtacctggacagtcgaacaacgcctacattttccctggatttggccttggtcttgttatctctggagccatacgtgtccacgaggacatgct

SEQ ID NO: 101277 - DNA, 360 bp, Zea mays
ctcacatccctcgagaagacgcctgctcctcgccgatcgatacgatggccgggttctccgacctccacaccgccgacggcctcaagtccctcgaggctcacctcgccggcaaaacctatgtgtctggtgactccattactaaggatgacattaaggtcttcgccgcggtgccgtcgaagcctgtcgctgagtttcctaatgccgcccgctggtacgagaccgtctctgcggctgtagcctcaagattccctggtaaggctgttggtgtaaatctgcctgcgggatcagctcctgcggcagctgctcctgcggatgacgctgatgacgatgatgaccttgatctttttggtgatgaaactg

SEQ ID NO: 101278 - DNA, 248 bp, Zea mays
gacgaccactccctccacaacgccttcagcacctacggcgaggtcctcgagtccaggatcatcctcgatcgggagacgcagaggtcccgcggcttcggcttcgtcaccttctccacggaggaggcgatgcggaacgccatcgagggcatgaacggcaaggagctggacggccgcaacatcaccgtcaacgaggcccagtcccgcggcggccgtggaggcggcggcggtgggtacggtggtggccgtgg

SEQ ID NO: 101279 - DNA, 426 bp, Zea mays
gtccccgctcttggattcccgacgacgagctcggagcttcttcttccctgctcggtgctcgtcgcaacagctgccgccatgtctgccgcgaaccagctcgccgctctggtcagcaacatgtacgccacgggtttgcttgacgatcagttccagcagctccagctgctccaggaccccagcgcccctgacttcgtctccgaggtcgtcacgctcttctgtcaggacggcgagcggatcatcgaagagctggccaaactgctggagaagcccaacgtggattttgacagggttgacgcctttgtgcatcagctcaagggaagcagtgcaaatattggtgctcagaaggttaagaacacttgcattcagttccgcgaattctgtcagcagaagagcagagatgggtgcctcaggtactggagacaatga

SEQ ID NO: 101280 - DNA, 384 bp, Zea mays
  unsure (1)..(384): unsure at all n locations
cccagctgtgcaagcctataggctacaacaagcaattgcggcgagcgtcttacaacaaccaatttcccagttgcaacaacaatccttggcacatctaacaatacaaaccatcgcaacgcaacagcaacaacaattcctaccagcactgagccacctagccatggtgaaccctgccgnctacttgcaacagcagttgcttgcatcaaacccacttgctctggcaaacgtagttgcaaaccagccacaacaacagctgcaacagtttctgccagcgctcagtcaactagccatggtgaaccctgccgcctacctacaacagcaacaactgctttcatctagcccgctcgctgtggccaatgcacctacatacctgcaacaacaatt

SEQ ID NO: 101281 - DNA, 371 bp, Zea mays
gtttgagaagaaatatgaaccaaccattggtgtggaagttcatccgttggatttcgccactaactgtggttagatcaggttctactgctgggataccgcagggcatgagaagtttggtggcctcagggatggatactatattcatggccagtgtgcgatcatcatgtttgatgtaacctcaaggcttacttacaagaatgttcctacgtggcatagggacctgtgcagggtctgtgaaaacatccgcattgtcctctgcggtaataaggttgatgtgaacaacaagcaggtcaaagcccagcaggttactttccacaggacgaagaatctgcagtactatgaaatttctgacaagagcaactacaactttg

SEQ ID NO: 101282 - DNA, 416 bp, Zea mays
  unsure (1)..(416): unsure at all n locations
gcaaaattctcaactgattttgaaatcaagtacatcagcagtagctgctctctcttggtcattgatagaggaaaccaagcaattcgagaaattccactcaacgatgatgactgtgcatatcagtatgaagctggttttccactagggtttgcattgctttgtgctgctggcttctttggttatatgcttgcgatgctccaacgccggcttttaggaatgtcatcaacaacagatgatcctcaagcgcctncaagacccagcattgcaagtatccctccatcataccagaagcctttaaatccttatattcgtcatccattcatcccgagagaagaaactgcaaaacaggaaaccggagaggggttcttcaccacagctggcanactcatgggaggggcaaaatcatctgtgggtga

SEQ ID NO: 101283 - DNA, 403 bp, Zea mays
cccacgcgtccgcccacgcgtccgcccacgcgtccggagaacacgatggtggcatacaaggctgcccaggacattgctctggctgagcttgctccaactcaccctattaggcttggactggcacttaacttctcagtgttctactatgagattctgaactcacctgatcgcgcctgcagtcttgcaaagcaggcttttgacgaggccatctcggaactggacaccctgagcgaggagtcctacaaggacagcactttgatcatgcagctccttcgtgataacttgaccctatggacctctgacatctcggaggaccctgctgaagagattagggaggcgcccaagcgggactcgagtgaggggcagtaaagccggctttatgtgcctagaaactagtagctag

SEQ ID NO: 101284 - DNA, 410 bp, Zea mays
agcaggccgccgggtacggctacccgcccccgcagcaggccgggtacgggtacgggtacgcgccgccgcaggccgccgggtacgggtaccagcagcaggccgtgaggccgcagaagaagaagaacaacttcgggatggggctcggggccgggctgctcggaggcgccgtcgggggcctcctgatcggcgacatgatctcggactcgtcggcgtacgacgccggctacgacgccgggttcgacgacggcggcggcttcgatttctagcgcgctccggtggcatgggtggtgacgccacgccgcgcatcagagacggagaggttcccgttttggatttgccttttgtgatttgtttccttctgtacgcaatctatgtaattgtcggaacgaaatcaatcaagattatgcata

SEQ ID NO: 101285 - DNA, 416 bp, Zea mays
gggcttcttccattgatccagtcttctgaagctggtctggtcaaggttgacttgagtggttgcaagaacattacagatgtggctgtctcctccctggtgaagggacatggaaaatctctgaagaaaatcaaccttgagggttgcagcaagataacagatgctatcctcttcaccatgtctgagagctgcaccgagcttgcggagcttaatctttcaaactgcatggttagtgactacggtgttgccatcctggcatctgcaaggcacctcaagctccgtgttctctcactgtcaggctgctctaaggttactcagaagagcgtgctgttcttgggcaaccttggccagtctatagagggcctcaatcttcagttctgtgacatgattggcaaccacaacattgcatcgctggagaa

SEQ ID NO: 101286 - DNA, 380 bp, Zea mays
ccagaagtcacgcaccaaacaccaccaccaaagaaggcgagaacgtactccgtccgtcccctcccctcgcctccccttcccctcgaggctccaggaccgtctcctcgcctgctcatccgccgctgcttcccttctctgggctcggagaaccggagagaagcgcgcgcggccatggcgtccagcgcctctcggttcatcaagtgcgtcacggtcggcgacggtgccgtgggcaagacatgtatgctcatctgctacaccagcaacaagttccccactgactacatacctacggtgttcgacaatttcagtgcaaatgtagttgtggatggcaccactgtgaaattgggcctttgggataccgctgggcaggaagattacaa

SEQ ID NO: 101287 - DNA, 419 bp, Zea mays
  unsure (1)..(419): unsure at all n locations
cgaaccccgtcgaccgggttcgtgtggctgcggcaggccgccggcctgacccacaccttcggctccatcggcaagcaggtgtggtacgacagggaggtgacggcgttcgtggagcccgggcggatgcacggcctcgccggggtgaagagcaaggagctcctcatctgggtcaccatctccgagatcgtcctcagcccctccggcaccaagatcgtgttccgcacccccgcggggctcggccgcgccttccctgtcaccgccttccagctcgagcccgcggcggcggagggggaccacaaggaggaggccgaggacgccgtcgccgtcgncggcaactgatttgctctagcttccggcggcggcggccgtgcgtgggctgctcgatccggtagtggcagtggctttgtgagacagtcgag

SEQ ID NO: 101288 - DNA, 355 bp, Zea mays
ctcacgcgtgcggcttgccaaagcagacgcacatcataccactgctgctgatatcagggacgactgttcagagtttgtgcaaaagtacttgcgtgagggccctagaatggtgcgtgacgtgttacgaatggccaacgagaatgcccgagcaatcataatcattgatgacgttgatgctatagccactgctcgttatgatgctcagactggtgctgaccgataagttcaccgtattcttatggagctactgaatcagatgcgatgggatagatcaaacagtcgatgagaaggctataatggcaactaatcatgcatacactctagatcctgctatgctgagtgctgctagacttga

SEQ ID NO: 101289 - DNA, 214 bp, Zea mays
cggaccagcagcggctgatcttcgccggcaagcagctggaggatggtcgcaccttggctgactacaacatccagaaggagagcaccctccacttggtgctccgcctaaggggtggcatgcaaatctttgggaaaccattgactggcagaaccataactttgaaggtgaagtctcttgcaccattcattatggccaaagccagaatccagaccag

SEQ ID NO: 101290 - DNA, 454 bp, Zea mays
  unsure (1)..(454): unsure at all n locations
gctggagcaggatcagcaactctttcaatggcctatgcagctgccaaatttgcagatgcttgcctgagaggattgcgtggtgatgctgggataatagagtgctcttatgtggcttctcaggtcacagagttgcctttctttgcatccaaagtgcggctagggcgatgtggcattgaggagatcctaccacttggaccattaaatgagttcgagaggtctgtattccatactcgaacttacaactactcaggttcttgttgtgaattgaaagtcgcatgctctgcattattcaacggccatttcacacatgctttccgtcgagttatatatctcagcaaattagtttgttcagctacttttcgtctacaacaacaggttcatcttgcccactcatctgacccaccatgatttggatccgncaggtngtagtagttattaggctatggtcaacata

SEQ ID NO: 101291 - DNA, 462 bp, Zea mays
gaaggagagcagcccggaggagggggagcaagcagcagccgtccgtggaagaagaggtcgtacctgctgccgcatctgcactcggggtgggcggtggaccaggccatcctcgccgaggaggagcgcctcgtcatcatccgcttcggccatgactgggacgagacctgcatgcagatggatgaagtgctggcagcagtagctgagaccataaagaactttgcggtcatctaccttgttgacatcacagaggtccctgatttcaacaccatgtatgagctgtacgacccttcgacagtgatgttcttcttccggaacaagcacatcatgattgatctcgggactggaaacaacaacaagatcaactgggccctgaaagacaagcaagagttcatcgacattgtggagaccgtatacaggggcgcccggaaaggccgtagtctggtgattggctccaaggactac

SEQ ID NO: 101292 - DNA, 187 bp, Zea mays
tatctgttgcctacaagaatgtgattgcggccccccgtgcctcatggcgcattatctcctccatcgagcagaaagaggagtcccgtaagaatgaggaacatgttgcacagatcaaggaataccgtggcaagattgaggctgaattgagcaacatttgtgatggtatcctaaagctgcttgacacgca

SEQ ID NO: 101293 - DNA, 295 bp, Zea mays
cacaaaaacacaggtagggttaggcgacgcggcggcgagagcgcgagagtaggaggaggcgtcggccatgacggggaaggcgaagccgaagaagcacacggcgaaggagatcgccgcgaagatcgacgcggcgacgacgaaccggggcggcggcaaggtcgggcaggcggatcggctagggcaggacaagggcgggcacgcgaagctggcgtgcccgctctgccgcaccccggcgcccgacatcaagtccatgcagatccaccacgaggcgcgccatcccaagctccctttcgag

SEQ ID NO: 101294 - DNA, 366 bp, Zea mays
cccacgcgtccgcccacgcgtccggcaggagaagccttgggccaacgacgcgcacgacttccgccgcaccaagatctccgcgctcgcgctgctcaagatggttgtccacgcccgcgccgggggcaccatcgaggtcatggggctcatgcagggcaagtgcgagggcgacgccatcatcgttatggacgcattcgcgctccccgttgagggcaccgagaccagggtcaatgcccaggccgatgcctacgagtacatggttgactactcaaccatcaacaagcaggctggaaggttggagaatgtggttggctggtatcactcgcaccctggctatggatgctggctgtcaagaatcgacgtgtcaac

SEQ ID NO: 101295 - DNA, 415 bp, Zea mays
gtcattttcacaccttgatctggataatgatgggctcttatcagcagatgagctggagcctgtaattggtaatctccatccatcagaatacttctatgccaagcaacaagccgactatgtaatatctcaggctgacacgaacaaagatggacaattgagcatgaatgagatgatcgagaacccctatgtcttttacaatgctttattcacagaagatgattatggctttcatgacgagctccgttagttcccaattcaacagcacaaagctttatggaatcaccactgtaggaagtcggaagactttgttatgcactgctaagaccatttccgttttctgtctgaaatcatccatcatttgacggtgattccatgtaaaacaagcatgtttttagatgcacctattctagaagct

SEQ ID NO: 101296 - DNA, 393 bp, Zea mays
atcgaggtctcagcttcaggaaagggaaggaagcatgttcgggcaccaccaccacgacgggcacggcgggcaccaccaggccccgccgccgcacgagcagacgctgttcaggatcttctgccgcgccgacgaggcgtactgcctcaccgtgcgccacgacgccgtcgtcctcgcgcccaccaacccccgcgacgagtaccagcactggtacaaggacatgaggcacagcacgaaggtgaaggacgcggagggccagccggcgttcgcgctcatcaacagggccaccggcctcgccatcaagcactcgctcggccagtcccatcccgtgaagctggtgccctacaacgcggagtacctggacgagtcggtgctgtggacggagagccacgacgt

SEQ ID NO: 101297 - DNA, 292 bp, Zea mays
  unsure (1)..(292): unsure at all n locations
cccacgcgtccggtggttattgaaactttctcaaattcctgagatcactgaggtgcctcagttcagcaaggaagcccaagccttcttgattgctattattgagaatttttgcattgatgatgcaaaagaaataaagaaaatcgagaaagtaaccaaccatgatgtgaaagccgtcgagtactttctgaagcaaaggtgcagctccaatccagagattgctaaagtgtcngagttcttccattttggctgtaactttgaagatatcaacaatttgtcacatgcattggctctt

SEQ ID NO: 101298 - DNA, 436 bp, Zea mays
  unsure (1)..(436): unsure at all n locations
accggtccggaattcccgcggcggcccacgcgtccgcccacgcgtccggtggttattgaaactttctcaaattcctgagatcactgggattgctcanttcaacaaggaggcccaagccttcttgattgctattattgagaatttttgcattgatgatgcaaaagaaataaagaaaatcgagaaagtaaccaaccatgatgtgaaagccgtcgagtactttctgaagcaaaggtgcagctccaatccagagattgctaaggtgtcggagttcttccattttggctgtacctcttaagatatcaacaatttgtcacatgcattggctctcaaagagggggtaaatagagttatgttccctgccatgattgacatatgcacagcattatgttccttggcgacacataattcaggctaccctatgttggctcgaacttat

SEQ ID NO: 101299 - DNA, 414 bp, Zea mays
  unsure (1)..(414): unsure at all n locations
ggcaggtgaaagcatgggctgagcttttgaatgctttttgcacgagtggcagacgcgaactggaacttatatacaaagtacagacacagtgctatgaggatgctaagctgatgaagctgtttcctgaaatcataagaacactgtatgaccaagatgtcctagctgaagatactgtcctgctttggttccgtaaaggttcaaaccagaagggcaggcaatctttcgtgaaagctctggagccgtttgtcaaatggctcgaggaggctgaggaggaagaataagtttttgatttggagaacggccgaatgctggcctaagtgttactttatatttctgaagttagaagtttgtggaggaattattgctgctgcctcttactgccgagaactttatngtatgatgttagccacatgg

SEQ ID NO: 101300 - DNA, 367 bp, Zea mays
cccacgcgtccgcttcagatctcaagaagatggctcttcctccttgccacatgtgggcacaatttaatgtggagaacgggaagctatcctgccagatgtatcaacgttttgaaaacatggggctgggggttccattcaacatggaataatatcctcttttgacatatataatggctcaagtttgagatctttctccaggagattttgtccatgttataggggatgctcatgtctatagaaatcacgttcgagctctggaggaacagattcagaagatgcctaaaccatttccaattttgaagataaatccttcgaaaaaggatatagattctttcatggcgtcagacttcaagctggttggctatga

SEQ ID NO: 101301 - DNA, 455 bp, Zea mays
cccacgcgtccgcgttggtcttgccgctgcagaaggtgcaaggattgctggagcgtgaaggatcattggtgtcgacctgaaccccagcagattcgaagaagctaggaagttcggttgcactgaatttgtgaacccaaaagaccacatcaagccagtgcaggaggtacttgctgagatgaccaacggaggggtcgaccgcagtgtggaatgcactggcaacattaatgctatgatccaagctttcgaatgtgttcatgatggctggggtgttgctgtgctggtgggtgtgccacataaggacgctgagttcaagacccacccgatgaacttcctgaacgaaaggaccctgaaggggaccttctttggcaactataagccacgcactgatctgccaaatgtggtggagctgtacatgaaaaaggagctggaggtggagaagttcatcacgcacagcg

SEQ ID NO: 101302 - DNA, 456 bp, Zea mays
  unsure (1)..(456): unsure at all n locations
ctgatttgtttaccccccgaaatttgccgtctcctcgtctcgctcctctccctgcgcagcccccagatccggcaccgcccgctcctcgatccccgcaccccacgcccgcaggccgggaccggcggggtcgcgcgccgggtaggaggaggagaagaggaagggtggtatggcggcgccgccggcgagggccagggccgactacgactaccttatcaagctgctcctcattggagacagcggtgttggcaagagttgcctcctggtgcggttctctgatggttccttcactacaagctntattaccacaattggtattgactntaagatacgaacgatagaattggatggcaagcgtataaagctacagatttgggatacggcgggccaagaacgcttncgggactataccaccgcgtactaccgaggagctatgggcatctngctgggttatgatgt

SEQ ID NO: 101303 - DNA, 455 bp, Zea mays
  unsure (1)..(455): unsure at all n locations
caaacacgtatgtggaaggtgggtgaaagggtccgttcaaccaggccacaaggtggtcttggcccactgcatcccttcactgctggagtgtatgttgcactaatgatggctcagattgaggtccttaggaagaagggccactcttactcagagataattaatgagagcctgatcgagtccgtggactcgttgaacccgttcatgcatgctcgcggtgtggccttcatggtcgataactgctccacaactgctcgtttgggatctaggaagtgggcaccacgcttcgattacatcttgacccaacaggcgtttgtgactgttgacaagaaagcaccgatcaaccaagacctcatcagcaacttcatgtctgaccctgtccacggtgccatcgaagtctgcgctcagctgaggcccactgttgacatctcagtgaccgctgatgctgatntcgtgcg

SEQ ID NO: 101304 - DNA, 465 bp, Zea mays
taccggtccggaattcccggggaatgtttatttgaacaagtacagaattgagcttgaccctcagcttgaagccctcgttggaaggcatagcaggaaaccctggttaaagtttatgaacgcagataaccagcacctagtgtctcctgaggccatagatttccttgacaagcttttgcgttatgatcatcaggagaggcttactgcacttgaagctatgacgcacccgtacttccaacaagtgagagccgctgagaacagcaggacgcgagcgtgacaggcaaagagcgaagaccatctgctcttttatcagtcagtcaggttgtatgagatgagtagccgttgggtcacttggcagaaaataaacaatagcggtagagcctgtactgtacgtaacgtaacctcctcgaggagttgtgaggtttgggacgtgattgcgaacatggtatattaatgattgttcatgta

SEQ ID NO: 101305 - DNA, 455 bp, Zea mays
  unsure (1)..(455): unsure at all n locations
cgaagaattacccaaccgtgagcgccgagtacagcgaggccgtcgagaaggccaggcgcaagctccgcgccctcatcgccgagaagagctgcgcgcccctcatgctccgcctcgcgtggcactccgcggggacgttcgacgtgtcgtcgaggaccggcggtcccttcggtactatgaagtgcccggcggaactggctcacggcgccaacgcggggctggacatcgcggtgcggctgctcgagcccatcaaggaggagttccccaccctctcctatgccgatttctaccagcttgccggagttgtggccgtcgaggtcaccggtgggcctgagatccccttccaccccggcagggaggacaagcctcagccgncacctgagggccgtcttcctgatgccaccaagggttctgaccacctgaggcaagtctttggcaagcagantggtttgagtgat

SEQ ID NO: 101306 - DNA, 410 bp, Zea mays
  unsure (1)..(410): unsure at all n locations
cagacattgcgactttgcgagagacaaaacctcccagataacgcccgcgcgctccccgatggcgtcgtcgtgccagaacgtggagattcccggcaagccgacggagacggggacggcgctgctggagacggcgacgggcaccatccaggggttcgcgccgctgagccagatccaccagcacctgtgcgcgttccacttctacgcggacgacatggggcggcaggtggaggcgcaccacttctgcgcgcacctgaacgaagacgtgcggcagtgcctcatcttcgacgggcccggcgccggcgcgcgcctcatcggcgtggagtacatcgtctncgagacggtgttcctgacgcttgccgacgccgagaagccggttgtgcacacgcacgagttcgaggtgaaaggcgggt

SEQ ID NO: 101307 - DNA, 363 bp, Zea mays
aagcggcagtgcgtagagaggatcgtcgaacagaacagcatgaagatgggcatcggtctcgtcgtgtgcctggctctgtcagctgccagcgcctctgcaatgcagatgccctgcccctgcgcggggctgcagggcttgtacggcgctggcgccggcctgacgacgatgatgggcgccggcgggctgtacccctacgcggagtacctgaggcagccgcagtgcagcccgctggcggcggcgccctactacgccgggtgtgggcagccgagcgccatgttccagccgctccggcaacagtgctgccagcagcagatgaggatgatggacgtgcagtccgtcgcgcagcagctgcagatgatgatg

SEQ ID NO: 101308 - DNA, 392 bp, Zea mays
gccaagtcgaccgcgatgtttgtagccgccctggccctggtggtggtgatggcgaggacgagcacaggcggtggcagggcggcagcggcgtgcgatcccaagccgctggtggtgtgcgatccggcgttcatggacggagcgaaacccgcggcagcatgctgctccaccctgcgtgcgcaggaggcatgcttgtgcgtgtacgccaaagaccccaagtttgcaaaatacatcaacaaccccaacaccgccaaaacctttacctcgtgcggcatagccatccccaaatgctaagcaagcgctctgcgtcgtcgcttcgcttgctcttgctcttgggtgtaacatatccagcttatgaataaattatgtggatcagttaattagtgggatgaaaa

SEQ ID NO: 101309 - DNA, 429 bp, Zea mays
  unsure (1)..(429): unsure at all n locations
ggaggcccctgcccaaggcaagagaaaccgcggcgcgcggagagggaggaagggcagacgcagacgggcgaacaagatgagggagatcatcagcatccacatcggccaggccgggatccaggtcggcaacgcctgctgggagctctactgcctcgagcacggcatcgagcacgatggcaccatgcccagtgattcctcggttggcgtcgcacatgatgccttcaacacgttcttcagcgagactggttccggcaagcatgtgcccagggccatcttcgtcgaccttgagcccactgtcatcgacgaggttcgcactggctcgtaccgncagctctttcacccagagcagctcatctcggggaaggaggacgcagctaacaactttgcccgtggccactacacggttgggaaggagattgtcgatctatg

SEQ ID NO: 101310 - DNA, 423 bp, Zea mays
cccacgcgtccgggacatcttttcgcattaaagaagctttttgaaagctcatctagcataggatgtgaggcgtacaaccttggaaccggaaaaggaacatcagtgttggagatagtcaatgcatttgagaaggcttctggaaagaaaatccctttggtcatgggtcaacggcgtcctggtgatgctgaggttcttttttcatcgccggcaaaagcggagagagagctgcactggaaagcaaaatatggcatcacagaaatgtgcagagacctgtggaactgggctagcaagagcccttatggatacgcggcatctgagtctcccaagctgaatggcagttcacgctgagcaacacgattggtccttgtggactcacttgtacatgagacagtagtgcctaccaggataaatgtagatctagta

SEQ ID NO: 101311 - DNA, 391 bp, Zea mays
tgcaagtttgtccattcgcattggtctgaatactgtagctactagcgcgagtgccgctgtgccgcagctgcctgctcgccattactgcaagctgtgttcaatcaaagcttaattaggctccctctacatctgatccagctaagtagctagccagcactacagaagggcgtggcaagaatcaggagagagatagcaggggggctagctagctgagctcgtgcgacgaagaatggccggaattggcaggaacatggtggcgccgctcctggtgctcaacctcatcatgtacatcatcgtcatcggcttcgcgagctggaacctgaaccacttcatcaacgggcagaccaactaccccggcgtggccggcaacggcgcgacgttctacttcctg

SEQ ID NO: 101312 - DNA, 382 bp, Zea mays
cacacctcacagagctgcagcagcatcagctgccacctcctgcctctcctccttcgttcctgcctgcataggttgctacacgtatatattctgaagaagagatcgagatgaccagcgtgtggaagaccaaggttctgcctggcctcaacaagatctttgacaaggatggcaagaaggctgcagctgcaggcttcttgaagtccttcaacaaggaggagtttgacaaggagattgaggacaagaagacagagctggagcccaaggtcgtggaggcctacgaagcatctcctcctgaggtcaaggctctcttcaaggataagaagccagtcaaggtcagcaagaagaactcggctgcagtcaccaagttcctcgatgagctggc

SEQ ID NO: 101313 - DNA, 369 bp, Zea mays
cggacgcgtgggttggggtacaagtcatgtcaatgagagtatggtaactggtgaaggtgtaccaatctccaaggaagtatccagtctagtcattggaggcacaatgaacttgcatggtgttcttcatatacaagcgacgaaagtaggatctggaacagttttgagccagataatttctctcgtggaaaccgcccagatgtctaaggcccctattcagaagtttgctgattatgtagccagcatttttgttcctattgtcatcaccctgtccttcttgacattccttgcatggtttctatgtggatggttgggagcatatccaaactcatggtctgctgaaagtagcaattggctttgtttcttcctaat

SEQ ID NO: 101314 - DNA, 450 bp, Zea mays
  unsure (1)..(450): unsure at all n locations
agccccaccagctctgctcagccaccaccatcctcctcttcctcgaacggtcgagcggccggaagcacgcaccccgccgccgcgtaccctcccctcacccgctttctatcgccggccgccgttctgcgcgacgcggattcgaatccggaaagcgggcgatgggggcgaagcgcgcggtgctggtgggcatcaattaccagggcaccaaagcggagctcaagggctgccacaacgacgtcgctcgcatgcgccggtgcctacgcgaccgcttcggattcgacgagtccggcatccgcgtgctcatagatgacggctccgcgccgcagcccacgggggccaacatccggcgggaactcgcgcgcctcgtcggggacgcgcggccccgtgacctnctctttttcactacagcgggcacggcatacggctgccccgcgagaccgggaatgacga

SEQ ID NO: 101315 - DNA, 459 bp, Zea mays
cccacgcgttcggagctgttgccaacccaaagaagccatttgccgccattgttggtggatgcaaggtctcaactaagattggcgtcattgagtcgttgctggcgaaggtcgatatcctcatccttggtggtggtatgatctacacattttacaaggcacagggatattctgatggaaaatctctcgtggaagaggataaactcgagctcgcaacttctcttattgagaaggcgaaagcaaagggggtttctcttttgcttcccactgatattgtagtagcggacaagtttgcagccgatgctgagagcaagattgtccctgccactgctatccctgatgactggatgggtcttgatgttggccctgatgccaccaaaacattcgacgaagcattggacaccaccaagactgttatttggaacggccccatgggagtgtttgagttccagaagtttgcac

SEQ ID NO: 101316 - DNA, 442 bp, Zea mays
  unsure (1)..(442): unsure at all n locations
gcaacatagaaagcacaatagtgtaccaacaatggcagccaaaatattttgcctcgttatgctccttggtctttctgcaagtgctgctacggcgaccattttcccgcaatgctcgcaagctcctatagcttcccttcttcccccgtacctctcaccagcggtgtcttcggtatgtgaaaacccaattcttcaaccctacaggatccaacaggcaatcacagctggcatcttacctttatcacccttgttcctccaacaatcatcagccctattacatcagttacctttggtgcatttattggcacaaaacatcagggcacaacaactacaacaacttgtgctagcaaaccttgctgcctactctcagcaacagcagtttcttccattcaaccaactagctgcattgaactctgcttcttatttgcaacaancacaactacca

SEQ ID NO: 101317 - DNA, 358 bp, Zea mays
cccacgcgtccgctcagaggtgggttggcttctcctcccccaccggttcgtgttcgggttctggttcgtgggcgagagggaagagatggcggcgtcggacgttgagtaccgttgcttcgttggcggcctcgcctgggccaccgacgaccactccctcaacaacgccttcagcacctacggcgaggtcctcgagtcgaagatcatcctggatcgggagacgcagaggtcccgcggcttcggcttcgtcaccttctccacggaggacgcgatgcgcagcgccatcgagggcatgaacggcaaggagctcgacggccgcaacatcaccgttaacgaggcccagtcccgcggcggccgttga

SEQ ID NO: 101318 - DNA, 447 bp, Zea mays
cccgtttggtcaggttccagctctgcaggtatggtgacttgtacctcttcgaatcacgagcaaggtgcaagtacgctgctcgcaaaaacaagccagagctgttgagggaaggaaacctcgaggaggcagcaatggtggatgtttggatcgaggtggaggctaaccagtacaccgctgcactgaatcccatcctcttccaggtcctcatcagtcctatgcttgggggaaccaccgaccagaaagttgtggatgagaaccttgagaagctgaagaaggtgctagaggtgtacgaggcacgcctgaccaagtgcaagtaccttgctggagacttcctcagcctcgccgacctgaaccatgtgtctgtcactctctgcctgttcgctacgccctacgcatctgtgctcgacgcctacccgcatgtgaaggcctggtggtctggtctgatgg

SEQ ID NO: 101319 - DNA, 452 bp, Zea mays
  unsure (1)..(452): unsure at all n locations
gccgcaggatcagggagctcacgtctgtcgtccagaagaggttcaacttccccgagaacggcgtcgagctctacgccgagaaggtcgtcaaccgcggcctctgcgccatcgcgcaggctgagtccctccgctacaagctcctcggaggccttgccgtccggagggcctgctatggtgttcttcgctttgttatggagagtggtgccaagggttgtgaggtcattgtgagtggaaagctcagggctcaaagagccaagtccatgaagttcaaggatggctacatgatctcatctggtcagccagtgaatgagtacatcgactcagctgtgagacacgtnctcctcagacagggtgttctgggtatcaaggtgaagatcatgcttgactgggacccgaaagggcaggttggcccgatcacccctcttccggacctggtgaccatccataccccg

SEQ ID NO: 101320 - DNA, 378 bp, Zea mays
cccacgcgtccgtctcactctcagctggtcgctcactcttgcagctccacccttcacgcagtcttaggctcttagctctaggctctagctagccgcgccactccttcgtgtagccatcagccttctcatcgccaccaatggccactgccgaggtccagaccccgaccgtcgtggcggccgaggaagcgcccgtggtggagaccccgccgccggccgtcgtgcccgaggagtctgcccccgccgaggccgaggccgaggccgaggctgaggctgctgctcctgctgatcccgaggagcttcccgcggccgagcagcaggcagccgccgagcccgaggccgctgctcctgctggtgccgaggagcccgcggcggccgatc

SEQ ID NO: 101321 - DNA, 388 bp, Zea mays
gctttgactgcctgccatgttgctagccaagttcatatatcttccaaacctgttttggttttgacacggataaagactggtggttttgagtgggtttcgccagatgaaactgatagagctccatacagtgctgtggaggttgcagtgttatcagaatctcatgacctttgtattaatggggactgttttgaaatgctacaaagtactgaggctgttctccaggttatcccttatgtgaaggttttttcacgtgttgctccagaacaaaaagaacttgtactaactacattcaaaagtgttgggagggtgacactgatgtgtggagatggaaccaatgatgttggtgcactgaagcaggcacatgtcggcgttgctcttttgaatgctg

SEQ ID NO: 101322 - DNA, 381 bp, Zea mays
gggtccacttcaagaacacaagggagacagcttttgcgcttcgcaagctgcctttgggcaaggctaagcgataccttgaggatgttattgctcacaagcaggcaattcccttccggagatactgtggaggtgttggtcgcaccgcacaagcaaagtctcgccactccaatgggcagggtcgctggcctgttaagtcagccaagttcatattggatttgctgaagaatgctgagagtaacgctgatgtgaaaagcttggacgtggacaacctctatgtttcacacatccaggtgaaccaagcccagaagcagaggcgccgcacctaccgtgctcacagacgcattaacccttacatgtgctgcccttgccacattgagctga

SEQ ID NO: 101323 - DNA, 463 bp, Zea mays
caagatccgtgctgatatagagatgaaatgcttccagtttgatggagtgctccatattgagcgggctatgaagaaagctgaagctgcgggcaatgataactgtcctgtgaagattaagctagttgctcctccactttatgttttgaccacacagacccttgacaaggatcaaggcatttcagttctcactactgcagtcaaggcttgtacagcagagattgaaaagtacaaaggaaagttagtagtgaaggaaccaccaagagctgttagtgagcgggaagacaagctattcctcgaccagattgattccctaatggagcaaaacgcagaggtcgatggtgatgctgacagtgaagaggaggaagatacaggaatgggggacgtcgacattacaaattcttgcgtcgctgcttactaaggctacactggttgatttggatgagctttgctgtacagcaccagc

SEQ ID NO: 101324 - DNA, 424 bp, Zea mays
gttacattagtattttttcccaccttatatgattgaaaactattgtttcccgtcgggtcgtgtcatagatggcttggaccctcttattatcctgggagcctcggtggtttggaagcatagaaacagagtggtgttcggtagagtttcttccaacctcactcttattctggagtctgctaatgaggaaagcgagaaatgacaagttgcatgagccaagggttatcctttctggctgctccaagccatataatttagggtggttggatccttcatggatattttaatgtacttctgttgttggccttcgtaagaagtgcatgtatcccgggcgtctttcagctctttgtattcttcgtcttttaatatagtggggcgcagttctcctgtgcttttcgagaaataaaataaaaagggcggtcgttct

SEQ ID NO: 101325 - DNA, 388 bp, Zea mays
  unsure (1)..(388): unsure at all n locations
gcggggatgagctgaccagcctcaaggattatgtgaccaggatgaaggagggccagagcgacatcttctacatcactggtgagagcaagaaggctgtggagaactccccgttccttgagaagctgaagaagaggggctatgaggtgctgttcatggtggatgccattgacgagtattctattggacagctgaaggagtttgagggcaagaagctcgtctctgccaccaaggagggcctgaagctggacgagagtgaggatgagaagaagcgcaaggaggagctcaaggagaagtttgagggcctctngcaggtcatcaaggaggtgctgggcgacaggtggagaaggtggtggtctccgaccgcgtggtggactccccctgctgcctg

SEQ ID NO: 101326 - DNA, 422 bp, Zea mays
gaaacgtgtaagcagcaccattttctttaattctggatctgatgatggatatgtcgggagtgctgcaccatttcctgggaggatactgccggtagatctaacaaactttagtggagaacttctttgccaggcagatgcttttctatgttcggtcaatgatgtctccgtctctagtacagttgagccaaggccacggaatattgagattggtgcagagatgatccttaaacaaaaacttaggggccaggggatggcttttcttgttggtggtggatcagtcatgcagaaaatccttgctcctagagaggtgataactgttgatgctgcttgtattgtggctatgtcggccaccattaacttccagttgaagagccctaaccagcttagaagagcagtttttgggggtgataaccagctaacag

SEQ ID NO: 101327 - DNA, 441 bp, Zea mays
ctgggtcagatgatgatgatgacgatgaatacgatgaagatgaagatgaagatgatggtgatgatgatgatgatgatgatgagggtggtgacgacgacgatgaagacgatgatgatgaagaggggggtgatgaagatgatgatcctgaggctaatggtgaaggggggagtgatgatgacgacgatgataacgatggtgatgatgatggtaacgatgatgacgacgatgaagatgatgacgaagatgaagatgaagaggatgacgacgatgaggaagaacagccaccttccaagaagaagaagtgatttgctctttcatggattcacctcagcttctccatgctgttagttgtgttggttagatcatggaacagctttgggacaaatgttgcttgtcatggtattatagtgtaggaaaccttgacatctgatgttaaaatcg

SEQ ID NO: 101328 - DNA, 467 bp, Zea mays
  unsure (1)..(467): unsure at all n locations
cccacgcgtccgccgtctccacgccgcgttctcccgcacgaatccgcgctccggccaacgggcgcaagccctagccacccccgcccattcatggtgggcgggccgtgagatctctagggaggcttgtcggcttcgtcgggcgggaggggaggagatgggcgcccggaacagcgctgccgccacgccggtgctgctcaacgtgtacgaccttacggccgcgaacgattacctctactggctcggcttcggcgtcttccactccggaatcgaagtccatggcacggaatatgggtttggagcccacgactacccatccagtggtgtgtttgaggtggaatcaaagagttgccctggctttatctacagaagaacagtgtggctaggcacaacagacatgtctcaggaagaattccgctcgtttattggaaaacttgcanngtgatatcatggcgacacatatcatttaa

SEQ ID NO: 101329 - DNA, 380 bp, Zea mays
gctggcttctcctccccctcttaccaagtccttctcgggttagggttccttagggttgtgtggaggggcgatggcggcggctgatgtggagtaccgttgcttcgtcggcgggcttgcctgggccaccagcaacgagtcgctggagaatgccttcgcctcctacggcgagatcctcgactccaaggtcatcaccgaccgggagacggggaggtcccgcggcttcggcttcgttaccttctcctccgagaactccatgctcgacgctatcgagaacatgaacggcaaggagctcgacggccgtaacatcaccgttaaccaggcccagtcccgtggcggtggcggtggcggcggtggctactgcggctgtcgcggcggcggcg

SEQ ID NO: 101330 - DNA, 403 bp, Zea mays
cccggtcaagctcgcgcctttcagcccggaccaggaggacgcgtcggtgctgtggacggagagcaaggacgtgggcaagggcttccgctgcatccgcatggtcaacaacacccgcctcaacttcgacgccttccacggcgacaaggaccacggcggcgtgcacgacggcaccgccgtcgtgctctgggagtggtgcaagggcgagaaccagagctggaagatcctgccgtggggtcccgaggccaactcctccgcggcccacgcgggaggcccgcacgccgtgcgcgtcttctgcaaagccggcggcgaggactacagcctcacggtgcgcaacggcacggcgtgcctggcgcccaccaacccgcgggacgagtaccagcactgggtcaaggacatgcgccac

SEQ ID NO: 101331 - DNA, 383 bp, Zea mays
cggacgcgtccggcagcggcaagtgctactgttgctccagctgctcctgcggcagcggatgcgactgcatgtcccctaacgtggagaccgccgccgccagcagcatcaagaccacggtcctcgccgcgccgaccaccaaggccagcgccggcggcttcgaggcggccaccgagggcggcggctgcgactgcaacacctgcaactgcggcaccagctgcggctgctcctgctgcagctgcaactgagccggtcaggcgatggcgcacgagagtcgagaggacgacgacgagtcgtataaatataatagcggcgtctaaataagatcctgtcaactgcacccggcattatcgatccatggtcgctcctggggttcatgttcatct

SEQ ID NO: 101332 - DNA, 411 bp, Zea mays
accagttccggcatgttcctcgagaagaatcaggatgaagtagtaacgaggatagaggagaggatatctgcttggacatttcttccaccagagaatggtgaagccattcagatattacactaccagaatggtgagaaatatgaaccccactacgactacttccatgacaaaaataatcaggccctgggcggccatcgcattgccactgtgctgatgtacctatcaaatgtcgagaagggtggagagaccatcttccccaatgcagaggggaagctattgcaacccaaggacgacacttggtctgattgtgcaagaaacggatatgcagttaaaccggtaaagggtgatgccctgctgttcttcagtctccaccctgattcaacaacagactctgacagcttgcacggtagc

SEQ ID NO: 101333 - DNA, 450 bp, Zea mays
  unsure (1)..(450): unsure at all n locations
gctgtatgagtacttaggagaggagtatcctgaggtgcttggttcaattcttggagccttgaaggctatcgtcaatgtcattggtatgactaaaatgactccaccaatcaaggatcttcttcctcgtctgacccccattcttaagaacaggcatgagaaggtccaagagaactgcattgatcttgttggtaggattgctgatcgtggagcagaatttgtgccagcaagggaatggatgaggatttgttttgagctgctcgaaatgttgaaggctcataagaagggtattaggagagcaactgtgaacacatttggttatatcgcaaaggctataaggccacaggatgtgttggccaccctgttgaataactngaangtgcaagaacgacagaaaccggtctgtacaactgtagctatngctatangtgctgaaacttgctcacctttcac

SEQ ID NO: 101334 - DNA, 463 bp, Zea mays
  unsure (1)..(463): unsure at all n locations
atcacgggttgctcctcctgatctcgatgaattcaagacaagagcaattgctgaaaggggacctggtatttctagtcaacctggtaatatcatccaccgaagggagcctagtgggaagttgtataattatgctgcagcttctaaaggggccaaggttctggatttcaataaggaggctaagggtgcttccaacatcttagataaagacaaagacaagtacctccgcaatccttgctcagcagaggggaagtttgtcatcatagagctttctgaagaaaccttagtagatacaatcgcaattgcaaattttgagcattattcttctaatccaaaagaatttgaactgctgagcagtctgacatatcccacagaaaactgggaaactcttggaagattcactgccgcgaatgcaaaacttgctcaaaatttcacttntcttgaaccaaagtgggctagatatttg

SEQ ID NO: 101335 - DNA, 455 bp, Zea mays
  unsure (1)..(455): unsure at all n locations
gtcatcttctcctcctcagaaacccaccaaccccgtccagccgccggctgtctcggccgccgccgccgccgccgccgccctatcccggtccttcaggcgaaccaggttggtcatggccttcaacaagatcaaggtctccaaccccgtcgtcgagatggacggcgatgagatgaccagggtgttctggaaatctatcaaggacaagcttatattccctttcgtagacctcgacatcaaatattttgacctcgggcttccacaccgtgatgctaccgacgacaaagtcacagtggaggctgcggaggccacactcaagtacaatgtggctatcaagtgtgccaccattacaccagatgaagcangggtaaatgagtttggcttgaaggctatgtggaagagcccaaatggcacaattaggaatattctgaatggcactgtgttcagagaaccaatca

SEQ ID NO: 101336 - DNA, 466 bp, Zea mays
tatacattgggcgaggggctatcatcacatccttcattgtgtgctatgctcttacatcgggtatttctggatatgttagtggtggtctttactcaaggagcggtggcaaaaactggattaaagcgatggttcttacagcatccctctttccgttcttgtgtttttcaattggtttcgcactgaatacaattgctattttctaccgctcattagcagcaataccatttggcacaatggttgtcatgtttgtactttgggctttcatatcttttccgttggtgcttttgggaactgttgttggtagaaactggagtggtgctcctaacaacccctgccgagtaaagactattccacggcctattcctgagaagaagtggtaccttacaccttctgtcatctcattgatgggtggcctgctttcctttggcagtatcttcattgagatgtacttcgtgttcacatcatt

SEQ ID NO: 101337 - DNA, 460 bp, Zea mays
cgcgtgcgaaccaagcagaccacaacaagaagaagcgtagtcgtcgccggaaggaaaggcgcggagcaagatgtcgtggcaggcgtacgtcgacgagcacctgatgtgcgagatcgaaggacagcatctcagcgccgccgccatcgtcggtcacgacggcagcgtttgggcgcagtccgagagcttccccgagttaaagcctgaggaggttgctggtatcataaaggactttgatgaacctggtactcttgcaccaactggtcttttcgttggaggtacaaagtacatggtgatccaaggtgaacctggagttgtcatccgaggaaagaagggcactgggggcattactatcaagaaaaccggcatgtccttgattattggtgtctacgacgagccaatgactccagggcaatgcaacatggtggtggaaaggctcggcgattacctgatcgagcagggc

SEQ ID NO: 101338 - DNA, 407 bp, Zea mays
cacattttcaaaatatgaccaggcaaaagctcttggaaagacaactattgatgtggctggtattgctgccgggttgccatgtggtagtgaaagcttcctcttgatgtttgccagatggagaaaacttgagagggatttatacaatgaaagaaaggaccgttttgacattacacagatcccagatgtatatgattcctgcaagtatgaccttttgcataatgctcatctcaatcttaagggtttggaagagctattcaaagttgctcaaatactcgctgatggtgttattccaaatgagtatgggatcaacccaaagcaaaaactgaaaatcggctcaaagatagcgcgccgtttattgggaaaaatcctaatcgatctacgcaacactcgtgaagaagctatcagtg

SEQ ID NO: 101339 - DNA, 436 bp, Zea mays
  unsure (1)..(436): unsure at all n locations
ccagtcctcacataatcatcttcattcactcactctcttcgatcactgtactgaagataccatggccaagtcgaccgcgatgtttgtagccgccctggccctggtggtggtgatggcgacgacgagcacaggcggtggcagggcggcagcggcgtgcgatcccaagccgctggtggtgtgcgatccggcgttcatggacggagcgaaacccgcggcagcatgctgctccaccctgcgtgcgcaggaggcatgcttgtgcgtgtacgccaaagaccccaagtttgcaaaatacatcaacaaccccaacaccggcaaaacctttacctcgtgcggcatagccatccccaaatgctaagcaagcgctctgcgtcgtcgcttcgctagctcttgctctcgngtgtaacatatncagcttatgaantaaatatgtggatca

SEQ ID NO: 101340 - DNA, 433 bp, Zea mays
gattgtagctttcaagatgctgatgtccttaaaccagacatacttgctcctggcaatctgatgggggctgcatgggcgcctaatggaacggatgaatcaaactatgctggtgaaggatttgcaatggtttctggaactagcatggccgcaccgcatatcgctggcattgcggcactgataaagcagaagaacccaaagtggagcccctcagcaataaaatctgccatgatgacaacggccaatacactggacaaagggagccgtcctctcagagcgcagcagtacactgcatcggaaatgatgacactttctcgggccacaccgtttgattgtggtagtggcgctgttaacccaaaagctgcccttgatcctggtcttgttctagatgcaacccacgaagagtacatcgcatttttgtgctcgatccctgacg

SEQ ID NO: 101341 - DNA, 437 bp, Zea mays
cggaggaggagctggggctggtggtggttacggtggaggagcaggtgcaggtggcggcgggggcggagggtatggcggaggtgccggaagcggttacggtggaggagctggtggaggtactggcggtggatacggtggaagtgcacgagcaggaagtggctctggaggcggctatggtggaggcgctggtggaggctactgtggtggtgctggcgctggtagtggcagtggccttggctctagcggcggtggaggttatggtggtggtgccggaggctgaagctgatgtggaagttgaggtggcatcggaagcggtgtgtgattcaacctcttacatccatgcatggcgtgtacatgcaagtgctcgacgcactgctctttgcattttaagcatgcgtggagtcaagctaatagcatgtgtgcgatataccgatcga

SEQ ID NO: 101342 - DNA, 456 bp, Zea mays
  unsure (1)..(456): unsure at all n locations
cccacaccgaggaaaggagaagagagcgagggtcggaataatggcggccgaggagggtggcgtgatcgcgtgccacaccaaggacgagttcgacgcccgcatggccaaggccaaggagcagggcaagctggtggtcatcgacttcatggccccctggtgcagtgggtgccagatgatggccccggtgtacgcggactgcgccagcaagtacccttccgcggtcttcctcgaggtcgacgtggacgaactgctggaagtcgcgaagatctacggcgtccatgtgatgccgaccttctgcttcatcaggaacggcgagacgctcgagagctttgctaccgtcgacgaggacgagctccgggacgccgtcaggaagtacgccgncgctggcactacgacggctcctgccttcgcgtncgcctaattcaggagatgtgatgtgtagcaaatagcgcgcgc

SEQ ID NO: 101343 - DNA, 435 bp, Zea mays
acgtcacaaaaaccctcgctccccacaacccgtcgccgcccacgccgccgcctgtacgagcggcgtcaagatgagtcggcaccctgaagtgaagtgggctcagaggatcgacaaggtttacatcactgtacagttacctgatgccaaggacgctaaggtcaatttggaaccagatggtgtcttcacattctctggcagtgctggtacaaacttatatgaattgaaactagatctgaatgacaaagtaaacgttgaggctagcaaaataagtgtgggtgtcaggtccatattctgtattgtagaaaaagctgaggccaaatggtggaagaaacttgttcgagatgatcaaagggcacctcactttgtgaaaagtgattgggacaaatgggttgacgaagatgatgatggtgctgatgtcaacttggatgggatgga

SEQ ID NO: 101344 - DNA, 383 bp, Zea mays
  unsure (1)..(383): unsure at all n locations
aggccattagctttatctactccagagcgcagttgaacccgatcgacaccatgagggggttgcgtcgttgccctcgctctcctggctctcgctgcgagcgccacctccacgcatacaagcggcggctgcggctgccagccaccgccgccggttcatctaccgccgccggtgcatctgccacctccggttcacctgccacctccggtgcatctcccaccgccggtccacctgccgccgccggtccacctgccaccgncggtccatgtgccgtcgccggttcatctgccgncgncaccatgccactaccctactcaaccgccccggcctcagcctcatccncagccacacccatgcccgtgccaacagccgcatccaagcccgtg

SEQ ID NO: 101345 - DNA, 384 bp, Zea mays
cagggtatggcgtttggcacgggtagtgccatggcacacagggctgttgactctgtgttaggtccccggaccatccagcatgagactcttgccacagaagctcctgctgctgcccctgctgctccagcgatgaatgctgatgcttgcagcttccattctaaggctttccaagattgtctgaacaactatggcagcgagatcagcaagtgccagttctacctagacatgctgaacgagtgccgccgtggtggtgtgtctgtctaagctgcctctgggattattcatggattttcttttcggatgagggtatctcattaataagacaccgtgaaacttcgaccatctccacagcttgaaaccatacttcctgggattaatttattt

SEQ ID NO: 101346 - DNA, 381 bp, Zea mays
  unsure (1)..(381): unsure at all n locations
cccacgcgtccgctcaccgaggtgcgcatgaacggcacctgcgcctggctgaggcccgacggggagacccaggtgacggtggagtacgtgaacgagggcggcgccatggtgcccgtccgcgtgcacaccgtgctcatctccacccagcacgacgagaccgtcaccaacgacgagatcgccgccgacctcaaggagcacgtcatcaagcccgtgatccctgagaagtacctcgacgagaagaccatcttccacctcaacccgtccgggcgcttcgtcatcggcgggccccacggtgacgccggcctcaccggccgcaagatcatcatcgacacgtacggcggctggngagcccacggcggtggcgccttctccggcaaggac

SEQ ID NO: 101347 - DNA, 409 bp, Zea mays
  unsure (1)..(409): unsure at all n locations
cctctccctccgctcgctctctccctccctcggtcaaagccagcacgacaacgcagcaggctgggtagctgtccccctcgccctcatccctcctcggcgccgctgccggcccgcctcccccctcgtgccgctctgccgcggcgcattccgcgcccgcctcgccaccgaatcgggcggaatctcagcgggaccaaaatggggtcgccgggtgcggggagcagcggcggccacgagtgctccttcaagatcctgctcatcggggactcgggcgtcggcaagagcagcctnctcgtcagcttcgtcgccgccttccacctcgacggcgacatcgcccccaccatcggtgtggattttaaaatcaaagtccttacagttggtggaaagaaactaaagttgacaatatgggata

SEQ ID NO: 101348 - DNA, 452 bp, Zea mays
gtgggttggcttctcctccccctccggttcgggttcgggttcgtgaggttctccggggggcgggttcgtgggtgagcggatcgagatggcggcgtcggatgttgagtaccgctgcttcgtcggcggcctcgcctgggccacggacgaccactccctccacaacgccttcagcacctacggcgaggtcctcgagtccaagatcatcctcgatcgggagacgcagaggtcccgcggcttcggcttcgtcaccttctccacggaggacgcgatgcggaacgccatcgagggcatgaacggcaaggagctggacggccgcaacatcaccgtcaacgaggcccagtcccgcggcggccgtggaggcggcagcggtgggtacggtggtggccgtggaggcggcggctacggcggtggcgggcgccgtgatggcggtggcggctacggcggtggcggcg

SEQ ID NO: 101349 - DNA, 399 bp, Zea mays
  unsure (1)..(399): unsure at all n locations
gcgatccgaagctcaatcaattcactcaaacctcttccccaaatcttcgattagatggtcgttgacaagaagactagaaccgaacctgaccatgtcgctgatccgccgcagcaacgtgttcgatcccttctccctcgacctctgggacccctttgagggcttccccttcggctccggcagcagcagcagtctcttcccctcgttcccgcggaccagctcggagaccgcggccttcgctggcgcgcggatcgactggaaggagactccagaggcgcacgtgttcaaggccgacgtaccggggctgaagaaggaggaggtcaaggtggaggtcgaggacggcaacgtccttcagatcagcggcgaacgcaacaaggagcangaggagaagacggacacctg

SEQ ID NO: 101350 - DNA, 447 bp, Zea mays
aggatggtgaatatgttctgacttacgaggacaaggatggagattggatgcttgttggcgatgtaccatgggagatgttcgctgactcttgccgcaggctcaggatcatgaaaggatcagatgcaattggacttgctccaagggcagctgataagtccaagaatcgcaactagaatggttgcttcttacagtccagagcaagagggagatatccagtgactgtagggatctttgtggaagccggaaaacgtctaacagtttcaagaagaattctgccttatggtctgtaccacatgtttttgctgctacgcaagtaaagaactccacgtctgtcaatgttagttttacaacatcgtctacggacaaaaaaaaaaccccccgctatttgattgttgctaaacctttgtacgacgtgtaaaatgtttggtacaatgagtgctgcgacta

SEQ ID NO: 101351 - DNA, 106 bp, Zea mays
tctgtatctatatatgtaataatgcagtatgacgacacacattatcatgtgtggtatgaccagtaatatatgcatggtcataataaagttttggttctaatgaatc

SEQ ID NO: 101352 - DNA, 466 bp, Zea mays
aaagaagcaatcaaatatggctgtcatgatcttaagatacttcaacgtgattggagcagacccagagggacggctaggagaagctccaaggccagagctacgcgagcatggacggatatccggtgcttgctttgatgcagctttgggaatcattccagggctaaaggttcgtggaaccgattactccactgcagatggaacttgcgttagagactacatcgatgtcacagatcttgtagatgctcacgtaaaagctcttggtaaagctcagccaggcaaagttggaatctacaatgtcggaacaggccaaggtagatcagtgactgagtttgtagaagcttgcaagaaggcaacaggagcttctatcaaggtcgaatatctggcacgtagacccggagaatatgccgaggtatacagcgatccgtcgaaaatccacatggaactcaactggacagcccagtacact

SEQ ID NO: 101353 - DNA, 421 bp, Zea mays
cggattcccggtcgactcacgcgtccgggacaaccactccaatatcatttgtgactgatttcatgttcccttatgctcgtgatagtgtaggaaaacatctgacttctacatttgactttgaggaaactaaagaagacatcaaactattgcgcatccaaattgaagatgatctacaaaatggagttgctggggctgttccagttccacctgatgagggtggcaaagaagaggttatcaattcattggttgccaatgttgaatcaatgattaaagcagaccggaagatcacatcattgaaacaacttcagggtcatatttggaggattggatttcaaaagaaagagctacagggagttgtctttgaggatgttcctgtggcgctaaagaactggcatgctaatggcataaaagtctacatata

SEQ ID NO: 101354 - DNA, 389 bp, Zea mays
gaaggattatgtgcatgtgcgcatccagcagctcaacggcagaaagagtctgactacggtccagggtctgaagaaagagttcagctataacaagatcctcaaggatctgaagaaggaattctgctgcaatggtactgtagttcaggacccagagctaggccaggtcattcagctccaaggtgaccagcgcaagaatgttgctactttcctagttcaggctgggattgcgaagaaagagaacatcaagattcacgggttctaagggacctgtaaatgcttgtgccctatattgtgtgcctccacatattggggagcttgaagcatcgacagttactagtcattgcttacttatataagaacataagtagtatttgctattgtcaagtgtg

SEQ ID NO: 101355 - DNA, 279 bp, Zea mays
cccacgcgtccgcccacgcgtccggtgataacaagttagaaaatcttaacaaggctgctgagttggaccctactcttacatatccctatatgttccgagctgcatctttgatgaaaaggcaaagtgttgaagctgcattgatggagatcaaccggatacttggattcaagctggtgctggagtgcttagaactaaggttctgttgctaccttgcccttgaggattatagggctgccttatgtgacgtgcaggcaatactaactcttgccccaaattatc

SEQ ID NO: 101356 - DNA, 396 bp, Zea mays
ccagcttgttaagccccttgatagaatcaccaggtatgtggatgctattcttgcgagcccaaagggcaccctcttccctatgtgtggaatgaaccttgcatttgaccgtgagctcattggtcctgcaatgtactttggtcttatgggtgatggccagcctattggtcgctacgatgatatgtgggcaggatggtgcacaaaggtgattacggaccatctgggcctgggtgtgaagactggcctgccctacatctggcacagcaaagcaagcaacccgtttgtgaacctgaagaaggaatacaacggcatcttctggcaagaagagctgatcccgttcttccagtcggtctcccttccaaaggaggccaccaccgttcaaaagtgctacctcgagct

SEQ ID NO: 101357 - DNA, 428 bp, Zea mays
cccacgcgtccggtcttttgctctcagtaatggccatactgtttatgacatggaacagccttgcagagcaaatgtggctgttcggcgagagcttcatacaccagcttctgaccgatcctgcattcatttagagtttgatattgctggaactggcctaaaatatgaaactggagatcatgttggtgtctatgctgaaaattgcatcgaaactgttgaagaggcagaaaaactgctaggttattcaccagatactttattctctatttatgctgaccaagaggatggtaccccgctctgtgggggttctttgccacctcctttcccgtccccttgcacagtgaggactgcgcttacgagatatgcagatctttttgaattcggctaagaagagtgctttactggcgctggctgctcatgcatctgattct

SEQ ID NO: 101358 - DNA, 430 bp, Zea mays
  unsure (1)..(430): unsure at all n locations
ctggcgaggagtatcatgagcttatgtgttagagttcatggctgctgttaagcagaatctgacggcgagaaagtcctcattcagtttgaggacttcgcgaatcataatgcttttaatttgcttgcaaaatatagcaagagccatcttgttttcaatgatgacatccagggcacagcatcagtggtccttgcaggtttgttagcagcactcaaggtggttggtgggaccttggcagagcacacttatttattccttggtgctggggaggctggaactggtattgcagaactcattgctcttgagatttcaaaacagacgtcggctccaattgaagagtgccgcaagaagatttggttggtggactcaaagggtttgattgttgactctcgtaaaaactccngtcagtcattcaaaaaaccttgggcacatg

SEQ ID NO: 101359 - DNA, 229 bp, Zea mays
  unsure (1)..(229): unsure at all n locations
gcggcggcaaaggcgacgttcccaactatgcgaacgaacattgccctggaacgcagggggaggatgcggtgaaggcggatgcctgcgctgggtgccccaaccagcagatttgcgccaccgcccccaagggccccgatcccgatgtggttgctattgttgagaagttggctactgtgaaacacaaattattagttntgtctggaaagggaggtgttggaaagagcacatt

SEQ ID NO: 101360 - DNA, 272 bp, Zea mays
gtcaagggggaaccaaacatatcatacatctgctcgcgatactatagggctgcagagctcatatttggtgccactgagtataccacagcgattgacatttggtctgctggttgtgttcttgctgagcttatgctagggcagcctttgtttccaggtgaaagtggtgtggaccaactcgtcgaaatcatcaaagtccttggtactccaacaagggaagaaattaaatgcatgaacccgaattacacagagtttaagttcccacaaatcaaagc

SEQ ID NO: 101361 - DNA, 417 bp, Zea mays
  unsure (1)..(417): unsure at all n locations
cccgcgggcgcacacagggatatggagcgaggcgccctcccggagctctccgttctgtccgccgagcagcgcccgcaggtccttccacgggaccaggccggtggcggcaagggactactacgatgtgctcggcgtcagcaagagcgccagccaggcggagataaaaaaggcctattatgggcttgcaaagaagctccacccagacacaaataaaggtgatgcggatgcagaacgcaagtttcaagaggttcaacgagcttatgagactttaaaggatgaacaaaaaagatcattatatgatcaggttggccctgatcagtatgagaaaactgcttctggcggaggcggaactggcttcgagggtggttttggaaatccatttgaggatatttttggtggtggccgtggcngtggtgg

SEQ ID NO: 101362 - DNA, 389 bp, Zea mays
gcctcccaccgccaccggcggcgacgtgtaactcgcccgctgaccccagcaggcagccatgggagggcacggcgggttgaacatcctgccgcagaagcggtggaacgtctataacttcgacaaccgtgagaaggtgcaaaaagacgaggccgccgccgcccgggaggagcagctccagcgcgaggcggaacgccgccgcgagtcggatctacgcctcgctgcactacgccgtaaccgcggcctggtccaggcggagacgccccccgctcctccatctcaccccgccggccccgctgatccggcggacgcccttccttccccggcggacgcccttccttccccggcaacggatggagaccacatcaacctcttctcaggtggatcaagcg

SEQ ID NO: 101363 - DNA, 434 bp, Zea mays
aacacaccaagcgaagcgcactagcatttacctaacaacaatggctaccaagggattagccctccttgcgcttcttgccctttttgtgagcgcaacaaatgcgttcattattccacaatgctcacttgctcctagtgccattattccacagttcctcccaccagttacttcaatgggcttcgaacacctagctgtgcaagccaacatgcaacaacaagcgcttgcggcgagcgtcttacaacaaccaattgcccaattgcaacaacaatccttgccacatctaacaatacaagccatcacaacgcaacagcaacaacagttcctaccagcactgagccacctagccatggtgaaccctgccgtctacttgcaagagcagctgcttgcatccaacccacttgctctggcgaacgtagttgcaaaccaacaacaac

SEQ ID NO: 101364 - DNA, 382 bp, Zea mays
  unsure (1)..(382): unsure at all n locations
ttggatcggacccagaggggcgactatgagaagctccaaggccagagctacgcgaggatggacggatatccggtgcttgctttgatgcggctttgggaatcattccagggctaaaggttcgtggaactgattactccactgcagatggaacttgtattagggactacatcgatgtcacagaccttgtagatgcccatgtcaaagctcttggtaaagctcagccaggcaaagttggaatctacaacgtcggaacaggccaaggtagatcggtgaccgagtttgtagaagcttgcaagaaggcaacgggagcttncatcaaggtcgaatatcttgcccgtagacctggagattacgccgaggtatacagcgacccgtcgaaaat

SEQ ID NO: 101365 - DNA, 461 bp, Zea mays
  unsure (1)..(461): unsure at all n locations
gtttcggaattcccgggtgctacccacgcgtctcggatgggattaggnccatgggaccacagctatctgtgattgggcgaaacttgaaacctcagttttgaaaaggggatgggacgtaccatagctgcagtgcgaattctcagtttctaagtgagctgaaatggatgccttggaagcctngattacttcgtcaaatgtaaaatgaaatctgatggcntttctgaagaaaaagggctttgcctcattcattcgtgtgtttatcagcgagcctttgtcggcttgtttggagttggatcccaagctgttaatggagcgattggtcactgcccgtggctcattccttgcttgctgtgaaagtctgcaaggcctttgagattggaagacaattgattttgtttgaacctgaatgaaggccttcgctctctcaagtttgtctatttgctgcaacaaagttgggggct

SEQ ID NO: 101366 - DNA, 372 bp, Zea mays
cccacgcgtccggcggcgagttcaaattccacaatcttcttgtagcacaccggtgtggtcgtccaactcggcggcgatgtctgggcgcggcaagggcggcaaggggctgggcaagggcggcgcgaaacgccaccgtaaggttctccgcgacaacatccagggtatcacgaagccggcaatccggaggctggcgaggaggggcggcgtgaagcgtatctccgggcttatctacgaggaaacccgcggcgtgctcaagatcttcctcgagaatgtcatccgcgacgcggtcacctacaccgagcacgctcgtcgcaagaccgtcaccgccatggatgttgtgtacgccctcaagcgccagggccgcactctgta

SEQ ID NO: 101367 - DNA, 394 bp, Zea mays
ggcaaactggacattcttgtcaatggttctgccggcaacttccttgcctccggggaggatttgaagcccaagggattccggactgttcttgacattgacactgtgggtacatacacaatgtgttatgaagccctcaagtatctcaaaaagggtggaccagggagaggtccttcctctggtggcctcatcattaacataagcgcaacgctgcaatacactgccgcttggtaccaaattcatgtctctgctgccaaggtacttggaccttctctgaaccgctctgcaagagaaaatcgatgaagtgtgtagatttctgctgattgatcggcttctataagctggcgttgacggtatcacaagatcattggctctggaatggggaacagattacgac

SEQ ID NO: 101368 - DNA, 391 bp, Zea mays
cgcacgcgtccgcccacgcgtccgaatacactcactggcaagacaatcacccttgaggtggagtcttcggataccattgacaatgtcaaggccaagatccaggacaaggagggcatcccacccgaccagcagcgcctcatcttcgccggcaagcagctggaggatggccgcaccctggcggattacaacatccagaaggagagcactctccacctggtgctccgcctcaggggtggcatgcagatttttgtgaagacattgactggcaagaccatcaccttggaggtggagagctctgacaccattgacaatgtgaaggccaagatccaggacaaggagggcattcccccaaaccagcagcgtctgatctttgcgggcaagcagctggaag

SEQ ID NO: 101369 - DNA, 445 bp, Zea mays
tgcctcttcaacaacaggctgatataatctgcaacaaggtcaaggaaatgaaacaagtgagaggtggctacaacatagttggtctgtctcaggggaacttgattggtcgagcagtggttgagtactgtgatgatggaccgccggtcaagaatttcatctctctaggaggtcctcatgctggtaccgcttcagtgcctctttgtggttctggatttttttgcattattgttgatgctctgatcaaattggagatctactcagactatgtgcaagaacatcttgcacctagtggctacctcaaaatcccaactgatatggcagattatctgaagagttgtaggtttcttccaaaacttaacaatgaaattccagataaaagaaatgccacctacaaggaaagattcagtagcttaaaaaaattggttctggatatgtttcaggatga

SEQ ID NO: 101370 - DNA, 408 bp, Zea mays
cggacgcgtccgcccacgcgtccgcctacgcgtccgcctgggacaacgccaagaaggacattgaggctggagtttcagagcatgccaggacccttggcccaaaaggttctgaccctcacaaggcggctgtcattggtgacaccattggagatcctctcaaggacacgtctggcccttccctcaacatcctcatcaagcttatggcggttgaatcccttgtcttcgcccccttcttcgccgcccatggtggcattctcttcaaatggctctaagccagcgagagacgcaggataaaggccgtagttttgcaaggcgagtagagcagtatgtcagtaatacagcatctatggcatgtgcttttgctcgtccagttcatgagccccgttgtgtatttggtttcccgtttct

SEQ ID NO: 101371 - DNA, 401 bp, Zea mays
  unsure (1)..(401): unsure at all n locations
ctggcaccattggcaagcgcctttccagcatcaatgtcgagaacgtggaggagaacgggcgggctctccgtgagctcctgttctgctgccctggtgccctccagtacatcagcggtgtgatcctcttcgaggagaccctctaccagaagaccaaggatggcaagccttttgtcgatgtcctcaaggagggaggcgtcctccctggcatcaaggtcgacaagggcaccattgaggttgttggcaccgacaaggagaccaccacccagggccacgatgacctcggcaagcgctgcgctaagtactacgaggccggtgcccgctttgccaagtggcgtgctgttctcaagattggccccaacgagccgtcacagcttgccattgacctgaatgctcanggtctg

SEQ ID NO: 101372 - DNA, 391 bp, Zea mays
gtgagagcgatatgagtgtcccaggtcaatgctcatcccagccacaatttatgaccagcgttgggaggagtaaccgctccaatggccccggcactcctcttatcgaaagcatagatgttgatcaaattgttattccagagaaaaacagttggaagaacttattctcatacatagggcctggatttctcgtctcaattgcatatattgatcctggaaactttgagacggatctacaggctggagcacagtacaaatatgaggtgcctgctgcttcagtcttatgttcccacttcttctttggatcataccttgtgcatcctgtgctgctcttattattcaatcacttgcagccaggctaggggttgtgacagggaaacatcttgcagagcat

SEQ ID NO: 101373 - DNA, 418 bp, Zea mays
cagattcagatcagatcgtagcagccttaggattccgcgctccgggggtgccgaggaagctgaagctcctctctccctgccttctcctcctcgccttctttgccaccgcggcgtacgcggcgtcggcgtcggcgtcgcgcgcggcggccgtcgtcaggggcgcgggcgccccgtcgcagtcggagttggagtcggacccggagaaccagtgcgtgtacacggtgtacgtgcggacggggtccatctggaagggcggcacggactcgaccatcggcgtgacgctgctgggccccgacggcacgggcatccggatccgggacctggcggggtggggcggcctcatgggcgccggccacgactactacgagcgcggcaacctggacatcttcagcggccggggcccctgcatgagccaggc

SEQ ID NO: 101374 - DNA, 339 bp, Zea mays
gtcggatgttgagtaccgctgcttcgtctgcggcctcgcctgggccacgggggaccgctccctccacaacgccttcagcacctacggcgaggtcctcgagtccaagatcatcctcgatcgggagacgcagaggtcccgcggcttcggcttcgtcaccttctccacggaggaggcgatgcggaacgccatcgagggcatgaacggcaaggagctggacggccgcaacatcaccgtcaacgaggcccagtcccgcggcggccgtggaggcggcggcggtgggtacggtggtggccgtggaggcggcggctactgcggtggcgggcgccgtgatggcggtgg

SEQ ID NO: 101375 - DNA, 390 bp, Zea mays
ttgtggacgtcccagaaatgaattatacttcggaggatcaaccgtatcctcgtggagagatgtgtgttaggggacctataatattctgtggttactataaagatgaagtccaaacgtaacttgttatcattacacatctatttacatcctttaaataaatacatccattaaactttgataaatgtatttgaaaacctgcagaagagaggtcattgatgaggatggttggttacatactggagacataggtttgtggctgcctggaaggcgtctaaaaattatagataggaaaaagaacattttcaagttaactcaaggagaatacatagctccagagaagattgagaatgtctatgctaagtgcaagttcattgctcaatgctttatata

SEQ ID NO: 101376 - DNA, 347 bp, Zea mays
  unsure (1)..(347): unsure at all n locations
ggaaagagcttacgctgctggggttatgggcgagcccgttcgtgctccgggcgcgcagcgcgctcagcctcaaaggcctcacctacgcttactccgaggagaacctcgacgacaagagcgagcttctcctcagctccaaccccgtgctcaagaaggtgcccgtgctcatccaccacggcaagcccgtctgcgagtcccagatcatcgtgcagtacgtcgacgaggctttccccgccgtcgcacctaatttccttccatccgacccctacgaccgcgccattgctcgcttctgggcctnctacgtcgacgacaagttctacagcgcgtggatacccgtgttcaggggc

SEQ ID NO: 101377 - DNA, 403 bp, Zea mays
ggcggcgacgcggcggcggcgcagcatgctctgatcgacgcggacctgcgggagctgggcgtcgccgcgcggaagctcgccaaccacgcattcgtcctcggcggcgggctggggttcggcacctccttcctcaaatggctggccttcctcgccgcagtgtatctcttgatattggatcgcacaaattggaagaccaacatgctgacagctctcttggttccttacattttcttcaccctgcctaatgtgctgttttctctgatcagaggagaggtggggaaatggattgcgattattgctgttattctgcgtctattctttccacgacacttcccagattggttagagcttcctggttccatcatcctgctcacagtggtcgcccctagcctgttcgcggaca

SEQ ID NO: 101378 - DNA, 385 bp, Zea mays
cccacgcgtccgcgagcccgccagagtagttgggaagcatgcccatgtcctggaaggggccgaggccgaggaatagcagcagcccgagaaccgcgcccgtatcgcccaaggagaagaaggacaggatcggcgagagagtcgcggcgctccagcagctagtgtcgccgttcgggaagacagacacggcttccgttctgcaggaggcctcggggtacatcaggttcctgcaccagcagctccaggtcggtgttccaccagtgaccgcgcgcatggtggccggcactacgtcctcagctccccttacatgcgtgctcctccggctgccggcgccgcgcctgaggatcccgagcactacagccttcggagccgctggctgtgcctggtg

SEQ ID NO: 101379 - DNA, 390 bp, Zea mays
aatacccacctagacccacgcgtccatgggcactatctacttcagacctcaattcaacccaagcgacaccatgaggaggaaaggtcaaaatccaaactctcctggctctcgcaacgagcgccacctccacgcatacaagcggcggctgcggctgccagccaccgccgccggttcatctaccgccgccggtgcatctgccacctccggttcacctgccacctccggtgcatctcccaccgccagtccacctgccgacgccggtccacctgccaccgtcggaccatgtgccgccgccggttcatctgcccccgccaccatgccactaccctactcaaccgtcccggcctcagcctcatccccagccacactcatgcccgtgccaacaaccgc

SEQ ID NO: 101380 - DNA, 371 bp, Zea mays
cccacgcgtccggattgtccatctttatccctttctcaaaggtttggttggaaggcagaacaggacaccaacgattgtcatcgtctggtccattctgctggcttcaatcttctcgctcctttgggttcggattgatcctttccttgcgaaggatgatggtccgcttcttgaggagtgtggtttggattgcaactaggatgtcagtgcatcagctcccccaatctgcatatgcttgaagtatattttctggtgtttgtccccatattcagtgtctgtagataagagacatgaaatgtcccaagtttcttttgatccatggtgaacctacttaatatctgagagatatactgggggaaaatggaagctgcggc

SEQ ID NO: 101381 - DNA, 381 bp, Zea mays
gtttgaaactatggaagaagcaagaatggctcttgaagctactcatgctaccaccctgttggacagggtgatttctgtcgagtacgccttcagggatgatagtgaagtgagtgataggtacggcagcccaagaagaggtggtggctatggtaggcggggtgatagcccagtgtaccggtcacgtcctagtccagactatggtcgcccagcaagtcctgtatatggttcatatgacggtcctggtcctgttcgtgatcgctatcggagatcttctgcttatcgatcaaagtccccaactgcgaaacgaagagcatatgactaatcgagaaccctttgttatgccatatatggcctaagaacaccctgtagcaagaacttact

SEQ ID NO: 101382 - DNA, 399 bp, Zea mays
gagagagagagcaagcaatggctacagcagggaaggtgatcaagtgcagagccgccggggcgtgggaggccggcaaaccgctgtccatcgaggaggtggaggtagcgccgtcgcatgccatggaggtgcgtatcaagatcctctacaccgcgctctgccacaccgacgtctacttctgggaggccaaggggcaaaccccggtgttcccgaggatcttaggacacgaagcgggaggcatcgtggagagcgtcggagagggcgtgaccgagctcgcgccaggcgaccacgtcctcccggtgttcaccggcgagtgcaaggagtgcgcccactgcaagtcggatgagagcaacatgtgcgacctgctcaggatcaacgttgaccgcggcgtgatgatcggcg

SEQ ID NO: 101383 - DNA, 333 bp, Zea mays
cccacgcgtccgcccacgcgtccggctcttgctgttgtggctaatgttgggaaacgagctatttcttctagatcggtggcccatgctcttcataatcggcattggatcactgacattgagacccctcttaatttgctagggctgcaacaatatcttagcctttgggatgctttaaggcgagtggtgctcactcaggacgcggatcgacatgtgtggattcatgctacctctgctcagttctcttcgaagtccagtgatagggcatattgcatgggttcgattaccttcgaaccatggaagaggttatggaagacttgggcttcacccacatgc

SEQ ID NO: 101384 - DNA, 435 bp, Zea mays
agaacacaggtacttttcatcgttacttgcaccaacaagaccatcgcagcttgcaaggccacgtcggaaaggagatcaagggaataacaagattcctgatctcaacctgcaggatggccctatggtgctctccccgccaagaaagttacgtagggtgacagcgcatgaagggatggaaggtatgcacaggacagataaagtggacgaacatccttctgggatgaggcacaccgatgacatgcccagtcagagttctagaattccaatgtcagttgatgttggggctgtgtttggcacacgacctgcacctaggccaacattgaacagtgcggacaagtctcgtttaaaacggaaacttgatatggatccagagtttggatacgcggagtagaaggaacacatgtttacatgcaccattcttttcttattggggat

SEQ ID NO: 101385 - DNA, 415 bp, Zea mays
ggcgagactattttccctgatgcaaatgtgaacgtcagttctttaccatggtgcaatgagctttcagagtgtgccaagagaggcctttctgtcaaaccaaagatgggagatgcacttcttttctggagcatgaaaccagatgccaccctggacccattaagtttgcatgggggttgtcctgtgattagaggaaataaatggtcgtcaaccaagtggatgcatatccacgagtacaaagcttgagccttcaagactcgagagtcgagcgtaccaaagatggatctctatgcatgtgacttggggctgtctactgggttgacacccatgtatgctttacagacccactgaagctgtattctttgctcctttgttggaggggggagaattgcagataataagggccaataagcaaggg

SEQ ID NO: 101386 - DNA, 359 bp, Zea mays
tttaaatatacagcatcagataacgaaacgggcaggtagaaaccagacacaacggacttcacaaggtaatacatgagttcaacagggcacaatggtcctcaaaagtccattcatacttgcgacttgactggttatttaggtgataacgatttggggtccggcacattcaccagtttggccagcttttagccttgcttctagcccatggcatacttctgtgtccaggagcgtgcggtggactcatacttggccctgtcggtcttgtacatgtgagcaatctcagggacaagaggatcatcagggtttgggtccgtgagcagtgagcagattgacaggagaacctttgagatagttaaagc

SEQ ID NO: 101387 - DNA, 401 bp, Zea mays
ccttcttgatccagccaagccagggatcgccatgtcggactcggaggagcaccactgcgaatcgaaggccgacgccggagcgtccaagacctacccgcagcaggctggcaccgtccgtaagaacggcttcatcgtcatcaagaaccgcccctgcaaggttgtggaggtttctacctcaaagactggtaagcatggccatgccaaatgccactttgttgccatagacatattcaacgggaaaaagctcgaagatattgttccttcgtcacacaactgtgatattccgcatgtgaaccgtactgagtaccagctgattgatatatcagaggatggatttgtgagccttcttacttcagatggcaacactaaggatgatcttagactcccaactgatgagactc

SEQ ID NO: 101388 - DNA, 365 bp, Zea mays
gggagatcgttcggcgtcacagactttttcaatccatcgcagctggacaagcgttctgtcgtagaggtgatcgttgagatgaccggcggcggcgtggactacagcttcgagtgcatcggcgtgccgtcggtgatgaccgacgccttcagatgcaccaagatggggaagggcaagacgatcgtgctggggctggggagggacagcgacgaggtgtgcctgccgtcgctggagctgctgttcgggaggtgcgtcatggggtcgctcttcggcgggctgaagcccaagacccacatccccgtcctcgccaagaaatgcatggacaaggagctgcagctggacgcgctggtcacgcatgagcttggact

SEQ ID NO: 101389 - DNA, 433 bp, Zea mays
  unsure (1)..(433): unsure at all n locations
cccggctggacccacgcgtccgaaggacaccaccgccatggcagccaagatgcttgcattgttcgctctcctagctctgggtgcaagcgccactagtgcgacgcatattccagggcacttgccaccagtcatgccattgggtaccatgaacccatgcatgcagtactgcatgatgcaacaggggcttgccagcttgatggcgtgtccgtccctgatgctgcagcaactgttggccttaccgcttcagacgatgccagtgatgatgccacagatgatgacgcctaacatgatgtcaccattgatgatgccgagcatgatgtcaccaatggtcttgccgagcatgatgtcgcanatgatgatgccacaatgtcactgcgacgccgtctcgcagattatgctgcaacagcagttaccattcatgttcaacccaatg

SEQ ID NO: 101390 - DNA, 463 bp, Zea mays
attcccggctcgagccacgcgtccgctgaaaggttttatctgtaactttggatgattggtctgatagtgatatcgactccatcgttgatgttggtggaaactcatatgcaaattcaatttatgaggcttttcttccaaaagatcacccaaaacccaaaccagattcaacgatggaatataggacaaaatttataagagctaagtatgagacacaagattttttgaagccaagtttgcgcatttcatcaagatcatcttttaaatctaccacttctgtgaagagtgtagatagcaatttctctagcacttcaaggaaggatgtctttgaagatacaagagaatttgttggagagttgaatatcacactggtcaaaggcaccaacttggccgttagagacatgctaacaagtgatccatatgttgttttaacgctcggagggcagaaagttcaatcaacggttaa

SEQ ID NO: 101391 - DNA, 379 bp, Zea mays
ccggctcgagccacgcgtccgccgacgcgtccgcctagctccagccaccatgaagggcaaggctgacacctccaagaagggcgagggcaggctccgggcgggcggcgccgccggaaagcgcaagaaggccgccgcgagcggcaagcccaagcgcccgccctccgccttcttcgtcttcatgtctgaattcaggcaggagtatcaggcgctgcaccctggcaacaagagcgttgcgaccgtgagcaaggcagcaggggaaaagtggcgtgctatgtcagatcaagagaagcaaccatatgtggaccaagctggacagaagaagcaggactatgagaagactaaggcaaactttgataagaaagagagcacaagctcaaag

SEQ ID NO: 101392 - DNA, 431 bp, Zea mays
tgatctgatattaacgggacaccaggaaaatgcagaatttgcgcttgccatgtgtccgtcagaaccatatgtcctgtcaggaggaaaggacaaatttgttgtcttgtggagcatccaagaccacatatctgcccttggggattcctcgtcttctcccggagcatctggcagcaagcagtctggcaaaattgcaaatgaaaaggagagtcctaaagttgatcctagaggtatattccatggccatgacagtactgttgaagatgttcagttctgcccttccagtgcgcaggagttttgtagtgtgggtgatgatgcttgtcttattctgtgggatgctcgaactggcactgacccagctgttaaggttgagaaagctcacagtggagatgttcattgtgttgattggaatccccttgatgttaactatatct

SEQ ID NO: 101393 - DNA, 435 bp, Zea mays
  unsure (1)..(435): unsure at all n locations
ccgacgcgtccgcgaaggggcatggctctggtcagattggcgtttcccgtgttcgtgttcctcgcagcggcggagttcgcggcggggacgcggtcgccgtcggctttcgtacaaaacgccatctactccaaccgcatcaccatcttctccaagacttactgcccctactccatgcgtgctaagcacatatttcgagaccttaaggaagatccatatgttgttgaactagatacccgagtggatgggcgtgacattcaaagtgttctcctggacctagttgggcgtcgtactgtgccacaggtgtttgtcaatggacagcatattggtggctcagacgatacagtaaatgcgctttcaaatggacagctccagaaacttctcgggaagagtcagtcacaatgatgggtcgctggacaagctngcactgtcaagaac

SEQ ID NO: 101394 - DNA, 262 bp, Zea mays
gtactcggtccggattcccgctcgagcctgcagaaaggtggttgttattgtgggtgatgatcctgatggtctacttattgatgcaaagtctggaaagacagttcattccataaaaggacatcgggactactcatttgcatcggcttgaacccctgatgggcaaacatttgctaccggcaaccaagacaggacatgccgaatctgggacgtaaggaacctttcaaaatccgtccatgtgttaaggggtaaccttggagccatc

SEQ ID NO: 101395 - DNA, 233 bp, Zea mays
gtaagccatggttcatttaagctgctgctgtccctgggtttctgcgtcgtctggtgcgctctggtgtccctctttatggatgtcgtcgtctattaaccatctgtggtttgtgtgtcatgaatcgtggttgtggcttcgttggtttaatggacctgttgtgtcctctgtgttgtacccaaaactcttctgcagcagtatggcttgaatccttatgaagtttgatatttgaactt

SEQ ID NO: 101396 - DNA, 433 bp, Zea mays
ggtttcgtaattcccgggtcgagccacgcgtccccagggggtctgccaaatttttaaatccaatggttccgtatacatccaaaaagaaagcaagggggagattatttcaggtgccacaagaccagtatatgctctagagccacatgacgtaggacgctatttgcaagctgaaatcgacgtaggcggcgaaatcgcagtagcaaagactgctgggccagtagaccctgatgctgggttggttgattatgtggagacgctcgtaaggaaacctgaaactgaattcaatgttgttgtgcttcaatccaatggcgtcgatcagccaaaagagtcggttcatgtactaaatgtcgggaggctgcggatgaggcttactaaagggaagtcggtagtcgccaaggaattctattcctcatcgatgcagttatgtggtgtg

SEQ ID NO: 101397 - DNA, 430 bp, Zea mays
gtgggaagcaggttgaaataaagaaggctgaaccaaagaaacatggatctgataacatgggtaatgggagatcaagccaagggggtggaggttaccgcagtacttaccgtggtggtggtggagctggtagtggcagcagcggcagcggtgggggtggttatgggtttggtgatgcttatcgatctgctgcagcgagttatggatatgatggtggcgcacgagcaggatatggctatggtagagggtatggctatggaggcaatgctggctttgcgtctggttttggtggtgggtatggtggatccatgtatggaggcgcatatggtgcatatggggcatacggtggtggtgcttatggaggtggtgcctatggaggtggtgcatatggaagcagcgcctatggtggcgccccaggtggtggttatggcac

SEQ ID NO: 101398 - DNA, 420 bp, Zea mays
  unsure (1)..(420): unsure at all n locations
agggagagcaagcaagagaggacgacatggcggcgccacggagcctggcggacctcgctctgctcggcgtggcggacctgataaagctgctcccgagcggcacggtgttcctgttccagttcctgagcccgctggcgagcaacaacgggcactgcgccacgctgaacaaggcgctgagcggggcgctggtggcgctgtgcggcgcctcctgcgccttctcctgcttcaccgacagctacgtgggcgcggacgggcgcgtgtactacggcgtggtgacgcggcggggcctgcgcaccttcacgcccgacccggacgccgncgtccgggacctgtcggcgtaccgtctccgcgccggcgacttcgcgcacgccgcgctctcgctgctcgtcttcgccaccctcgcgctcctcgacgccgaca

SEQ ID NO: 101399 - DNA, 389 bp, Zea mays
ggcgccgacaacagcgtagtgtagtgttgttccggagagggttggggagagtagtagggatccgcaatgtcgacggaggaggctgttgtggctgaagtcccggtgaccgaggtgccagcggaggtcccggcggcccaggtggccgaggcgcccaaggcgaagaaggcgcccaaggagaagaaggcgcctaaggagaagaagctttccgcggcgaagaagccggcggcgcaccctccctacgctgagatgattgtagaggcgatcgctgccctcaaggagaggaaggggtcgagctcggtggccatcagcaagtacgtcgaggggaagcatggcggcaagctccccaccaacttccgcaagcagctcactgtgcagctgaagaagctcgc

SEQ ID NO: 101400 - DNA, 415 bp, Zea mays
  unsure (1)..(415): unsure at all n locations
ccgacgcgtccgcagacaaatgcacactatcttattaggtatctagctactgcagttggtgtcaacaaaaggagaaggaatatgcttaaagagttgattaaggtcattcaacaggagcaccatagctacaaggatcccgtaactgaatttctggaatgcttatatgttaactatgattntgatggtgctcaacaganactcatagagtgtgagcaggttatactgaatgatccattcctgggaaagcgcattgaagagggaaattttgtcagtgttcctttgagagatgagttccttgaaaatgctaggctttntattttcgagacatactgccgtatccatcggtgcatcgatatcagcatgcttgctcagaagttgaacatgagctacgatgaggccgagttgtggatcatga

SEQ ID NO: 101401 - DNA, 381 bp, Zea mays
  unsure (1)..(381): unsure at all n locations
caggtctgaagtattatgacacataccttcctttccttttggaggcatcaaacgatnagagttcatatgttcggcaggctgctgtctatggtgtgggtgtatgtgccgagtttggtggtcatgtttttcgccctctagtaggagaggccttatcaaaattaaacaatgttataaggcatcctgatgcacgacttcctgataatatcatggcatatgacaatgctgtttcggcgcttggaaaaatatgccaatttcatcgggatggtattgatgcagctcaggttgttccagcctggcttagctgcttgcctataaaagacgacaaggttgaagctaaagttgtacatggacagctttgctccatggtggaaaggtcggatg

SEQ ID NO: 101402 - DNA, 430 bp, Zea mays
cccacgcgtccgcccacgcgtccgctttggcgcccgttcaggatccacatcttccctgtcgagttcttggttgacctggtcctcttcggaccacctccaaggctcttggtgtagcttgccactctcaccaatcaagttttcatgtctgatctcgacattcagatcccaactgccttcgatcccttcgctgaggccaatgctggggactctggtgcggcagcagggtcaaaggactacgtacacgtgcgcatccagcagcgtaatggtcgcaagagcctgaccaccgtccagggattgaagaaggagttcagctacagcaagatcctcaaagatctcaagaaagagttctgctgcaatggtacagtggtccaggacccagaacttggacaggtcattcaactccagggtgatcagaggaagaacgtctcga

SEQ ID NO: 101403 - DNA, 435 bp, Zea mays
ccgacgcgtccgagcgcctgtctgttgtctatggcaagaagtccaagctcggtttcggcgtgttcccatccccccaggggtccacatccgtggttgagccatacaacagtgtcctgtccacccactctctcctcgagcacactgatgttgctgtcctgctcgacaatgaggccatctatgacatctgccgccgctcccttgacattgagcgcccaacctacaccaacctcaacaggcttgtctcccaggtcatctcatccctgacggcttccctgaggttcgatggtgctctgaacgttgatgtgaacgagttccagaccaacctggtgccctacccgaggatccacttcatgctttcgtcctacgctccagtcatttctgctgagaaggcctaccacgagcagctgtccgtggctgaaatcaccaacagcgcct

SEQ ID NO: 101404 - DNA, 422 bp, Zea mays
ctgcatcagggataaaggattcaattccagcctggatcaagtactcagtgcaggcccgaggagaaataccatatgatgggatttattatgatcctcctgaagaggtaaagtatgtgttcaggcatgcgcaacctaaacgaccaaaatcattgcggatatatgaaacacatgtcggaatgagtagcccggaaccgaagataaacacatatgtaaactttagggatgaagtcctcccaagaataaaaaaacttggatacaatgcagtgcaaataatggcaatccaagagcactcatattatggaagctttggataccatgtaactaatttttttgcgccaagtagtcgttttggtaccccagaagaattgaagtctttgattgatagagcacatgagcttggtttgctagttctcatggatgtg

SEQ ID NO: 101405 - DNA, 398 bp, Zea mays
ttccggctcgagccacgcgtccggagccgatgaacatgggagcatacagctacatcaacccgcggttgctgacggcgattagggttctgggccggggtggcatcgaggacatcaagtacgtcggcagggccccgtcggctgctaccgcgacgggcttctactcggtgcacgtgcaggagcagacggagctggtgcagaaggcgctgcagcgcgaccccctcaactaccctttctgaaagaaacgaggcccctgtagattcttggaattggggaccttttgaatttgatataataccaatatagagagaacatgccttaaattttatctgtgcagccatttggtgaaataattgtttcgactctgcagtaccgcatgaaacaaaccgttgtaagtttgg

SEQ ID NO: 101406 - DNA, 313 bp, Zea mays
  unsure (1)..(313): unsure at all n locations
ccgacgcgtccgcccacgcgtccgctccttcagacctcgcgctccgccgagaagatgtggaagatcgactcccacctggcgtgcgccgtggccgggatcatgtccgacgccaacatcctcatcaacaccgcccgcctccacgcccaacgctacgcgctctcctaccaggaacccatccccgtcgagcagctcgtccagtccctctgcgacaccaagcagggatacacccagttcggaggcctncgccccttcggggtctccttcctattcgccgggtgggacaagcaccacggcttccagctctacatgagcg

SEQ ID NO: 101407 - DNA, 433 bp, Zea mays
ccgacgcgtccgcccacgcgtccgagaaaatctagatttgcaccttactccatacgcgggttcttgcaactggacaagatgaagggatgcttgaatttattagttccagttctcttgcacagattctatcagaacatcgcagtattacaagttacctacagaagttccatcctgatgaggatggtccttttggtataacggctcaatgtttggagacattcataaaaagctgcgccggttactctgtcattacatacatattgggggttggagacaggcatctggataatcttcttctaactgatgatggacgcctttttcatgttgactttgcttttatccttgggcgagacccaaagccatttccgccaccgatgaagttgtgtaaggaaatggttgaggccatgggtggtgcagaaagccaatattacac

SEQ ID NO: 101408 - DNA, 419 bp, Zea mays
ccgacgcgtccgaacgacttcaagcattcaggggagaggtaccgctcctgggacgccggccgacaggaccgattcgtgaggcgattcgccgactcgctcggacacccaaaggtcagccaggagctcaggtccatctggatagacctcctcgccaagtgcgacgcgtcgctggggatgaagattgccacccggctcaacatgaaggcaaacatgtgatgcttctgctgaatagaataataatgaagacgcatgcatgtcgtcgccaggaacaagagaaataatacaagaccaccacgcatgggcatactccatatatatatgtatagcccgtgcccgtgtccgcctttgtaccaatacaagccaagactagtggatgtattattattattattattgcgctatcacatacatgtacccct

SEQ ID NO: 101409 - DNA, 427 bp, Zea mays
tgacctgagcgaccgctaccacacccactgtgacccaaggctgaacgcctcccagtcgctggagctcgccttcatcattgcagagaggctcaggaagaggacgatgccgtcggggctcaacaacagcctgcctctgccaccactggctttctaagtagccgaagctgaacagagaaggtagagggatagttgcggcgactcgaaagattacgcctgtttatttgctgatgcttggtgtggaggcctggcgggcgctcttggcacaagttacatgctggggagctataggagggtacctgttgcgttgtggaagacagtagctagtattatgtgttgtaattgtatgccttcgattcatgttctgagtgcgtgacttgtcgactttgctgcttctggggttctgaccttggtaaggagagaatataga

SEQ ID NO: 101410 - DNA, 420 bp, Zea mays
  unsure (1)..(420): unsure at all n locations
ccgacgcgtccgcggacgcgtgggccgtcgctaagaagcccaaggccgctgccaagagcaaagctaagacccccgccaaggcgaagcccgccacaaagcccaagcccgccgcgaagccgaaagccgtagtgaagccgaagacacccgccaagcccaaggccaagccagctgccaaggcgaagcccaagaccgtcggcgctaagccgaagccacttgctaagaaagccggccgccccgccaaggcggcgaagacgtcggccaaggacacgccagggaagaaggcgccggtggccaagaagtccgctgctgccgcgaagaaggcccctgccaagaaggccgctccctcgaagaaggcggcgacccccgtgcggaaagcgccgtnccgtaaggccaagaagtaaagcggccaagaaggggggc

SEQ ID NO: 101411 - DNA, 352 bp, Zea mays
  unsure (1)..(352): unsure at all n locations
gggagatcgcgcaggacttcaagaccgacctacgcttccagagctctgctgtctccncgctgcatgaggcggctgaggcctaccttgtcgggctcttcgaggacaccaacctctgcgccatccacgccaagcgcgtcaccatcatgcccaaggacatccagcttgcccgccgcatccgcggggagagggcctaagcgtcatattttctgtcatcagtgcccgatcagaagatgtagagatatgctgggttctgtagtttgggttactgtcgaatcatcgagtgttggctgttcactgctgtaacttaattatcatgatgcatatgaaatggcaatgaactctgttatcagtt

SEQ ID NO: 101412 - DNA, 452 bp, Zea mays
ccggttcggaattcccggctcgagccacgcgtccgctgaattctgatatcaaagaagataaatttcatctggaaggcaaacgcgtattggaggttggatgtggacatggcctggctggcatttttgcgggtctcaagggtgctgacctgattcatttccaagatttcaatgccgaggtgcttaggtgcttgactataccaaatgtaaaagtcaatcttttcaaggattcaccagaaggaacatgtacatgtccgattgttggtttctttgctggtgattggagtgaaatggataagctactactttgcggggatgctgagcaagacaaaacagccagtggtgatacagaaggtaaaatgtgtaatggttatgatatcatcctgatggctgagactgtttacgcggtatcttgtcttccaaatctctacaggctcatcaagaagtgcttgcgc

SEQ ID NO: 101413 - DNA, 459 bp, Zea mays
  unsure (1)..(459): unsure at all n locations
ggaattcccgggtcgagccacgcgtccggagtaacgaacgaactcttgctccgatcacgagctagctgaggtcgacgatggctggtntgctgaacagcaggaagacgccgcaggcggtggtggccgtgctggtggcggcggcgctgctggcttcgtccgcttcggcggcgatcacctgcgggcaggtggggtcgtcgctggcgccgtgcatcccgtacgcgacggggagggccagcgcgctccccgcgtcgtgctgcagcggcgtcaagagcctcaacagcgcggcgcggaccagcgcggaccgccaggcggcgtgccgctgcctcaagagcctcgccaacagcgtcaagagcgtcaacatgggcaccgtcgccaccatccccggcaagtgcggcgtctccgtcggattccccatcagcatgtccaccgactgcaacangatcagctaagttacgacga

SEQ ID NO: 101414 - DNA, 425 bp, Zea mays
ggaaggcgtttaatgtggcagaattctttgggacactgtgtcttgaaagcagactgtgccaaatgcaaaaaggaacttgcagtatcattgttccagagcgtggttttgatgttgttcaatgacgcacaaaagttaagcttcattgacatcaaagattccactggtatcgaggataaagaattgagacgaacattgcaatctcttgcatgtggtaaagttcgggttctccaaaagataccaaaagggagagatgtagaagataaggatgaatttgtattcaatgaagattttagtgctcctctctaccgcataaaggtaaatgcaattcaaatgaaagagacggtagaagaaaacacgagcaccactgagagagtgttccaggatcggcagtatcaggttgacgcggccatagttcgaataatgaa

SEQ ID NO: 101415 - DNA, 456 bp, Zea mays
  unsure (1)..(456): unsure at all n locations
cggttcggaattcccgggtggacccacgcgtccggggggactactacagataccttgctgatttcaagactggagctgagagaaaggactgtnctgataacaccatggtggcgtacaaggctgcccaggacattgctttggctgagcttgctccaactcaccctattaggcttggactggcactcaacttctcagtgttctactatgagattctcaactcacccgatcgcgcctgcagtcttgcaaagcaggcttttgacgaggccatctcggaactggacaccctgagcgaggagtcctacaaggacagcactttgatcatgcagctccttcgtgataacttgaccctatggacttctgacatctcggaggaccctgcggaagagatcagggaggcgcccaagcacgactcgagcgaggggcagtaaagccggctttacgtgcctagaagctagt

SEQ ID NO: 101416 - DNA, 397 bp, Zea mays
atgatttggggatactgcaccgtgaatcaactgatgacaaggtcacagtggaggctggggaggctactctcaagtacaacgtggctattaagtgtgcgaccattactccagatgaaactcgggttaaggagttcaatctgaaacacatgtggaagagcccaaatggcacaattaggaacattataaatggcactgtgttcagagagcctattatatgcaaaaacgttccaagacttgttccaggatggactaagcccatctgcattggaaggcatgccttcggtgatcaataccgagctaccgatgcagttctgaaggggcctgggaagctgaaactagtttttgagggaaaagaagaacagattgatctggaggtattcaacttcactgggtgctg

SEQ ID NO: 101417 - DNA, 433 bp, Zea mays
  unsure (1)..(433): unsure at all n locations
cggacgcgtgggcgcgtccgcgtgctctctgccccctgcccccctcccatctgcgccgccctcctcatccaccgcccgggccgccgccgccagcccaaggccaggcatccgccagcctctcgcaccacgcgtatcgcgtgcccgcccgaccggctcgtggcgatggcgtaccgggcggacgacgactacgactacctattcaaggtggtgctcatcggggactccggcgtcggcaagtccaacctgctctcgcgcttcacgcgcaacgagttcagcctcgagtccaagtccaccatcggcgtcgagttcgccacccgcagcatccacgtcgacgacaaggtcgtcaaggcccagatctgggacaccgccggtcaggaaaggtaccgtgctatcacgagcgcgtactaccgcggagcagtangggcgctcgtcg

SEQ ID NO: 101418 - DNA, 428 bp, Zea mays
  unsure (1)..(428): unsure at all n locations
ccggttcggaattcccgggtggacccacgcgtccggtgaagttggaaaaggaagctgaaattttggctgcacaggatgatggtggtggtgagtcattggagcgtgtttatgagacgtctagatgcaatggatgctggaactgcagaaaagcgagctgctgaaattttatttggtctgggttttgacaaacaaatgcaagcaaagaaaactaaagatttctctggaggttggcgtatgaggattgctttagcaagagcactgtttatgaatccaacaatccttttgcttgatgagcccacaaaccatctagatcttgaggcttgtgtctggttggaagagacactgaagaaatttgaccgcatacttgttgtcatatcacactcccaagattntctaaatggagtgtgtactaacattatccatatgca

SEQ ID NO: 101419 - DNA, 406 bp, Zea mays
  unsure (1)..(406): unsure at all n locations
ccgacgcgtccgcccacgcgtccgcgctcgagggttcggtttcgtggtcttcgctgaggccactgtcgccgagcgcgtgaccatcgaaaaacacatgatcgacggccgaatggtggaggccaagaaggctgttcccagggatgaccacagtattgtgagcaagagcaacacaagcagcatagggtcacctgggccgggccgtaccagaaagatctttgttggaggtctgccctcaaatgttacagaggctgacttcagggggtattttgagcagttcggtgtcataactgatgtggttgtgatgtatgatcacaacacacagagaccgangggctttggattcatcacctatgattcagaagatgctgtggacaaagccctgcacaagagctntcatgagctaaat

SEQ ID NO: 101420 - DNA, 410 bp, Zea mays
ctgttgttcaggagaaagtaccaagtgctcatggagttcagtctgacaatgatcctagcaatgcatccatttttgttggtggtcttgaccccaatgtcactgaagatatgttgaaacaagttttcaccccttatggggacgtagtccatgttaagattcctgttggcaaaagatgtggttttgttcaatatgctaacagatcttcggcagaggaggcattggtaattctgcaaggcaccttggttggaaggcagaatgtgaggctttcatggggtcgcagcccttcaaacaaacaagttcagcctcaacaggactccaaccagtgggccggggctaatgctggatattatggctacggtcaaggctatgaggcctatgggtacccccagtctcaggacccttatatgtat

SEQ ID NO: 101421 - DNA, 440 bp, Zea mays
gcgattggtgcctacatttccttgctttgcaaaaatccttgtctcactcatggagaaggcacatgttgactttgggctaaaacttcttggagcagatgtaatggctattcctggtctttacagatttgttcaggagaccatcaagaaacaagtagcaagcatgtatttgtggccgaagacactagaagtacctataatggatccctcaaaagcatcaaaaaggcctgttggaattctacttgtgaaggttgtgagagcccaaaatctgcggaagaaggatctgctgggtaaatctgacccatacgtgaaacttaagatgtcagatgataaacttccatccaagaagacaactgtaaagcgcagcaatctcaatccagagtggggtgaagacttcaagtttgttgtgacagatccagaaaaccaggctcttgaagttaatg

SEQ ID NO: 101422 - DNA, 439 bp, Zea mays
cacagttcctccgaccagttacttcaatgggcttcgaacacctagctgtgcaagcctgcaagctacaacaagcgcttgcggcgagcgtcttacaacaaccaattaaccaattgcaacaacaatccttggcacatctaaccatacaaaccatcgcaacacaacagcaacaacagttcctaccagcactgagccaactagatgtggtgaaccctgtcgcctacttgcaacagcaggtgcttgcatccaacccacttgctctggcaaacgtagctgcataccaacaacaacaacaattgcaacagtttctgccagcgctcagtcaactagccatggtgaaccctgccgcctacctacaacagcaacaactgctttcatctagccctctcgttgtgggtaatgcacctacatacctgcaacaacaattgctgcaacagattgt

SEQ ID NO: 101423 - DNA, 434 bp, Zea mays
aataaccggctggacccacgcgtccgggcacttgatcagtcaaatgcaacatgtggcaagaggttatcatctattggcttgcggaacacataattgaaccgtcaggcttacaggcagctattgctgacaactgctgttcttggtgaatatatcactggcgctattcttttcgaacgagaccctttatcaatcaactacagacggcaagaagcttgttgactgcttgaaagatcagaatatcatgcctggcatcaatgttgacaagggtttgattccattgcctggatccaacaatgaatcatggtaccaaagtcttgatggcttggcttcaaggcgtgctgactactataagcaggtggcgcgcttcgcatagcgcatgactgttgctagcatccatcgtggtgcatctgcattatcagtcaatgaatcatcat

SEQ ID NO: 101424 - DNA, 423 bp, Zea mays
  unsure (1)..(423): unsure at all n locations
cccacgcgtccgatttgcgccgccgcagcccgcagtcgcttgcgcgcagcagcacttggcaccgccgccccatcccattgccgccagtgtctgctcgatccgatggctcccacgaagaagtcgaagaagagcacagagagcatcaacaacaagctgcagctggtgatgaagagcggcaagtacaccctgngctacaagaccgtcctcaagacgctgcgcaactccaagggaaagctgatcatcatcgcaaacaactgccctccacttaggaagtctgagattgagtactacgccatgctggccaaagttagtgtgcaccatttccacggaaacaatgttgatcttggcactgcctgcggcaagtactacagggtgtgctgcctcagtatcatcgacccangtgactcggacatcatcagtacc

SEQ ID NO: 101425 - DNA, 360 bp, Zea mays
  unsure (1)..(360): unsure at all n locations
agaccattagctttatctactccagatcgcataagaacccgatcgacaccatgagggggttgctcgttgccctcgctctcctggctctcgctgcgagcgccacttcacgcatacaagccgcggctgcggctgccagccaccgncgccggttcatctaccgncgccggtgcatctgccacctccggttcacctgccacctncggtgcatctnccaccgccggtccacctgccgncgccggtccacctgccaccgncggtccatgtgccgncgncggttcatctgccgncgncaccatgccactaccctacttcaaccgcccggcctcagcctcatccccagccacacccatgcccgtgcca

SEQ ID NO: 101426 - DNA, 421 bp, Zea mays
ggcgaagtgcagcgcagtgtgccccgtctcggaacagcgcggaccaccagagcgtgcgcgtccgtgccccacccctccctctctatccatggcggtcccccgcgggtgcctcgggctccccctggtcgccgtgctcctcgcgtccctctgccgcggccaggcggcggtgagggagctcaaggtcgggtactacgccgagacgtgcccggaggccgaggacatcgtccgtgagaccatggcgcgcgcgcgcgcacgcgaggcccgcagcgtcgcctccgtcatgcgcctccagttccacgactgcttcgtcaacgggtgcgacggctcggtgctgatggacgccacgccgacgatgcccggcgagaaggatgcgctctccaacatcaactccctgcgctcgttcgaggtcgtcgacgagatc

SEQ ID NO: 101427 - DNA, 420 bp, Zea mays
  unsure (1)..(420): unsure at all n locations
ttcacgtactccggccatccggttgcctgtgctgtggccattgaagctctgaaacttgatcgcgaaagggacattcccggccatgtcaagcaaatcgccccaaagttccaggacgggattagggcgctggcagacagtccgattatcggggagatacgtggcttggggatgattatggggaccgaattcacaaacaacaagtcaccgactgatctgttccctgccgaatggggggtcggtgccatcttcggcgaagagtgccagaagcgcggcatgctggtgagggtcgctggcgacgccatcatgatgtcgccgacgctgatcatgacgcccggcgaagtcgacgagttggtgcgcatctacggngaagccctcaaggccacggangagagggtggcagccctgcagtccaagaagaac

SEQ ID NO: 101428 - DNA, 401 bp, Zea mays
  unsure (1)..(401): unsure at all n locations
ccgcgctcgcctacatggaggacgagggccagtgggtcctggccttctggatcgccagcggcgcggcgctgctcggcttcctcctcttcgccgtcgggaccatcaggtacaggcacttccttcccagcggcaacgctgttgtcagcgtctgccaggtggtcgtcgctgccgtcaggaaccggcgcgtcagagctacggttcgagcgcaggatatgtacgaccccgataccgatggagatcgcggcaagaagggggtcaggaagatggtgcacacaccagagtacaggtgtctggacaaggcagcggtgatcaaagatccagcgtctgcgttccgagcaccggcaggtcaaccacagggccattcctnctncaagcccaacccatggaggctctgcacactg

SEQ ID NO: 101429 - DNA, 313 bp, Zea mays
gactggcaagactatcacccttgaggtcgagtcttctgataccattgacaatgtcagggccaagatccagaacagggagggcatccctccggaccagcaccggctcattttggccggcaagcagctcgaggactggcgcacgcttgccgactacaacattcacaaagagagcaccctgcacttggtgctgcgtctcaggggtggcatgcagatcttcgtgaagacacttactggcaagacgatcacccttgacgtcgagtcctacgacaccatcgacaatgtcaaggccaagatccaagacaaggagggcatt

SEQ ID NO: 101430 - DNA, 429 bp, Zea mays
gctttcatcaactccggcgacttggagaagacgaagttccagaatccgatcgggggggtggtgctcgcgccttgacggattgatttcggtgcgccgatggggcaggcgttccgcaagctgttcgattccttcttcggcaccagcgagatgagggttgtgatgcttggtctggatgctgccggtaaaaccaccatattgtacaagctgcatatcggggaggttttgtcgactgttcccacgattggtttcaacgtcgagaaagttcaatacaagaatgtgatgtttactgtgtgggatgttggtggccaagaaaagttgaagcccttgtggaagcactacttcaacaatactgatggcttgatctacgtagttgattcgttggatcgggagagaattggaaagccaaagcttgattcaggcaataatcaa

SEQ ID NO: 101431 - DNA, 433 bp, Zea mays
caaaagcccacagcttcttctccctactcctccagtcctccgtcatccgtttcggtcgctgccgccgccaccgcacaagaagctagctcctgcctgtaccgccccgtcatggcgatgctatcccgcgcagcctcctccgcggcccggcgcccgctgctgccgccgcctaggcttctggcggtgagggcgatggcgtcgtcgctcttcggccacgtcgagccggcgcccaaggaccccatcctcggcgtcaccgaggctttcctcgccgacccctcgtccgacaaagtgaacgtcggcgtcggcgcctaccgggacgacaacggccagcccgtcgtgctcagctgcgtgcgcgaggccgagcgccggatcgcgggcaacctcaacatggagtaccttccgatgggaggcagcgtcaagatgattgaagagtcac

SEQ ID NO: 101432 - DNA, 432 bp, Zea mays
gcttctcttcccacctcaagatcgggatcgttgggttgccaaatgttggcaaatcaaggttgttcaacatagtaacgaagttggctatcccagctgagaattttcctttctgtaccatcgaaccaaatgaagcacgggtgaatgttccagatgaacggtttgattggctttgcaaactttacaagccaaagagtgaggtgcctgcatatcttgaagtaactgacatagctgggcttattagaggtgctcatgctggggatggtctgggcaatgcattcctctcacatatacgtgctgttgatggaatcttccatgtcctaagagcatttgaagacgcagaaattactcatgttgacgatacagtagatcctgttagagacatggaaactattagtgaagagctcagactaaaagatatagagttcatgaaaa

SEQ ID NO: 101433 - DNA, 435 bp, Zea mays
cggacgcgtgggcgaccgccaccaagatgaacaaggagaggctcatgaagatggccggggccgtccgcaccggcggcaagggcaccatgcgcaggaagaagaaggctgtacacaagacggtcaccacggacgacaagaggctgcagggcactctcaagagagtaggggtcaacaccatccctgcaatcgaggaggtgaacatattcaaggacgatctcgtcatccagttcttgaaccccaaagtgcaagcttccatcgcagcaaacacatgggtggtcagtggatctccacagacgaaaaagctacaggatgttctccctgggatcattaaccagcttggccctgacaacatggagcacctgaagaggattgccgaggagatgcagaagcaggtggctgctgccggtgcggcagcacaggtcaaggaagacaacg

SEQ ID NO: 101434 - DNA, 383 bp, Zea mays
gtcggcgcctacggtctcgccggctccagggccagggcgtgcggctgagaaggcagggctcgccggcttcggacgacgtgtgtgtgcggcagcaggccggccggcagagctcggattcccggccggtgctgcagcagtgcatgtgcctcctgatccaccgcgcctaacgccgagcaagatgagatcagttcttttcttcgtgtgcatttgcttcctgttcgtgtcgacggcgagggcggaaggcccctaccagttcttcgattgggagatcacgtacggcagtatcagccctattggatctctacaacagggaatcctcatcaacgggcagttccccgggccgaagatcgagtgccaaacaaacgagaacctgatcattaacg

SEQ ID NO: 101435 - DNA, 427 bp, Zea mays
gccatgggtccatggcccagcaatttattttctgaatttaccttcaccttgtgcttgtggcctttttgcaggtatgttgcaccggagtacgccatgacaggacacttgcttgtaaaaagtgatgtatatagctatggagttgttctacttgaactactaactgggaggaggcccgttgatatgtcacagccctctgggcaggaaaacctagtgacttgggtaacacttctttcttttaggagtatactatcttcagttcctgtgtgattttacagctaaattggaatattttaacgtgatgactctcagacactctggattgtgtgtgcatacgttgtttttatgtatgtgtgggcagctgacaactggaatttaaatctgaaattgctcgtatatatatatatatatatatatatatatatatata

SEQ ID NO: 101436 - DNA, 429 bp, Zea mays
gatcaggtcatcgggaaggccgccatggacgacgaggagcacgaggtttacggccaggagatccctgaggacggcgatatggacggcgctgacgttgatatggccgccgccggggacgacgcggcgaagcttcaggagcttgacgagatgaagcgcaagctgaaggagatggaggaggaggccgccgccctccgcgatatgcaggccaaggtcgccaaggagatgcaaggaggtgaccctagtatatctacagctgaggcgaaggagcaggtggatgcccggtctgtgtatgttggaaatgttgattatgcttgcaccccagaagaagtgcagcagcatttccaagcttgtggaactgtcaacagggtgacaatcttgactgacaagtttgggcagccaaaaggttttgcttatgttgaatttctggaa

SEQ ID NO: 101437 - DNA, 466 bp, Zea mays
ccggtccggaattccgggtcgacgcacgcgtccgagagatttcagtggcagagttggatcgccacatgtatagtgccggatgcccagatcgggagatcgtcatccggacttcgggcgagactcgattgagcaatttcctcctttggcagacaacgtttagtcacttgcagaatccagatcctttgtggcccgagttctcctttaggcaccttgtttgggctatcttgcagtatcagagagtttaccctgctctggagcataacagaaagttggctaagaagcagttgtgattccatgttatttgcaaagaggtatcatgaagggctattaacatcaaacttttccttctcaatttcccggtaatgggaaatgcaaagaagaacatactagcatataacattatgaatagatcaccatgtaacttaagtgtgattgctaccgtaaccatgtaacttaaccatgtaac

SEQ ID NO: 101438 - DNA, 431 bp, Zea mays
gtggttcccaaggacgtgaacgctgctgtggccacaatcaagaccaagcgcacgatggagttcgtggactggtgcccgactggcttcaagtgcggaatcaactaccagcctcccagcgtcgtcccaggcggtgatctggccaaggtgcagcgtgccgtgtgtatgatctccaactccaccagtgttgtggaggtcttctcccgcattgaccacaagttcgacctcatgtacgccaagcgcgccttcgtgcactggtacgtcggtgagggtatggaggagggcgagttctccgaggctcgtgaggatctggcggcgcttgagaaggactacgaggaggtcggtgctgagtttgacgagggtgaggacggcgacgagggtgacgagtactagacgctctactggcgcggcgtcgtcgggcttgtgtgccactt

SEQ ID NO: 101439 - DNA, 420 bp, Zea mays
ctcttgggaaagaatttgatctggatggcaaccgggtaaatcaagggctatgtgtagatggaaacaaaggaagcactgaccagcacgcttacattcagcagctgagagaaggtgtacacaacttctttgttacttttatcgaggtcttgcgtgacaggcctgctggtcatgattgggagcttgaacctggagtcacatgtggtgactatttgtttgggatgttgcagggaacacgttctgctctttatgcaaatgaccgtgaatctatctctgttactgtgcaagaggtaactcctagagctgttggagcactggttgcactttatgaacgtgctgtggggctttatgcttctttggtaaatatcaatgcctatcatcaacctggtgttgaggctgggaaaaaggcagcaggagaagtgt

SEQ ID NO: 101440 - DNA, 425 bp, Zea mays
ggacattgagaagtggaaattagctagtagcagtcctaagaaaccaattgctttgagggcaattattttgggcttggttatggttggaagagcggcatttgtattccctttgtcgttcttatccaacctaagcaaaaaggaggcccgtccaaagatctccttcaagcaacaagtaatcatatggtgggctggtctcatgagaggagcagtgtcaattgcgcttgcctataacaagtttacagcatctggtcacactgaagtgcgagtcaatgctatcatgatcaccagcacagttattgttgttctattcagcacaatggttttcggcctgctgacgaagccgcttctcagtctcctcatcccaccaaggactggactgaacacgtcgtctctgctctcaagccagtctatgctggacccactcc

SEQ ID NO: 101441 - DNA, 422 bp, Zea mays
gcgagatctgaaggattctgatttctataagcagcaagctaaacttcttttcaagaagttggcaaaagggcatcatgaagcttcacggatgtcaattgagacagggccctactatttccactacattattgagggcagagtatgttatctgactatgtgtgaccgctcttatccgaagaaacttgcattccagtacctagaagatctgaaaaatgaatttgagagggtcaatggcaaccaaattgaaactgctgcaaggccatatgcttttatcaagtttgatacattcatccagaagactaggaaactgtatttggatacaagaactcaaagaaacctcgcaaaactgaatgatgaactctatgaggtgcatcaaattatgactcgcaatgttcaagaagttcttggtgttggtgaaaagc

SEQ ID NO: 101442 - DNA, 397 bp, Zea mays
cccacgcgtccgtgacagcgatgttgccaagaaaatagtcgagatcgagaggatccctgggtttccccaaaaaattatccttgagggtggaagcattcatgtagatggagaaggtacatgcattacaacggaagaatgcttgctgaatcctaataggaaccccaacatgaccaaactagagatagagaatgagctgaaggattttcttggagtctcgaaggtcatctggatacctcgtggactttatggcgacgaggatacaaacggccacgttgacaacatgtgctgcttcatcaaacccggtgtgatcctgctgtcgtggaccgacgacgagaaggattatcagtacgaacggtcggtcgaggcgctgtctgttctctcccagtccgtcgacgcg

SEQ ID NO: 101443 - DNA, 408 bp, Zea mays
gaggatctccaagggaaagaagggtggtaagaaaaagaccgtcgatcccttctctaagaaggactggtatgacatcaaggccccatcggtcttcagtgtgcgcaacattgggaagactctcgtgtccaggacacagggtaccaggattgcctctgatggtctgaagcacagagtctttgaggtttgtctagctgatcttcagggtgacgaggatcaggcttacaggaaaatcaggctccgtgctgaagatgtgcaaggcaggaatgtgctcacaaacttctggggcatgaattttaccaccgataagctcagatctctagtaaagaagtggcagacattgattgaagcccatgttgatgtcaagacaaccgacaactacatgctgcgtttgttctgcattggttttac

SEQ ID NO: 101444 - DNA, 431 bp, Zea mays
  unsure (1)..(431): unsure at all n locations
cccacgcgtccgcaaccagtcctcacataatcatcttcattcactcactctcttggatgactgtactgaagataccatggccaagtcgaccgcgatgtttgtagccgccctggccctggtggtggtgatggcgacgacgagcacaggcggtggcagggcggcagcggcgtgcgatcccaagccgctggtggtgtgcgatccggcgttcatggacggagcgaaacccgcggcagcatgctgctccaccctgcgtgcgcaggaggcatgcttgtgcgtgtacgccaaagaccccaagtttgcaaaatacatcaacaaccccaacaccgtcaaaacctttacctcgtgcggcatagccatccccaaatgctaagcaagcgctctgcgtcgtcgcttcgcttgctcttgctctngtgtgtaacatatccagctta

SEQ ID NO: 101445 - DNA, 418 bp, Zea mays
  unsure (1)..(418): unsure at all n locations
gtctgctgagtcttattcagttccaaagggcctcaagatactcgagaatttggccgatgcatctagtctaatcactgggcttgagcatgaattgccagttccttgggcaaaacttaagcgagttttctggttcgatggctttggtaacgatgagtcagccaccgagcaggctctcttgcagaagttcttcgcgagtattgccatcaagattttgtcggaacagctgtccggcctgcaggtcatcctgatcatgaaaaacacgagatacattcagttgcaggtggaaagattggcgcgggagtgcttctttttcctcagcgaatcgtttctgtctgatgaagcaaatctaggatggttctcagatacctncacgcacacaagaaggatgcaagtggcagcaccggtgacctacgtcttc

SEQ ID NO: 101446 - DNA, 432 bp, Zea mays
atctcgagcattcagaaacacaccaagtgaagcacattagcaacaacctaacaacaatgggtaccaagatattatcccttcttgcgcttcttgcgctttttgcgagcgcaacaaatgcgctcattattccacaatgctcactagctccaagttccattattacacagttcctcccaccagctacttcaatgggcttcgaacacacagctgtgcaagcctataggctacaacaagcaacttcggcgagcgtattacaacaaccaatttcccagtcgcaacaacaatgcttggcacatctaacaatacaaaccatctcatcgcaacagcaacaacaattactaccagcactgagccacctagccatggtgaaccctgccagctacttgcaacagcatgtgcttgcatcaaacccacttgctatggcaaacgtag

SEQ ID NO: 101447 - DNA, 428 bp, Zea mays
cccacgcgtccgcccacgcgtccgttcctctcccgactctctcctcgccggcgaggcggcggagtaggtgcaacagaaactgctcgaggcggaggcggagcctgcggctgcacagacatgggtgatcacgaggcgcgcggtgatgacttcgagaagaaggcggagaagaagctctcgggctggggcctcttcggctccaagtacgaggacgccgccgacctcttcgacaaggctgcgaactccttcaagctcgccaagaactggagcagagctgcatcagtttacatcaagattgctaactgtcatttgaagggagatagcaagcatgaggctgcctcagcgtacgtcgaggcagcaaattgctacaaaaagttttcacctcaggaagctgcgcaagcgctaaaccagtctgttaatcttttcttgga

SEQ ID NO: 101448 - DNA, 429 bp, Zea mays
gggaaaaggcggatcttctctctgattctcaaaggattaaatataccattgagacgtgcaccaagggcatccctgatgcacggacttacttgaatactcttcaacagctcagaataaagagtggtcttatagatcatcttggaattgagcctttgatgatggaagctcttgagaagattgagaaggacattaagaaaccacttttgaggagcgacaagaagaacatggccaccctcttggcagagtttgacaagattaacaaaaagcttggctttcggaaggaggatcttcccaagatcgaggaagagcttgaattggaaattgccaaaagtgagctgactgaacttaagaaggaatgcgttgaagcaatggagactcaactcaagagggaggagtttcaagatgaggagatgcctgatgtcaggaaat

SEQ ID NO: 101449 - DNA, 405 bp, Zea mays
atctgagactaaggttagattatcaattaagggaaccattgttactctttcattgatgactggctctctgtggtatgaatacatatacaagctagacaaagttacatacaacaagtaccatccctacacctcatggatccctataactgtttatatctgcctgcgcaattgctcccagcagttgaggagtgcctctttggtccttttcgcatggcttgacaagattacactagagacttatatctctcagatccatatttggcttaggtctagcatgccaaatggacagccaaaatggcttctttgtttcataccagaatatcctatgcttaacttcatgcttactacggcgatctatcttcttctatcataccgtgtgtttgagatcacgaatgtcttgaagtc

SEQ ID NO: 101450 - DNA, 430 bp, Zea mays
attgcctcaattaccaatgattcccgtgtagaagcagcgcaaatttgttgaaaccattgagctacaaattggactgaagaactatgaccctcaaaaggacaagcgcttcagcggttctgttaagctgcctcacatccctcgccctaagatgaaggtttgcatgcttggtgatgctcagcatgttgaggaggcagagagaataggtatagacaatatggatgtggaagccctcaagaagatgaacaaaaacaagaagctagtgaagaagctggcaaagaagtaccatgctttccttgcatctgaggctatcattaagcaaattcctcgtcttcttggtcctggtcttaacaaggcaggaaaattccctaccttggtgacacaccaggaatcccttgagtccaaggttaatgagacaaaggctacagttaag

SEQ ID NO: 101451 - DNA, 430 bp, Zea mays
gtccaattgagctctccattgtctgctatccgagagcatgtggtacaaactcgaccatgggcaccagtgaatgaattgcaacctgtgcaaattgagtgcttgcctgaggtgtccgtaagcacagctggaactgcagctgagaacattcagcaagtccagcaaagttcgaaagatattcaaagcaagtcccagggcgcttcaacaaggagctgtacaaaggttcataagcaaggagttgcgcttggccggtccgtggacctctctaaattcaccgactacggtgagctcaaagcggaactagacaagatgtttgagttcgagggcgaattggtatctgctaaccggaactggcagatcgtttataccgacaacgaaggtgatatgatgcttgtcggagatgacccgtgggaggagttctgcaacatagtgc

SEQ ID NO: 101452 - DNA, 346 bp, Zea mays
gggctctccggaggctgaggaccgcttgtgagagggcgaagaggactctgtctgccgctgcccagaccacgattgagattgactcgctgtatgagggcatcgacttctactccaccatcacccgtgccaggtttgaggagctcaacatggacctgttcaggaagtgcatggagcctgttgagaagtgcctgagggatgccaagatggacaagagcaccgtccatgacgttgtacttgttggtggctccactaggatccccagggtgcagcaactgctccaggacttcttcaacggcaaggagctgtgcaagaacatcaaccccgatgaggctgtcgcctatggtgc

SEQ ID NO: 101453 - DNA, 429 bp, Zea mays
  unsure (1)..(429): unsure at all n locations
gagagccgaacgtgacctcccagccgccccatgctcaccctccccggtaccctccggcgggcgcgcgctcctcctggcctacctccccgccgacacctctcccgcctcctggaccgttacggcttcgtggccccggactccctcaccccggccccgcgagaacctcacagcgacaccgccgactccgccgccgctgcgaagaagcgccgcgcgaagaagccgccctaccgccctccgtcctcgctggaccgtggcggtcgcccgcccgcgcactccgacctccccttcgacttccgcttcagctacaccgagagcaccccggcctncaagcccatcgggctgcgcgagcccaggtactccccgttcgggcccgggcggctcgaccggccctggacggggctctgcgcgcgcgccgtcgacgctaccctg

SEQ ID NO: 101454 - DNA, 423 bp, Zea mays
  unsure (1)..(423): unsure at all n locations
agagcctccaaaacctcgcaacaaccccgtgacacccacacccatccgccctgcgcctcctcgcgctccccaccaaccccgacgagcggcgatgaccggcacggtgtccaagctggcggcgccccggcctgcggcgccaccgctccggccggcgtccctccgcgccgccgcaatcgccttcgccccctccccgcgccgggtccgcgtctccgtcgccgggcgggccaggatcccctccgtcattgcgatggcttctgccaaggaaggaaatggtgcaccgaccaagaaaacctcgcttcacgatctctacgagctccagggcctctccccgtggtatgacaacctctgccgacctgtcaccgacttgctgccccttatcgccagcggtgttcgtggagtcaccagcaaccctgcaattntcca

SEQ ID NO: 101455 - DNA, 425 bp, Zea mays
gcgaaaacgtcgtggccagccatcccggtgtcgtcccgcgttctacagccaccgctgtggtggccgtcctagactcctagatccgtcagcttaacgagctccattccttcgaggccagccatcccggtgtctcagcagcggcggcggcggcgtcgagctcttgctttctgtgggaggacgcatggcgatgtctgcggggcgtgggctcttggtcctcttcttctctgccgccgtagtggctgagctcgcctctgccgcgaacggtcctttcctgtccgatagcgtcttccagtcgagcgccggatctacagggaggagcttgctgcaggccaagaatagttgccctgtgaactttgagttccaaaactacacaatcatcacaagcaagtgcaaaggaccgaagtttccagccagccaatgctgtg

SEQ ID NO: 101456 - DNA, 427 bp, Zea mays
cccacgcgtccgcccatttccccgagcgcaagagtaccatggcggcggcggcaggttgtggcggcctcaaggggaagcttggcgtcgaggatgcccccgagctgcagctgaatcgcatccgcatcaccctctcatccaagaacgtcaagaacctggagaaagtttgtgcggatttggtaaagggagccaaggataagcatctgagggttaaggggcctgtcaggatccctactaaggttctccacatcaccacccgcaaatccccttgcggtgaaggaacaaacacatgggaccggtttgagttccgcatccataagagggtgatcgacctgatcagctccccagacgtggtgaagcagatcacctctatcaccattgagccgggtgttgaggtcgaggtgaccgttgcagacgtgtaatgacgatc

SEQ ID NO: 101457 - DNA, 370 bp, Zea mays
  unsure (1)..(370): unsure at all n locations
gaagaattctctcacatatgacatggataaacattgcaacacagaaatagctgctaaggtggttcgtgtgtcatctaacccaaatgatggagaacacgagaagtaccgtttggagggtttgatggagagtccagccgtcgatgatgatggggaatgcttctctcctatcttattgaatgcaacttctttgaatgttgaagtttattacaacaaagcagtcaactacacactgatggtcacttttatctctttccttcaagttttgctgctgattagacaaatggagcataacaacacacaatctggagctgctaaggtttctattntaatgattggccaacaagctatcatggatgcatatctctgtcta

SEQ ID NO: 101458 - DNA, 408 bp, Zea mays
caaaactgcactaatgacttgtgctgacatctttaaggcctatggtgacttaatggtgcactcaatcgatccactgctagtacaactgtttctgaaggcttcacaagataagcgttttgtctgtgaagctgcagaggcagctcttatatcgatgacaagttggatctcccctttactactcttgccaagaatgctgccttacctcaagaacaagaatccacggatccgagcaaaagcatcagtgtgtttcagcaagagtgtaccacgccttgatgtggtgggaatcaaagaatatggtatggataagctcatccaaattgcggcaacccaacttagcgaccagcttcctgaatcaagggaggctgctcgcaacctggcactggaactgcaagcattctatgagaagtc

SEQ ID NO: 101459 - DNA, 432 bp, Zea mays
cgggaaagaaatcttcatcaagcaacaggtagcgggagcggacgcgaggtgaaccacgagctggccagtgccggccgaggctagggttccggggatcgcgggcgcgggctcgggctcgactttcgtagcctagccgccgccgccggccgcgcgggggaaccggatgctatgctgctgagctgcgggtcgctctcctcctgggtgcgccgcttcgtcgcctgcgttggaggttgttttggttgtgcccagcctactccaataatagctgttgacaagcctacaaaaggtttaagaattcaaggacgctcagtaaaaaggcgcaacgtatcagacgacttttggagctcgagcccacacgaaatggagaatagtgccttgcaaatcccgcacagtatgtcctcaatcagcacagcagcacagcctaatgatcag

SEQ ID NO: 101460 - DNA, 426 bp, Zea mays
cccacgcgtccggacagcgtccggcgaggaggcggaggcgaagatgaggaagaagctcggcgcccggttccccgcggctcgaatcaaaaagataatgcaagcagatgaggatgttggaaagattgcactagcagttcctgttttagtttcgaggtctcttgaattgtttttacaagatttaattgaccgtacttatgaaattactcttcaaagtggagcaaagacactgaattccttccacctgaagcaatgtgtgaagaggtacagttcttttgatttcctaactgaagttgtcagcaaggtaccagatcttggtggcgctgattcctgtggagatgaaagaggattacctagaagaagaaagtcaaatggcagtgacccagagaatgatgaatcaagatctagtaaaatggccataagaaatgc

SEQ ID NO: 101461 - DNA, 429 bp, Zea mays
ggaaggcatgccggcgttcgcgctcgtcaacaaggccacggggctcgcaatcgagcgctccctcggccagtcccacccggtcaagctcgcgcctttcagcccggaccaggaggacgcgtcggtgctgtggacggagagcaaggacgtgggcaagggcttccgctgcatccgcatggtcaacaacacccgcctcaacttcgacgccttccacggcgacaaggaccacggcggcgtgcacgacggcaccgccgtcgtgctctgggagtggtgcaagggcgagaaccagagctggaagatcctgccgtggggtcccgaggccaactcctccgcggcccacgcgggaggcccgcacgccgtgcgcgtcttctgcaaggccggcggcgaggactacagcctcacggtgcgcaacggcacggcgtgcctggcgcc

SEQ ID NO: 101462 - DNA, 420 bp, Zea mays
atctccgctccggctgcgctctgccttgctttcctgctacctgttctagcgcgagcgagagaggtacggcggccgatctggcggcgcaggcggagggctcggccggggccggcaagtcggcgccgaacatggggaggggccgggtcgagctcaagcggatcgagaacaagatcaaccgccaggtcaccttcgccaagcgccgcaacggcctgctcaagaaggcgtacgagctctcggtgctctgcgacgccgaggtcgcgctcatcatcttctccaaccgcggcaagctctacgagttctccagcacgcagagcatgccaaaaacacttgaaaagtaccaaaaatgcagttttgcagggcctgaaacagcactccagaatagagagaatgagcaactgaaaagtagccgcaatgagtacc

SEQ ID NO: 101463 - DNA, 392 bp, Zea mays
ggagtctcggtgtagtgtctccgtctgagtcgattaaggaccgtgtcgatgtgggagtgctgactgaggaccctttaattggtcacatgcctcgtcatgggcaagctttgcctcaggcagactaataccagaaaggccaacatgcaatgggagtggagagatggcgtgagtagcgtgtaccctccgtggcaagaggctggacggtggtgtatctgtgctctcggttggtgtgaacccagtctggtcttaagaaacccggtggagagttgacatatgcaagggttaagtgctacatatgtcgtgtgattggagatcctcagctgagtattaatcgattcggatcgtcgttacttctcagatatgaagacttggtcactgacttacacgtagca

SEQ ID NO: 101464 - DNA, 446 bp, Zea mays
  unsure (1)..(446): unsure at all n locations
cgtatgttgaccaattctcaagatgcctctatgttgagtacaagagcaagggtattgatgtgcaatgccaggtgcccttatacgtggcgacaaagatggcatccatcaggaagtcttccttcatggtcccatctgctgacacctatgctcgtgctgccgttcgtcacattggatacgagcctaggtgcacaccatactggccacactctgtcgtgtggttcttgatctccattcttcccgagtcccttatcgacagcgtgcgcctgggcatgtgcattaagatccgcaagaaggggctggccaaggacgccaagaagaaggcgctgtgattgatgtttcagaatgcatgttcagattcgcacatttcctcatcacctgtagtagacacgtgccttgctgtagtcactttattagctaccattacctnctgagtctgttaagaatcg

SEQ ID NO: 101465 - DNA, 447 bp, Zea mays
  unsure (1)..(447): unsure at all n locations
ctggatttagtagagttttatctggcataattgcaaatcaatggaaaagaaggcaaggattggaagcgggggaaggattggtacaggcttgatgggagcactccatcttctgatcgtcagaatcttgtggagatgtttaatgaccttgaaaacacaagagtgaaatgcacattgatatcaactcgtgctggatccctgggtatcaaccttcatgctgcaaatcgcgtggttcttcttgatggatcatggaatccaacacatgatctgcaagccatttatcgagtttggaggtatggccagaccaaacctgtatatgcctaccgnctaatggcacatcaaacaatggaagagaaaatatataagcgccaggtgacaaaggaaggccttgcaacaagggtggtggatagacagcaagtttcaagaaccatcttcaaagaagagatgctt

SEQ ID NO: 101466 - DNA, 391 bp, Zea mays
ctacgaacgggggccgggaaaagatcggctacagacagatgaggctctgtctccggcgagcggcggccaccagctcacccctcgcagctaccctccgcggcaagacttctacgagcaccctcgccccccatggccggctcagcttcagccacaccacgtcgctgcagacggcgcccgggcaccgcgggctccgagcagggtgggcggtgcgcgtgctcccgctgacggaggagaacgtggagaaggtgctggacgaggtgcggccgagcctgatggcggacggcggcaacgtggcgctgcacgagatcgacggcctcgtcgtcgtgctcaagctgcagggcgcgtgcggctcctgccccagctccaccatgacgctcaagatgggcatcga

SEQ ID NO: 101467 - DNA, 404 bp, Zea mays
  unsure (1)..(404): unsure at all n locations
tgacctttagcattcttaattcaatgaacatgtcttgttagaattcaagtaaatggagtanccaagattgttatcatagttttacctttacatgactaaccttacacatggttttgtatgactttctttttcagatgtgacctgtttgatgtcatgttggagatggatcgcatactgcgcccagaaggaactgccgttatacgggcctcgccagacgtagtagccaaggcagcacagatcgctcagtcgattcggtggaaggcacaggtgcatgacagtgaaccagaatcaggcagtaccgagaaaatacttgtggctaccaaaacattttggaagctgccactaacaaaacaataggctaatgcgagtttgaactttgaacccttttcacttgcgcttcctta

SEQ ID NO: 101468 - DNA, 445 bp, Zea mays
gacgccggcgaggaagcggctgatgcgggacttcaggcgcctgcagcaggacccgcgcggcgggatcagcggcgcgccgcacgacaacaacatcatgctctggaacgccgtcatattcgggccggatgatacgccgtgggacggtggcacgttcaagcttaccttgcagtttacagaagattacccaaacaagccaccaactgttcgatttgtctctaggatgtttcatccaaatatatatgctgatggaagcatctgtttggatatcctacagaaccagtggagtcctatatatgatgttgctgcaattttaacttctatccagtccctgctgtgtgatccaaacccaaactcccctgcaaactcagaagcagcaagactgttcagcgagaacaaagcggagtacaaccgcaaagtccgtgagatcgtggagcagagctggaca

SEQ ID NO: 101469 - DNA, 441 bp, Zea mays
aaagatatcaaagaccacttcccgtcttcctcccgtggctgtctgtcatctggctctgaaacgatggcagtcctgcaagttgctgctgctgcccctccccctgtctctgtgattgggttcgagggatttgagaagcgccttgagatcagcttctctgaggcacctgtcttggctgaccccagcggaaggggactgcgtgcgctctcgcgtgcccagatcgactctgttcttgaccttgctcggtgcaccattgtgtccgagctctcaaacgaggacttcgactcttatgtcttatctgagtcgagcctgtttgtctacccatacaagattgtgatcaagacctgtggaactacaaagcttctgctcgctattccgaggatccttgaacttgctgaagagctcctgttgccactcgctgcagttaaatactcccgtggaacg

SEQ ID NO: 101470 - DNA, 446 bp, Zea mays
gtgctcagtaatcccaagcagcgtgaagactatgacttacatgggaaacctggtgtgtcaacggaagcgataattgatcctgcagcaatttttgcgatgctgttcggtagcgagctttttgaggactacattggtcagctggcgatggcatccatggcttcacttgatggttttactgaaaacgaacagatcgatccaagaaggttgcaagagcaaatgcgagttgtacaaaaagaaagagaggagaaacttgcagaggcactaaaagataggttgcatctttatgttcaaggaaacaaagaggaatttatccagtatgctgatgctgaggttactagactctctaatgccgcatacggtgttgatatgttgagtactattggttatgtgtattcgagacaagcttctaaggagcttggaaagcaagctaaatatcttggtgttcc

SEQ ID NO: 101471 - DNA, 415 bp, Zea mays
gctctggaagtggtgcgagggcgacaaccagcgctggaagatcctcccttggtgaacgaacgaaagaaactactagctggtaccctaataataattctgctggctgcggcgatcccaaaataaaagaggccgggtgcgatgcatctcggacttctcgagtggtgtttgcgtcagacagccagccactgtggggctagtgttccaacatttgtcagcctgcttgcgcgaggaaggggggtcactgactcaagagaagggcctggtcataggctgctgcattatgaatttctgatgatgtcttatgtctgtactctgaatcaactatgtatgagatctcatctcctttctcctactgaatgaatgaatcattattggctttgctttgcttcacctgcttgaaaagcatgcattgtat

SEQ ID NO: 101472 - DNA, 442 bp, Zea mays
  unsure (1)..(442): unsure at all n locations
caagattcgccactccgtccgttaccttcactcgctcactcacaatgcggcgccatggcgaggtacgcgtgatcttagctatggccgccgccgccgccgccgcgctcttggcgtcggcggccgtggccggacgagacggccggcagacctacatcgtccacatgtcccattccgccatgccggacgagttcgcggagcatgaggaatggtacgccgcgtcgcttcaggcggtgtcggatgccgccaccgtgctgtacacctacagcaccctcctncacggctactcggcgcggctgacgcgcgcggaggccgcggcgctggagtcgcagccaggggtgatcgtcgtcaacccggaggtgcggtacgagctgcacaccacccggacgcccgagttcctggggctggacggcacggacgcgctgntcccgcagtcgggcaccgg

SEQ ID NO: 101473 - DNA, 393 bp, Zea mays
cagagggttggcagcactccttgatatggatttagatacaagtgtgatgagagagctgaagatcgaagagagttctactcaaagctcgaggtgaagattcatgcacaggaactagataaaagcaacttgcatgcaaaatcaaaggaaactgaagaagctgaactcaaaatgctgacaaagagtttaaatttcaaggcatcaccaatgcccagcttctataaggaaccaactagtcctaaggttgagttgaagaagatacctacaactagagctaggtcaccaaagcttgatcactccaagaacacatcctcaggagggacagaatggaattcaaatccttcagatcgttcatgtcgactgagtctcgatgaaagggtcttccaaaatggtgtc

SEQ ID NO: 101474 - DNA, 439 bp, Zea mays
ggagaagcagccgccgttgctgctgccgcgtccacagaatggggggtttcgtgaagagtcataagaccaatgcgtatttcaaacgtttccaagtgaaattcaagagaaggcgggctggcaagacagactacagggccaggataaggctgattaaccaagacaaaaacaagtacaacacacccaaatacagatttgttgtgcgatttaccaacaaggacatcactgcccaaatcatatctgctagtatagcgggtgatatggctcttgcttctgcctactcgcatgagttgccacgatatggtcttgaagttggtctgaccaactatgcagctgcctactgcactggccttctgttggctcgccgtgtgctcaagatccgtggtttggatcaggagtacgagggcaatgttgaggccactggtgaggacttctcttgtga

SEQ ID NO: 101475 - DNA, 417 bp, Zea mays
accacgcgtacgagcagaacaacgacctttacaatcttactcaacttcgtcagatggggttcagggagccgatgtgctgattctagatctatcaacattgcgagacgctacagatgactttgctgaaagcaaaatgctcggtaaaggagggtatggtatggtttataagggagtcctgcctgatggccaagaaattgcggtaaagaggctttgccagagttctcgacaagggattggagagctgaagagtgagctagtactggtggctaagcttcaccacaagaaccttgtgaggcttattggtgatcgcctgcaagaacaggagaaaatacttgtgtatgagtatatgcccaatcgaagccttgacaccattctgattgactccgagaagaacagagagctggattggggaaagag

SEQ ID NO: 101476 - DNA, 368 bp, Zea mays
cggaattcccgggtcgactcacgcgtccgtcgcatctgcgtacacggtctccctcttcctgtcagtagtagagtgagagtgaggcagcgagtaggagacatggggaaatggggaagggagcgcaaggtgagcgatgcggcggcggcgggcggcgaggtggaggagaacatggcggcgtggctggttgccaagaacaccctcaagatcatgcccttcaagctcccgcccgtcggcccttatgatgtccgcgtgcgcatgaaggcagtggggatttgcggcagcgatgtgcactacctcaaggagatgcgcatcgcgcacttcgtggtgaaagaaccgatggtgatcgggcacgagtgcgcgggcgtggt

SEQ ID NO: 101477 - DNA, 369 bp, Zea mays
cccacgcgtccgcccacgcgtccggcccgtacgagattacctacgccgacgactcgtgcaccgtcggcaacctcgcgcgcgacacgctgactctttcgccgaccgacgcggtcccgggcttcgtcttcgggtgtggccacaacaacgccgggtccttcggcgagatcgacgggctcttgggcctcgggcgcgggaaggcgtcgttgtcgtcgcaggtggcggccaggtacggcgcgggcttctcctactgcctcccgtcgtcgccgagcgccacggggtacctgtccttcagcggagccgcagccgccgcccctaccaacgcgcagttcacggagatggtggccggtcagcacccgtcgttctactacc

SEQ ID NO: 101478 - DNA, 440 bp, Zea mays
  unsure (1)..(440): unsure at all n locations
cggcaagatccccgacccggagtccaccgacaacgctgagttcaagatcgtgctcaggatgatccgcgacgggctcaaggctgaccccaagaagtaccgcaagatgaaggagaggcttgtcggcgtctctgaggagaccaccacgggtgtcaagaggctctaccagatgcaggagaccggcgccctcctcttccctgccattaacgtcaacgattccgtcaccaagagcaagtttgacaacctgtatggttgccgccactcgctccctgatggtctgatgagggccactgacgttatgatcgccggaaaggttgccgtggtctgcggatacggtgatgtcggcaagggttgtgctgctgccctcaagcaggctggtgcccgtgtcattgtgaccgagatcgaccccatctgtgccctncaggctctgatggagggtcttc

SEQ ID NO: 101479 - DNA, 440 bp, Zea mays
gcaacacttgtgggattccttcggcacattggtggagccacttgctagcaaccggcgttggatggtgacagaaggcaaccatgagaaggagcacattccattttttgagtcaggatttcaatcttataatgcacgatggaaaatgccttatgaagagagcggatctagatcaaatttgtactactcttttgaagttgctggtgcacacatcataatgctaggttcatacacagattatgatgatagctcagatcagtatgcttggctaaaggctgatcttgccaaggttgatagaaagaggacaccctggctcattgtgttgttgcacgtaccatggtacaatagcaattgggctcatcagggtgaaggcgacagtatgatggcttcaatggagcctttgctgtacgctgctcatgtggatatggtaatagcaggtcatg

SEQ ID NO: 101480 - DNA, 441 bp, Zea mays
gcgacacttgtgggattccttctgcttattggtggagccacttgctagcaacgcgcgttgtattttgacagaaggcaaccatgataaggagcacattccattttttgagtcaggatttcaatcttataatgcacgatggaaaatgccttatgaagagagcggatctagatcaaatttgtactactcttttgaagttgctggtgcacacatcataatgctaggttcatacacagattatgatgatagctcagatcagtatgcttggctaaaggctgatcttgccaaggctgatagaaagaggacaccctggctcattgtgttgttgcacgtaccatggtacaatatcaattggtctcatcaaggtgaaggcgacagtttgatggcttcaatggagcctttgctgtacgctgctcatgtggatatggtaataacatgtcatgt

SEQ ID NO: 101481 - DNA, 443 bp, Zea mays
caggtgacattaatgttttcgctcagatgattgacgacgcggaaggcctggaaaaagtcgagaacctacagagccatgataataatgaaatctatgaaaaggctgtgaagcttcttgagacttactggatggaggaggaagatgatgcaatggctactgctggggaagctgctcctgctgtttttgactttagccaaggtggcaaccctcctggtggtggtttgaacctcaactgaatacagtatttgaccaaaagggtgttaattccctcatgacaacctagtctggtcgattccatgtgggataatggtttgtggttggtccagtaaattcgagatttcaagggagatgggttagcattattcccaagctgtcatggatatcagtatcgcagggtctgtaacaggaccataatcgtcgaacatgagtctgggtttttgagc

SEQ ID NO: 101482 - DNA, 420 bp, Zea mays
  unsure (1)..(420): unsure at all n locations
cgtgtccgcgtccagtgtgtccgctactccgctccccctcagtcctcagttcctcaggtagcggtagcgtgcgcgcgggagacgtagatggcggcttcggaggcggcagcggcggcggcaacaccggtgacgccgacagaggggacggtgatcgcgatccacagcctggaggagtggagcatccagatcgaggaggccaacagcgccaagaagctggtggtgattgacttcactgcaacatggtgtcctncgtgccgcgccatggctccaatttttgctgatatggccaagaaggtcccaaatgttngtntcctgaaagttgatgtggatgaaatgaagaccattgctgagcaattcagcgtagaggccatgccaacattcctgttcatgagggagggcgacgttcaggacagggtcgtt

SEQ ID NO: 101483 - DNA, 187 bp, Zea mays
cccacgcgtccggtcttctgataccattgacaatgtcaaggccaagatccaagacaaggaaggcatccctccggaccagcagcggctcatttttgcccgcaagcaactcgaggaacggccccacgctggccaactccaccatcaaaaagagaaccaccttcaattggtgcttcgtcttaagggtggc

SEQ ID NO: 101484 - DNA, 411 bp, Zea mays
aaaaatgcttgttggaaacaaagttgacaaggatgatgaaagaatggtcacaaaagaggaaggtcttgcttttgctgaagaatatggatgtctgtttcttgagagcagtgcaaaaacacgagaaaacgttgagaaatgttttgaggaacttgcattgaagattcttgaggtgcctagtctcctagaggaagggtcttcttcggttgtcaagaggaacatcctgaaacagaagcaggaaagtgatgcaaagaacggtagtggatgctgtcaatagatgtatgtgctgatccacaccacacggttggctttcttcgtgtgagctgccctgattgtctgctgtacatgttcttgtgagtaagaagggcgagcataattgatttgtacaaaaaaaaaataaattataattattat

SEQ ID NO: 101485 - DNA, 449 bp, Zea mays
cgcacgcgtccgcccacgcgtccgcccacgcgtccgatggcaagcgcctagctacagtgctgctctgataatacaataaagatcattggcgtaagtggaacctcacaccagcagcttgcaactttgagtggacaccagggcccagtatggcaagtcgcatgggctcatcccaagtttggttccatgcttgcatcctgcagctacgacggccgagtgatcatctggaaggaaggaagcaagcctgatgaatgggcactggtacacacctttgctgagcacaagtcctccgtgaattccatcgcgtgggcgcctcatgagctgggtctatgcttggcttgtggttcatcagatgggaacatttcagtcttcactgctcgttctgatggaggttgggataccacgcgtattgatcaggcgcatccggttggtgtgacctcagtttcttgggc

SEQ ID NO: 101486 - DNA, 444 bp, Zea mays
cgcaggaggcggcggcggcgggagggtctcggcgctcgagacgggcaccaagctctggatctccaacctggactttggggtttcgaacgacgatatcaaggagctgttctctgagctaggtgatctgaagcgtttttcgataatatatgatcgaagtgggaggtctaagggaacagctgaagttgtatttgcaaggcgttctgatgctgtagcggcggtgaagaaatataacaatgtccaacttgatggtaagcccatgaagatagagatagttgggaccaatactccaactgcatctgctgctcttccagtctccaatggtggccatgctaggaatgctgtgaggagtgcaccgaggggtgctgccccagcaggtgtgccgcagcgaagacctcatcagaggggtgggaggcgtagtggtggatctgggggtggtcgtcgtgg

SEQ ID NO: 101487 - DNA, 417 bp, Zea mays
gcgacgtcggcaacggcttccgctgcgtccgcatggtcaacaacatctacctcaactgcgacgccttccacggcgacaaggcccacggcggcgtccatgacggtaccgagatcgtgctctggaagtggtgcgagggcgacaaccagcgctggaagatcctcccttggtgaacgaacgaaagaaactactagctggtaccctaataataattctgctggctgcggcgatcccaaaataaaagaggccgggtgcgatgcatctcggacttctcgagtggtgtttgcgtcagacagccagccactgtggggctagtgttccaacatttgtcagcctgcttgcgcgaggaaggggggtcactgactcaagagaagggcctggtcataggctgctgcattatgaatttctgatgatggctta

SEQ ID NO: 101488 - DNA, 305 bp, Zea mays
  unsure (1)..(305): unsure at all n locations
aagcacagtcgtgaccagagcgcgagagctagctagagggccgtgaaaatgccgatcaataggatcgccctggggagccaccaggaggtgtaccacccgggcgccctcaaggcggcgttcgctgagttcatctccaccctcatcttcgtcttcgccggccagggctccggcatggccttcagcaagctgaccggcggcggcccgacgaccccggcgggcctgatcgcggcggcggtggcgcacgcgttcgcgctgttcgtggcggtgtcggtgggcgcgaacatctncggcgggcacgtgaaccc

SEQ ID NO: 101489 - DNA, 445 bp, Zea mays
  unsure (1)..(445): unsure at all n locations
cccacgcgtccgcccacgcgtccgatggagttggttgatgctgcatttcctcttctgaagggagtcgttgcgacaactgatgttgtggaagcgtgcactggcgtgaatgtggccgtcatggttggtggattccccaggaaggagggaatggaaaggaaagatgttatgtctaaaaatgtttcaatctacaaaacccaagcatctgctcttgaagcccatgcggcccccaactgcaaggttctggtggttgccaacccagcgaacaccaatgctcttatcttgaaagaatttgctccatcaattcctgataggaacgttacttgcctgacccggctggaccacaacagggctcttggccagatttctgagagacttagtgtccaagtcagtgatgtgaagaatgttatcatctggggtaaccactcgtncactcagtaccctgatg

SEQ ID NO: 101490 - DNA, 435 bp, Zea mays
  unsure (1)..(435): unsure at all n locations
agcgagggtcggaataatggcggccgttgagggtgccgtgatcgcgtgccacaccagggacgagttcgacgcccgcatggccaaggccaaggagcagggcaagctggtggtcatcgacttcatggccccctggtgcagtgggtgccagatgatggccccggtgtacgcggactgcgccagcaagtacccttccgcggtcttcctcgaggtcgacgtggacgaactgctggaagtcgcgaagatctacggcgtccatgtgatgccgaccttctgcttcatcaggaacggcgagacgctcgagagctttgctaccgtcgacgaggacgagctccgggacgccgtcaggaagtacgccgncgctggcactacgacggctcctgcctcggcgtccgcctaattcaggagatgtgatgtgtagcaaatagcgcgcgcgca

SEQ ID NO: 101491 - DNA, 436 bp, Zea mays
  unsure (1)..(436): unsure at all n locations
tgaaattgctagtgtcagcacctccgttaaaggagttggagtcattggtaatgtaagaggcgattgacttgcaatccccaattggcagtctcattgggagacaagttgtcaaagttggaagaagttctggtatgacaactgggactgttgtcgcatacgcacttgagtacaatgatgagaagggaatatgtttcttcactgactttcttgtcgttggggagaaccaacaaacatttgatcttgaaggggacagtggaagcctcataatcttaacaggacaagacggtgagaagccgcaacctataggaattatatggngtggtacagctaaccggggaaggttgaaacttaaaagtggccagggtccggagaactggacaagtggagttgatcttggccgncttcttgatctcttggagctagatctgatcacaac

SEQ ID NO: 101492 - DNA, 432 bp, Zea mays
ctattttgaaggtgttagaccttcagtgcgcgagtaaagttgctcgagaacccgaagggtctgaatggactgaaagagtcagcagatgtgacagattgaaatctccggttaggattgcaatggttggaaagtatactggcctgtcagactcctacctatctgttataaaggctcttttgcatgcgtcggttgctttggacaggaaacttgtggtggactgggttccttcctgtgatcttgaagattctacagcaaaagagactcctgacgcctatgaaaaggcatgggagtcgttgaagggtgcagatggtgtgttggtgccaggaggttttggagacagaggagtccaagggaaaattctggctgcaaaatacgcgcgagaaaacaacgttccatatcttggcatttgcttgggcatgcaaattgcagtga

SEQ ID NO: 101493 - DNA, 378 bp, Zea mays
  unsure (1)..(378): unsure at all n locations
gcagttcaccacagataacggctttgaggacgctaacattccctttggtcctgtggaagcaaatggtagaacgatactgagcattgatgatcgtttggaggatgacaggcatcagcttcccttgacggctgctgatgcagttgcaaccaatggtgtgaacccgtggaattggagagacacctctactgatggtattaatctgcacatgtcacaacacacaagttaaatcaatacctctgaatgggtggcctttaacttctcagtgcttaaaattggtataatttgaattgttgctatctcactgtgttgtgtactccctccgtttcgttttagttgtcgctggatagtgcaaaattaaaccatncagcgacaactaaa

SEQ ID NO: 101494 - DNA, 393 bp, Zea mays
cccacgcgtccgcccacgcgtccgcttgccactagcttctatgagtatggttggggtggatccttccactttgctcacagatggaatggagaatccttacgtgaaagcatcaagcgacatgagcattttcttgccctgcaacttggtttgaaaccaggaatgaaggttttagatgtgggctgtggaataggtggaccactgagagaaattgcaagatttagctcaacttcagttaccggattgaataacaacgaataccagataaccaggggaaaggagctcaaccgtttagcaggaattagtggaacatgtgattttgtcaaggcggacttcatgaagatgccgttcgatgacaacacttttgatgcttgttacgccattgaggcaacatgt

SEQ ID NO: 101495 - DNA, 364 bp, Zea mays
gcgcctccatttcggcctctgtcccttgcaagttcaatctcacctccaaccatgggtgaagagaagtcccacatcaacattgtggttattggccatgtcgactctggcaagtcgaccaccacaggacaccttatctacaagcttggaggcattgacaagcgtgtgatcgagaggtttgagaaggaggctgctgaaatgaacaagcggtccttcaagtacgcgtgggtgctcgacaagctcaaggctgagcgtgagagaggtatcaccattgatattgctctgtggaagtttgagaccaccaagtactactgcacggtcattgatgcccctggacaccgtgacttcatcaagaacatgatcactg

SEQ ID NO: 101496 - DNA, 448 bp, Zea mays
  unsure (1)..(448): unsure at all n locations
gtggtacgacgacatggcggccaccatcagcaagtcgtcgtcgtcctcgagctcggggcagcgggcagctgccgcactgctcgtggccgccgccgtggcggtgtccgtcctggtggtgggcgcggcggcggtgtgcgacatgagcaacgagcagttcatgtcgtgccagcccgcggcggccaagacgacggacccgccggccgcgccgttcgcaggcgtgctgcgacgcgctggcgggggcggacctcaagtgcctgtgcggctacaagaactcgccgtggatgggcgtctacaacatcgaccccaagcgcgccatggagcttccggccaagtgcggnctcgccacgccgtccgactgctagcagtgtgctagccaagccaagccaagcagggaggcccccggcattgctagctgtacgtgtctgtgtgtgcatctgcagcagggtgc

SEQ ID NO: 101497 - DNA, 384 bp, Zea mays
ctttgctttttgcatggcaatacttgtgagctttcctcctggcacaatcgaaccaagtatggctggcctcgctgtaacatatggacttaatttaaatgctcgcatgtcaagatggatattgagcttctgtaaattagagaacaggataatctctgttgagcgcatttatcaatattgcaggcttcctagtgaagcaccattgattattgagaactgccgtccaccatcatcatggcctcagaatggaaacattgaactgattgatctcaaggtccgctacaaggacgatctaccattagttcttcatggtgtaagttgtatgtttcctggcgggaaaaagattgggattgtagggcgtactggaagcggtaaatctactcttat

SEQ ID NO: 101498 - DNA, 436 bp, Zea mays
gcacactgacttggctgaaaaatatggtgtttctggtttccctacattgaagttctgccctaagggaaacaaagccggtgaagattatgatggtggccgggacttggatgactttgtcaagttcattaatgagaagtgtggcaccagccgggatccaaagggccacctgaatcaagaggctgggcttgtgccaagcttgaatcctcttgtgaaggagtttctcaatgctgctgatgacaagcggaaggaagtcctctctaaaatagaagaggatgttgctaagctcagcggttctgcagccaagcatggaaagatatatgtgacagctgcaaagaagatcatagacaagggctctgactacactaagaaggagactgagaggcttcaccgcatgctggagaagtcaatcagtccttccaaagctgatgaattcatc

SEQ ID NO: 101499 - DNA, 444 bp, Zea mays
cgaacgacctcacgcagatgacctttggctacagcagggatgatgtggggaagttgagccccatttatctggctcagggcatcctccagcatgaccccttcgaggttctcgaccagagaggagtgggcgagctggttaagcttgctacagagaggggccgcaaagctaggcctaacttgaaggtgggcatttgtggagaacatggtggagagccttcatcggttgctttcttcgccaagactgggctggattacgtttcttgctcccctttcagggtcccgatcgctaggctagctgcagctcaggtgcttgtctgaggggctgcctcctcgttggcagcctgctgttggtgcatctggtgattaataatactactatgacagagccatatgctctgtgaagagtattaatagcagcgctcataaaagctacagttccatctat

SEQ ID NO: 101500 - DNA, 391 bp, Zea mays
cccacgcgtccgccaccactccctcctctcctctcccgtcctatccatccggcacgcgcagcgtccatccactcctcccctgctccggctccggctccggctccgccatgggcctttcaacagtttactccccggccggaccgcgcctcgtgccggcccctctcggccgctgccgctctgcccagccccgccgcccgcgccgagccccgctcgccaccgtccggtgctccgtcgacgccaccaagcaggcgcaggatggcgtggcgacggcggtcgcgacggatgcgccggcgtcgcggaaagagtgcttcggggtcttctgcaccacctacgacctcaaggcggaggacaagaccaagtcgtggaagaagctagtgaaatgtgctgtgtc

SEQ ID NO: 101501 - DNA, 391 bp, Zea mays
cagaatgctgcccaccgggtgcaggtgcagcctcctctcctgcctccgccgcgacaagggcgaggcgggccgaaccgacccccgcgtcgcggacgagcccaccgcgtcgtcgctcggcaagggcagcgccgcggctcggcggttcgcgtgggccgagatcgagtccgtcacggcggggttctcgtccagggtcatcggccagggcggcttcagcaccgtgtacctggcctgcctctcctcctcccgcctcggcgccgtcaaggtgcagcgcagcagcgagcgccttcaccgcgccttccgccaggagcgcgacgtgctcctcgcgctccgacacccgcacatcgtccgcctgctcggatactgcgacgaacgagaggaaggcgtgttggtg

SEQ ID NO: 101502 - DNA, 379 bp, Zea mays
gttttgttgaatttacaagccgtgcatctgcatagcgagttcttcagacatataatggacaaatgatgccaaatgttgacttgacatttcggctgaactgggccagtgctggtgaaaagcgtgatgatactcctgactatactattttcgttggtgatttggctgcagatgttacagattacttgttacaagagacattcagggttcattatccctcggtgaagggtgcaaaagttgtgactgataaattgacaatgcgtaccaagggttatggatttgtgaaatttggcgatcctacagagcaagctcgtgcaatgactgaaaatgatggaaatgccttgtctttcaggcctatgcgtattggtcctgcagcaagtag

SEQ ID NO: 101503 - DNA, 443 bp, Zea mays
cttacacgtcttctgaggaggcttcatctgccattactgccttggatggaaagactcgtcgatggacggagcatacgggttaatcatgctaacgagaagaccggtggctttcgtggcggcggtggctatggtggcggcggctatggtggtggtggaggctatggtggtgctggtggaggcggtggatacggtggcggccactatggtggtggtggtggcagcggtggatactgtggcggcgactatggtggcaactacagcaacaggggtggtggtggtgattatggagttgctggtggaggtggaggcaactttactgctggaggtagcgacagctttgccaacagtaactatggttctgacagtagttttggtggaaacggtgctggaggctatgatgcaaccggcggttccacaggcgaagatgggttctctggcacacc

SEQ ID NO: 101504 - DNA, 473 bp, Zea mays
  unsure (1)..(473): unsure at all n locations
ccggtcggattcccgggtcgacnacgcgtccgcgcacgcgtccggccaattcccaagctgggagtggttcatcaattaatgagcggacgaattctgggttttctcgcggttcatcagaggctgggttagatgaagatcagtcctcaaccggtaagagtggggactcatcattttttgctggtttcttgaagaagggtttcaaggacctttctttattaaataagtccatggatagcgttaaggtttcaattaatggtcatccaatctctgaaagagcccttaagaaggcagagaagaaagctggtcctgttgacccaggttcatattggtacgactaccgtgctggtttttggggtgtcatgggacgagaatgtatcggcattgtccctccatttattagagaatntaattatccgatggccagaaattgtgcccgtggngattctggtgtttttgtcaatggcagagaactg

SEQ ID NO: 101505 - DNA, 374 bp, Zea mays
accacctccacctcgtcgtctcccaccaccgccgagcgcgagccctagcccgatctaggcggcggcaggcaccagatcccgccgcccgcggcgtcccgggacgcgccccgccgaatccgccgctcctcgcactgcaacacgcccggaccacggtgcatttgatccgtcccggccgcctacacgatgtccaagtcgggagcgctggatcttgcttctggcctcggagggaagatcaacaaggtggaagtcaagtcggccgtcgatgagtatgagaaatatcatggatactatggagggaaggaggaagcaaggaagtccaactatactgatatggttaataaatactatgatcttgccactagcttctatgagta

SEQ ID NO: 101506 - DNA, 364 bp, Zea mays
tgattatttgtctgtgaagggacctaagggccgattcaagtaccacgttggccaagtgagggcatttggaatgctggctggtggatcaggcattacttcaatgtttcaagttgccagagcaattcttgagaaccctaatgacaacaccaaggttcacttaatttatgctaatgtcacatatgaagacattcttctgaaggatgagctggacgacatggccaaaacctatcctggccgctttaagatctactatgtgttgaatcagcctcctgagaactggaacggtggtgttgggtttgtgtctaaggaaatgatccaatctcattgtccagcgcctgctgaggacattcagatcctgagatgt

SEQ ID NO: 101507 - DNA, 413 bp, Zea mays
cagaagcggcggcggcggagcaaacgctatgcgaaggcgagggtgtgagggaaggagcaccagccatggtgcacgtcaacttctaccgcaactatggtaagacgttcaagaaaccaaggcgtccttatgagaaggagcgtcttgatgctgaactgaagctggttggtgagtatgggctgaggtgcaagcgtgagctttggagggtccagtatgcactgagcaggatccgtaatgctgcaaggcacttgctcacccttgacgagaagaacccccgtcgtatctttgagggtgaggcacttcttcgccgcatgaaccgctatgggctgcttgctgagggtcagaacaagcttgattatgttcttgccctcaccgctgagaacttcctcgcaaggcggcttcaaacacttgtcttc

SEQ ID NO: 101508 - DNA, 322 bp, Zea mays
gcgaaaccgattcaacagatagtgatgaatcaagcactccctgcctgaaaagtgtcgactcgaatctgggtgccatgcctaatctggagcagatcaatgctctgatcaagcactacggcccaaccgttttcttccacccgcaagagacgtacttaccgtcatcagtttcttggttctttgagaacggagctacattgcacgagaaagacgcaaaaatgggagatgcaatactccctggtggcttgaatctgcctgttggtgggacaaacgatggcgagtactggattgatctccctgatgatgacaggaaagagctcgtcag

SEQ ID NO: 101509 - DNA, 404 bp, Zea mays
ctgcgccgccgcctccgacatcgtcccttcgtccccacgagcaaccgataatgcgccggcgttgagatgttggtttatcaggatctcctatctggcgacgagctcctgtcggattcattcacctacaaggagctcgagaacggcgtcctgtgggaggtcgagggaaagtgggtcacccaaggtcctgttgatgtggacattggtgccaatccatccgccgagggtggtgaggacgaaagcgttgatgacacagctgtgaaggtggttgatattgttgacacattccgtctacaggagcaacctccttttgacaagaaatcatttgtgtcttacatcaaaaaatacatcaagaatctcactgctgtgttggagccagagaaagcggatgagttcaaaaagggtgt

SEQ ID NO: 101510 - DNA, 360 bp, Zea mays
gtcttcaagcgctacgatgacctgccgacccggacgccaagcccatggcggtgcaggccacgctgtgggacggcagctactgggccacgcgcaagggcgaggtcaagatcgactggtccagcgcgcccttcgtcgtctcctaccgagactacaccgccaacgcctgcgccgtccacggccggaacggcggcggcagctcgtcgtgccccgccggtgccaacgagtggatggacaggcagtccgacgacaccgaccgtctcaccgtggcttgggcgcgccggaactgcttgcagtacaactactgcgatgactggtggcgctttccgccagggttccccggaaagtgcgcccgcaactgat

SEQ ID NO: 101511 - DNA, 359 bp, Zea mays
  unsure (1)..(359): unsure at all n locations
gtcgcggtagccggcggcggcgcggttgaaagcaggcaggccatggcgtcggggtcgttttcgaccccggcggccgtccgcgagatgcagaaggatctcgaggtccaggccaacgccctcagcaagatccagaatgacatcgtcaagaaccaccaggtccgcaagcagtacaccatccaggtcggcgagaacgagctcgtcctcaaggagctggagctgctcagcgatggggccaacgtgtacaagctcatcggaccggtgctggtcaagcaggacctcgctgaggccaaggccaacgtcaagaagcgcatcgagtacatctncgcagagctgaagcggatggatcgggcgctcaaaga

SEQ ID NO: 101512 - DNA, 421 bp, Zea mays
cttggatacaagaggtccaagtcgaaccagtacgagaccacgtctctcgtgcagatcgagggggtgaacaccaaggaggatgtcgcgtggtacgctggcaagcgcatggcgtacatctacaaggccaagaccaagagcaatgagacccgctacaggtgcatctggggcaaggtcacccgtccgcacggaaactcgggcgtcgtccgtgccaagttcatgtccaacctcccgcctgagtccatggggcgcaaggtcagagtgttcatgtacccgagcagcatctaaggttttgttggagtaaagatggactagaaatggccatgtgtttatttctcacttttctctgaacttaaaatgccttgtgttggtaacttaaattgttcaagtgctgaacctgtggaagttgtgccaaaatttggtg

SEQ ID NO: 101513 - DNA, 352 bp, Zea mays
aaactggcgaattgcgacgttggcggaattgtaatggcaataattccttcctccttcgttccccatttctcctctttctaggtttctacccctcatcggtcctcgctccacggccatggtgaggatgaagcaggtaaagatctcggtaaagaaggacgtggattcgtacacaatccgcggcactaacaaggtcgtccatgtgggcgactgcgtgctgatgcgggcgtcggactcggacaagcagccgtatgtggcgcgggtggagaagatggaggccgacggacgcggcagcgtgcgggtgcaggtgcgctggtactactcgcctgaggaatccaaaggcggtcgccggcag

SEQ ID NO: 101514 - DNA, 378 bp, Zea mays
cagcagttacctttggtgcatttgttgtgcacaaaacatcaaggcacaacaagtacaagaacttgtgctaggaaaccttgctgcctactctcagcaacagcagtttcttccattcaaccaactggctgcattgaactctgctgcttatttgcaacaacaactaccattcagtcagctagctgctgcctacccccagcaatttcttccattcaaccaactggcagcattgaactctgctgcttatttacaacagcaacagctaccaccattcagccagctagctgatgtgagccctgttgccttcttgacacaacaacagttgttgccgatctacctgcacgctgcgcctaaagcttgcacccttttacaactgcaaca

SEQ ID NO: 101515 - DNA, 333 bp, Zea mays
gtgtactccctggactacgctagaacaaggttggctaatgacgcggaggctgccaagggaggaggtgaaaggcagttcaatgggcttgtcgatgtctaccgcaagacactcaagtctgatggtattgctgctgggattacaaaaaaaaaaaaaaaaaaaaaaaaaaacaaaaaaaaaaaaaaaaaaaaaaaaaaaaaataccaaaagcaaaatacaatacaaaaaaccactgtactgtaacatcaactacgcaactcaccaagcacaaatttgcgtgctcaactactccagtttgaaaaatcccaacaagaatgatatcggcgccttatatga

SEQ ID NO: 101516 - DNA, 334 bp, Zea mays
cccacgcgtccgcccacgcgttcgcttcagacaccatcgacaacgtcaaggcgaagatgcaggacaaggagggcattcccccagaccagcagcggctcatctttgctggaaagcagcttgaggacgggcgcacgcttgccgactacaacatccagaaggagagcaccctccacttggtgctgcgcctcaagggaggcatgcagatcttcgtgaagaccctgaccggcaagactatcaccctcgaggtggagtcttcagacaccatcgacaatgtcaaggccaagatccaagacaaggaaggcatcccaccggaccagcagcgtttgatcttcgc

SEQ ID NO: 101517 - DNA, 412 bp, Zea mays
  unsure (1)..(412): unsure at all n locations
ctttccccgtgcttctccgccgtcgagtgccgcgtcccagtgcgaagagactgcgacgcagatggccagccgctgggtccggcccgaggtgtacccgctgttcgcggcgacgggcgtggccgtcggcatctgcgggtttcagctcttccggaacatcactggcaacccggaagtcagggtaaacaaggcagggagggcagctggtgtgcttgagaaccatgaggaggggagacgttacgccatgcatggcctaagaagctttgtgcacgacaagactcctgagatcatgcctgcagttaacaagttcttcactgaccctaagtgaagcatgttgattggcatactactactactactngctactggggattntacactttgctggcaactcaatatgttggggacattcatg

SEQ ID NO: 101518 - DNA, 386 bp, Zea mays
cgcggagttcaaggaggccttcagcctcttcgataaggatggcgacggctgcatcactgaccaaggagcttggaactgtgatgcgctcccttggccagaaccccactgaagcagagctgcaggacatgatcaacgaggttgatgctgatggcaatgggaccattgacttcccagagttcctgaacctgatggcaaggaagatgaaggacaccgactccgaggaggagcttaaggaggcctttcgcgtcttcgacaaggaccagaatggtttcatctcggctgctgagctccgccatgtcatgaccaacctcggcgagaagctgactgacgaggaggtcgacgagatgatccgtgaggccgatgttgactgcgacggccagatcaac

SEQ ID NO: 101519 - DNA, 376 bp, Zea mays
cccacgcgtccgggtgaaggtcatggggaaatcaaaggttctggtgaaggtacatcccgaaggcaaatatgtggtggatatagataagagcattgatatcactaagatcacaccttcaacaagagttgctcttcggaatgacagctatatgctccatctgatcctaccaagcaaagttgatccattggtcaatctcatgaaagttgagaaggttccggattctacctatgatatgattggaggccttgaccagcaaattaaagagatcaaagaggtcattgagcttccaatcaaacatccggaactgtttgagagccttggaattgcgcaaccaaagggtgtccttctttatggaccttcgggcacaagaaagaca

SEQ ID NO: 101520 - DNA, 403 bp, Zea mays
  unsure (1)..(403): unsure at all n locations
gagataccatcttgtccttcgcttccagatcctagtttttcaagagcgacacacttggatgttgttgctgttaagcttccctgtactcgtgtggcgggttggtcaagagatgttgcaaggctgcatctgcagttgtcagcagcaaaattagcagcagccacagcaagaggcaatagaggaatccatgtgctgtttgtgactgattgcttcccaattccaaacctcttctcttgcaaggacctagtgaaacgtgaaggcaatgcttggatgtacaaacctgacgtgaaggctctaaaggagaagctcangctgcctgttggttcctgtgagcttgctgttccactcaacgcanaagcacgactctacacggtagacagacgcagagaagcatatgctacaatac

SEQ ID NO: 101521 - DNA, 394 bp, Zea mays
cccacgcgtccggctcctcctcgtcgttacagatctggggacgaccaaggtggctgagactaggcactgcctgtcgcagagccacctgttcaagggcctgtgcatgagcagcaacaactgcgccaacgtgtgccagaccgagaactttcccggcggcgagtgtaaggcggaaggcgccacgcgcaagtgcttcttctagaatatatgctagtagtagcctcagctttgctggcacaagcacgtctttagcacgcaacgcaattcaagcatcatatcggtcctcctgccgcgttgctgtctactttgaccccgtattttttttctatcgatttctttgtttttctgttgctctcttattttcccccgaataatatgcttcatgggatctcactgt

SEQ ID NO: 101522 - DNA, 409 bp, Zea mays
cccacgcgtccgggcatcaagaagctgcaaatcatgatgaccattgtcgatgacctgggctctgttgacactctcatcgaggaccatctctgcgctgagccagtgagcgaatacgtccagagctgcgacattgtcgccttcaacaagatctaaatttccttgtgatggtggcaatggtggttggtgggcactgtaccagcctaatttataattttccatgagcatcttcaagagtttttctaaattatcatttggagtcatttacataaaaagcactttctatatctttttaatctcaacaacttttctatatcttggttgcaccctggagagctatttacgttttctatctttagctagcgagaaacctggatgggtggaatagaagataactatatttagacaatac

SEQ ID NO: 101523 - DNA, 448 bp, Zea mays
ctgatttgggatttttaggcctgtttgggacgcagaaattggaaaacacaggaacaggatgctctaacatcttgaatcctatggattgagaaaatcatttggagcacaggaaaaatacgccaattcgatgagaggctgacacgaaggaaactttccatgaggttcaatctcttcagtaaattcctccaaaattcctatgtaacaggccattacataggaattgcacgggatttgtcaaaacccaatcctttttccccaaggggttattcctatagggtttcaatcctctactggggtttggatactacatggggaatcgattggtttcctgccctggaatcagtttcgttaccggcaaattttgtgttctcgctctgaccagccgcgaaggccaataacatcttccaacaaggatctactcaacagtaccgcgagctgtttggtgagg

SEQ ID NO: 101524 - DNA, 406 bp, Zea mays
atcgatgacagcgtggccatcctgatggcattccagatgccgggcgtccaggtcctagggctcaccaccatcttcggaaactgcaccacagagcatgccacacgcaacgccttgatcctgtgcgagaaggcaagccatctagaggtcccagtagctgagggcagccatgagcctctcaagggaggaaagccgcacgttgctgacttcgttcatggacctgatggcctcgggaacgtagatcttcctgatcccactatcaagaaagtggaggaaagtgctaccgacttcttggttgataaggtctcgcgatttcctggagaggtctctgtgctcgccttgggtcctctgacaaacatagcattggccatcaagaaggatccctcattcgtgaaaaacgttaagaaga

SEQ ID NO: 101525 - DNA, 428 bp, Zea mays
  unsure (1)..(428): unsure at all n locations
cccacgcgtccgcccacgcgtccgcccacgcgtccgcccacgcgtccgagcagcggggagctccaatccgcccggccgcctccgcctgttgccactagctaggtgatcgatcgaatggactgcggtggcgcgctgcagctcccgcctgggttccgcttccaccccaccgatgacgagctggtgatgtactatctcctccgcaagtgcggcggcctgccgctcgccgcgccggtcatcgccgaggtggatctctacaagttcgacccatggcagctcccagagaaggcgttcggtggggagaaggagtggtacttcttctcgccgcgcgaccgcaagtacccgaatggctccaggcctaaccgggcggccgggacagggtactgggaggccaccggcgccgacaagccggtagggtcgccgngccccgt

SEQ ID NO: 101526 - DNA, 428 bp, Zea mays
tgctctttctgcatgtgttgctaacgcgacaattttccctcaatgctcacaagctcctgtagcttgccttcttcccccataccttccatcaatgatagcttcagtatgtgaaaacccagctcttcagccctataggctccaacaagcaatcgcagcaagcaacatacctttatcacccttgttgtttcaacaatcgccagccctatctttggtgcagtcattggtacaaaccatcagggcacagcagctgcagcaactcgtgctacctgtgatcaaccaagtagctctggcaaacctttctccctactctcagcaacaacaatttcttccattcaaccaactgtctacactgaaccctgctgcttatttgcagcaacaactattaccattcagccagctagctactgcctactctcagcaacaacaac

SEQ ID NO: 101527 - DNA, 444 bp, Zea mays
  unsure (1)..(444): unsure at all n locations
gcggcaatgacgaccgccgcgagggagaggcgcctgccgccgacgctgcccctggccgcgctggtcggtcgcgagctccgtgcggggggctccgagcgcccggccctgcgctacggccacgccggcttcgccaagcgcggcgaggactacttcctcgtcaagcccgactgcgtccgcgtccccggggaccccgcatcggcgttctcagttttcgccgtgttcgacggccacaacggcgtgtcggcggcggtctatagcaaagagcatctgctcgagcacgtcatgagcgcgctgccgncggacatcgggcgcgacgactggctgcaggcgctgccgcgcgctctcgtcgccggctttgtcaaggccgacattgatttccagcgcaagggggatgtgtcatgaaccacggcgacactggtgggcatcgatgggttcacggtcaca

SEQ ID NO: 101528 - DNA, 416 bp, Zea mays
  unsure (1)..(416): unsure at all n locations
gcgggattaactcggaaattagttggtagcggatccagacctccccctttatatagatgaagggctacggccgattaaagcccccaacaatcgaacaaatcaagtctattactcatttttaccttatgcattaggagtagttctagtctagttctagtttagccctagtttagtattccaatccccaaattctccgcctctcctcgactctacgtcgattagaggagtctaggtcggcctgcccgagcctagacaactcctaggatctctcctccccgacggggtccctcccgggagtgagatccaggcgccgtcggcgatctaccgtcgcccctgcgcacgcgcggaccgtccggccctaatgcgcggaccgtncggccgtcaggcatggaacccgagcttctgcacccagtcgc

SEQ ID NO: 101529 - DNA, 363 bp, Zea mays
  unsure (1)..(363): unsure at all n locations
caagctcctcctcgcgattccaatccacgcacgcctgctccgcttccgcctcgctcaggcttatagtcagtgatggaacacaaggaggcgggctgccagcagccggagggcccaatcctatgcatcaataactgcggcttcttcggcagtgctgcgacgatgaacatgtgctccaagtgccacaaggagatgataacgaagcaggagcaggcccagctggctgcctnctccatcgatagcattgtcaatggcggtgacggcgggaaaggacctgtaattgctgcatctgtaaatgtggcagttcctcaagttgagcagaagactattgttgtgcagcccatgcttgtagctgaaaccagcgag

SEQ ID NO: 101530 - DNA, 382 bp, Zea mays
  unsure (1)..(382): unsure at all n locations
aaactgtctgaacaagtaggtggatcgaagcaactgggactgcgggccacacatacataatatagagtactacagtacagtatatatatagatcgatactgcatgctgctcctggcaatacagcggctttattttatttcttccctggcttcatcactcgtgcagcgcgcgggacgtacgtgtacgttcggtaggcttattagcttggtcgtcgtaacttagctgatcttgttgcagtcggtggacatgctgatggggaatccgacggagacgccgcacttgccggggatggtggcgacggtgcccatgttgacgctcttgacgctgttggcgaggctcttgaggcagcggcacgccgnctggcggtccgcgctggtccgcg

SEQ ID NO: 101531 - DNA, 424 bp, Zea mays
ggaggaagcggatgccatggaggagaatgcgggagtgcttgatgagtaagacggactgctgatgtggatttgcttctgagttgtttattttatatcgtcgcaatttcgtggttgtcgtttggttattctgtgaagcatccaagccaggctattgttatgaaaatttgtcgtctgtaagcatgtgaacttccgatgttgccacatgctggatcagtctgaataagtaagtatgcagctctaggtggtcagctgcgtctaccacaatgagcatgaacgtatggagaaatatctgtgaacccattatggctatgaattacattttgccttttcgaaataagaatactggcggcgtctgttcaagatatggtttgagcctgtgctttctatttttctgaagaccggtctacttgacgctaaattcgca

SEQ ID NO: 101532 - DNA, 428 bp, Zea mays
  unsure (1)..(428): unsure at all n locations
ggaattcccgggtcgtacccacgcagtccgagcttaccagatactcaaggattaatgatctctatcaactctcttggnnaggggcccaagtgacagggagactgtagtcttgagattcaaggccaatgcagatgcctgcactcactaaaggcgaacttaaataggatactcttgcatactcacaactgggcagcctcctggataagaaatcaacgtagatacctgactcgtgactaccttcatgagncgcgaaagaagcaaaggagtatggccttattgatggagtaatcatgaatcccctcaaggcccttcaaccacttccagcttccagttagtcatgaagtgtgctagaactccgtcaaacatttttgttgtatcaatgtgtctgttggaaaccctggctacgtaatattctacgtncaaatgca

SEQ ID NO: 101533 - DNA, 431 bp, Zea mays
  unsure (1)..(431): unsure at all n locations
gccaaattctgtgcaaaatatctacacagagaagttctccataccgaagcctatgcggctggtgacctgggtgctgctgtccacagagcttacttaagaatggatgaaatgatgcggggtcaaagaggatggcgggaactccaagcacttggagataagataaatcagttcactggcataatagaaggcttgatttggtcccctaaagcaagtgattcaaatgatagacatgatgattgggctttcgaggagggaccacactctgactntactgggccaaattgtgggagtacagcatgtgtagcattagtcagaaataggcaactcgttgtggcaaatgctggtgactcccgctgcgtcatctcaaggaatggccaggcatacanattgtcaagagaccataaaccagagcttgatgcataaagagaaag

SEQ ID NO: 101534 - DNA, 439 bp, Zea mays
cgaagaattccctcccctagccgccgtcgccgccgctcgtctccctgagaggtgcctgtaccgatgaactggccgagtactaggtagagaatcggtttttcttgtctcagcccggggtctgctgcgtctggtggtggtgaaggggagaaattcgtgagatctgttccggatcaggcgtgcgagctcgggaatcaggggtttcacacatagcttcgtcgatttgaatttgatgtactaatggagtctaagggtggcaaaaagtctagcagtagtcgttctatgatgtatgaagctccccttggctacagcattgaggacgttcgacctgccggaggcgtgaagaagttccagtctgctgcttactccaactgcgcgaagaagccatcctgatttcccttttgctttctcattctagtagtttaggatttcttttctgaca

SEQ ID NO: 101535 - DNA, 444 bp, Zea mays
cgcacgcgtccgctaatggttcagcatcaagttagtgcaagatttggtaaatgcctgggtgaacttagcggaaacaatgccatcattgttatggatgatgcagatatccagctagctgtgcgatctgtcttgttcgctgctgttggtacagcaggacaacgctgcactacatgtcgtaggctgattcttcatgagaacatatatcaaaccttccttgatcagcttgttgaggtatacaaacaagtccgaattggggatccgttggagaaaggcaccttactgggaccactgcacactcctgcttcaaaagagaactttttgaaaggcattcagactatcaaatctcagggagggaaaatcctttttggaggatctgccattgaatcagaaggaaactttgtgcaaccaacaattgtggaaattacaccttctgcaccagttgtg

SEQ ID NO: 101536 - DNA, 364 bp, Zea mays
ccaacttccgcaagcagctcactgtgcagctgatgaagctcgctgccgccggcaagctgacgagtgtgaagaactccttcaagctgccggccaccgacgccaagcccaaggccgccaagcccaaggcacccaaggccgcgcccaagcccaagccctcgccgaaggcgaaggccaagaccgctgcgaagcccaaggcggcgtcgcccaaacccaaggccaaggccaaggccaagcctgtcgctcctgccgccgcgtcgcccaagccccgcgggcgccctcccaaggtcgtcaagaccttcgccaaggccttccccgtcaaggcagccaagaaagcggctgctcctgccaagaaaggaaaggcagc

SEQ ID NO: 101537 - DNA, 363 bp, Zea mays
gtccagttgatgcagcttacaaggctattgacctaataatccagatcccaactgttctccgagaatatggtatgacctcagtcaccgaaggcatcgacgcaatcgcaacaacccgggtggttgtcaccggagatgtgaccaacaacttcaaacatgccttgactggccgcgctttcaaccgctccttcagcgggagcggtgcatcaatggacatcgtcgtctccagtgtcagagcttacctgaatgccctgaacaagatgtgtagctttgctggtgccgcgaaagccagcggcgaggtacctgagagtgcaagcgtccaaagcgcagagtgagcttggcgaccatttgtttctcatgtggact

SEQ ID NO: 101538 - DNA, 400 bp, Zea mays
  unsure (1)..(400): unsure at all n locations
ctttggccacagtataactatgggggctggccatcatgctgcagaccaaccagattcgacatatataagatcttaatgttgatgccgatactcgagaagtattggccgtccttgtactgtggttcttcttcaacctgctttggtggaagggggccattttgggtgcatgagtgggaaactcatgggacctgtgcttaccctgaaatacaggatgaatatgactacttctccacagcactgtatctctacagcaaatacaatgttacgaaagctctgagaaaagcacgtatccggcctacaagcggcagaaaatacgccgttggccatattgttgccgtcattgaatatgcgtntggtgcaatgccgtcactcgtctgtaagaacggctcagttcaagaac

SEQ ID NO: 101539 - DNA, 430 bp, Zea mays
cccacgcgtccgtgcaaattaaattgatctgtacctgttggtcttcctcctcgctctggttggttctcgctggttgccgggagctgggatcgaaagtactgctgttgttcgcacggcgaggcggcggcggagaccggtcagaaggaatgtcttcggcccaaatcgcgccggcagatcatgtgtgctatgtgcactgcagcttctgcaacacagttctcgcggtgagtgtcccggggaatagcatgctcaacatcgtgacagttcggtgtggacactgcgcaaatctactgtcagtgaacctgagagcactgatgcactcactcccagaacaagatcatcagctccaggagaacatcaaggtccatggcatcaacggcactttgcacgatgatcatcagtactgcggccatttggatcagctcggctcttc

SEQ ID NO: 101540 - DNA, 298 bp, Zea mays
cgaattcccggtcgcccacgcgtccggtgctttgaagcattgcttctaccatctactttaaggatgagctttatctgaacgtattggtcgaatatgtgccctagacagttcatccagtcgtgaagcatcacaacaagatgaaccaacgcatgccacttatttatgtgaagctgtatatgtaccatatatgtatggcatttgcttacattcatggcactattgctgactgccacagagatattaagccacaaaaccttttggtgaacccacacatctaccagcttaaactatgtgactt

SEQ ID NO: 101541 - DNA, 452 bp, Zea mays
gctggcttgggcccagggcggctgcatgggaagggttgtagtctgttggccttctagccttgggcggtgccccttcgaacataatgccatccagggccattgcattgcttgcttcctcaacagatctcatctccacaaaagcaaatttcttgtcatgatttatgtatacattgagaacagcatcacctggaccagcagtgtttcccccaatagcagccatgacttgattaaagtaaattgccactgtctgttcgttagcagatggaggaaggccaccgacataaacacgccgagcatgacgagtagcctgttgagtcattgcttgtggctggatgacaaggggattgaactgcccagcaacaccgaaagggagcatgtttggaaacatgccaccaatgttgtgaagcgaagagcctggttactgacctgcagggcatcaataaatttctagt

SEQ ID NO: 101542 - DNA, 415 bp, Zea mays
cagaccttcaaccgctacatttccgttactaccggagccgccactcccacgaacgcgggcggtttaacggaagcgaaccagttatctagtggagttgcctccttcaagctactctaatgtcctttctattcaagtctagcaatggcggcaccactgaaaaaatcccatccccagaagaacagcgagaaaaaataaatgaattacgcaaggagcttggtgaacactcatcagcagccattaaagacttcctttcagatgcctcgttagcgagatttcttcgagcaaggaactggaatgtgcagaaagctagtaaaatgatgaaagcagctgtgaagtggctgcttgcattcaaacctgaaaacatctgttgggatgatattgcagaggaagcagagactggaaagatttatagagc

SEQ ID NO: 101543 - DNA, 414 bp, Zea mays
gagaaattgcaagatttagctcaactttagttaccggattgaataacaacgaataccagataaccaggggaaaggagctcaaccgtttagcaggaattagtggaacatgtgattttgtcaaggcggacttcatgaagatgccgttcgatgacaacacttttgatgctgtttacgccattgaggcaacatgtcatgcacctgatccagttggttgctacaaggagatatatcgtgtgttgaagcctggccagtgctttgccgtgtacgagtggtgcattacggatcactatgatcctaacaatgcaacccacaaaaggatcaaggatgaaattgagcttggcaatggcctgccagatatcagaagcactcgggaatgtcttcaggcagtaaaagacgccgggtttgaggttgttt

SEQ ID NO: 101544 - DNA, 254 bp, Zea mays
accggcccggaattccgggtcgcccacgcgtcgccacgcgtcgtcctcggccatcgcttctcagctaactgggagcactgggggaggacatcgagccggctcgctgaccccggcgtgaccgacccgtcggtgcgcgaggcggcgcggatcctccgcctgaccccgggtcgcggctggtccgctcgagtgctccgggggcgactggcggcatcgcacccgcatttggccaacaccaagtcctggcgtatcgtacc

SEQ ID NO: 101545 - DNA, 440 bp, Zea mays
ctgaaaccgctccacgccctcccccttcgcgcatagccagccaagccaaccagccaggcagaagaggaaccggggagcggcagctgcagcggccgagggcggagcacgcgaggcatggatagataccaaagggtagagaagcctcggaatgacacgccaatcagccagaatgagatcagaatcactactcaggggaggatgaggaactatatcagctatgggatgtcgctgcttgaggaaaatggacatgatgagattagtatcaaggccatgggacgggccataaataagacagttatggttgttgaattgatcaagagaagggttggaggtcttcatcagaacactgctactgaatctgttgatatcacagacacatggggaacctttggaagaagggccttttcccactagagacaactcgccatgtgtcgatgatc

SEQ ID NO: 101546 - DNA, 368 bp, Zea mays
gttaacgaacttttggagaaatgccacccatttttcatgtttgacagcattgcatcacttgcgagtgctcaaaacatgcgtgagctctatagattggttctagtcgatacaccactggccccttacttctcagagtgcattacatctgaggatttggatgacatgaatattgagattatgaggaacactctctacaaagcatatcttgaggacttctacaaattttgccagaaactaggtggtgcaacagctgatatcatgtgtgatctcctttcatttgaagctgacagaagaactgttaacattacaataaatagtattggtactgacttgacaagagatgaccgcttgaagctgtactccaactt

SEQ ID NO: 101547 - DNA, 421 bp, Zea mays
cccacgcgtccgcgggaagcctttccttcgctccgcttcctacctcaaggaggccctgctcctcgcgctcaccgacggccaccaaggctccactcacctatcctcccctctcgacgtcgccctcaagctcggtgcatacaagtccttctccgacctctcgcctgtgctccagttcgccaatttcacggccactcaggcgctcctcgacgagatcgcctcaacaacttcatcttgtatccacattattgatttcgaccttggtgttggcggccagtgggcttccttcttgcaggagtttgcacaccgccgtggaactgggaacgcccccctgccaatgttgaagctcacagccttcgtctcaagtgcttcccaccatccccttgagctgcatcttactcgggagaacctcacgcaatttgct

SEQ ID NO: 101548 - DNA, 414 bp, Zea mays
  unsure (1)..(414): unsure at all n locations
cccacgcgtccgaaaggccaaagcggtacgggagccacagagatagctagcaagaagccacagatggcggcgatagcggcggccacccaggcggcggcgacggtgctactgctcgcggcgctggtgctggcggcgggaccgggcggggcgcgggcgcagtcggcgtcgccgtcgagccagtgcacgtcggcgctggtgagcctgtcgccgtgcctcagctacatctccgggaacgtgtcggcggcgccgccgtcgtgctgcgcgcagctgggcaaggtggtgcagtcggacccgcagtgcctgtgcgtggcgctcagcgcggacccggcgtcgctgggcctcaccgtcaaccgcacccgcgcgctgggcctncccgacgcatgcaaggtcacgacgcccgacgtcagcagctgc

SEQ ID NO: 101549 - DNA, 422 bp, Zea mays
gtgcaagcagcggagtgggcgttattttctgatcaaataattttgcctatggcacattgtgtggagactttgacggatctttgcctgcttttctatgcgatgtaagctgctgaaacctgcactcatcaaatgttgtgtatgcagatggtaccatgcatttgtttccctgaatggcttcaaatgaaatgaatgttttttttaaaaatataaactgaactatgtggaagtacacatatcacaaacacaagagatgctaaagcatttgcactcttatctgacgagggtattgcaaaaggagttaggaggataacagtcgtgactgctggatgtgccacccaggctatggagttggcataatctatcgattctgatatcaataaagcatcttagttggagggagctttgtttgaaaagaaaattgc

SEQ ID NO: 101550 - DNA, 422 bp, Zea mays
tccagatggaactcaggacattgtaaatcagctgcagcaagtatatggtgaagatttggttttagtgcgagctaggccaaggaagctagggcttggtaccgcatatttacatggactaaagcatgccttaggggaatttgtcattatcatggacgcggacctatctcaccatctacaatactagccaagcttgattaggaaccataaggaaactggagctgacattgttactggcacacgttatgacaagaatggtggtgtccatggttggaatgttatgctcaagctgactcgcagaagtccaaatgttcttgcacaaacgttactgcagcctggagcttcagatttaaccggatcatttaggctatataagcgagatgtcctggaagacttaatctcctcatgtgtcagcaagggctacg

SEQ ID NO: 101551 - DNA, 423 bp, Zea mays
aaatgggagttctcacaggcgaatattaagaatgtcaatgagattctgtctcactatccaagggactacaagcaatctggtattattccgctgcttgatcttgcacagcagcagcatggtggatgggtgccagttgcagcaatggatgctattgctaaaatcgtcgaagttgcaccaatcatggtttatgaagttgcaaccttttataccatgtttaacaagactaaggttggtaaataccaccttctggtgtgtggaactacaccttgtatgattcgtggttcacgtgaaatcgaagagacgacgttggagcaccttggagttaaacgaaatgaggtgaccagtgatggtttatcttctgttggagaaatggaatgcatgggtagctgtgtgaatgctcctatgattgctgaggcttactac

SEQ ID NO: 101552 - DNA, 445 bp, Zea mays
cggacgcgtggggccgcggcggggatctccgccgtcatcccgggatggttctccgagatcagccccatgtggcccggtgaggcgcactctttgaaggtggacaaggtgctgttccaagggaagtcagactaccaaagcgttatggtctttcagtcctctacgtacgggaaggtgctcgtcctcgatggagttattcaggtgacggagagggatgagtgtgcgtaccaagagatgatcactcacctgcccctttgctccatcaaagaccccaagaaggtgttggttattggagggggtgacggtggtgttctgcgtgaggtttcacggcattcctctgtggaacaaattgacatctgtgaaattgacaagatggtggtagatgtctccaaacaatttttccctcatttaagctgtggatttgaagaccctcgtgtgtcattacaca

SEQ ID NO: 101553 - DNA, 425 bp, Zea mays
ctgacaagtcccgcttcaccgctaagtgtgctgcctagagctgcccgtggcgcatacgtgcagcaaggctccccggtgtgcccaccttctccattagaaccatacatgacaaccacagctgtgtcgggatcaaccatcttggccatcagcaggcatctgttcagtgggttgcgaacactgtcgaagagaggctacgtgagaacccagaatacaagcctaaggaaattttggaagaaattcacaaggcccatggcatcaccctatactacaagcaagcttggagaggtaaggagcggatcatggctgcggttcgagggtcttttgaggaaggataccgtctcctgcctgagtactgtaggcaggtggaaagaacaaatgcaggaagtatagctcgagtgtatggaaacccagatgacaattgcttt

SEQ ID NO: 101554 - DNA, 401 bp, Zea mays
ccaaaatccaaatcaccacatcccgccattaatttaaggggtttttatgtccaccgcggccgccagcgccaactaaacccgcgacgacggtcgaccatggcgtcctcgctgctctcctcccccgctaaacccaccatcaccaccaccaccaaaacgaccccggccccaagacccgcccgctccgcccatgtccatgtcctctccgccgtccgctgcctccgcctccgcctccgcgcgtcgtcgcagcatcctccgccttcgcccaccccgcggtcgcggcggccggattacgtcccgaaccgcatcgacgaccccaactacgtgcgcatcttcgacaccacgctgcgcgacggggagcagtcgccgggcgccaccatgacgagcgctcagaagctcgtcgt

SEQ ID NO: 101555 - DNA, 347 bp, Zea mays
cccacgcgtccgcccacgcgtccgcgtacggcggcatcaagtgcgccatggagacgcagcccatgagcaacaaccggacggggcgactggacatcggcacggattggcgcctgcacggcgtggcgcgcggggtgctggcgcgctacctacgccgcgtgccggtgcacttcgtcgacatcacggggctgtcggagctgcgcaaggacgcgcacaccttcgtgcacacgctgcggcaggggaagctgctcacaccggagcagcaggccgaccccaagacctacgccgactgcatccactggtgcctaccgggactccccgacacctggaaccactttctctacgcgcac

SEQ ID NO: 101556 - DNA, 338 bp, Zea mays
cacactcttgcaccgagctagcagccatagatgtgtgaccaaacacctggctctttgcgctccttgttctctttagcataggcatgggcatggccaccgctgctgcaaaccgcaaactgggttatggccccgggggaggaggtggcggtggtggtagcggtggcggtggaggcggtggttacggaggaccaggctatgggtccggatcagggtatggtgagggcggcggcagcggaggtgctgctggagggtatggacatggtggtggcggacgcctcggtcttggtgagggtgcgggagctggtggctctgggtatgggtccgggcaaggatctggc

SEQ ID NO: 101557 - DNA, 374 bp, Zea mays
cccacgcgtccgcgagaatgttgcttttaagaaagaggaagaggaatttaggacagggcctctgtcagtactaatgatgagtgttaagaacaacacccaggttctcatcaattgccgcaacaacaagaagctgcttggccgggttcgtgcttttgatcgccactgtaacatggtgctcgagaacgtgcgggagatgtggacagaggtccccaagactggcaagggcaaaaagaaggctctgcctgtgaacaaggatagattcatcagcaagatgttcctcacgggcgactcggtcatcatcgcgctgaggaaccccaagtgacagcccaaccggaagccatgtctatgttgaaaactgtagcttatgatgtatg

SEQ ID NO: 101558 - DNA, 399 bp, Zea mays
  unsure (1)..(399): unsure at all n locations
cccacgcgtccgcgtgtacacggtgtacgtgcggacggggtccatctggaagggcgggacggactcgaccatcggcgtgacgctgctgggccccgacggcacgggcatccggatccgggacctggcggggtggggcggcctcatgggcgccggccacgactactacgagcgcggcaacctggacatcttcagcggccggggcccctgcatgagccaggcgccctgcgccatgaacctcacctccgacggcaccggcgcgcaccacggctggtactgcaactacctcgaggccacggtcacggggccccacctcgggtgcgcgcagcagctcttcaccgtcgagcagtggctcgccaccgacgcgtcggcctaccgnctgtacgcggtcgtcgacaagtg

SEQ ID NO: 101559 - DNA, 427 bp, Zea mays
gaggaactccgcaaggttaatgttgactcgccggttcttgactacaaggatacagttgacgagtgtgcaaccctggacgtattcctaaaaacaccacaggcgcaggcctgtgccgaggacattgccatatggatgaagaaatatatatccctcagagggcatgagttctcatattagttgtagcaaaaaccatgcattgtgaaataggccctttgcagggaagcgtcaatgtgttcttttcaactggtggaaagaaggatgttggattgcagtcgggtaaaccagctagcttaatgctgagtactgagtcctttaggccctgttcggtttcaccggaatagaccaagatttattccagctcatcaaaatctatataaattagagaagtaatccggctaggaatcaatccgaggctcaaatccataac

SEQ ID NO: 101560 - DNA, 428 bp, Zea mays
  unsure (1)..(428): unsure at all n locations
cctacgcccgtttctctctcgtcgcgcatcatcagagcacaagcgaggaacccagtcgagtcccgggaatggagtgcgtattgggcgtggttggccgcgacttcgcgctggtggcggccgacacctccgccgtgcagagtattctcgtccacaagaccgacgaggacaaggtgatggtgctcgactcgcaaaagctgatgggcgcttcaggggagcctggtgatcgggtgcaatttacggagttcatacagaagaaccttcacctgtaccagttccggaacaccatcccgctctcaaccgccgccgncgccaacttcacacgcggcgaactcgccacagcccttcgcaagaatccatatatggtcaatattattcttggtggttatgataaggatgttggtgctttcctctactacatcgactacatt

SEQ ID NO: 101561 - DNA, 409 bp, Zea mays
cgcacgcgtccgcccacgcgtccgcccacgcgtccgcccacgcgtccgcggacgcgtgggggctggatccatactagctacctgaaggatctgtggccagactcgcggtacacttacaggcttggccacaggctaatgaatgggacccgcgtctggagcaaatcatacagcttcagagcatcaccttaccctggacaagattctttgcagcgagttgtcatatttggagacatgggaaaggcagaggcagatggttcaaatgagttcaacaacttccagccaggttcactgaatactacgtaccagatcacgagtgacatagaaaacatcgacatggtggtccacatcggggacatctgctacgcgaacggctacttgtctcagtgggatcagttcactgcacagatcg

SEQ ID NO: 101562 - DNA, 268 bp, Zea mays
ttctgcacacacgatgcgatacgcaacgccatcacacttcatgagggacgaggagatgcacagccgcatcatcggcatgaacgaggccgagctccacggccgccgcatgagcgtcaacgaggcctactgccgtggccgtcgaggcggcggctacggcgggtacggtcgccgtcatggcggcggcggctacggcggtggcgggcgctacgatggcggcggcggctacggcggtggcggcggctactacggcggtggcaactacggcggt

SEQ ID NO: 101563 - DNA, 413 bp, Zea mays
cgcaaattgcaccaagaaatccatcgagaggccgtcgacaggggaattaatggcgtcggcgtctagcagcagccaccgccgcctcatcctcgcagccgccgtcctgctctccgtgctcgcggctgccagcgccagcgccgggacctcctgcgtgccggggtgggccatcccgcacaacccgctcccgagctgccgctggtacgtgaccagccggacctgcggcatcgggccgcgcctcccgtggccggagctgaagaggagatgctgccgggagctggcggacatcccggcgtactgccggtgcacggcgctgagcatcctcatggacggcgcgatcccgccgggcccggacgcgcagctggagggccgcctagaggacctgccgggctgcccgcgggaggtgcagaggggat

SEQ ID NO: 101564 - DNA, 428 bp, Zea mays
ccacgcgtccggtgcaaacttggcttgaatgatagggttcttttggaggctcaaggcagagcggctaagggcaaagcgatagacctcgatgatatcaaatttcatcagtgtgtacgtttggctagatttgagaatgatagaactatatcgttcatacctcctgatggatcttttgatctaatgacatacaggcttagcactcaggtaaaacctcttatctgggtcgaagcacagattgagaaacattctagaagccgtatagaactcatggtgaatgcaaggagtcagtttaaagaaagaagcacagcaacgaatgttgaaatttgaatgcctgttccttcagatgccacaaacccaaatataagaacttcaatggggtctgctgcatatgctcctgagagagatgcaatggtttggaaaaataaatc

SEQ ID NO: 101565 - DNA, 424 bp, Zea mays
  unsure (1)..(424): unsure at all n locations
tgctcctccccatccgcctccgccgtcccggtcttccaccccaagaactcctcctcctgccgcctcgtgggctgccgcaacccctcctgccagtgggtccactctgccgcgaacctcgccaccaagtgccgccgcgccccctgctcccccggcgccgccaactgccccgccgccgccagcaacgtctgcccgccctacgccgtggtctacggctccggctccacagccggtctgctcatcgccgacaccctgcgcgcgccgggccgcgccgtccccggcttcgtcctcggatgcagcctcgtgtccgtgcaccagccgccgtcgggcctcgcgggctttggccgcggcgcgccgtccgtgcccgcgcagctcggcctnccgaagttctcctactgcctcctgtcccgccgcttcgacgacaacg

SEQ ID NO: 101566 - DNA, 426 bp, Zea mays
ctggggtgctacccatcggctgctaccgtatctacctcaccgactacagcagctgcaggagcgccgactacgacgcgctcggctgcctgaagaagttcaacgacctctccaccaaccacaacgcccaatcgcacgcccagatcttcgacctccaagccaagtacaagtcggcgcgcatcatgtacgccgacttctactccgccgtctacgacatggtcaataacccatgcagctacaggttcagctcggtgttacaggcgtgctgcggctcggggggcggcaagtacaactaccagaacagcgcgcggagcggcatgtctggcgcgtacgcgtgctccagcccggcgtcgcacctgagctgggacggcattcacctcaccgaggccgtctacaagcagatcaccgacggctggctcaacgggccct

SEQ ID NO: 101567 - DNA, 418 bp, Zea mays
  unsure (1)..(418): unsure at all n locations
cggacgcgtggggcctccggtgccggtggcctctatgccgtcaccggacgtgaacgggtacacgtggttcgcgtactacggccgccgcttcctggaaaccagaggcatcatcgctaacacggcagccgagctggagccaggcgttcttgcgtccatcgccggcggcaggtgcacgcctggcgggcgtgctccaacggtgtacccaatcggcccggtgctctcgccgaagccgcgcgtcgtcgtcgatgctcggtcgtcgtcgtctgcgcaagagtgcatccggtggctcgacgcgcagccgccggcgtccgtcgtgttcctctgcttcgggagcatggggtggatgaacgcggagcaggcgcgcgaggtggccgncggcctcgagcgcagcgggcacaggttcctgtgggtgctgcgc

SEQ ID NO: 101568 - DNA, 345 bp, Zea mays
  unsure (1)..(345): unsure at all n locations
caccaacccagctcgctcgtcccagctgatcaggtcgagcacctagtagcgacctgctggatcatcagtgtagagtgtcggtaggtgtctgtctctcttggtggctggttgcaacggtcatggcgacgtcgtctcgtcgggtgcccttgctgctgctgtgcctgggcgtgctggtgtcctgctccttcgcggcgggcagcttggaccaggagctggacatcacgtggggcgacgggcggggcaaggtccttgacaacgggcggctgctgacgctgtcgctggaccgcacgtncggctccgggttccagtcccggcacgagtacctgttcggcaagatcgacatgc

SEQ ID NO: 101569 - DNA, 412 bp, Zea mays
atcgagttcatagtgaaccagcaaataaaggacgagctgggtgtgtatgcacttgaaagaaaactagaggatgcgaagcgcataaatggtcttcgtgctgtgtttggtgaaatctaccctgatccagtaagagttgtatcagttggtcgcaaagttgaagatctgcttgcagatcctgatagcaaagagtggctatccatatcgactgaactatgtggaggtacacatatcacaaacacaagagatgctaaagcatttgcactcttatctgaagaaggtattgcaaaaagagttaggaagataacagccgtgactgctggatgtgccacccaggctatggagttggcgtcatctatcgattctgatatcaataaagcatctcagttggaaggagctttgttggaaaagaaaa

SEQ ID NO: 101570 - DNA, 435 bp, Zea mays
acgcgtgcgtccagatggaactcaggacattgtaaatcagctgtagcaagtatatggtgaagatttggttttagtgcgagctaggccaaggaagctagggcttggtaccgcatatttacatggactaaagcatgcctcaggggaatttgtcattatcatggacgcggacctatctcaccatccaaaatacttgccaagctttattaggaagcaaaaggaaactggagctgacattgtaactggcacacgttatgttaagaatggtggtgtccatggttggaatctcatgcgcaagctgactagcagaggtgcaaatgttcttgcacaaacgttactgcagcctggagcttcagatttaaccggatcatttaggctatataagcgagatgtcctggaagacttaatctcctcatgtgtcagcaagggctacgtgtt

SEQ ID NO: 101571 - DNA, 396 bp, Zea mays
aggtccccgtcgcctccgctcaactgccgccgcagggcccgctgcaggcttgcatgtggggtagggcccggtgtaccctcagcccggccgaggttgccagggccttcggcttccccaccacctccgccaacgcgggcggcggtggagacggccccgctgtgccgacgctccatcttaaccgtttccggccgtcgtacaatgtgttgcctggggcgtacctgcctgtgggcgccatgcgggcactaccaggttgcgcccacggaggaggaggttcggatggggaggggccggtgatccagtgcatgaagtgggggctggtgcccagcttcaccggcaaggccgagaaacccgactatttcaggatgttcaatgccagatcagagtccgtaaaagaaa

SEQ ID NO: 101572 - DNA, 194 bp, Zea mays
gaggccacatcttcaagacaccatctaaaaatgtctcatttattccaaagtttcttgatgaccgtgaatttttggaggtggagactccgatgatgaacatgattgcttgtggagcaacttcaaggcctcttgttacacattacaatgaatttaacattcggctttttatgcgcattgctccttaattatatctt

SEQ ID NO: 101573 - DNA, 428 bp, Zea mays
  unsure (1)..(428): unsure at all n locations
cccacgcgtccgcccacgcgtccgcccacgcgtccgcacaaacccatcgcagggcatgctcnagcatagcttctctgcctctctctcccctcctctcctctcgtccactcctttgtccaaagcttcgagatggctcagcagcagaaggtggtggtcagggttccaaccatgacagatgacaagatcaagcagaaggccatcgaagctgttgcggacatttacggtattgactccatagcagcggatctgaaagagaacaagatgaccatcataggcgagatggatgcagtagcgattgccaagaagttaaagaagattggaaagattgacattgtgtctgttggacctgcaaaagaagaaaagaaggaagaaaagaaagaagagaaaaaagaggaaaagaaagaagagaagaaagaggagaagaaaga

SEQ ID NO: 101574 - DNA, 375 bp, Zea mays
  unsure (1)..(375): unsure at all n locations
gggaagggggtctgggttgcgtacaggcgaaaggcacgcgccgccgctgccgcgcgagcctctccgtccccatcgccgcgcagatggatccgtcgtcggagcccctgtacgcgcaggtcgagccgtacgactccgggttcctcaaggtctccgatgtccacaccatctactacgagcagtccgggaacccgcagggccatgcggcggtgtttctccacggcggtcccggagccggcacgtcgcccggcaacaggaggttctttgacccgcagttctacaggatcgttctgtttgaccagaggggtgcangcagaagcactccccatgcttgtttagagcagaacactacttgggacttggtagctgacattgaga

SEQ ID NO: 101575 - DNA, 248 bp, Zea mays
cccacgcgtccgacccgcggcagcatgctgctccaccctgcgtgcgcaggaggcatggttgtgcgtgtacgccaaagaccccaagtttgcaaaatacatcaacaaccccaacaccgccaaaacctttacctcgtgcggcatagccatccccaaatgctaagcaagcgctctgcgtcgtcgcttcgcttgctcttgctcttgtgtgtaacatatccagcttatgaataaattatgtggatcagttaatt

SEQ ID NO: 101576 - DNA, 414 bp, Zea mays
cagaagtaaatgaatctggaagtgttttggctgttgatgcactctcgcaagttaaacgtgggctgcttccagtccttgatcgcaacccttacctttctgaaggcacaagacaggctgcagcaacaaccgcttccctcgcaaagaagtatggagcagatattactgtagttgttattgacgataaaccaaaggagtctgtcccagagcatgatactcaaatgtcaagcattagatggcatctctcagaaggcggattttcggagtttagattgatggagcgtcttggggaagggcagaaaccaacagttatcatcggggaagttgctgatgagtgggacttagacctggttgtgctaagcatggaggcaatccactccaagcatgtcgatgggaatttgctcgctgaattcatcc

SEQ ID NO: 101577 - DNA, 417 bp, Zea mays
gcagcacatcaagaacctcctcagtccatccaccccgttcttcttcaacaccctggacgacccctaccgtgagggtgctgactttgtgcgtggataccccttcagcctcagggagggtgctcacaccgccgtctcccacggcctgtggctgaacatccctgactatgatgctcccacacagctggtcaagcccaaggagaggaatgagaggtattgcattttgctctcgtcttttatctgacattctagcaactgccctgctgctgcatgaagggttgggtctaactcccttttttttcaggtatgttgatgctgtcatgacaatccccaagggaaccttgttccccatgtgtggcatgaaccttgccttcgacagggatctcattggccctgctatgtactttggtctcatgggtg

SEQ ID NO: 101578 - DNA, 302 bp, Zea mays
gaggatgtatctggagcagtacggtggtgccgatgacgtgtggattgggaaggtcgggtacaggatgtctctcgtcaacaacgagctcctcctccggacagctcaagccgacttcagaagtttccagagacaatgcaagctcgagtggcatggcctcagaaaatgggccagcaggagaaacctccaagcatacggcgtgacgtctaacagcacgctgcgatcctacttcttagccgcagccagcatctttgagccagacagagcgacagagcgtctgcgatgggctcgcacggcggtgctcg

SEQ ID NO: 101579 - DNA, 429 bp, Zea mays
  unsure (1)..(429): unsure at all n locations
cccacgcgtccggcgacgactgcgaccgtcacaccccccctatgtgctaggggccagggtccgtcgggtccttggctggcgacgagcaactaccaggcgacccagtggtgtgttcgggaacgtttccgcgggcgggcggcggcccccagtggcgaagatgatctgactaccgacgtacgcagcacgaggcgttcgttgccatcttcttctcctttgagtatatgatactagcaacatccacggtatcaacattcgtgaagtatatattctatgttagtgacatgctaatggaaggtcaatgggagaaaaaggcagtgtatacattttacttggagctcataagtgaccttgtgcacttgtcattatacatgctcttcttcatagttattctnctgaactatggtgatcggcgaccgtgatcttccatgt

SEQ ID NO: 101580 - DNA, 427 bp, Zea mays
  unsure (1)..(427): unsure at all n locations
gcgtgactatatcatgagagtagtttgtgaagcgacacagtctccagaggtgaagatgagaggcaggccgcctttgagtgtttggtggctatctcgtctacttattatgataagctggcaacagacatgcaggatatatttaatataactgcaaaagctgtgaggggagatgaggagtcagttgcactccaggctattgaattctggagttccatatgcgatgaggaaattgatattctggatgagtacagcagtgaatttacagctgattccgatgttccttgctactactttatcaagcaggctcttcctgccttggtgcctatgttgttggaaactctcctcaagcaagaggaagaccaagacttggatgaaggtgcttggaatcttgcaatggctggnggaacttgtttgggcctggtggcaa

SEQ ID NO: 101581 - DNA, 420 bp, Zea mays
ggtcggtctgctctgtcagcatgagtggaggccaaagtccctcgtgactctttcagctgaggatgatccaaaggtggtaagtgcgccttcaaggatcggcgtggccatatcgctcaagccttgagatatgggtcaagtcaccttctgtaaaacagtacaagcgttacgtactgatactcgtgtccaagaacataaacttttggagcgatacctagaacaaccctctccattttagccttgtttttggtaagagccttgggcaaagaagtgttgtcagggagttggacttgttttgtggaatgtttccattaagagccaaccccacaccgaggattgcaaacacagaagtttgtattagtgcagaagtttcactctgcgatattttttccccatgttttcctagtcgacgcaaaatgattt

SEQ ID NO: 101582 - DNA, 462 bp, Zea mays
cggaattcccgggtggacccacgcgtccgagacatcaccacaataggcttacatgacctgcgttcacgtttgggtatcattccggaggatccgacactctttcaaggaaccataagatataatctagaccctcttgggcaattctctgatcaacaaatatgggaggttctaggcaaatgtcagcttcttgaagctgtccaggagaaggagcagggattggactcacttgttgtggaagatggttcgaactggagcatgggtcaaaggcagctcttttgtttgggacgtgcacttctaagaagatgccgtatcttagttcttgatgaggccacggcatctatagacaacgctactgatgctatccttcagaagacgatcaggacagagtttagagattgcactgtcatcactgtcgcacaccgtatacccaccgttatggactgcgatatggtacttgcaatg

SEQ ID NO: 101583 - DNA, 367 bp, Zea mays
ttgcaaagctcctcctcgatccattgatcactgcaccggccggcggcaccgcgcgggcgggggctagccaacgaggcggcagcaatggcggaccgtgaccgcagcggcatctacggcggcgcccacgccacctacgggcagcagcagcagcagggaggaggcgggcgcccgatgggtgagcaggtgaagggcatgctccacgacaaggggccgacggcgtcgcaggcgctgacggtggcgacgctgttcccgctgggcgggctgctgctggtgctgtcggggctggcgctgacggcctccgtggtggggctggccgtggccacgccggtgttcctgatcttcagccccgtgcttggccccgccgcgc

SEQ ID NO: 101584 - DNA, 429 bp, Zea mays
gctaccggcgcctccaccctccgcctggtgtccttcgccgtcgacgagcgcacaccagggtacagtacgtattgctcgtgatttgtgtaactacggagcaagctgcatacagcacaagatagaagatgggtatccttgagaggatcaaggagattgaggccgagatggctcggactcagaaaaataaagcaacagaatatcatcttggacaactgaaggcaaaactagcaaagttgaggacacaactattagagcctccaaagggttccagcggaggtggagatggttttgaagtcacaaagtttgggcatggtcgtgttgcacttattggatttcccagtgttggaaagtcaactcttttaacgatgttgactgggacacattctgaagctgcatcatatgagttcacaacgcttacttgcattcctg

SEQ ID NO: 101585 - DNA, 243 bp, Zea mays
cgcgaaagccgttgcgcttccgtacacgcgcatactcttgctccgtcgcgcgttagggtaggttagtacttagtactgaacttagtacaataacgcgcagccgttttgggcggacacggttctctaaaggcgaagactctgaagtgggcgaacactcggcccagcgggcgaacatgccggctccggctccgcgcacctgctgacacctttcgaagcactttcacgtgtgaaccgaagtcgtct

SEQ ID NO: 101586 - DNA, 278 bp, Zea mays
gcgcaggaagaagaaggcagtccacaagactacgaccacagatgataaaaggcttcggagcaccctgaaaagaataggagtgaacaccattcctggtattgaagaggtcaacatctttaaggatgatgttgttattcagtttgtgaatcctaaagtgcaagcttcaattggtgctaatacatgggtggtcagtggaactccacagacaaagaagctgcaagatctgcttccgtccattatcaaccagctcggacctgacaacctagacaacctgcgga

SEQ ID NO: 101587 - DNA, 392 bp, Zea mays
cccacgcgtccggcgaggaggcgtgccatgccagcggtttgcgatgacggcaccggcggagaaggggaagaaggccaagaccgatgccgacggcggcgaggagaacgagcaaatcgacggcgcccttgtcttctccatcgagaagctccaggagattcaggacgagctcgagaaggttaatgaggaagcaagtgacaaggttatggaggtggagcagaaatacagtgagattcgcagacctgtctatctcaagaggggtgacattatcaagaccatcccggacttttggctcacagcgtttttgagccatcctctactaagtgagcttctgactgaagaggatcagaagatattcaagtacttggactccattgatgtcgatgattctgatg

SEQ ID NO: 101588 - DNA, 441 bp, Zea mays
gtaccggttcggaattcccgggtggacccacgcgtccggtcctcacataatcatcttcattcactcactctcttcgatcactgtactgaagagagcagggccaagtcgaccgggatgtttgtagccgccctggccctggtggtggtgatggcgacgacgagcacaggcggtggcagggcggcagcgtcgtgcgatcccaagccgttggtggtgtgcgatccggcgttcatggacggagcgaaacccgcggcagcatgctgctccaccctgcgtgcgcaggatgcatgcttgtgcgtgtacgccaaagaccccaagtttgcaaaatacatcaacaaccccaacaccgtcaaaacctttacctcgtgcggcatagccatgcccaaatgctaagcaagcgctctgcgtagtcgtttcgcttgctcttgctcttgtgtgtaacat

SEQ ID NO: 101589 - DNA, 391 bp, Zea mays
tgagacttcaattaatctagttaatctagtctcccttctactaaagactggggcatggccagaggatgttctttcacctctcagtgctttgcggaaagttgcacgatcattgtgcatcatcttgagctatgcatcttctgcaactgttgatcaaatatatacttgtgtgctgaatggtgaaaactcttccaagtcttcaatcttacacttagcattgctgatagaaggatttcctttggattcattgtctgatggtacaaaggaacttgctatgaataaaatgtttacctcttttgctggctatctggagagctactccaagaaccaccgatttatcaatgtgccaacttgttaattgggcgttttaggacttcctatacatgctttaacc

SEQ ID NO: 101590 - DNA, 435 bp, Zea mays
catacatctcacttcgccaaaaaaatttcgtcaacagttgaagttatacccgtggcagaactactcttgggtttgctccttgcccttgctattctagggacaacatcggctgctggttgtgtacaagacgcggaagacatgaaacgagagtgcaagcagtttgagctattcccagcgaacccaaagttgccaccgtcggcagcatgttgtgctgtgtggaagagggcagatgttccatgcctatgcaaatatgttaacaaggaagtagagaaggtatggtgcatggagaaggttgtgtacgtcgccaactattgtaagaggccgtttcaacctggctacaagtgcgggagttatacagttcctcttagtatgtaaaaggagtggttgggacatgtggtactctcttctagaactttaatttgagatttgtaacat

SEQ ID NO: 101591 - DNA, 304 bp, Zea mays
aaaaattcctcgcctgattgattttgacaacaaacgtgcatatttccggtgtaaaagcaagcatcagtatgatcatcatcatcataatcctgttagaatttctgtgcgtcgttcatatattcttgaggactcctacaatcagcttaggatgcgctctcctcaggacttgaagggtagactcactgttcattttcaaggagaagaaggaattgatgctggtgggctgacaagggaatggtaccaatcgctttcacgagtcatttttgacaagagtgcccttctatttacaccagtcgggaatgat

SEQ ID NO: 101592 - DNA, 273 bp, Zea mays
gacgattccacccatgttcttacagcaaccctttgttggtgctgcattctggatagagatatttgtgttgtaccaaataatgagttgacatgccatcgcgtgtgactcattattattaacaataaaacaagtttccttttatcaaaaaaaaaaaaaaaaaaaaaaaaaaaaaaaaaaaaaacaaaaaaaaaaaaaggcgcaggggctgtaggtttacaagttccaagctcacgtacgcgagcttgcaacgcttttatactgcgatacataaac

SEQ ID NO: 101593 - DNA, 250 bp, Zea mays
cccacgcgtccgcttgtcttcacacgtagagaactttgacatgttaaacaggacaggtgacaaaagtaaagcagtcattattgcaaaccctcgcacttctgaattcgaggttgttagaactagcctgatgtcgtgtttattaaaaacactgaaacataatatagaccatccaagacctataaagatttttgaagttggtgatgttgtgatgctggactcgtcacgtgatgttggtgcctctaataatcgc

SEQ ID NO: 101594 - DNA, 391 bp, Zea mays
gttgttttcctgtaccttcttgacaatgacacttcatggatgatccttgctagctctggaggtggtgtgtgcattgaattttggaagattggaaaggcaatgcatattgaggttgatagaagtggaaaaattcccatgttgaggttccgagaccgtgaatcatatgcacagaataagactaaagagtacgatgccattgcaatgaagtaccttacctatgtacttttactccttgtggtcggttcctctatctattcacttaagtatgaaaagcacaagagctggtactcatggatactatattctatgacaagctgtgtgtacatgtttggtttcattatgatgtgcccccaattgtttatcaactacaagctgaagactgttgctcata

SEQ ID NO: 101595 - DNA, 418 bp, Zea mays
  unsure (1)..(418): unsure at all n locations
gtggctccaacaatccaccggcaccaacccagcgcggcgccaccggcgacgcgtacggcctcccccggagagcgatggcgacggagctgacggcggcgcagctgcgcgcgtacgacggcaccgacccgtccaagcccatctacgtctccgtccggggcaaggtctacgacgtcacctccggccgcggcttctacggccccggcggcgcctacgccgtcttcgcgggccgcgaggccagccgcgccctcggcaagatgtccaaggacgaggccgacgtctccggggacctctccgggctcaccgacaaggagctcggcgtcctcgccgactgggagatcaagttccaggccaagtaccccgtcgtcgcccgactcgncgncgacgcctgaactcgtcagtcttcgtctaaatttactct

SEQ ID NO: 101596 - DNA, 382 bp, Zea mays
cccacgcgtccggcaccgcctcctcctgccgcgcgccccgcggcgaacccgtgcaacgacctcttcgtctcagggttaaataaacgcacaacgtccgagggacttaaggaagcattttctaaatttggtcaggttattgaagcaagagtaatcactgataggatatctggatactccagaggatttggctttgtcaaatatgcgactgtacaagaagctggtgaggccataaaaggcatggatggaaaggtcagcgcatgtgtttgactgcagttaatttccagcttcactgttcatggaagacgttaaccacattgaatgttctttataatcctaaggccctattccaaacctctagagctaataattagtcagctaatat

SEQ ID NO: 101597 - DNA, 410 bp, Zea mays
gttacagcctaaaagaaggaattcctagtttccttacgaatgttgccgcaacgattctgacaacagggaagtatcttaatgttatgagagaatgtgggcacaatgttcaggtttccttgtcagacaattctaagcttatgagctttggctcaaaccaccaatatcttgaatgtataaaatctgcatatgattttgcaagtggtgaattgttgactctgatgaaagataagtatgatctcatcgggaaactccgatccctgaagcgctatctactccttgaccaaggtgactttttggtccattttatggatattgctcgagaggagcttacaaagaaaccagaagaaatatccgctgaaaaacttcagtctctgcttgacattgctttacggagtactgcagctgcttca

SEQ ID NO: 101598 - DNA, 433 bp, Zea mays
cacactttgagcattcttgatcattctcactccgactttgcgcactcgtttgacagtcttagtgatttgagctccgttctagtggtgaactttgtgatactcatttgagctcaattcttggctgtgtgtgtgcgtatttgctgtggatttgagtgtgttgcttccctcccttactctagtgctttcactttgattcttattgtaagggtgagagactccaagttgtggagattcctcacaagcgggaaagagtaaagaaagaagaacaccgtggtattcaagtcgatcattggatcacttgataggggttgagtgcaaccctcgtccgttgggacgccacaacgtgtagtatgcaagttttgtacttggccgaaccacgggataaatcctcgtgtctcttgtgctagatctcactatgtctattgtatttcac

SEQ ID NO: 101599 - DNA, 313 bp, Zea mays
cccacgcgtccggtcgtcgccggaaggaaaggcgcggagcaagatgtcgtggcaggggtacgtcgacgagcacctgatgtgcgagatcgaaggacagcatctcagcgccgccgccatcgtcggtcacgacggcagcgtttgggcgcagtccgagagcttccccgagttaaagcctgaggaggttgctggtatcataaaggactttgatgaacctggtactcttgcaccaactggtcttttcgttggaggtacatagtacatggtgatccaaggtgaacctggagttgtcatccgaggaaagaagggcactggg

SEQ ID NO: 101600 - DNA, 222 bp, Zea mays
agaaaggtggttgttattgtgggtgatgatcctgatggtctacttattgatgcaaagtctggaaagacagttcattccataaaaggacatcgggactactcatttgcatcggcttggagccctgatgggcgaacatttgctaccggcaaccaagacaagacatgccgaatctgggacgtgaggaacctttcaaaatccgtccatgtgttgaggggtaacctt

SEQ ID NO: 101601 - DNA, 424 bp, Zea mays
cccacgcgtccgcccacgcgtccgcccacgcgtccgcccacgcgtccgctcagttggcgtgtctacgggccaaatcaagacgggagctccttgccggtctgagcgcctggccaaatacaaccagctgctcaggatcgaggaagagctcggtgatgccgcggtctacgccggagcaaagttcagggcaccagtggagccctactaagaaaggaagaggatggggatgttttcttgtggagctatactagctcgctgctgccttttgttacaatgtttgtacggtcgcaataaatgtatggtcgtgtttgctcgagagctactcaggtgattttgtcgtgggagcaccaaaagcagaaaagaactgtttttttcttctctctctctagattctgacgagtggtggtctgcactcgtcgtaatgtcg

SEQ ID NO: 101602 - DNA, 433 bp, Zea mays
gcaccaagaagccgtggtccctgtctttctccttcggccgtgccctccaggcgagcaggctcaaggcctgggctggcaaggtggagaacctggagaaggctagagctgccttcctcgccaggtgcaaggccaactctgaggctaccctcggcacctacaagggtgatgctgccgccgacaccgagagcctccacgtcaaggactacaagtactgagttgcttctctttgcgtgcccgttttggaactcctgcctacgagctaggttgcggagtgtggtttgctcgttagagcttattttcggacatccaaaaaacatgcttcctatgtgggatgatggttatctttatatttgtatgttaattagtctctttgctgttaaatttcgtgtaagttggtcctgccgatggagaatcgagcagctcccttttttgg

SEQ ID NO: 101603 - DNA, 447 bp, Zea mays
cccacgcgtccggaaggaggctgaaggcaagcccgactgggtgaaggatcttgatgctgttggcgagaatggagaggagattgagaacccacttactctgttgaatgatccatcctctgttgagccactggggaactgtgggaagaaggtcctactgtggtggcttcgtgttgaagcacgggcggatagcaagtttcctcaagggtgggtaattgagccacctttggaagtcgtcgtccccgcaaagcgcactccatggcctgaaaccacccccgagcttccatccgagttattggatgacaagcaaaagctggaggataggcacttgtcaagaggcaacaaatcgtctcagccccgaggcaccacgaaacggaagggcgaccctcaagggcaagataactgatggagaacgcactggcattgtaatgtatatctcttgcaccctgc

SEQ ID NO: 101604 - DNA, 359 bp, Zea mays
gtgaagcgtacatgatcgcatgggcctaggcaaactgaagaacccagacgcggacaagagcgccgagtccgacgggctcggacgattcgacgtcgatgagcacaacaggcgcgagaacgcgctgctggagttcgtgcgcgtggtggaggccaaggagcaggtggtggccggcacgctgcaccacctcacgctcgaggccgtcgaggccgggaggaagaagctctacgaggccaaggtctgggtcaagccatggctcgacttcaaggagctccaggaattcagccacaagggggacgccaccgacttcaccaacgccgacctcggcgccaagcaaggtggacatgaacctggttggcgtg

SEQ ID NO: 101605 - DNA, 400 bp, Zea mays
  unsure (1)..(400): unsure at all n locations
gcaaaacgagctatgcaagaactttcccaaattgggataatgccagaaatgtggggtggggggtccccaatgatcgagataagtgctcttactggggataatgttgatgaacttctggaaactgtcatgcttgttgcaaagttggaagaattaaaggcaaatccacataggaatgccaagggcactgttattgaagcatgccttgacaaggccaaaaggcctcttgctaccttagttgttcagaatggaaccctaaacaaagctgatattattgtgtgtggtgaagcttatggaaagatccgtgcattgtatgatgactgtgggaagctcgttgacaaagcangaccattcaatgcagtgcatgttattggcctcaataacgttccccttgccggtgatg

SEQ ID NO: 101606 - DNA, 411 bp, Zea mays
cccacgcgtccgcacacagcagcctttttgttctccccgcgagcgctctctttgtctggcgactggcgacgactccgccaccgccgccgctctacgcgagacgcccaggtcttcgccaacgacgagcatccgggttagagaggaagaaattgcaaccgaaacaatggcggcagattccggcgctcgcagacaaccaagcttcaccaaggtcgaccagctgcgccctggaacccacggccacaacctcatcctcaaggttgttgactccaagatggtcgtccagagaggccgcgagggagggccccagggaagacagatgaggattgcggagtgcttggttggtgatgaaaccggcatcattgtcttcactgcaagaaacgatcaagtggatgtaattaggcctggaacaac

SEQ ID NO: 101607 - DNA, 371 bp, Zea mays
cttgtcttgtgggctgtgcctgtgacggactgacggcacacaggtaatggagggcgggcctaccaccatcaccgtccaggtcaagttcgccgggcggacgatccccgtggaggtcccggcagcggcttccggcgcggagctgaagcgcctcctacagccgctgaccaatgtcctcccgcgcggccagaggctcatctgcaaaggcaaagtgctccaggatgccgcaagcctgagctcgatgcaagtagtgggcggatccaaggcgatgctcatcgcgtcgcaagggctccatcacggggatggtcctatcacaagtcatcgcagtagctcagcaacaactgtgagaaggccttcaaatgttaaggagaatc

SEQ ID NO: 101608 - DNA, 390 bp, Zea mays
cagacgctgccgcggtctcctgatactgtgatgacggcaagggttgtgctgctgggcgcaagcaagctggtgcccgtgtcattgtgaccgagatcgaccccatctgtgccctccaggctctgatggagggtcttcaggtccttcccttggaggacgttgtctctgaagctgacatcttcgtgaccaccactggcaacaaggatatcatcatggttgaccacatgaggaagatgaagaacaatgccattgtctgcaacattggccactttgacaatgaaattgatatgctcggccttgagacctaccctggcgtcaagcgcatcaccatcaagccccagactgaccgctgggtgttccccgagaccaacactggcatcattgtccttgctg

SEQ ID NO: 101609 - DNA, 348 bp, Zea mays
aggctgtcgaaaaggtgcacgccatgatagacagggaagtagccgatggcatccaccgtgagaacatatttgtttgtggattcagtcaaggaggtgctctgacattagctagcgttttgctttatccgaagaagttaggtggaggagcagtgttcagtgggtgggtgcctttcagttcatcagtcactgagaggatttcacctgaagcgaggaagaccccgtttctttggtcacatggaatggctgacaaagtagtattgtttgaagctggccaggctggtccaccgtttttgcaaagcgctggtgttaactgtgagttcaaggcatatccagatctgggtcattcgc

SEQ ID NO: 101610 - DNA, 375 bp, Zea mays
aggctgtcgaaaaggtgcacgccatgatagacagggaagtagccgatggcatccaccgtgaggacatatttgtttgtggattcagtcaaggaagcgctctgacattaactagcgttttgctttatccgaagaacttaggtggacgagcagtgttcactgggtgggtgcctttcagttcatcagtcactgacaggatttcacctgaagcgaagaacaccccctatctttcgtcacatcgaatggctgaccaagtagtattgtttgaagctcgccatactggtccaccaattttgcaaagcgctggtgttaactgtaacttcaaggcatatccagatctgggtcattcgctttcccaaaaagagctactttatcttg

SEQ ID NO: 101611 - DNA, 388 bp, Zea mays
gtgagcagacggattaccggcgatccctgcgtcggtcgccctcatacttgctcgtacggtgcgttcctttctctgtccaacaatcaatattagccatggcggcagcgctcgtaggtgtcaaagttctctgggttacctctttggaagcggagagccctccaaacacatcagtggcaccagctgatagtgctccacctgctgctgcaggtgctccacttgctgagaaaccacctgctgcaaagcctgatggcaccagtcagattgctgctggggctaccagctcaaccaattactaccacagggcctacagttagaacaccggaaactttcttacggaccgtacttcgaccaaggtccacgctgatcctggccgtggctatttcctggg

SEQ ID NO: 101612 - DNA, 246 bp, Zea mays
cccacgcgtccgatctcctataagggttctcgcataccccgaccaatgcggaagtggagtgaaagcaagcttggcaccgagttgcttcgtgctattgacaaggctggatatgaaaaaccatcaccaatccagatggctgccattccgtaggtctacaacaacctgaaggtaatgggattggttaaaccaggttttgaaaaaactgcagccttggaactcccaaggtggcctaacattacccaattg

SEQ ID NO: 101613 - DNA, 326 bp, Zea mays
aattcccggctggacccactcgtccggtggaccacatccttgatcgcgctactatctaccatgacttcacaaacatccttccgaagaattactgacgattcgcgatctatcatatctactctgttactgcaaatgatgtccaaacaaccactatcttctatatcctatggtccccatcctccaccaaggtgaacagcaacatgctttatgcaagctcaaaccataaattcaatattgtcctcaatggcattcaccttgaactccaatccacatatgctagtgaaatcagcctcgatgagatcaaagatcttgcacactatgcacac

SEQ ID NO: 101614 - DNA, 420 bp, Zea mays
gcgtagcacagtccattattgccgtcttccttttgcgtgagcaaagaaagagagcgagaagagcagtcgccatgtctggcatcatccacaagatcgaggagaagctccacatggggggcgaccacaagaataaggaagaagagcaccacaagaaggccgaagagcaccacaagaaagaagaaggggagcaccacaagaaggaccgccgggagcacaaggaaagcatcgtggagaagatcaaggaccagatcaccggcgagcaccgcgacaagttcggcgaccaccaggaaaagaaagacaagaaaaagaagaagcacggcgagggccacgaccacgacggcggccacagtagcagcagcagcgacagcgactgagatctggtgtcgcagcacaagtgcaacacatgtattcttgctggat

SEQ ID NO: 101615 - DNA, 415 bp, Zea mays
agcacaaggtggaggttattgccgtcttccttttgcgtgagcaaagaaagagagcggggagagcactcgccatgtctggcatcatccacaagatcgaggagaagctccacatggggggcgaccacaagaataaggaggaggagcaccacaagaaggccgaggagcaccacaagaaggaggagggggagcaccacaagaaggacggcggagagcacaaggaaggcatcgtggagaagatcaaggacaagatcaccggcgagcacggcgacaagtccggcgaccacaaggaaaagaaggacaagaaaaagaagaagcacggcgagggccacgaccacgacggcggccacagtagcagcagcagcgacagcgactgagatctggtgtcgcaacacatgtgcaacacatgtatgcttgc

SEQ ID NO: 101616 - DNA, 403 bp, Zea mays
  unsure (1)..(403): unsure at all n locations
ggcgctggtgatgtgactgaagatcgtccagaaaaagaagcccaagctgttgggaccggcgacactggtttcgtgtttgaacctggttctgtgcttgtggagtttttgcgggaggaggctgcttgcatggccgcacattccttacatgggcgtcgcttcgggaacagaactgtgcatgctggatatgctccgtatgatctctacttgcagaaataccccaggtgattctgcgtttgcgactgcatgagttgcgatacgagctttgcctatgtgccagtatttcacagaaacttcagacttgtagttttggcttttgagcctttggatggttcttccggtccagatagtggtaccattagttgaacgaaatatttggaaatgttgntccacagtagatatcgga

SEQ ID NO: 101617 - DNA, 383 bp, Zea mays
ccaagactatagccacgacaagattgtttccaggggaccaaaaaagtacgcagaggagattgaaagtggttcttctgatgttgaagcaaagtacaagaaaatgtatgaggatgacataaacccgtttgctgctttttcaaagaaggaaaaggatcagcgttataaggaacttggtttaagagacaaaatcacacttagtagtggccgttttgtccttggtaacaaatacgcacggacgtttatattcttctacagcatcggattgcatctccttgtatttacattactgtacagaatgtcagctttgagctatctcaacacaacaactcagcaggatgaaatcattctggatgctggtaatcagaggctaacgcacatgcttt

SEQ ID NO: 101618 - DNA, 387 bp, Zea mays
cgaccatcatcacagatcatccacagaggagaccatcttccgtgtagagactagactggagagagagggggatatatggcagacatcgtccaaggtgtggagctcgtgggtggagtccgccgccgcgtccggggtgaggttcagcgtcgcgctgcacctggagcccaagaccgcgctcgccctggccgccgccgatggcctcttctccgcctagctagctagctagcctagctgcttccaggcccttctcctgagtgagcagagcactgagcagcagtagtcgagttcttctggaccatataatacaatgcgcggttcacctgtacattcattcttcgcttctcctgcgctcattgatatgcgcatctgcttgattggtttctccct

SEQ ID NO: 101619 - DNA, 415 bp, Zea mays
gtggaatccagtagcaacaatagagcaacaatggcgaccaagatattttccctccttgggctccttgctctttctacatgtgttgctaacgcgacaattttccctcaatgctcacaagctcctatagcttcccttcttcccccataccttccatcaattatagcttcaatatgtgaaaacccagctcttcaaccatataggcttcaacaagcaatcgcagcaagcaacatacctttatcgcccttgttgtttcaacaatcgccagccctatctttggtgcagtcattggtacaaaccatcagggcacaacagctgcagcaactcgtgctacctctgatcaaccaagtagctctggcaaacctttctccctactctcagcaacaacaatttcttccattcaaccaactgtctacac

SEQ ID NO: 101620 - DNA, 392 bp, Zea mays
  unsure (1)..(392): unsure at all n locations
cagcttcactgttgggatggtcaacggaagacatacctatatacctttctacagggtgacatccacaaggaacaaggttaaagtcactgacaggatgtgggcaaggcttctgtcgtccaccaaccagccaagtttcctgagtcagaaggatatcgacgaagcgagtgaggcggataggctggcaaacaggccaccactgccaacgggtgccagctctcgcgtggtgaggtctttcgatcaatcttcgtcgtgttcttccaatggagagatctaagtgattgctggtgcaccgcaattgtgtacagaacctacttactatcgttctgagctctggtgcttgggcagcttcgccacgcaacgagttttgctcttggtgntagtcggtatgcata

SEQ ID NO: 101621 - DNA, 359 bp, Zea mays
  unsure (1)..(359): unsure at all n locations
agcccgtccattccccaatccccgtgtcgcctgtgcccctctgccacctcgccgggggcatgacaacagggtcgaccccgggttcggccccctctcagagaaaacgaaattctaccaaggattccgttgccctgtacgcggtgcaatgctataagtgctacaaatggagtacggttccaaaagaagaatttgagacgcttcgtgaaaacttcactaaggatccatggttctgcagcagacgaccagacagctcttgtgaagacgatgctgacattgagtacgacagcagccgcatttgggttttggacaagcccaacataccaaagcctncaccagagacggagaggctagtggttatg

SEQ ID NO: 101622 - DNA, 418 bp, Zea mays
cacagatccaaaggctttggtttcaaagaattaccaggggacatgttttgctgggccgtgtgttgaaaatggcaagagggtttcttggtggatggtagacatcggacaggagcaccagttgatgtgcaactactacacggtgaggcaggatggctccacagcattcatgaggtcttgggctttccagggatccatggacggccggaactggacaagcctccgtgtccacgacagcgaccctaccgtctgctatccaggccagttcgcctcttggcccatcgttggcccggcggcccttctgcccttccgattcttcagggtcgccctgacaggccctgccgtcggctgtacgtggaacctctgcatttgcttcctcgagctctacggctacttccattagatcttcttcttccttttc

SEQ ID NO: 101623 - DNA, 388 bp, Zea mays
ctaaacgctcccgttctgctccgcctgcccccaccggctccccttgtacacgagcgggggagacgccatggcggcggcgcagccgaagccggccaagaagctgggcggcatggcagaagcactcgccatcgacgccgacctaggattccccgcctataccacgcaggaagatcagactagctccgacaaaagcgatgattcggtgaaggttttgagggaactgactgtacagcagaggaacattgccaacttgcaagtggagctacagggaagaaaggatgatgaaaacattgctcatttgactcatgtgagtgagattgaaaagaagtgcgagtctttggccagaatgactgcaatattgaaagatgtcattcataacacggatcgt

SEQ ID NO: 101624 - DNA, 405 bp, Zea mays
  unsure (1)..(405): unsure at all n locations
cacctcgtcccgtggctccactaagacccttggcaacttcgtcaaggcaaccttcgagggcctgatgaagacctacggcttcctcactcctgaattctggagccagaccaagttctccatggccccgttccagcagtacaccgacctgctggcaaagcccaccaagggccttgtgctcgaggccccaactgagacagtagaggcttaggatggtttgagtggagagctctactcgtcgggtgcttgtctaaatgcggtatctatattatagctaagaactgccggagtcgattttgggttctgttttgtcctggatgctgntctgtactgtcaagttttggattatgctatggcactttttatcgatgaatgctacantatgatctcatgatagtggttttttcc

SEQ ID NO: 101625 - DNA, 368 bp, Zea mays
  unsure (1)..(368): unsure at all n locations
gatatcgagcaccaacgacacaccccattgacgtacagctatgatgcggccgcgtggacccttgctatggtcgtgccgtcgctcgctgtagccatcctctgcatcctagtccggtccgcctccgcggagttctggctcgacgagttcaccacggacggcgacgtccgcagagactacgaccgttctggccggcaggtggcgtcgcttgtcctcgaccagcgttctggcgctggcttcaactccacgcgcaagtacctcttcggcgagttcagcgtggagatgaagctcgtcggcggcaactccgctgggactgtcacctncttctacctgacgtccggcgagggcgacgagatcgacatggagttcat

SEQ ID NO: 101626 - DNA, 378 bp, Zea mays
ggaattcccggctcgaggcacgcgtccgagctcctgcaaagcaagccgatctggtttcaagtataccaaacactgatgtttgcacggctggttacaaagtctgcgcgtctggcatgaaagctactatgttcgccgcacattcaattcatctgcgtatcaatgatattgctctggcatgtggcatcgaaagcatgtgcaatgccccaaagcacattgctgaagctaggaaagggtctcgttttggacatgacacactttttgatgccatgcttaaagatggactttgcgatgtttacaatgactgtgccatgcgaatgtgtgccgaactttgtgctgacaatcatgccctcacaagagaagaccatgatgcttttgcta

SEQ ID NO: 101627 - DNA, 377 bp, Zea mays
ggaacctgtactgatgttgagcaacagttcataaacaatacagtgcactttcagaaggtgtggagcattaaaccagagattcatagccgatgcaaactagcagccaagcagattgcggatgacggaagggagttcaacatatggaggcctctctgccctaatgagtatgcctcaaatggtgatattgcgcatgttggcatccatccaccgtattgtgctgctgtatacaagaatatcaatgggaactttgcactgcctcttggctatgacctggtttggagaaattgtgctgaggattacaagagccctgtatcaatatggcttccaaggccaccggggggatacgtagctcttgggtgtgttgcttgcccttcatt

SEQ ID NO: 101628 - DNA, 369 bp, Zea mays
gttgaccctgataaagtacacggactatcgtggaattccccttccgatggttaaggagatatgccgccatgtgctcattggccttgattacctccaccgtacactttctattattcacactgaccttaaaccagagaacatattgcttgtgtctaccattgatcccacaaaggaccctcggaaatcaggcgtacccctagttccgccttcaatgaggacagacgagccacctcctaaggtgcctgcacaatcaggaaatggtggcctcaccaagaaccagaagaagaagatccggaagaaagctaaacgtgcagttgctgcaacttcagaaggaagtagtgctgtggcatctgcggacacagatgggtc

SEQ ID NO: 101629 - DNA, 432 bp, Zea mays
gcgcctctacatttcttctctctctgctcctccgactccgcctgatccatccaagagaggggtcgccatgtcggactcggaggagcaccacttcgaatcgaaggccgacgctggggcgtccaagacctacccgcagcaggctggcaccgtccgtaagaacggcttcatcgtcatcaagaaccgtccctgcaaggttgtggaggtttctacctccaagactggtaagcatggccacgccaaatgccactttgtcgccatagacatattcaatgggaaaaagcttgaagatattgctccttcatcacacaactgtgacattccgcatgtgaaccgtactgagtatcagctgattgatatttctgaggatggatttgtgagccttcttacttcagatggcaacactaaggatgatcttagactcccaactgatga

SEQ ID NO: 101630 - DNA, 388 bp, Zea mays
gtcgcaacccgcgggcggagggtcaggcacaggaccgttgcgttgctgccgccgccggcacgagatcgaggagggatcccccgctctcacgccgctccaggtcgagggccgagcgagatggtgaacaccttcttcctcttctgcgggtgcgtggaccaggccagcgtggcggtggtggagaagtggggccgcttcctccgcctcgccgacccgggcctccacttcttcaaccccctcgccggggagtgcgtcgcgggctccctcaccacacgcgtccagtccctcgacgtccgcgtcgagaccaagaccaaggataatgtcttcgtccaactgatctgcacaatccagtaccgtgttgtcaaggaaaatgcatatgatgctttctatg

SEQ ID NO: 101631 - DNA, 78 bp, Zea mays
gagccatccctccgtagttagcttcttagagggactatggccgtttaggccaggggggttctcaactatgagttcccg

SEQ ID NO: 101632 - DNA, 411 bp, Zea mays
cttatctgacggcactaatgataagatccaagctgtaattgaagctggtgtttgcccgcggcttgtggagctccttctccatccatcaccgtcggtgcttatacctgctctacgaactgttgggaacattgtaactggagatgatcagcaaactcagtgtatcattgatcatcaagctcttccccgcctcctgaatttattgacacagaaccacaagaaaagcattaagaaagaggcatgctggacgatttcaaatattactgctggaaacaaagatcagatacaggctgtcataagtgctggtattatcgctcctttgttgcaactgcttcaaggagcagagtttgatatcaagaaagaggctgcttgggccatctcaaacgctacctctggtggttcccatgaacaaat

SEQ ID NO: 101633 - DNA, 342 bp, Zea mays
aaaagccaaagccaccaggccagcaacaatagaagcgagcgagcgagcagcagtaggcgagcggcgcgggcgaggagcagaccagcacccagcagccctcgtcggggggcgggagttgtagcttgatgaggcgtcgcctttgcgcgtgtgctgtgactgtgactctgccgctaacccggttgcatttctccatcttatccctctcccgcttctgcttcctcgtctcttacttcgttctgatcccgctggcgaggatgcattcgcatttgcggcactcaatgtagccctaccagaaggtggtgaagatcgtggacgtcactgtcagtgtggtgtacaatgtgc

SEQ ID NO: 101634 - DNA, 410 bp, Zea mays
gttccgtgtggtaacactgttgctatggctggtctggatcagttcatcacgaagaaggctacactcactaatgagaaggagactgacgcttgcccaatcagagcaatgaagttctccgtctctcctgttgtgcgtgttgctgttcagtgcaaggttgcctctgaccttcccaagctagtcgaaggcttgaagcgtctagcaaagtccgatcctatggttctatgtacaatggaagaatctggtgagcatatcattgctggagctggcgagcttcatcttgagatctgcctgaaggatctgcaggaggacttcatgggtggtgctcaaattatcgttttcactcgcgtcggctacttacgcgaaacggatcttgagaagtcctgacgtactgtcatgagcaagtctcccaa

SEQ ID NO: 101635 - DNA, 373 bp, Zea mays
acacgagatagctccaaaatcacagctgagcaggttcacggcctcatgtcacaggtcataaaagacatccttttcaactctgttcacccgtcaagcaaggcaagcacaagtgctccaccagattcatccggtcctgagcctatggttgaagcctgagttccagcggaaggggacaatggatatttgtgttatgttatctgattcagaaggtgcaaaacaagttatcttttgagtacagaatcatcatgtaattatgagttgccatcttgggctgccactgagagggtgtgatttgggtccggttagcaatctcatgtattggatttcggatcagtattcgaagctttcataacgaggagccatcatcttaaaa

SEQ ID NO: 101636 - DNA, 400 bp, Zea mays
ggaagggttggagaagaaggcacaagccagcggtgcatgtcagcttgttgagaaggacctcaaagaagaatttgttagtgaatatatatacccctgcctgcgtgcaggtgcagtttatgaaagaaagtatctgcttgggacttcgatggctaggcctgttattgctaaggcaatggtcgatgttgccaaggaagttggtgcggatgcagttgcccatggttgcactggaaaaggcaatgatcaggttcgctttgagcttacattctatgctttaaatcctgaacttaaagtggtggcaccttggagggagtgggatatcacaggacgtgaagatgctattgaatatgctaagaatcataatgtacctgttacagtttcaaagagatcaatatacagtcga

SEQ ID NO: 101637 - DNA, 278 bp, Zea mays
acttcgtcttaattcccggctggacgccactcctccgcagcactctgctcctaacgctggttctctcttacaactgcaacaattgctgtcattcgacctacttgctttgacaaacccattatcattctaccaacaacccatcattgattgtgccctcttttacatctcttatcatttataaatcattactaaacccaaccttactcatctttgagaatatccacatattacaaactacatttataacaaataatcctttacctatcacccttcccaac

SEQ ID NO: 101638 - DNA, 395 bp, Zea mays
cccacgcgtccgtgcaactccagtgctgctcactgccactgccagcagatcgagctggtccgtctcacaaaccctcttgctttgctgctgcacctgcaagtctgcaaccgcgcacacagagatgtcgacgacggtgagccgtgcgtccctcgaccagaagctcgccctcgccaagcgttgctcccgagaggcgaccctcgccggagccaaggcggcagcggtggcgactatcgcctccgcgatccccaccctggccagcgtgcggatgctgccatgggccaaggccaacatcaaccccaccggccaggcgctcatcgtctccacggtggctgggatggcctacttcatcgccgccgacaagaagatcctgtcgctggcgaggcgccactcgttcg

SEQ ID NO: 101639 - DNA, 412 bp, Zea mays
cgccggcgttcgctcctcctctccgactccttcctcgggcaccgtggtgttcttcgtggagagggcaggccggaggcgcctgatgctgatcagcctggtcggaatcgtcgtgtggctcgccgtgctcggcggcacgttcctgggcgccgcacaccacgccccacccgtcagcgacctggagacccgactgttggcgaaccagaaccagacccagacccagacgtgtcccgagttcaacccgaacgtccgctggagctgcatggactgcctcaaggccgcgtacacgtgcggcttctgtgctcaccagggagacaagcttcttccgggggcgtgcttggcgctgaacaacgcgtctcggcatgcgtgccgcgcagaccaccgggagttctacacggaagggtgccccaacaac

SEQ ID NO: 101640 - DNA, 425 bp, Zea mays
aattcccgggtcgagccacgcatccgaccgtgggcggttaccattgggcgatctacttctaccccgacgggaagaacccccaggagaactccacctacgtgtccggcgtcatcgcgctcgcattctactgcaccaacgtgcgcgcgctcttcgaactcactctcctctaccacacccgaaagggcaagcataaggagcactctcacttcaaccgctccctagagtccgggccgtacaccctcaacaacccaatatccatgtggggctacaaaagggtctttccgcatactactcttgaacaatcacattttcttaaagatgaatgcttgaacataaactgtacattggcatgttgtaatatcaactattgattattctaagccacattcaatatatgttccacactctgacataggctttcattt

SEQ ID NO: 101641 - DNA, 348 bp, Zea mays
caggaacaaggaaaaatgagtccatctttggtgagcttcacacccagattaagaacaagaaattgacagttgatgtcaaagcaaactcagaatcagatcttttgacagcaatcactgtcgatgagtttggtactccagggctaaaatcaattatcaatgtggttgttgcagaccagagttcagggaagcttgaattccagtacctacatgaatatgctggtgtgaatgcaagcgtcggacttaattccaaccctatggttaacctttctggtgcctttggaagcgaagcactatcagtccaggttgatggctgatttgataccgcgactagcgattttaacaatgaca

SEQ ID NO: 101642 - DNA, 402 bp, Zea mays
gcctcgcccgcccttcgctcgccgccgccatggggaggggaaagttcaagggaaagcccaccggccgccgcaacttctccacaccggaggagatcgctgctggtacttcaggtcgccctcgcacctttaagaagaaggaggaagaggaagaggaggaagaagaaagagaagagtcagaggaggaagaatctgaagacgagtctgatgacaaacctaaacataaaggtactgagggtattattcagattgaaaatccgaacttagtaaaagtgaagaatataaaggccaaggaagttgatcttggaaagacaactgaactctcaaggcgtgaaagggaggagcttgagaaacaaaaagctcatgaacgttatatgaaacttcaggagcaaggaaaaacagaac

SEQ ID NO: 101643 - DNA, 385 bp, Zea mays
cgcacatatctactatactatactctaggaagcaaggacaccaccgccatggcagccgggatgcttgcattgttcgctctcctagctctttgtgcaagcgccactagtgcgacgcatattccagggcacttgccaccagtcatgccattgggtaccatgaacccatgcatgcagtactgcatgatgcaacaggggcttgccagcttgatggcgtgtccgtccctgatgctgcagcaactgttggccttaccgcttcagacgatgccagtgatgatgccacagatgatgacgcctaacatgatgtcaccattgatgatgccgagcatgatgtcaccaatggtcttgccgagcatgatgtcgcaaatgatgatgccacaatgtcact

SEQ ID NO: 101644 - DNA, 360 bp, Zea mays
cgcacatatctactatactatactctaggaagcaaggacaccaccgccatggcagccgtgtgcttgcattgttcgctctggtagctctttgtgcaagcgccactagtgcgacgcatattccagggcacttgccaccagtcatgccattgggtaccatgaacccatgcatgcagtactgcatgatgcaacaggggcttgccagcttgatggcgtgtccgtccctgatgctgcagcaactgttggccttaccgcttcagacgatgccagtgatgatgccacagatgatgacgcctaacatgatgtcaccattgatgatgccgagcatgatgtcaccaatggtcttgccgagcatgatgtccc

SEQ ID NO: 101645 - DNA, 383 bp, Zea mays
ccgataggtaaaaagaatatatgtgccactacctgatccaaatgtacgaaggttacttgggaaaaatcagctcaaaggacaatcattcaaactgtcgaaccatgattttgaaagacttgctgtggagaccgaagggtattctggaagtgacctgagagccttgtgtgaagaagctgcaatgatgccaataagagagctcggtccacaaaatattcttactatcaaagcaaatcagctgcgacctttgaggtacgaggacttcaagaacgcgatgacggtgatcaggccaagcttgcagaagagcaaatgggacgagctggagaactggaacgaggaattcggttcgagctgacggagacgcgcgctgtctgatgatgatgatc

SEQ ID NO: 101646 - DNA, 410 bp, Zea mays
  unsure (1)..(410): unsure at all n locations
aattccgggtcgacccacgctccggacagcccgcagccccttctttttcatccgccttgctacaaccgcgtgcgcggacgcctcctccaggaaagcgagagcttctgcataagaacaacaacaaaagcttgatcagcttgggcctacaaaacctcaacaacncaagttatgtctgatctcgacgccagcttccatctgcctttgatccgttgctgagcaaatgctgagactctggtgctggtcctggaacgaagatatctgcatgtgcgcatcagcagcgcncggcagacagagtctgactacagtgaaggtctgaaaaagagttagcttcacaagatcctaaggatctgaaaaagaattctgctgcaatggtactgcagttcaggacccagagctaggccaggtcattc

SEQ ID NO: 101647 - DNA, 435 bp, Zea mays
ccaagatattagccctccttgcgcttcttgccctttttgtgagcgcaacaaatgcgtgcattattccacaatgctcacttgctcctagtgccattataccacagttcctccgaccagttacttcaatgggcttcgaacacctagctgtgcaagcctacaagctacaacaagcgcttgcggcgagcgtcttacaacaaccaattaaccaattgcaacaacaatccttggcacatctaaccatacaaaccatcgcaacacaacagcaacaacagttcctaccagcactgagccaactagatgtggtgaaccctgtcgcctacttgcaacagcaggtgcttgcatccaacccacttgctctggcaaacgtagctgcataccaacaacaacaacaattgcaacagtttctgccagcgctcagtcaactagccatggtga

SEQ ID NO: 101648 - DNA, 352 bp, Zea mays
ccgtcactcaacacagcacaggcagctcgagagagagagagagagaaagatgtcgtgggtggggcaccaccaccacaaccagccggctcccccggcgtcgggccccaaccaggtgttcaagatcttctgccgcgccaacgagaactactgcctggccgtccgcgacggcgccgtcgtgctggccccggtcaaccccaaggacgaccaccagcactggtacaaggacatgcgcttcagcacccgggtcaaggacgaggaaggcatgccggcgttcgcgctcgtcaacaaggccacggggctcgcaatcaagcactccctcggccagtcccacccggtcaagctcgcgcctttc

SEQ ID NO: 101649 - DNA, 358 bp, Zea mays
attggaccccgcctgagggtgctggacagtttcatggtgtacccttggatgttaagggggttcatttcaaaggttccagaaagcgattgatgcttgaggcatggaatttctacagctcaacctctaagctgtctgatatgctatgcctaatcttgagaagtggccggacgaaatatgacttctgaacttttgggttaaaactgacacatgttgatactgttcaaagctgttgtatgttcaagtatagtacaaaaaaatgctgaccatgaggctgtcattgcaagaattcagatcagcataaaaaattgctagtagcattcaatatgtaacaaaaacatgtgagaacccatacgagaac

SEQ ID NO: 101650 - DNA, 370 bp, Zea mays
ctcctccccctccggttcgggttcgggttcgtgaggttctccggggttcgggttcgggggtgagcggatcgagatggcggcgtcggatgttgagtaccgctgcttcgtcggcggcctcgcctgggccacggacgaccactccctccacaacgccttcagcacctacggcgaggtcctcgagtccaagatcatcctcgatcgggagacgcagaggtcccgcggcttcggcttcgtcaccttctccacggaggaggcgatgcggaacgccatcgagggcatgaacggcaaggagctggacggccgcaacatcaccgtcaacgaggcccagtcccgcggcggccgtggaagcggcggcggtgggtacggtggt

SEQ ID NO: 101651 - DNA, 421 bp, Zea mays
gtcaggaatattgggaagaacagcccagttctttcctcagtgaatatgctcattgtgggggaaattctttcactgaatccactcctcctgttagtgctgcgtcacctgatatcttccagctctccaagatttctcctgcacaaagcccttcaatgggctctggcgagcaggcgttagagcctaaacatgagtcggcagcttcacctcgtcctgaaaacttgaggcctgatgcattattctctgggaacacagccgatccatccattttcaataatgccatagccatgctcctgggcaatggcattgatgccgagtacaaacctgttcttggtgatggaattgtgctcgattcttcgtcatggaacaacatgcaacatgcttttcagatggcgggattcaaatgagttccatgcaccttgtt

SEQ ID NO: 101652 - DNA, 440 bp, Zea mays
ccgcgacgaaccactcctccgatgtaacacggctgaaggagcaatgtaccttttccctcagatccatctgccacagaagtcaattgaggctgctaaagctgccaagaaagcacctgatgcattctatgcgctccgtctccttgaatcaactggaattgttgtggttcctggatctggatttggccaagttcctggaacatggcacgtcagatgcacgatcctgccgcaggaagataaaatccccgcggtgatcacccgcttcaaggctttccatgaggcgttcatggctgagtaccgtgactgaactgttacagtggctgagtaccaccgtgtagaccgaaacagaataaagctcccccctctctctgtgtctgtgcgtgtgtgtgaactgatctctgaatggacgaacaatgtactctgttggcgcctttaatggcaat

SEQ ID NO: 101653 - DNA, 232 bp, Zea mays
cggctgcttcggtgagccgtgccacggaatcgggagctccaagtgggccatttttgggaggcagaattaagtgaaaaatagacataaagttcatccttgcagttactaaacatgaggacgaacaccttcaagtgatgttgcttgatgtatatttatgacacaacagtgtcgtaaattaaaaggagacgatcactgcgtttggaacaaattgtttgctctgataagtttgatt

SEQ ID NO: 101654 - DNA, 328 bp, Zea mays
ccttgccacatctaacaatacaagccatcacaacgcaacagcaacaacagttcctacgaggactgagccacctagccatggtgaaccctgccgcctacttgcaagagcagctgcttgcatccaacccacttgctctggcgaacgtagttgcaaaccagcaacaacaacagctacaacagtttctgccaacgctcagtcaactagccatggtgaaccctgccgcctacgtacaacaacaacaactgctttcatctagcccgctcgctgtgggcaatgcacctacatacctgcaacaacaattgttgcaacagattgtaccagctctgac

SEQ ID NO: 101655 - DNA, 423 bp, Zea mays
  unsure (1)..(423): unsure at all n locations
gggacgcacacgtccagcaccgcggcgggcggcgccgtccagggcgccgacctgctgggctacgctgccggcacggccaagggcatggcgccccgcgcccgcgtcgccacgtacaaggtgtgctgggtcggcgggtgcttcagctccgacatcctcaaggccatggaggtcgccgtgacggacggcgtcgacgtgctctcgctctcccttggcggcggcacggcggagtactaccgcgacagcatcgcggtgggcgctttcagcgccatggagaaggggatcttcgtgtcctgctccgcgggcaatgccggcccgggcgccgcgacgctgtccaacggcgcgccgtggatcaccaccgtgggcgccgggaccatcgaccgcgacttccccgnctacgtcacgctcggcaacggcaagaactac

SEQ ID NO: 101656 - DNA, 319 bp, Zea mays
cacgcatccggggacgcacacgtccagcaccgcggctttctgcgccgtgcaaagcgccgacctgctcgagtgactctaccggcacggtcaagggcatggcgcccctcgcccgcttcgccacgtacaacgtgtgctgagtcgacgggtgcttcagctccgacatcctcaaggccatggatgtcgccgttacatacggcgtctacgtgctctcgctctcccttggcggcggcacgtcggagtactaccgcgacagcatacatgtgggcgctttcagctccatggagaaggggatcttcgtgtcctgctccgcgggcaatgc

SEQ ID NO: 101657 - DNA, 392 bp, Zea mays
ggagcaggacatacagatgatgctcgcggccgacgtccacctcggcaccaagaactgggatttccagatggagcggtatgtctttaagcgtcgcaccgacggcatctacatcatcaacctgggcaagacatgggataagctccagctcgcggcgagggttattgttgccattgagaacccacaagacatcatcgtccagtcggcccgcccctacggccagcgtgctgtcctcaagttcgcgcagtacactggcgcccatgccatcgctgggaggcacacccctggtaccttcaccaatcagctccagacctctttcagcgagcctcgcctgctcatccttactgacccaaggactgaccatcagccaatcaaggagtctgctctggggaaca

SEQ ID NO: 101658 - DNA, 419 bp, Zea mays
cccacgcgtccgataaattttgggctagcctttctgagaaaacggggatttaaggcggtgcaaactccctttttcatgagaaaggaaactatggcaaaatgtgcccagttggcccagtttgatgaggagctttacaaagttacaggtgatggtgaagacaaatatctcatagctacatcagagcagcctttatgtgcttatcacttaggtgatagaatataccctgctgaacttccaatcaaatatgctgggtactccacatgcttccggaaggaagctggttcgcatggaagggacacagctggtatcttcagagtccaccagtttgaaaaaatcgaacaattctgcattacaagcccaaatgacaacgattcttgtgagatgcatgaagagatgctaaaaaactcagaagattacta

SEQ ID NO: 101659 - DNA, 410 bp, Zea mays
cgtcagcctagcaattagctcatcgactccagattggagaactcgacaccatggaggggctgatcgttgcccttgctctcctggcgctcgctgcgagcgccgcctccagtacaagcggcggctgtggctgccagacaccaccgtttcatctaccgcctccgttctatatgccgcctccgttctatctgccgccgcagcagcagccgcagccatggcaataccccactcaaccaccgcagctaagcccgtgccagcagttcggatcctgcggcgtcagcagcgtcggcagcccgttcctgggccagtgcgtcgagttcctgaggcaccagtgcagcccggcggcgacgccctacggctcgacacagtgccaggcgctgcagcagcagtgctgccaccagatcaggcaggtg

SEQ ID NO: 101660 - DNA, 405 bp, Zea mays
  unsure (1)..(405): unsure at all n locations
ggtccggaattcccgggtggacgcacgcgtccggggtggggcacgaacgaggcgctcatcatctccatcctcggccaccgcgacgccgcgcggggccgcgccatccgccgcgcttacgccgaggcctacggcgaggagctcctccgctccatcacggacgagatctccggcgacttcgagagggccgtgatcctgtggacgctggacccagcggagcgcgacgcggtgctggccaacgaggcggcgcggaagtggaagcccgggaaccgtgtgctcgtcgagatcgcctgcacgcgcacctncgcgcagatcttcgcgaccaggcaagcttatcacgagcggttcaagcgctcgcttgaggaagacatcgctgcgcacgtcactggggactttcgcaagctattg

SEQ ID NO: 101661 - DNA, 349 bp, Zea mays
ctacctctcccaaatttattttccactacttttaccactaggacgtgcatattgctcctcctgctatctataacgactacaatctacctaatcttctctgctatacactactaatccccattccattttaacacaaacatctactcctttgattcctaataccatcttctaatatcaatatacttctcaatcacatatactatatcctcacattttcataattttcaataacttattctatcaagcatccaatccattctatattaattaaaatctgtcctctgtaaacatgtcaacttcctatctttccacattctcaatcaatctaaatcattacctattcatctct

SEQ ID NO: 101662 - DNA, 306 bp, Zea mays
acgagaactactgcctggccgtccgcgacggcgccgtcgtgctggccccggtcaacgcgggggacgaccaccagcactggtacaaggacatgcgcttcagcacccgggtcaaggacgaggaaggcatgccggcgttcgcgctcgtcaacaaggccacggggctcgcaatcaagcactccctcggccagtcccacccggtcaagctcgcgcctttcagcccggaccaggaggacgcgtcggtgctgtggacggagagcaaggacgtgggcaagggcttccgctgcatccgcatggtcaacaacaccc

SEQ ID NO: 101663 - DNA, 419 bp, Zea mays
  unsure (1)..(419): unsure at all n locations
cccacgcgtccgataaattttgggctagcctttctgagaaaacggggatttaagccgatgcaaactccctttttcatgagaaaggaaactatggcaaaatgtgcccagttggcccagtttgatgaggagctttacaaagttacaggtgatggtgaagacaaatatctcatagctacatcagagcagcctttatgtgcttatcacttaggtgatagaatataccctgctgaacttccaatcaaatatgctgggtactccacatgcttccggaaggaagctggttcgcatggaagggacacagctggtatcttcagagtccaccagtttgaaaaaatcgaacaattctgcattacaagcccaaatgacaacgattcttgngagatgcatgaagagatgctaaaaaactcagaagattacta

SEQ ID NO: 101664 - DNA, 391 bp, Zea mays
cccacgcgtccgcacacagcagcctttttgttctccccgcgagcgctctctttctctatcgactggcgacgactccgccaccgccgccgctctacgcgagacgcccaggtcttcgccaacgacgagcatccgggttagagaggaagaaattgcaaccgaaacaatggcggcagattccggcgctcgcagacaaccaagcttcaccaaggtcgaccagctgcgccctggaacccacggccacaacctcatcctcaaggttgttgactccaagatggtcgtccagagaggccgcgagggagggccccagggaagacagatgaggattgcggagtgcttggttggtgatgaaaccggcatcattgtcttcactgcaagaaacgatcaagtggat

SEQ ID NO: 101665 - DNA, 409 bp, Zea mays
ggcttctcctccccctccggttcgggttcgggttcgtgaggttctccggggttcgggttcgtgggtgagcggatcgagatggcggcgtcggatgttgagtaccgctgcttcgtcggcggcctcgcctgggccacggacgaccactccctccacaacgccttcagcacctacggcgaggtcctcgagtccaagatcatcctcgatcgggagacgcagaggtcccgcggcttcggcttcgtcaccttctccacggaggaggcgatgcggaacgccatcgagggcatgaacggcaaggagctggacggccgcaacatcaccgtcaacgaggcccagtcccgcggcggccgtggaggcggcggcggtgggtacggtggtggccgtggaggcggcggctacggcggtggcgggc

SEQ ID NO: 101666 - DNA, 404 bp, Zea mays
agctcctgcaaggcaagccgctctgggtgcagggataccaaacactgttgtttgcacgactgttaacaaagtctgcgcatctggcatgaaagctactatgttcgccgcacagtcaattcagctgggtatcaatgatattgttgtggcaggtggcatggaaagcatgtccaatgccccaaagtacattgctgaagctaggaaagggtctcgttttggacatgacacacttgttgatgccatgcttaaggatggactttgggatgtatacaatgactgtgccatgggaatgtgtgccgaactttgtgctgacaatcatgccctcacaagagaagaccaggatgcttttgctatccaaagcaaccagcgtggaattgctgctcgtgacagtggtgcttttgcatggg

SEQ ID NO: 101667 - DNA, 430 bp, Zea mays
tgatatggttaataaatactatgatcttgccactagcttctatgagtatggttggggtgaatccttccactttgctcacagatggaatggagaatccttacgtgaaagcatcaagcgacatgagcattttcttgccctgcaacttggtttgaaaccaggaatgaaggttttagatgtgggctgtggaataggtggaccactgagagaaattgcaagatttagctcaacttcagttaccggattgaataacaacgaataccagataaccaggggaaaggagctcaaccgtttagcaggaattagtggaacatgtgattttgtcaaggcggacttcatgaagatgccgttcgatgacaacacttttgatgctgtttacgccattgaggcaacatgtcatgcacctgatccagttggttgctacaaggagata

SEQ ID NO: 101668 - DNA, 434 bp, Zea mays
accattcagccagctacctgctgcctacccccagcaatttcttccattcaaccaactggcagcattgaactctcctgcttatttacagcagcaacaactactaccattcagccagctagctggtgtgagccctgctaccttcttgatacaaccacagttgttgccgttctaccagcacgctgcgcctaacgctggcaccctcttacaactgcaacaattgctgccattcaaccaacttgctttgacaaacccagcagcgttctaccaacaacccatcattggtggtgccctcttttagatttcttatgagttatagttcaataataaagttttttgtctgatgtttgtggcttcccagaaataagaaagtacatttctagattcttatgtgcttctagtctccaaatgtggttgatagttattttgctctaaga

SEQ ID NO: 101669 - DNA, 432 bp, Zea mays
ccactagattaccaccacctccacctcgtcgtctcccaccaccgccgagcgcgagccggagcccgatctagccggcggcaggcaccagatcccgccgcccgcggcgtcccgggacgcgccccgccgaatccgccgctcctcgcactgcaacacgcccggaccacggtgcatttgatccgtcccggccgcctacacgatgtccaagtcgggagcgctggatcttgcttctggcctcggagggaagatcaacaaggtggaagtcaagtcggccgtcgatgagtatgagaaatatcatggatactatggagggaaggaggaagcaaggaagtccaactatactgatatggttaataaatactatgatcttgccactagcttctatgagtatggttggggtgaatccttccactttgctcacagatggaatggaga

SEQ ID NO: 101670 - DNA, 419 bp, Zea mays
gaagaatcacgctcgttcttctataaaaggctacggaggaggatcgcagaagatgttgttgcaaaagaaataaggcagatagtccgtgataaatttacgcaccaattagcaatggagctcatcaaggaatggtaccttgcttctcaagccacaacaggaagcactggatgggatgaccatgatgcttttgctgcctggaaggacagtcctgaaaactacaaggggcatatccaaaagcttagggctcaaaaagtgtctcattcgctctctgatcttgctgactccaggtcagatctgcaagcattctcgcagggtctttctacgctattagataagatggatccctctcagagagcgaagtttgttcatgaagtcaaagaagtccttgattgatgataccaacacatccaacacaatgt

SEQ ID NO: 101671 - DNA, 420 bp, Zea mays
cccacgcgtccggcggcgagatgaacggcggcggggaggacgggaagcagcagccgcgcctggtactggcgcacaagctgttcctcctgtcgcactccgacgtcgacgacctcgccaaggtcgacctacgcgctgacgtgttcgcggcagtcaaatccgatgacatggcagctctgtacgagtcgttggcggcggacggcgtactggagacggacgcggcgctgctggccgagatgcgcgccaggatcgacgaggagatccggaagctcgacgagaagattgctgatgcagaggagaacttgggtgagagtgaagtgcgtgaggcccatctcgccaaatccttatatttcataagggttggggagaaggagaaagcactggagcagcttaaagttactgaaggaaaaaactgtaactgtg

SEQ ID NO: 101672 - DNA, 403 bp, Zea mays
gttctgaagctgatagacaagtatgatctgtatggaagcgtagcgtttcctaaggatgacaatcaggctgatgtcccggagatctaccgcctcgcggccaaaatgaagggtgtcttcatcaaccctgctctcgttgagccgttcggtctcaccctgatcgaggctgcagcacacggacttccaatagtcgctaccaagaatggtggtccggtcgacattacaactgcactgagcaacggactgctcgttgacccgcacgaccagaacgccatcgctcaagcactgctgaagctcgtagcagataagaacctgtggcaggaatgccggagaaacgggctgcgaaacatccacctttactcatggccggagcactgccgcacttacctcaccagggttgctgggt

SEQ ID NO: 101673 - DNA, 422 bp, Zea mays
  unsure (1)..(422): unsure at all n locations
gccgccggaggaggagccccaggccccgccgtcgccggacacagagcctaccgaggcggcgcccggcgaggcggaggatgagccgcaaaccctagagcgggcgcaggagctcttcgacaggggttccaaggccatcgaggatgaggacttcgtcgacgccgtagactgtctcagccgagcgctcgagatcagggcttcacattatggagagctcgcaccggagtgtgccagcacatacttcaaatatggatgtgccctgctatacaaagctcangaggagagtgatgttttgggaaatgttcccaagagcttgccaaatgaagactcagtgaagagtacagctactaaagatgacagtggaacctcaaaggtctctggtaccgatgncgangatgctgcgtcatcagaaaaaagtgatgctg

SEQ ID NO: 101674 - DNA, 393 bp, Zea mays
cgccgccgcttgctcctcctctccgactcctccctcgggcaccgtggtgttcttcgtggacagggcaggccggaggcgcctgatgctgatcagcctggtcggaatcgtcgtgtggctcgccgtgctcggcggcacgttcctgggcgccgcacaccacgccccacccgtcagcgacctggagacccgactgttggcgaaccagaaccagacccagacccagacgtgtcccgagttcaacccgaacgtccgctggagctgcatggactgcctcaaggccgcgtccacgtgcggcttctgtgctcaccagggagacaagcttcttccgggggcgtgcttggcgctgaacaacgcgtctcggcatgcgtgccgcgcagaccaccgggagttctacac

SEQ ID NO: 101675 - DNA, 281 bp, Glycine max
tctatttctcagtctctgtgtttgcggctgaggattccgaacgagtgaccttcttcgtttctcgcaaagtttaagtaatcatgggtaaggaaaaggttcacatcaacattgtcgtcattggacatgtcgactctgggaagtcaactaccactggtcacttgatctacaagcttggaggtattgacaagcgtgtgattgagaggttcgagaaggaggctgccgagatgaacaagaggtcattcaagtatgcctgggtgctcgacaagctcaaagctgagcgt

SEQ ID NO: 101676 - DNA, 285 bp, Glycine max
agaaaaggaagaggaaaagcacgaatggcaacacaagcaggaaaagcaccaaggaaaggaaagtgaagaagaagaagaagaccaagacgaggatgaggagcaagacaaagagagccaagaaagtgaaggttctgagtctcaaagagaaccacgaagacataagaataagaacccttttcacttcaactctaaaaggttccaaactctcttcaaaaaccaatatggccacgttcgcgtcctccagaggttcaacaaacgctcccaacagcttcagaatctccgaga

SEQ ID NO: 101677 - DNA, 280 bp, Glycine max
agccccggaattcttggaacatgcgttcgtcgtggacaggcagatagtgagaaagctacaaggtgagaacgaagaggaagagaagggtgccattgtgacagtgaaaggaggtctcagcgtgataagcccacccacggaagagcagcaacaaagacccgaggaagaggagaagccagattgtgacgagaaagacaaacattgccaaagccaaagcagaaatggcattgacgagaccatttgcacaatgagacttcgccacaacattggccagacttcatca

SEQ ID NO: 101678 - DNA, 283 bp, Glycine max
agagcacccagagaccatgcaacaacagcagcagcagaagagtcatggtggacgcaagcaggggcaacaccagcagcaggaggaagaaggtggcagtgtgctcagtggcttcagcaaacatttcttagcacaatccttcaacaccaacgaggacacagctgagaaacttcggtctccagatgacgaaaggaagcagatcgtgacagtggagggaggcctcagcgttatcagccccaagtggcaagaacaagaagacgaagacgaagatgaagacgaagaatat

SEQ ID NO: 101679 - DNA, 282 bp, Glycine max
caccagatgtacgagagctccttccagaccctctcggagcgtctcttcaaggataccccgtggccctccgtggacgccgtcgcgcactacgtcgacaacgaccacgtcttctgcctcctctaccgcgagatgtggttccgccacctctacgctcgtctcactccgacgctccgccagcgcatcgactcgtgggacaactactgcagcctcttccaggttgtcctccacggggtcgtcaacatgcagctccccaaccagtggctatgggacatggtcgacgag

SEQ ID NO: 101680 - DNA, 279 bp, Glycine max
actcttcctcaccgattgctagaatggaatttcgatgctcagtcatctcttttaccattctcttctctcttgctcttgcaggagagagccatgtccatgcatcgctacctgaggaagattattgggaagctgtttggccaaacactcccattcccactgcactgcgagagcttctaaagcctctccctgcaggtgttgagatcgatgaactccctaagcaaattgatgatacacagtacccaaaaacattcttctataaagaagaccttcatccaggca

SEQ ID NO: 101681 - DNA, 277 bp, Glycine max
ctgaccaagccatggcgatgagaaccaaactttctttagctatctttttcttttttcttttagccttattttcaaacctagcctttggcaaatgtaaagaaaccgaggtagaagaagaagaccctgagctcgtaacatgcaaacaccaatgccaacagccacagcaatacactgagggtgacaagcgggtatgcttgcaaagatgtgacaggtatcatcgtatgaagcaagagcgagagaaacaaatccaagaggaaactcgtgagaagaaagagga

SEQ ID NO: 101682 - DNA, 274 bp, Glycine max
acgcttgctctctctctctcggtcctttcagctttgactttggtggaaactaaagactagtcaaaatggtgaagttcacagctgaagagctgcgtcgcattatggactataagcataatatccgtaatatgtctgtcattgctcatgttgatcacggaaaatcaaccctgactgattctcttgtggctgctgctggtattattgctcaagaagttgcaggtgatgtccgtatgactgatacccgtgcagatgaagctgagcgtggtattacaat

SEQ ID NO: 101683 - DNA, 276 bp, Glycine max
  unsure (1)..(276): unsure at all n locations
caattattaacactttccttagttcaatatggggaagcccttcttcactctctctctttcttccctttgcttgctactcttgtcgagtgcatgctttgctattacctccagcaagttcaacgagtgccaactcaacaacctcaacgcgttggaacccgaccaccgcgttgagtccgaaggtggtcttattgaaacatggaactctcaacaccctgagctgcaatgcgccggtgtcactgtttccanacgcaccctcaaccgcaacggcctccactt

SEQ ID NO: 101684 - DNA, 274 bp, Glycine max
  unsure (1)..(274): unsure at all n locations
cttatttgaaaaacacttgggcgttggtgcacatgtttgcttcgttaattttctctggagacaacaggctcactgagaaaacaatttttacttgcagagatttggacatcttggttgtttattatacaatagcaactcaatttagaaaatttctaccgcattacattaggtggcatctgtataccttgttgatctacattctcccatcttttctcactgctgaaattanatataagcggaatttgagtaatattcatatttccggcttatttta

SEQ ID NO: 101685 - DNA, 275 bp, Glycine max
ccatcatcatggccacctctgctattcagcaatcagcattcgcaggtcaaactgctctgaagcagctcaatgagttggtccgcaagaccggtggcgccggcaaaggtcgcaccaacatgcgccgtaccgtcaagagtgctcctcagagcatttggtatggccctgatcgtcccaagtacctgggtccattctcagagcagattccgtcatacctgaccggagaattccccggtgactacggatgggacactgctggactatcagctgacccggaa

SEQ ID NO: 101686 - DNA, 278 bp, Glycine max
tgagaagactgccctgtatttgacaacttatttgaattttgtcagatttatgctggtggaactatagatgctgcacgtcgattaaacaatcaattgtgtgatattgctataaactgggccggtggactacatcatgctaagaaatgcgaggcatctggattttgttacatcaatgacttggttttaggaatcttggagcttcttaaatatcatgctcgtgttttgtatattgatatagatgtgcaccatggtgatggtgtagaagaagccttctactt

SEQ ID NO: 101687 - DNA, 277 bp, Glycine max
attggaaaaagtttcctctacaaaagcacaatttgttagtggaaaaaccttcaaatatgatataattggtgctggttcacattcttcaggagattttcctgaaaaggaagatcaagaaaaacccaaaaagattgataccagattgagacaaagaatagatcctcaatacaatgaggttcaggctcagatggaaacaaatttgtttaaattgtctcttgatgatgttgaaactcctaaaggttctatgttggatcttaaaatttctcaatctaaaatt

SEQ ID NO: 101688 - DNA, 278 bp, Glycine max
ggaaaggttagagttgtgaactgccaagggaatgcagtgttcgacggtgagcttaggaggggacaattgctggtggtaccacagaacttcgtggtggcggagcaagccggagaacaaggattcgaatacatagtattcaagacacaccacaacgcagtcactagctacttgaaggatgtgtttagggcaattccctcagaggttcttgcccattcttacaaccttcgacagagtcaagtgtctgagcttaagtatgaaggaaattggggtcctttggt

SEQ ID NO: 101689 - DNA, 273 bp, Glycine max
atttgaaattttgataaaccgcgatcacaggttgccgcaccttaaaaccggaaacaaaagcaatcgttacttgatttcaagaatctttcaatttttcctacttctttgtgcacgatttcttaagggaaagaaaatcactctctgtgccggtcacagacttcgtgaatcattttcttttccactcttagtttatttgctgaacactctcctatttgatataggacttcgtgtcagatttaaacttcttctgtctctttctcagttctctgttta

SEQ ID NO: 101690 - DNA, 276 bp, Glycine max
tttagattggacagatcctgatcagtcacctgagaaagaaaatgaggcctttcaacgtgcaatggctcttgctggcagtgagtttctggatagtgttcgatttcatgtcaattcatggttaccagcaaggtcaattgtaatggagaccctagaggctagacatactgttgatcctagtggagaaattctagttttgactaaattgtgtccttggaagcttcacttatttgagcttgaggagagttgaaaaatgacccttctgtcaaatatgttctg

SEQ ID NO: 101691 - DNA, 273 bp, Glycine max
gacgttcgttcgtgtctcaaaaaaaggggtactaccactctgtagtgtatatggatgctggaaatcaatgtgttttgtatttgttcacttccttcgtcgtcccccccggagcccgtttcgaaccgccgcgttatgaagccggcgtcaaagcgccctccatttaccattccgagagaggtccaacgacttcccaggtcctcgccgtcctcgccggcctcccggtcggtggcatcctgctcctcctggcgggattgaccctggcaggaaccctca

SEQ ID NO: 101692 - DNA, 270 bp, Glycine max
gagcgattccaagcacaagttctctgagttgttttgtgagatagcacatagcatacgcaaggaaggagtattacaaccgaaaccctgaagaaaaaaagagtagaggaagaaaaaacacctgcaccaccaacgatgggtgtggattactacaagatcttgcaggttgataggagcgccaaagacgacgacttgaagaaggcttataggaaacttgctatgaaatggcaccctgataagaaccccaacaacaagaaagaagctgaagctaag

SEQ ID NO: 101693 - DNA, 261 bp, Glycine max
ctttccaaggtgggcgacaactcaattgatattcctgaagcaaacgtaataattcagatctcttcacatgctggttcaaggcgacaagaagcccagcgtctgggtcgtattcttagggcaaagggaaagcttgaggataggatggcagggggcaaggaggagtataatgcatttttttattcccttgtttcaattgatacccaggagatgtattactccactaagaggcagcaatttttaattgatcagggttacagcttt

SEQ ID NO: 101694 - DNA, 259 bp, Glycine max
  unsure (1)..(259): unsure at all n locations
tagnagaatcactcccttatccatttccacaccacaccatggcctcaaccaacgctctctcttcagcctccattctacgctctcccaaccgccagtctctgacccgaagagcgaaccataatggaagagtaaattaccggaaaccgaataaccgtttctccgtgaaagcctccgccaaagagattgcctttgaccagcattcccgctctgctatgcaggccggcattgacaagctcgccgacgctgttgggctcactct

SEQ ID NO: 101695 - DNA, 213 bp, Glycine max
cttattaacactttccttagttcaatatggggaagcccttcatcactctctctctttcttccctttgcttgctactcttgtcgagtgcatgctttgctattacctccagcaagttcaacgagtgccaactcaacaacctcaacgcgttggaacccgaccaccgcgttgagtccgaaggtggtcttattgaaacatggaactctcaacaccctg

SEQ ID NO: 101696 - DNA, 267 bp, Glycine max
tctccattggtccttaaacactcatcagtcatcaccatggccaagctagttttttccctttgttttctgcttttcagtggctgctgcttcgctttcagttccagagagcagcctcagcaaaacgagtgccagatccaaaaactcaatgccctcaaaccggataaccgtatagagtcagaaggagggctcattgagacatggaaccctaacaacaagccattccagtgtgccggtgttgccctctctcgctgcaccctcaaccgcaac

SEQ ID NO: 101697 - DNA, 275 bp, Glycine max
tatcactcttcaccttcctctgcgcaatttgtgcgcactccgtcgccgtcacctccgcggcatatccttccatccccggcacggaaaccggagagtgctccctccgcggcgtcggcgtcggcgacggtgttctggtccctccgcggcgagaagtgtacgaggaggggcgaatcttcgacatcacccacaggtatgtccccgagatgccggtgtgggactcgacggaggggctcgggcagcacttcctgtggctcgaaaagagcatgaagaatggc

SEQ ID NO: 101698 - DNA, 276 bp, Glycine max
aagctctagagaagtttgttgaggaatctagtacccctgttgttactgtctttaacaatgaaccgagcaatcaccctttcgttgtcaaattcttcaacagtcccaacgcaaaggcaatgttgttcatcaacttcactgccgaaggtgctgaagctatcaaatcaaaataccgtgaagctgctgagcaatataaacaacagggtgtcagctttttggtgggagatgttgagtctagtcaaggtgctttccagtattttggactgaaagaagagcaag

SEQ ID NO: 101699 - DNA, 275 bp, Glycine max
gtgacatttatggtaccattgattacatatttggaaatgcagcagtgattctacaagaatgtaacatcatatcaagaaaaccaatgcctggtcaattcacagtaatcactgcacaatctagagatagcccagatgaggacactggtatctcattccaaaattgctcaatcatagcaactcttgatctctattccaactctagcagcttcaagagctaccttgggaggccatggagggtgtattctcgcactgtttaccttgagtcctacattgat

SEQ ID NO: 101700 - DNA, 277 bp, Glycine max
ctagtataccttaataaataatttaagatactatgatgagagcacggttcccattactgttgctgggacttgttttcctggcttcagtttctgtctcatttggcattgcttactgggaaaaagagaaccccaaacacaacaagtgtctccagagttgcaatagcgagagagactcgtacaggaaccaagcatgccacgctcgttgcaacctccttaaggtggagaaagaagaatgtgaagaaggtgaaattccacgaccacgaccacgaccacaaca

SEQ ID NO: 101701 - DNA, 277 bp, Glycine max
gttgcgactaagagttgctgcttcttccgccactcagcacttcgctccctctgtgcttcaccaaccatggccgaaatcgaagctaccgttccagatccctctcaaatcgacgtcaaacttttcaaccgctggagcttcgacgacgttgaggttactgatatgtctctggctgattacattggagtgtccccgtcaaagcatgctacatatgttcctcacactgctggtaggtactcagtgaagaggttcaggaaggcgcagtgccccattgttgaga

SEQ ID NO: 101702 - DNA, 278 bp, Glycine max
gagcagcacagaagagggaaaacggcaccgccgccgtagaagaaaacaaccatggtgcacgtctccttttacaggaactatgggaagacattcaagaagccgcgtcgtccgtacgagaaggagcgtctcgacgcggagttgaagctggttggtgagtacgggcttcggtgcaagagagagctgtggagggtgcagtacgcgctcagccgcatccgcaacaacgcgcggaacctcctcaccctcgacgagaagaacccgcgccggatcttcgagggaga

SEQ ID NO: 101703 - DNA, 274 bp, Glycine max
gttcaatatcctagtacaccgtattaaagaatttaagatatactatgatgagagcgcggttcccattactgttgctgggagttgttttcctggcatcagtttctgtctcatttggcattgcgtattgggaaaagcagaaccccagtcacaacaagtgcctccgaagttgcaatagcgagaaagactcctacaggaaccaagcatgccacgctcgttgcaacctccttaaggtggaggaagaagaagaatgcgaagaaggtcaaattccacgacc

SEQ ID NO: 101704 - DNA, 272 bp, Glycine max
ggatctctccgcaagaatgcaatgttcgtgccacactacaacctgaacgcgaacagcataatatacgcattgaatggacgggcattgatacaagtggtgaattgcaacggtgagagagtgtttgatggagagctgcaagagggacgggtgctgatcgtgccacaaaactttgtggtggctgcaagatcacagagtgacaacttcgagtatgtgtcattcaagaccaatgatacacccatgatcggcactcttgcaggggcaaactcattgtt

SEQ ID NO: 101705 - DNA, 271 bp, Glycine max
ataaaattcttccaccaagttatgggtttccttgtgttgcttcttttctccctcttaggtctctcttctagttccagcatatcaactcatcgttccatattggaccttgacctaaccaagtttaccacacagaaacaggtgtcttcactgttccaactatggaagagtgagcatggacgtgtctaccataaccacgaagaagaggcaaagagacttgagattttcaagaataacttgaactatatcagggacatgaatgcaaacagaaaat

SEQ ID NO: 101706 - DNA, 272 bp, Glycine max
cggctcgagctcagcttcgggacttggatgtcttcctcagtgttgtggatatgaacgagggagctctttttctgccacacttcaattcaaaggccatagtggtactagtgattaatgaaggagaagcaaacattgaacttgttggcattaaagaacaacaacagaggcagcaacaggaagagcaacctttggaagtgcggaaatatagagctgaattgtctgaacaagatatatttgtaatcccagcaggttatccagttgtggtcaacgct

SEQ ID NO: 101707 - DNA, 273 bp, Glycine max
aggcacttggtagtcgaaggttatttatgttagattaccatgatatcttcatgccatatgtgaggcagataaatcagctgaattctgccaagacttatgcgacaaggactatcctttttttgagagaagatggaactttaaagccagtggccatcgaattaagtttgccacattctgctggggatctgtcagctgccgtcagtcaagtcgtcttacctgctaaggaaggtgttgagagcacaatttggctactagccaaagcttatgtcatcg

SEQ ID NO: 101708 - DNA, 261 bp, Glycine max
gaagaggaaaagatggaggtgattagaaatagaggcattcctgctgatgttcttgcaaagcgagctcatgaatttgaaaaacatgttgctcatgaaagcctcaaggatcaaattcctgctgttgacaagttgtattctactaaggttaataagtttgcaaaaattatgaaccttagacaaagtgttgttggtgatcttaaacttcttactgatgggaagttgtatgagggtaagcatattcctgtatctaatattagtgca

SEQ ID NO: 101709 - DNA, 273 bp, Glycine max
gaaagaaaggaaacggaataattcgatacccctctcgtctcgtaactaaccatggcagcgttccgatggaagagcttcgaggagaatgaggatcgcccagccaagcctcgtcattttggcgtcaccgagattcaaagcccccactgcactctcttctcccacaaccttcttcaggatatttttgaatctatgggagactatgtagatgggttaaagttttctggaggttctcacagcatgatgccaaaggctactatcaagcaaatcattgac

SEQ ID NO: 101710 - DNA, 268 bp, Glycine max
attcattcttaatctttgtgaaaaataatgttcatcgagaattttaaggttgagtgtcctaatgtgaagtacaccgagactgagattcagtccgtgtacaactacgaaaccaccgaacttgttcacgagaacaggaatggcacctatcagtggattgtcaaacccaaatctgtcaaatacgaatttaaaaccaacatccatgttcctaaattaggggtaatgcttgtgggttggggtggaaacaacggctcaaccctcaccggtggtg

SEQ ID NO: 101711 - DNA, 275 bp, Glycine max
atatactatgatgagagtgcggtttcctttgttggtgttgctgggaactgttttcctggcatcagtttgtgtctcattaaaggtgagagaggatgagaataaccctttctacttgagaagctctaacagcttccaaactctctttgagaaccaaaacggtcgcattcgtctcctccagagattcaacaaacgctccccacaacttgagaaccttcgagactaccggattgtccagtttcagtcaaaacccaacacaatccttctcccccaccatg

SEQ ID NO: 101712 - DNA, 271 bp, Glycine max
cgaaaggatctcgaagacccaccaacgcacgaaagccgggatctttcagaaaatggattcctattcgaagggtgcataaccgcatggataagctcacactaacccgtcaatttgggatccaattcggttccttaggaggtatcgggaaggaattttggaatgtaataatatcgattcatacagatacagaagaaagggttctctattgattcaaacgctctacctacgagatagggatagagaaagaggaaaaaaccgaggatttcacata

SEQ ID NO: 101713 - DNA, 266 bp, Glycine max
caaagttgaacaaaactcattttccaactacatttcttccaccaactcataaaatcctcatatctgttcccaaaagcttgtttgtgagaatggcttcgggtgaaaagaaattcccacctcaacaacaacaaacacagcctgggaaggagcatgctatgaatccagtaccccaattcactagccctgactacaagccttcaaataaacttcaaggaaagatagcattagtgactgggggtgactctgggattggacgagcggtgtgt

SEQ ID NO: 101714 - DNA, 265 bp, Glycine max
  unsure (1)..(265): unsure at all n locations
caaggatcaaattcctgctgttgacaagttgtattctactaaggttaataagtttgcaaaaattatgaaccttagacaaagtgttgttggtgatcttaaacttcttactgatgggaagttgtatgagggtaagcatattcctgtatctaatattagtgcaggggaaaatcatgtagttcaaatacccttaatggcacaggaggaaattctgtcttctagtgcaagtgatttcagaactgcaatggtgagtanaaatagcaaacct

SEQ ID NO: 101715 - DNA, 264 bp, Glycine max
atcacaggaggtcatcggagatgcactcggtgaggaatttaagaggtatgtcttcaaaattaccggaggttgtgacaaacaaggatttccaatgaagcagggagtgctgactcctggtcgtgttagacttttgcttcacaggggaactccttgcttccgtggatatggaaggcgtaatggagagcgtaggagaaagtctgttcgtgggtgcattgtcagcccagacctctctgttttgaacttggtaattgtgaagaaaggtga

SEQ ID NO: 101716 - DNA, 267 bp, Glycine max
atcgagccgctcgagccgcgcccacaacctcgtcaagaagaagagcacgagcagagagaggaacaggaagcgcctcgcaaggaggaaaaacgcggagaaaagggaagtgaagaggaagatgaggatgaggatgaggaacaagatgaacgtcaattcccattcccacgcccacctcatcagaaggaagagcgaaagcaagaggaagatgaggatgaggagcagcagcgagagagcgaagaaagtgaagattctgagttacgcagacat

SEQ ID NO: 101717 - DNA, 270 bp, Glycine max
gtaaagatctcgcaatggttaaagttaatgtagcatgtgctgctgttggcttgacatcaagttacactccaactccattgttggaatctggtctgcaaaaagacagagggttaattgtggagtattttggaaggatgtcttacgttgctcataacgttaatcagccccaagagaaagatttgttggagggaaatttttcctttgatattaaatctcgctctagattggaaaaagtttcctctacaaaagcacaatttgttagtggaaaaa

SEQ ID NO: 101718 - DNA, 269 bp, Glycine max
atttgaaattttgataaaccgcgatcacaggttgccgcaccttaaaaccggaaacaaaagcaatcgttacttgatttcaagaatctctcaatttcttcctacttctttgtgtacgatttcttaagggaaagaaaatcactctctgtgctggccacagacttcgtgaatcattttcttttccactcttagtttatttgctgaacactctcctatttgatataggacttcgtgtcacatttaaacttcttctgtctctttctcagttctct

SEQ ID NO: 101719 - DNA, 272 bp, Glycine max
attgataaatcatatcattaaattattaaataagttttgaagttgatacttgtgtctatattgagtatgcttttggtcattgtgcgagcagaaggatttacaaaagtggtgttagtggaaaacgttgtgatggaagtagcactgctcctccttgcacagggtgggttgaaatgatggctcctgttttctcaagagctgcttggcgttgcatttggtatatgatccagaatgacttgatccatgcatggggtctagatatgcagctaggctac

SEQ ID NO: 101720 - DNA, 272 bp, Glycine max
gctgatgacaccatcaattttgaggcttttccccacaagctggtgcagtttggagagattcaggaaaaagttgtgttgaaattttcacaagaggaatttcttacagcttggtcaactcaggtgcgtcccgcaacgactctgttggctgatgggtgcccatatttgtatgctatggtgcatgatagttcagtgtctacaataccaggtgattttgtcattggtgttaagttgacaaccataaacaatatgtgtgcatatgggctcaatcctgg

SEQ ID NO: 101721 - DNA, 269 bp, Glycine max
cgaaacagttgaacaacttaggtctggtggtcaatttactgagtcctcagagtgtaaatatgttgtatggatttcgtttagtggcttagggaataggattttgaccctagcttctgcttttctctatgctctcctcactaaccgtgttctactggttgaccctggagcggatatggttgatctcttttgtgagccatttccagattcttcctggcttcttcctagtgactttcctcttaatgctcagtttaataatttcagtcagaatt

SEQ ID NO: 101722 - DNA, 269 bp, Glycine max
gaaactgagaaaccgttgtggaccagttcaaatgccttatactctgcttttgccttcgagggattcttcctcagctcctcatgcctgagaaaggttctgctgagtatgaggagctgaggaagaatccccagaaggcttacttgaagactattacaccaaagtttcagacccttattgacctttctgttatagaaatcttgtcaaggcatgcatctgatgaggtgtaccttggggagagcgctgatccaaattggacatctgatacaaga

SEQ ID NO: 101723 - DNA, 273 bp, Glycine max
aggagataaacaaaggttcctgtttagttcacgaacgcaaggcagcagcataggggagcagaggctgcaagagagcgtgattgtggaaatctcgaaggaacagattcgggcactgagcaaacgtgccaaatctagttcaaggaaaaccatttcttctgaagataaaccttttaacttgagaagccgcgaccccatctactccaacaagcttggcaagttctttgagatcaccccagagaaaaacccccagcttcgggacttggatatcttcct

SEQ ID NO: 101724 - DNA, 269 bp, Glycine max
cggctcgagtggagaagaagaagggtgagctaaagtcaattttccttcctttcctttccactagtcacataatcccgctagtggacatggccagactcttcgccttgcacgacgtcgacgtcaccatcatcaccaccgcacataacgccaccgttttccaaaagtccatcgatttagatgcgagtcgcggtcgccccatcagaacgcacgttgtcaacttccccgccgcacaagtgggtctccccgttgggatcgaagccttcaacgtc

SEQ ID NO: 101725 - DNA, 268 bp, Glycine max
cagaggagaacacaaacagcagcgtcttggtttgtgagagagacagaggcacagagagaaaatggtttcggggtcaggaatctgcgcgaagagggtagttgtggaggcgcggcaccacatgctggggaggctggcatcgatcgtggcgaaggaacttctgaatgggcagaaggtggtggtggtgcgctgcgaggagatttgcatctccggtgggctcgtcaggcagaagatgaagtacttgcgtttcctccgcaagcgcatgaacacc

SEQ ID NO: 101726 - DNA, 269 bp, Glycine max
attaataaagatgagtttgaagaacaacatggtggtgctaaaggtgtgtttgttgcttcttttccttgtgggggttacagctgcacgcatggaactgagcttcttcaaaagtgatcagtcatcaagttatgatgatgatgagtattcaaaaccatgctgtgatctctgcatgtgcacacgctcaatgcctcctcaatgcagctgtgaagatattaggctgaattcatgccactcagattgtaagagctgtatgtgcacacgctcacagc

SEQ ID NO: 101727 - DNA, 272 bp, Glycine max
ctcactcttcactcaaaactcttctctttcattttcataattcccacacattatggctgagcttcactaccaaccacaacaccaataccccctccgctaccctaacgatccacaccaacaaacccgttcctccacccaccaggtcgtcaaggccgccaccgccgtcacagcgggcggctccctcttgatcctcgcctcgttgatcctcgccgccaccgtcattgccctcaccatcgtcaccccgctgttcgtcattttcagtccggttctcg

SEQ ID NO: 101728 - DNA, 255 bp, Glycine max
cttaattattaacacttccttagttccatatggggaagcccttcactctctctctttcttccctttgcttgctactcttgtcgagtgcatgctttgctattagctccagcaagctcaacgagtgccaactcaacaacctcaacgcgttggaacccgaccaccgcgttgagtccgaaggtggttgactccaacatggaactctcaacaccctgagctgaaatgcgccggtgtcactgtttccaaactcaccctcaa

SEQ ID NO: 101729 - DNA, 265 bp, Glycine max
tcttttaacacttcgggaagtgctctatggaggagctggtgcaaagaatgctattctcatgaatatgccaaatgctgttctttcaatgtggagatattttgttggagatctcgtctttgaagtttctaagatgacttctccctacattaaatgtacagtctctttcttcatagcatttggaaatttggctgatgacaccatcaattttgaggcttttccccacaagctggtgcaatttggagagattcaggaaaaagttgtattg

SEQ ID NO: 101730 - DNA, 266 bp, Glycine max
aaaattcattggacagtgttattttcagtatcagcatcatggctccaattgcagtgggagatgtcattccagacggcattttggcttacttggatgaagaaaacaaaccccaaactgtctctattcactctctcgccgccggcaagaaagtcatcatctttggggttcccggtgccttcactcctacatgcagcttgaagcacgtgcctggcttcattgagagagcagaagagctgaaaggaaagggtgtggacgaaataatctgt

SEQ ID NO: 101731 - DNA, 266 bp, Glycine max
cggctcgagatcataaaattcttccaccaagttatgggtttccttgtgttgcttcttttctccctcttaggtctctcttctagttccagcatatcaactcatcgttccatattggaccttgacctaaccaagtttaccacacagaaacaggtgtcttcactgttccaactatggaagagtgagcatggacgtgtctaccataaccacgaagaagaggcaaagagacttgagattttcaagaataacttgaactatatcagggacat

SEQ ID NO: 101732 - DNA, 265 bp, Glycine max
attagaaggaaatattgaatgataagaaaaaacgagaagtaattatgatctgtttgttctgaacaaaaaaaaaaaaaagatcatacatagtagtgttggtgggttgcaaagatgcttgggggtcttctccataggggtcataagataaaagggacagtggtgttgatgcgcaagaatgtgttggacgtgaatagcgtaaccagcgttgggggaattattggtcaaggtctcgacttagttggctcaacactcgatactcttactg

SEQ ID NO: 101733 - DNA, 259 bp, Glycine max
aatggtttgattgtgttgatgaggaggattcctttgaggaagtttctttaagtgcagcacttaatggtgttgagggtttggactatatggaaagaattcctcttgccacatctgagggttttcctcatgtgctttcacgcaaaaatggcgaaaaaggcaaaaggagatttgtctctggggatggtgaagagatgacattgattccaggaaccagtgttgaagaggcttacaacaagctaatagttgaacttgagaaaag

SEQ ID NO: 101734 - DNA, 272 bp, Glycine max
attgacaccaacagcttggagaaccagctcgaccagatgcctaggagattctatcttgctgggaaccaagagcaagagtttctaaaatatcagcaagagcaaggaggtcatcaaagccagaaaggaaagcatcagcaagaagaagaaaacgaaggaggcagcatattgagtggcttcaccctggaattcttggaacatgcattcagcgtggacaagcagatagcgaaaaacctacaaggagagaacgaaagggaagacaagggagccattgt

SEQ ID NO: 101735 - DNA, 267 bp, Glycine max
aagtcagtggtactgaccatactcatattttgcgagttccattcagatcagagtcaggaactctccgtaaatggatttcaaggtttgatgtgtggccttatctagagacttatgcagaggatgttgccagtgaaattgctgctgagttacaagggtatcctgatttcatcattggaaactacagtgatgggaatcttgttgcatctttattggcttataaaatgggagttacacagtgcacaatcgcgcatgcacttgagaagacaa

SEQ ID NO: 101736 - DNA, 267 bp, Glycine max
cttgtgttgcttcttttctccctcttaggtctctcttctagttccagcatatcaactcatcgttccatattggaccttgacctaaccaagtttaccacacagaaacaggtgtcttcactgttccaactatggaagagtgagcatggacgtgtctaccataaccacgaagaagaggcaaagagacttgagattttcaagaataacttgaactatatcagggacatgaatgcaaacagaaaatcaccccattctcatcgtttaggattg

SEQ ID NO: 101737 - DNA, 271 bp, Glycine max
agtgattgtgtctctttctccccagtcaagggcttctattgctgttcattttggcatttctccaattcaggctttcaaaaagctgacaagattttttaaatccttgggagtgaaggcagtttttgatacaagttgtagtagagatttgacccttgtcgaatcttgtgtggagttcatcacaaggtatagacagaatcagttggttgatgatgagaggagtaaatcaagccgacctatgattgcatcagcttgcacaggttggatatactat

SEQ ID NO: 101738 - DNA, 270 bp, Glycine max
atcctcctcatctctcttctcttctgcatcgcccacacttgcagcgcctccaaatggcagcaccagcaagatagctgccgcaagcagctccagggggtgaacctcacgccctgcgagaagcacatcatggagaagatccaaggccgcggcgatgacgatgatgatgatgacgacgacaatcacattctcaggaccatgcggggaagaatcaactacataaggaggaacgaaggaaaagacgaagacgaagaagaagaaggacacatgcag

SEQ ID NO: 101739 - DNA, 271 bp, Glycine max
tatagtagtgttggtgggttgcaaagatgcttgggggtcttctccataggggtcataagataaaagggacagtggtgttgatgcgcaagaatgtgttggacgtgaatagcgtaaccagcgttgggggaattattggtcaaggtctcgacttagttggctcaacactcgatactcttactgccttcttgggccgatccgtgtctctccagcttattagtgctaccaaagctgatgccaacggaaaagggaaacttggaaaggctaccttttt

SEQ ID NO: 101740 - DNA, 278 bp, Glycine max
aggtatgaaactgatgaatgaaattgaggctgatcagtcaggaacaatagctgaggtattagctgaggatgggaaaccagtcagtgtagacatgcctctttttgtaatagttccatgagtaccggaagggaccttacttcaaagttgatatgaaatctccctagcttgttggatagcagcatggtatttgatgtcagattttctgttcagaaatttcttgagtgataatgtttgtctcattttaagaaatccttgtcttctttagccccacccctcct

SEQ ID NO: 101741 - DNA, 264 bp, Glycine max
atggaatcctgcttgcacaaaagcaatgactatgtcatttaatccaaacccgtgttctgatgcatggagtttggaatttctgaagcgtaccggaattcattgtgatatcatttgtgtcactggatggactgccaccccaatgcaggatgttcaggttacaattgattggtttatttcctctcaggaatgtgttcccaggacctattgtgttttaaatccacaaaatccttttgtgttaaataggtggatgggaaaactgacttt

SEQ ID NO: 101742 - DNA, 265 bp, Glycine max
ggtttgaaaagaagccggtgctgtctccttgttctccatcgtaagatataactaattatttttatatcttcatcaagatgcgccgagggagaaccgccgccgccgctgccgccgttgtggatcccacgccggaccaggccaaggagacgacgcggttccgtggcgtgaggaagcggccgtgggggcgattcgcggcggagattcgagatccgtggaagaagcagcgcgtttggctggggaccttcgattccgccgaggatgccgc

SEQ ID NO: 101743 - DNA, 268 bp, Glycine max
aagaaatgaagagtactatcttctttgctctctttctagtttgtgccttcaccatctcatacctgccttcagccaccgctcagttcgtgctcgacactgatgatgatcctcttcaaaacggtggcacatactatatgttgccagttatgagaggaaagggcggtggaatagaagtagattcaactggaaaagaaatatgccctctcactgttgtgcaatcacccaatgagctcgataaggggattggactagtctttacatctccatt

SEQ ID NO: 101744 - DNA, 270 bp, Glycine max
accaaatgatcattgtcgttcaagggaagggagcaattggatttgcatttccgggatgtcctgagacgtttgagaagccacaacagcaatcaagcagaagaggctcaaggtcgcagcagcaactacaagacagtcaccagaagattcgtcacttcaatgaaggagacgtactagtgattcctcctggtgttccttactggacctataacactggcgatgaaccagttgttgccatcagtcttcttgacacctccaacttcaacaatcagc

SEQ ID NO: 101745 - DNA, 269 bp, Glycine max
tagggaagcccttcttcactctctctctttcttccctttgcttgctactcttgtcgagtgcatgctttgctattacctccagcaagttcaacgagtgccaactcaacaacctcaacgcgttggaacccgaccaccgcgttgagtccgaaggtggtcttattgaaacatggaactctcaacaccctgagctgcaatgcgccggtgtcactgtttccaaacgcatcctcaaccgcaacggcctccacttgccatcttactcaccttatccc

SEQ ID NO: 101746 - DNA, 270 bp, Glycine max
tagccaatctgcattcaaaattaattttgaatgggatgatgggagtggaattcctggagcattttatatcaagaattttatgcaaactgagtttttccttgtgactttgactcttgaagacattccaaaccatggaagcatccactttgtttgcaattcgtggatttacaatgccaaactcttcaaaagtgaccgcattttctttgccaaccagacatatcttccaagtgagacaccagctccactagtcaaatatagagaagaagagtt

SEQ ID NO: 101747 - DNA, 270 bp, Glycine max
tatggatgtacaacaatgaagacactcctgttgttgccgtttctattattgacaccaacagcttggagaaccagctcgaccagatgcctaggagattctatcttgctgggaaccaagagcaagagtttctaaaatatcagcaagagcaaggaggtcatcaaagccagaaaggaaagcatcagcaagaagaagaaaacgaaggaggcagcatattgagtggcttcaccctggaattcttggaacatgcattcagcgtggacaagcagatag

SEQ ID NO: 101748 - DNA, 273 bp, Glycine max
gtcacagacagactcagtatatgatactgagaaactggctgagaggatagctaaactgtctggtggagttgcagtcatcaaggttggtgctgccacagagaccgagcttgaggatcgtaagctccgaattgaggatgccaagaatgcaacttttgctgccattgaggaaggtattgtacctggtggaggtactgcactggttcatctctccactcatgtcccagcactcaaggacaagcttgatgatgcagatgagaggctaggagccgacat

SEQ ID NO: 101749 - DNA, 263 bp, Glycine max
ggccaatctgcattcaaaattaattttgaatgggatgatgggagtggaattcctggagcattttatatcaagaattttatgcaaactgagtttttccttgtgagtttgactcttgaagacattccaaaccatggaagcatccactttgtttgcaattcgtggatttacaatgccaaactcttcaaaagtgaccgcattttctttgccaaccagacatatcttccaagtgagacaccagctccactagtcaaatatagagaaga

SEQ ID NO: 101750 - DNA, 261 bp, Glycine max
agggaaacaaaactacccttttgcttttgctctttgttctttgccatggagtggccacaacaacaatggccttccatgatgatgagggtggtgataaaaagtcaccaaaaagtttgtttttgatgagcaactccacgagggttttcaagactgatgcaggggaaatgcgtgtgctgaaaagccatggtggtaggatattttataggcacatgcacattggcttcatctctatggaaccaaagtccttgtatgttcctcagt

SEQ ID NO: 101751 - DNA, 265 bp, Glycine max
atcatggaaatattcgtttgaagagaatgggggaacttgatactagaccattccttgaagcaatgaagcaaagatataatgaggaggatgctgaagagagagcttcagagctgtgttcattgtgggaagaatatctaaaggacccagattggcatccattcaaagttatcatggttgaaggaaaagaaaaggaaattattagagatgacgatgaaaagctgaatgggttgaaaaatgacttgggtgaaggggcatataaagcagt

SEQ ID NO: 101752 - DNA, 262 bp, Glycine max
gaagggttcgagtgagagcatacctgtcgggacccgaaagatggtgaactatgcctgagcggggcgaaccagaggaaactctggtggaggcccgcagcgatactgacgtgcaaatcgttcgtctgacttgggtataggggcgaaagactaatcgaaccgtctagtagctggttccctccgaagtttccctcaggatagctggagcccgcgggcgagttctatcgggtaaagccaatgattagaggcatcgggggcgcaacgc

SEQ ID NO: 101753 - DNA, 264 bp, Glycine max
acaatgcttttggttgatacttatcataccaatcctgaaaatgcagttcgtagtatttttgttgcgcctttcagaggcggaaggcccattcgggtgggtacatttccgaataccatcgtgcagattgaaccagatatgaattcaaggtttcagcttttgagtaccactaccaatggtgattttgttcaaggggaagatctcgcaatggttaaagttaatgtagcatgtgctgctgttggcttgacatcaagttacactccaact

SEQ ID NO: 101754 - DNA, 263 bp, Glycine max
ggcacaacaacaacaaggacggttaaccatttctgccattttgctcataacttgcttggtaatcaaaccatcaaaactagcataatcgcaacacagaatatcgttgccctactcagtaatctattgggccaaccagtccattccatggagtatgggttgattccaacttgacaactaagcttgtcgcttttcttcataatgaacctcacaaaatttaaaaacttctgacgaaccacaagattaaactccatagggagaatagt

SEQ ID NO: 101755 - DNA, 264 bp, Glycine max
  unsure (1)..(264): unsure at all n locations
ctcttngggaatttctcaagattttgaaattgctggtaatactcttatgccagctttttctgtcccacaggctactgccagatcttctgaaaatgcggaatcctctgcatgatctggaatttgtgttttctctcgcttgttcgtttgtttaattcaataaaggaaattaggcatgaccctcttgttgagtatgctctgcctatttgaaaatttccacacctcttttaattatcgtaatgatgtgtgaagtgtgtgttattttaa

SEQ ID NO: 101756 - DNA, 267 bp, Glycine max
acatatcctagtacaccgtattaaagaatttaagatatactatgatgagagcgcggttcccattactgttgctgggagttgttttcctggcatcagtttctgtctcatttggcattgcgtattgggaaaagcagaaccccagtcacaacaagtgcctccgaagttgcaatagcgagaaagactcctacaggaaccaagcatgccacgctcgttgcaacctccttaaggtggaggaagaagaagaatgcgaagaaggtcaaattccac

SEQ ID NO: 101757 - DNA, 266 bp, Glycine max
agaacattttagaggcctcctacgataccaaattcgaggagataaacaaggttctgtttagtagagaggaagggcagcagcaaggggagcagaggctgcaagagagcgtgattgtggaaatctcgaaggaacagattcgggcactgagcaaacgtgccaaatctagttcaaggaaaaccatttcttctgaagataaaccttttaacttgagaagccgcgaccccatctactccaacaagcttggcaagttctttgagatcacccca

SEQ ID NO: 101758 - DNA, 268 bp, Glycine max
agcatttggaaatttggctgatgacaccatcaattttgaggcttttccccacaagctggtgcaatttggagagattcaggaaaaagttgtattgaaattttcacaagaggaatttcttacagcttggtcaactcaggtgcgtcctacaacaactctgttggctgatgggtgtccatatttgtatgctatggtgcatgatagttcagtgtctacaataccaggtgattttgtcattggtgttaagttgacaaccataaacaatatgtgt

SEQ ID NO: 101759 - DNA, 263 bp, Glycine max
aaaattcttccaccaagttatgggtttccttgtgttgcttcttttctccctcttaggtctctcttctagttccagcatatcaactcatcgttccatattggaccttgacctaaccaagtttaccacacagaaacaggtgtcttcactgttccaactatggaagagtgagcatggacgtgtctaccataaccacgaagaagaggcaaagagacttgagattttcaagaataacttgaactatatcagggacatgaatgcaaaca

SEQ ID NO: 101760 - DNA, 262 bp, Glycine max
aaaattttgataaaccgcgatcacaggttgccgcaccttaaaaccggaaacaaaagcaatcgttacttgatttcaagaatctctcaatttcttcctacttctttgtgtacgatttcttaagggaaagaaaatcactctctgtgctggtcacagacttcgtgaatcattttcttttccactcttagtttatttgctgaacactctcctatttgatataggacttcgtgtcagatttaaacttcttctgtctctttctcatttc

SEQ ID NO: 101761 - DNA, 258 bp, Glycine max
cacaggaactgatgttgggtacccaggtgggctttggtttgatccacttggctggggaagtggttctcctgagaagatcaaggagttgagaacaaaggagatcaagaatgggaggttggccatgttggctgtgatgggggcatggttccagcacatttacactggcactggtcctattgacaacctctttgctcaccttgcagatcctggtcatgctactatttttgctgctttcactcccaagtgagaagggttgga

SEQ ID NO: 101762 - DNA, 263 bp, Glycine max
attcaatatcctagtataccttaataaataatttaagatactatgatgagagcacggttcccattactgttgctgggacttgttttcctggcttcagtttctgtctcatttggcattgcttactgggaaaaagagaaccccaaacacaacaagtgtctccagagttgcaatagcgagagagactcgtacaggaaccaagcatgccacgctcgttgcaacctccttaaggtggagaaagaagaatgtgaagaaggtgaaattcc

SEQ ID NO: 101763 - DNA, 266 bp, Glycine max
acgttctgttcattcattcagaagcagcgtgggtgtgtgttttgcttcagagaatctttctcctaatggaacagctgaagccaagcgctcctaactcatcccctctcactccactcgccttcttggacagagcagccaccgtctacgcccacgtcccttccctagtctacaaccacaccaccttcacctggtccctcacgcgccgccgatgcctccagctcgcctcctccctctcctccctcggcatccgccgcggcagcgtcgtc

SEQ ID NO: 101764 - DNA, 261 bp, Glycine max
catcgagccgattcggctcgaggaatagaggttcctatagtgagaaactacccgaagtccagacatattataactcaactggatatggtgatgagcttttatgggcagctagttggctctatcatgctacgggtgatgattcttaccttcagtttgtgactggccaagatggagaagactatgctcaatggggaagcccaacctggttcagttgggataacaagcttgctggaactcaggttttgttatctagattaagct

SEQ ID NO: 101765 - DNA, 264 bp, Glycine max
agactatccttatgccgctgatggactggagatatgggctgcaattaagacatgggttcaagaatatgtgcccttgtactatgcaagagatgatgatgtcaaaaatgattctgaactccaacattggtggaaagaagctgtagagaaaggccatggtgatttgaaagacaagccatggtggcctaagttgcagacacttgaagaccttgttgaagtttgcctcattatcatatggattgcttcagctctccatgcagccgttaa

SEQ ID NO: 101766 - DNA, 268 bp, Glycine max
ccaaaaggtacatcgcttcagagagggtgatttgatcgcagtgcctactggtgttgcatggtggatgtacaacaatgaagacactcctgttgttgccgtttctattattgacaccaacagcttggagaaccagctcgaccagatgcctaggagattctatcttgctgggaaccaagagcaagagtttctaaaatatcagcagcagcagcaaggaggttcccaaagccagaaaggaaagcaacaagaagaagaaaacgaaggaagcaac

SEQ ID NO: 101767 - DNA, 227 bp, Glycine max
gatcaaactcaagtttatcgatacctcttcaaagtttgggcatggtcgcttccagaccacacaggagaagcagaagttctttggacgcctcaaagcataattatgttaattggatggaaatgctggaattctatttggttgccatcacttataaactttgtagtgtttctgttttgatattatggattctcgggtagtgagtcattacattgcgtcaatccctcctt

SEQ ID NO: 101768 - DNA, 254 bp, Glycine max
ctcagctagcattgtttggctgaagaacataaacaggagaactgttgatgttattgcatccagactgtatttttactattcgtatagctatgaacttatgggagatcttgctgaaattcggggcaaccttcttgcattgcaccgaattgccaccctccgccatgatgagctgggtcaggaaacacttcttaatttgttacttcgtaactaccttcactacaacctatatgatcaggctgagaagttgaggtcga

SEQ ID NO: 101769 - DNA, 260 bp, Glycine max
ctcgagccgcgccgtcgtcgctgtttttgtgtgtcgcttcttcgtaggtgcagctgcaatggagaagggacgccaaggagaacgtgtcagactctacgtgaggggtacaatccttggatacaaaaggtccaagtcaaaccagtatccaaatacatccctgatccaaattgagggtgtgaatgccaaagaagaagtagcatggtatgctggcaagaaaatggcctatatctacaaggctaaggtgaagaagaatggaagcc

SEQ ID NO: 101770 - DNA, 261 bp, Glycine max
aaaattttaataaaccgcgatcacaggttgccgcaccttaaaaccggaaacaaaagcaatcgttacttgatttcaagaatttctcaatttcttcctacttctttgtgtacgatttcttaagggaaagaaaatcactctctgtgctggtcacagacttcgtgaatcattttcttttccactcctagtttatttgctgaacactctcctatttgatataggacttcgtgtcagatttaaactttttctgtttctttctcagtt

SEQ ID NO: 101771 - DNA, 258 bp, Glycine max
attacagagaaagatttggctagagatgcaaactcgaagtttgagaatgtgattttgagcaagattgactcaaagttgggtggcttattagctgaagcctcttctgaagaggatttctctggcaaagttggtcagtcaactgttcttagaattacaggacttggatcaaagagggttggattgattggtcttggtcagtcaccttccactccttcaccttttaagggtcttggcgatgccgttgtggaggctgccaag

SEQ ID NO: 101772 - DNA, 257 bp, Glycine max
atatcctagtacaccgtattaaagaatttaagatatactatgatgagagcgcggttcccattactgttgctgggagttgttttcctggcatcagtttctgtctcatttggcattgcgtattgggaaaagcagaaccccagtcacaacaagtgcctccgaagttgcaatagcgagaaagactcctacaggaaccaagcatgccacgctcgttgcaacctccttaaggtggaggaagaagaagaatgcgaagaaggtca

SEQ ID NO: 101773 - DNA, 256 bp, Glycine max
cttgcggctagggttttagcgcacttcttctagatttaaggaagatgggtaaggaaaaggttcacatcagtattgtggttattggccatgttgactctgggaagtccactaccactggccacctgatctacaagcttggaggcattgacaagcgtgttattgagagatttgagaaggaagctgctgagatgaacaagaggtctttcaagtatgcctgggtgcttgataagcttaaggctgagcgtgaaagaggaat

SEQ ID NO: 101774 - DNA, 260 bp, Glycine max
gttcacaatcctcctcatctctcttctcttctgcatcgcccacacttgcagcgcctccaaatggcagcaccagcaagatagctgccgcaagcagctccagggggtgaacctcacgccctgcgagaagcacatcatggagaagatccaaggccgcggcgatgacgatgatgatgatgacgacgacaatcacattctcaggaccatgcgaggaagaatcaactacataaggacggacgaaggaaaagacgaagacgaagaag

SEQ ID NO: 101775 - DNA, 260 bp, Glycine max
gtgagtttgttgttcctcactgacctcaccatggcgaccagagccaagctttctttagctatcttccttttctttcttttagccttgatttcagacctagccttgggcaaacttaaagaaaccgaggtcgaagaagatcccgagctcgtaacatgcaaacaccagtgccaacagcaacggcaatacactgagagtgacaagcgaacatgcttgcaacaatgtgacagtatgaagcaagagcgagagaaacaagtcgaaga

SEQ ID NO: 101776 - DNA, 261 bp, Glycine max
tctcgagccgaatcggctcgaggagaacttcctcttcgtttcgctgactttggggttttgcataggaatgaggctagtggcgcactgagtggattaacacgtgttaggagattccagcaggacgatgcacatattttctgcagggagtctcagataattgatgaacttcaagcagttcctcacttcatcctttatctgagactccctgcagaaaaaggatgaagtgaggaacagcttgaatttcatcaattatgtctataa

SEQ ID NO: 101777 - DNA, 261 bp, Glycine max
aagaagcaagcatgtgtggcggagcaatcatcgcagatttcatacctcggcagcgtccccgcaccctcacagcctccgaactctggcccaagcgcacgaacctcaacctcaacctcctcctcctccagttaagaggcagaggaaaaacctctacagagggatcaggcagcggccctggggcaaatgggccgcggagattcgcgatccacgtaaaggagttcgtgtctggcttggcaccttcaacaccgccgaagaagccgc

SEQ ID NO: 101778 - DNA, 262 bp, Glycine max
acatatcctagtataccttaataaataatttaagatactatgatgagagcacggttcccattactgttgctgggacttgttttcctggcttcagtttctgtctcatttggcattgcttactgggaaaaagagaaccccaaacacaacaagtgtctccagagttgcaatagcgagagagactcgtacaggaaccaagcatgccacgctcgttgcaacctccttaaggtggagaaagaagaatgtgaagaaggtgaaattccac

SEQ ID NO: 101779 - DNA, 262 bp, Glycine max
  unsure (1)..(262): unsure at all n locations
cctactcattctccatacctcaacgaagaggttanagagacggcaacactttgctgtccgccttgaccgagcagagcttcgtcttggccctcgattttgccctaaagtactctcagtcacaacagacaccgtcgtcgtcgtcgtcgtcatcaatggcaccgaagcagaccaaggctgagaagaagatcgcttacgatgcgaactgtgcgacctaatggaggagtacggccagatcctcgttgtgaactccgataacgtggga

SEQ ID NO: 101780 - DNA, 273 bp, Glycine max
  unsure (1)..(273): unsure at all n locations
attctcgtcgcattggtcgcttaaaacactcatcaagtcatcaccaatggccaaggctagttttttcccctttgtttctgctttcaagtggtgctgcttcgctttcagttccagagagcagcctcagcgaaacgagtgccagatccanaaactcaatgccctcaaaccggataaccgtatagagtcagaaggagggctcattgagacatggaaccctaacaacatgcattcagcgtggacaagcagatagcgaaaaacctacaaggagagaac

SEQ ID NO: 101781 - DNA, 258 bp, Glycine max
atggtatttttggcatgatattcccgggttgtcctagcacatttgaagagcctcaacaaaaaggacaaagcagcaggccccaagaccgtcaccagaagatctatcacttcagagagggtgatttgattgcagtgccaaccggttttgcatactggatgtacaacaatgaagacactcctgttgttgccgtttctcttattgacaccaacagcttccagaaccagctcgaccagatgcctaggagattctatcttgctg

SEQ ID NO: 101782 - DNA, 251 bp, Glycine max
ctcgagccgcttaattattaacacttccttagttcaatatggggaagcccttcactctctctcattcttccctttgcttgctactcttgtcgagtgcatgctttgctattagctccagcaagctcaacgagtgccaactcaacaacctcaacgcgttggaacccgaccaccgcgttgagtccgaaggtggtttgattcaaacatggaactctcaacaccctgagctgaaatgcgccggtgtcactgtttcc

SEQ ID NO: 101783 - DNA, 255 bp, Glycine max
acagattgcaaagtttgttgttgggctaggagacaaggtttcccccactgacataaaggaagggatgcgtgttggggttgatagaaataaatatcagattcagattcctttgcctccaaaaattgatccaagtgtgaccatgatgactgttgaagagaagccagatgtaacatataatgatgttggcggttgtaaggagcagattgaaaagatgcgagaagttgttgaacttcccatgcttcatccagagaaatt

SEQ ID NO: 101784 - DNA, 255 bp, Glycine max
agttaacaaacccggtagatttgagagtttcttcctatctagcactcaagctcaacagtcctacttgcaagggttcagcaagaatattctagaggcctcatacgacaccaaattcgaggagataaacaaggttctgtttggtagagaggaggggcagcaacaaggggaggagaggctgcaagagagtgtgattgtggaaatctcaaagaaacaaattcgggaactgagcaaacatgccaaatctagttcaaggaa

SEQ ID NO: 101785 - DNA, 257 bp, Glycine max
atcgagccgctcgagccgatcatgtagttcaaatacccctaatggcacaggaggaaattctgtcttctagtgaaagtgatttcagaactgcaatggtgagtaaaaatagcaagcctcaagctactgcaatgcatgtgggagctatagaaattatcattgatagtttcgcaagtcctgactgcaacatagttggtgcaatgcttttggttgatacttatcataccaatcctgaaaatgcagttcgtagtatttttgtt

SEQ ID NO: 101786 - DNA, 255 bp, Glycine max
agctgctacaaagaaacaaaagtatgataaaatatgccagaagaaattatcaactcctattgaggtactatgcaaatctcatcctgtagagtttgcctcgtacttccattactgccactctttgacatttgatcagcgacctgattatggattcttgaagcgcctatttcgggacctatttgctcgagaaggttatgattttgattatgtatttgattggaccattttgaagtaccagcaatctcaaaagaatgt

SEQ ID NO: 101787 - DNA, 256 bp, Glycine max
tatacacttccttagttcaatatggggaagcccttcactctctctctttcttccctttgcttgctactcttgtcgagtgcatgctttgctattagctccagcaagctcaacgagtgccaactcaacaacctcaacgcgttggaacccgaccaccgcgttgagtccgaaggtggtttgattcaaacatggaactctcaacaccctgagctgaaatgcgccggtgtcactgtttccaaactcaccctcaaccgcaatg

SEQ ID NO: 101788 - DNA, 256 bp, Glycine max
agaatttcgatgctcagtcatctcttttaccattctcttctctcttgctcttgcaggagagagccatgtccatgcatcgctacctgaggaagattattgggaagctgtttggccaaacactcccattcccactgcactgcgagagcttctaaagcctctcccagccaggtgttgaaatcgatgaactccctaagcaaattgatgatacacagtacccaaaaacattcttctataaagaagaccttcatccaggcaa

SEQ ID NO: 101789 - DNA, 260 bp, Glycine max
aaactccttcaccctcactatcgtgacaccatgaacataaatggccttgctcggttatcactggtcaacgacggtggcgttatagaacaaacatttttgtggggaaggtattctgtggaaatgtctgctgtagtttacaaggattgggtttttacagatcaagcattgcctgctgatcttataaaaagaggaatggcaattgaggatccatcgtgccctcatggcattcgccttgtgatagaggactacccttatgctgt

SEQ ID NO: 101790 - DNA, 263 bp, Glycine max
tagctacttagtttgagaagaatgatcttcggaagctgaagtacattcttgggatagaagttgcctactctaagtaaggtatctttaattctcaaaggaaatatgtgcttgatctccttaaatagactggtaagttgggttgtaagatgtgcttgaccatgtgtacagggcccttaaccagctaaaatactcctaaagaaagacacatcagataaatctggattctaccatattttggaggaggaaactccaatacatgaagt

SEQ ID NO: 101791 - DNA, 255 bp, Glycine max
tggggttgctcgaacatctccagaggacgctaatagggcaggaacaacacatagactggtatcaggagtggaagctaaaattgtgaatccacatacaggagaagccatgtttccctgtgaacaaggagaactttggatcaatcacctagtattatgaaaggttatgttggtgaccctgaagcaacttcagcaactttggtggatgggtggttaaggactggggacctctgttattttgataacgaagggttcttg

SEQ ID NO: 101792 - DNA, 262 bp, Glycine max
tgcaaaaatattaagatgataaacattggagcacttgttgtactctttgcatttctcttcctcagttgtgcctatgcacaagacacaacaacccttgtgcctgcaatcataacttttggtgactcagccgtggatgtagggaataatgctatcttcccacccttttcaaggctgattaccctccttatgggagggactttgctaaccaccaacctactgggaggttttgcaatggcaaattagctactgattttactgctga

SEQ ID NO: 101793 - DNA, 262 bp, Glycine max
cttacctgctacttactactatagtgtctgcttcacaggccacaatgcaaagattttgagcacaatggcctcgacacaatgctttttgcaccaccacgccctcaccactccagctagagcttcaacacagcgcctagttgtgagcaccaaccaaaccacattgtttgcaaggcagcacagaagcaggttactgtccaagagggtgaggacactactactggccttgtctctcgcaggttggctctcactgtgctcattggtg

SEQ ID NO: 101794 - DNA, 259 bp, Glycine max
agaacggttccaatttaacaaatttataaaccggttcatcgtataaatgaattaaaaaagaactaataaccaacgcatcgcttcggattatctagatctaaagaactagtcaaaacaaaaaaaaaatataaaaaaagatatatatagcaactgttcttttatgcttcacaatagttcagttgctataaaaatatacagataaatgaagaggtgaaagaaagagagaaaaaaaatcaatgatatagaattctaatatgta

SEQ ID NO: 101795 - DNA, 262 bp, Glycine max
aatcacattacattagattggtggtaatggcagcgtcactacaagcagcagctactttcatgcaacccaccaagttgagcaggagcaacactttgcagcaaaagtctactcagtccatttccaaggcttttggtttggaacctgttgagctaaaaaggtcacatgctcccttcaggctgatcttaaggacttggctcacaagtgtgctgatgctaccaaaattgcaggattcgcccttgccacctctgccctcgttgtctct

SEQ ID NO: 101796 - DNA, 264 bp, Glycine max
attggcagcaagacaagtggaatggttgctttcctcttaagtggcacattgttaaggatgttcctaacaatttgttgaggcacattaccttggacaacaatgagaacaaacctgtcactaacagtagggatacacaagaggttatgttgagcctgggctgaaattaattaaaattttcaaggaatataccagcaagacatgcattttggatgattttggcttctatgaggctcgtcagaaaactattttggagaagaaagcaaa

SEQ ID NO: 101797 - DNA, 267 bp, Glycine max
atacccacgcggctctagcttctacaaggatccccactaacaccaagttcccatccaaggcttcacactcttactcaacccaatgcgcctcaaagagacttgaggtgacagaattctctgggctaagatccacttcatgtgtgacatatgctacgatgctagagaatcttccttttttgatcttgtagcttcccaactcactcccaagaccaatggatcatcaactcctgtgaggggagagacagtggccaagttgaaggtggcaat

SEQ ID NO: 101798 - DNA, 268 bp, Glycine max
agcatgtacaacaaggaagagaatccgcgtgtgcccatcatcgtcaccggtaacgatttctccacactctatgcgcgtctcatccgtgatgggcgtatggagaagttctactgggcaccaacaagggatgaccgcattggtgtctgcactggatttttcgcaccgattcaattcctgaacaggacgttgtcaagattgttgacaccttccctggacaatccactgatttctttggtgcactgagggccagagtatatgatgacgaagt

SEQ ID NO: 101799 - DNA, 258 bp, Glycine max
aattcacgaaaaaacaaatcaatattcgaaaaaaaaaaagattattaattttaagatatgagaaaggctccattgtcgaattcagacctaaccattaatcgagaagtgatgggaacgacgaaacctgcaaatacttaagattttttaaaaacaaatcttaatgattcattaggtgggatggcggaagaaaccaaaaagcaatcctttttttaggagttgtgccctacattacatctgaatttgattgataataaaaga

SEQ ID NO: 101800 - DNA, 256 bp, Glycine max
aattgttgtaactttttgattcctaaattctctaaaattcgaaattctaatttcgttaggggaaagagattgtttgtgtgtgagtgagtatggctggaaaaggcgagggtcctgctatcggaatcgatttgggaacgacgtatcttgcgacggcgtgtggcaacacgatcgtgttgaaatcatagccaacgatcagggtaacagaactaccccatcctacgtggctttcaccgacacagaacggttgatcggcgat

SEQ ID NO: 101801 - DNA, 261 bp, Glycine max
ataagaaaatcctcacccattttcttcgtagccaaacactctgaaattctcagttatgtcgtggcaagcgtatgtggatgatcacctactgtgtgaaatcgaaggtaaccacctcactcacgccgctatcatcggccaagacggaacgtttgggctcagagcaccaacttccctcagttcaaacctgaggaaataactgccatcaataatgactttaatgagcctggatcacttgctccaactggattgtatatcggtggc

SEQ ID NO: 101802 - DNA, 164 bp, Glycine max
tgcacaagctcttgtatcatcatcatatcttaccttctcagccgaggctacaagacaaagtcttggaccaagatcactccaatctccatttggcttctcaagaaaagcctcctttcttgctaaggcagctgctactccccctgtcaagcaggatcagaaagact

SEQ ID NO: 101803 - DNA, 256 bp, Glycine max
ataacagaaacaaaagtggcagtattaggtggcatcaccgaagtgcagggagctgccaacagcgtcgagatcaacaatctcgctcgctttgctgtagaggaacaaaacaaaagagagaattcagttctggagtttgtgaggggattagtgcaaagcagcaagtggttgctggagtgaattactacataacattggaagcaaaagatggtgagattaaaaatgagtataaagcgaaggtttgggagagggaatccca

SEQ ID NO: 101804 - DNA, 249 bp, Glycine max
atccatcaatagcactgatcaataccttactaatgtacttcttaaattcaattctaagcttggaggaataaattctctgtagacaatagagcattctgggcatcttctcctgattaaggataccccaacaatgattttgggatggatgtctctcacaattcgcctggtcaattagatagtccatcaatagcactgatcaataccttactaatgtacttcttaaaatcaattctaagcttggaggaataa

SEQ ID NO: 101805 - DNA, 253 bp, Glycine max
ataactgccaattctggtgaagggtgtgctgactgctgaggacacaaggatagctgtacaaagtggtgcagctggaattatagtgtccaatcacggagctagacaacttgattatgttccagccactatatcagccttagagaggttgtcaaagctgctgaaggtcgtgttcctgtaattttggatggtggtgttcgccgcggaactgatgtcttcaaggcattggcactaggtgcctctggcatatttattg

SEQ ID NO: 101806 - DNA, 254 bp, Glycine max
attgttgacaccttccctggccaatccattgatttctttggtgaactgagggccagagtatatgatgatgaagtgaggaagtggatttctggtgttggtgttgacagtgttgggaagaagcttgtgaactcaaaagatggcctccaacctttgagcagcccaagatgactctggagaagctcttgctgtatggtaacatgcttgtccaagaacaagagaatgtcaagagagtccaattggctgacaagtacttg

SEQ ID NO: 101807 - DNA, 256 bp, Glycine max
ataagatgtggctattcggcagaaaaggggcttctgggttttcatcatcatccactgcagagcaagtcactgaaggaattgatggaactggtttcactgccattgtcacaggggcatccagtggtattggcactgagactaccgtgttcttgctttgcgtggtgtccatgtgattatgggtgtgagaaatatgcttgctgctaaagatgtcaaagaaacaatactcaaggagattccctccgctaaagttgatgcc

SEQ ID NO: 101808 - DNA, 256 bp, Glycine max
agaagatgggtaaggaaaaggttcacatcagtattgtggttattggccatgttgactctgggaagtccactaccactggccacctgatctacaagcttggaggcattgacaagcgtgttattgagagatttgagaaggaagcgctgagatgaacaagaggtctttcaagtatgcctgggtgcttgataagcttaaggctgagcgtgaaagaggaatcacaattgatattgccttgtggaagtttgaaaccaccaag

SEQ ID NO: 101809 - DNA, 159 bp, Glycine max
acaattgaagttaaaagccttagccttccctacaactccaaacacaaagacatcatcatccatggctgcctccgtctccactgtcggagctgtcaacagagctcttttgaacctgaatggttctggagctggagcttcagctccagttcagccttcttt

SEQ ID NO: 101810 - DNA, 147 bp, Glycine max
aggaattcgtgttttctttcgcttgttcgtttgtttaattcaataaaggaaattaagcatgaccctcttgttgagtatgctctgcctatctgaaaatttccacacctcttttaattgtcgtaatgatgtgtgaagtgtgtgtatttt

SEQ ID NO: 101811 - DNA, 160 bp, Glycine max
cattagtctagcagaaacaattagagggtttaaattgattctttctggagaattagatggtcttcctgaacaagccttttatttggtaggtaatatcgatgaagctactgcgaaagctacgaacttagaaatggagagcaatttgagaaatgactttaaa

SEQ ID NO: 101812 - DNA, 155 bp, Glycine max
caagcctctactatactgcttcaacttctgctctagaaaattcagtgctgaaacatggcttcggctactctctctgtagccaaaccagcccttcaggcaaatgggaaaggcttctctgaattctctggcctccgaagctcataggcttccttccc

SEQ ID NO: 101813 - DNA, 250 bp, Glycine max
gtagatttggtgaacaacttgggtaccattgcgaggtccgggaccaaggagttcatggaggcattgcaggctggtgctgatgtaagcatgattgggcagttcggtgtggggttctactctgcttacctcgttgcagagaggtcattgttaccaccaagcacaatgatgatgaacagtacatttgggagtctcaggccggtggctctttcactgttactagggacaccgatggcgagcaactcggaagggg

SEQ ID NO: 101814 - DNA, 251 bp, Glycine max
atcgagccgaatcggctcagagtattaattttttattatattaaagagtacatattttggattatatataagacaaatataaaattgatattaagaaatttattttatacttgatatttaatatattgatgtataggataatgaaattatagccaattaagaattttaaaaattatagaaagtattgggttttggtgtgaatttaattggaattgaattgtttcaatttattgaataatttagttcttttt

SEQ ID NO: 101815 - DNA, 251 bp, Glycine max
ttgcaattgaagttgaagtcttgcccttctctcttcaactccaaacacaagacatcatcatccatggctgcctccgtctccactgtcggagctgtcaacagagctcttttgaacctgaatgggtctggacctggggttcagctcccagttcatccttctttgggagcagcttgaagaaggttattggctcaagggtccccaacacaaagatttcctctggaagcttcaagattgttgctgtagaagagaag

SEQ ID NO: 101816 - DNA, 255 bp, Glycine max
acaactttgcccccttgtaaaacttcttattgtgatgtctaaaagcgaagacttgaagcttttgggaggctggttcagcccatttgccctgagggtgcagattgcccttaacctcaagggtctagaatatgaggttgttgaagagaccttgaatcccaaaagtgacctgcttcttaagtccaaccctgtgcacaagaaaatcccagttttcttccatggagataaagtcatttgtgaatctgcaatcatagttga

SEQ ID NO: 101817 - DNA, 257 bp, Glycine max
agaaaaacaaaccttaaggcgaaaggttcttgccaagtggctgaaggaaaacattcttagattaggtccaacattcatcaaaattggccagcagttctccactagggtggacattcttcctcaagaatatgttgaccagttgtccgaacttcaggatcaagttcctccatttccctcagagacctctgtagctattgttgaagaagagcttggagctcctttaggtgatatctttgatcagtttgactatgaaccaa

SEQ ID NO: 101818 - DNA, 245 bp, Glycine max
atttattattgaattaaccgatcaacttgctttgttatcgaacatttctttttgatttcaaaaattttccggaaaaaatttgaatctacttttatatgcgaatcaatcctactacttctggtcctgaggtttctgcgttgaaaaaaaaaatctgggacgtatcgcccaaataattggtccggtactagatgtagcttttccccacggtaagatgcctaatatttacaacgctctgatagttaagg

SEQ ID NO: 101819 - DNA, 252 bp, Glycine max
cagaattctctaaaagagatctttttctgctctttgaagaaagaagggtctttgcttgattttggagatgtctctgctctcagatctcatcaaccttaacctctccgataccaccgagaaggtgatcgcagagtacaatggatcggtggatcaggaatggacctgaggagcaaagcaaggactctcccaggaccagttagcgacccttcagagcttcccaagtggaactatgatggttccagcacaggtcaa

SEQ ID NO: 101820 - DNA, 249 bp, Glycine max
ttcattaacgggtggtgcctctcttccatctccccagccaaaacctctctcaagaaggccacattaggcccttctgtcttcgcaaccgttagcactccttcttctccttcttcttcttcttcttcttccttccctttctcattcaagacaggcctgtctttgctgcccctgcccccatcatcaacccaactgtgagagaggatatggcaaaggaatacgagcaagctattgaagaactccagaaattgt

SEQ ID NO: 101821 - DNA, 248 bp, Glycine max
taactacaaaggttgctgtaggagataagatattgaagtagtgctaagtgcctaacacctgcagtgaacaatggcgtctgcatcagcatctcttctcaagtcttcacttgttcttgacaagtctgagtgggtgaaggacaaacacttcgccaaccttctgctgcatcagttgtgagatgcaaccccaccaccccatcaggcctcaccatcagagctggttcctatgctgatgagctcgttaagaccgc

SEQ ID NO: 101822 - DNA, 250 bp, Glycine max
ataggtgtagacaaacacaatctctaatggcactcaggatgtgggcttcttccactgccaatgcactcaaagtctcttctacctccagacctcatctcttgcatcctttttctttctccagatgcttgtactccgtttggatggacttaagtatgcagattcacacgaatgggtcaagcacgaacgctcagtcgccaccattggtatcactgaccatgcccaggaccatcttggagaggttgtgtatgtg

SEQ ID NO: 101823 - DNA, 250 bp, Glycine max
atcatggccacccacgcggctctagcttctacaaggatccccactaacaccaagttcccatccaaggcttcacactctttcccaacccaatgcgcctcaaagagacttgaggtgacagaattctctgggctaagatcacttcatgtgtgacatatgctaacgatgctagagaatcttccttttttgatcttgtagcttcccaactcactcccaagaccaatggatcatcaactcctgtgaggggagagac

SEQ ID NO: 101824 - DNA, 250 bp, Glycine max
atcggatcgcactactaagagagatccgggtttagaataggataggttatttctttatatttttgaccaggaacagggcctaccacccgccatcccagaaataacctttcctattctttccccggatcccactactagagagatgttcatttcttagaatatcctatatacgtaggtgggaacaggggaaggggtcagatttatcttgacgatcataagagtaataataatgtgtataatgctacagcag

SEQ ID NO: 101825 - DNA, 236 bp, Glycine max
attcatcttcctctttttctcaaccaaaaggggttcaattctagctagttctattacatcgtccgctaccatgaacatggcgatcgcgcttctgttcatggttttcgcagtttcatcagctttagacatgtcaataatacacatgacaacgctcatgcggatagggccacgaggcgcaccgacgacgaggtgatgtcaatgttcgaggagtggctggtgaaacatgaccaagtgta

SEQ ID NO: 101826 - DNA, 254 bp, Glycine max
aaaccttgactggtacaagggtccaactctgcttgatgcacttgaccagattagtgagcccaagatgccctctgacaagcccctcaggcttccccttcaggatgtgtacaagattggaggtattggaactgtgccagtgggcgtgttgagaccggtgtcttgaagcctggaatggtggtgacttttgcaccaactggactgacaactgaagtcaagtctgtggagatgcaccatgaatctcttacagaggaaca

SEQ ID NO: 101827 - DNA, 176 bp, Glycine max
gtgcagagcagagagagacgcagccatggggcgaagacccgcgaggtgttataggcaaattaagaacaaaccataccccaagtcacggttttgccgtggtgttcctgatcccaagatcaggatttacgatgttggtatgaagaagaagggtgttgatgagttcctttctgtgtcca

SEQ ID NO: 101828 - DNA, 174 bp, Glycine max
aaaatgaaagtccttgttttctttgttgctatagttctagcagcatggcattgccatggctcagaccatgaccatgaccatggccacacctaccaaattttccctctgagaatgaaaactggccatggtggccactacattccggaggtatcatgcaaagttggaggcttggtg

SEQ ID NO: 101829 - DNA, 294 bp, Glycine max
atttcattcaaaacaatcatggcttctcttcattccattacattttcaacaaaaactgtcctttatgtatttgtattggcctcttccatcgcagcctctgctggcaacttctaccaggattttgacgtaacttggggagatggtcgtgccaagatatcaacaacggcgatcttctcactctttcccttgacaaagcctctggctcggggtttcagtccaaaaacgagtatctctttggcaagattgatatgcaactcaagcttgtacccggaaattctgcaggcactgtcaccg

SEQ ID NO: 101830 - DNA, 173 bp, Glycine max
tggaagactcagatattgttaaaaaagcaattgaaaatccagagctatttgtgatgaagcctcaaagagaaggaggaggaaacaatatttatggtgatgagttgagggaaaccctccttaaattacaggaagcaggttctcaagaagatgcagcatcatccttatgcagagga

SEQ ID NO: 101831 - DNA, 291 bp, Glycine max
aaaggttgctgtaggagataagattgcagtagtgctaagtgctaacacctgcagtgaacaatggcctctgcatcagcatctctgctcaagtcttcacttgttcttgacaagtctgagtgggtgaagggacaaacccttcgccaaccttctgcatcgttgtgagatgcaaccccaccaccccatcaggccccatcagagctggttcctatgctgatgagctcgttaagaccgcgaaaacagtggcttcaccagggaggggtattttggccatggatgagtccaatgctacct

SEQ ID NO: 101832 - DNA, 291 bp, Glycine max
gtgagcacaacaggtcaccaggatactacgatggacgctactggaccatgtggaagctgcctatgtttggttgcactgatgcttctcaggtgttgaaggagcttcaagaggctaagactgcataccccaacggcttcatccgtatcatcggattcacaacgttcgccaagtgcagtgcatcagcttcatcgcctacaagcccccaggcttctaagtgtgaaaaatttgcaaagcatttgtagccgccaccccactttgtttgtttgtacttaaactacattcccatttgtt

SEQ ID NO: 101833 - DNA, 291 bp, Glycine max
gcttcaagcggcaacaacatgctctttctcggcaacactgaacttgcttttcgagggagatcgattatgagcatggaggaagcctcgaagagcgacctttcttcacctcaccggatgaactgtatgatgaagagtattatgagaagcagtcgccgagaagaagcaccgcctcagttccgaacaggtccatctgttggagaagagctttgaggaagagaacaaattggagcctgagaggaagacccagttggctaagaagctgggattgcagcccaggcaggtggctgtgtg

SEQ ID NO: 101834 - DNA, 171 bp, Glycine max
acccgggaaaaaaagtaggtaaaaaaatatgctaagtataaattgtctactgatgaaatacgaaagctgatgatattgaaaaaaaaagaattgtaaataaggttcaggttcgacttccatagagaatatagatgatattgtctataatgatagacaaaatagaaaactttc

SEQ ID NO: 101835 - DNA, 172 bp, Glycine max
cttctactcaatgtttcttgcaccaccatgctcttaccacccctggcagatccccatcacaacgcatcatggttagcaccaagcctaaccagcttgtttgcaaggcacagaagcaagaggatattgatgtcagcccaatctctcgccggttagctcaaccgtgctcattggt

SEQ ID NO: 101836 - DNA, 293 bp, Glycine max
tcgcatctgtagatctggaacttcatacaaaatatgttccagggggacctgagtcgatctatgatgttgaccacagagtttctgagaaaacccaagtgattcctccattaccagagttataggttcctttgcagctttagccatatatttgcaggtgatatgcggctggatactatagttacaagtgggctgaggtgctgtctgctgatgctttctctgcatttgaggatgctggattggataatgacaaggctgttaaagaaacggggcgcaagttccgggagaccattctt

SEQ ID NO: 101837 - DNA, 171 bp, Glycine max
gcaaaggattctacccgccgctcgatgggaattgcgcttcaaggcgtctcgtagggctaatccgcctcacgagggtcaccaacggcacgtgcctttggggggccgaggccccctactgctggtcggcaaacggacggcgggcgcacgcgtcgcttctgcccggattctgac

SEQ ID NO: 101838 - DNA, 283 bp, Glycine max
gtgcagggttgggtagcagtaagtttttgtccctttgtaatctaattcactgttgtgcttggctgcttgcaggtatccttacttggcactagttcttaactttagtcagacatgggccctatattgccttgtacagttctatgctgttattaagataagttgaaaccaatcaaaccattggcaaagtttctaacttttaagtcaattgtcttcctgacatggtggcaaagtgtggctgttgcatttcttttttatatgggagcttttaggggatcattggctc

SEQ ID NO: 101839 - DNA, 288 bp, Glycine max
gcaattgaagttgaagtcttgcccttctctcttcaactccaaacacaagacatcatcatccatggctgcctccgtctccactgtcggagctgtcaacagagctcttttgaacctgaatgggtctggacctggggtttcagctcccagttcatcttctttgggagcagcttgaagaaggttattggctcaagggtccccaacacaaagatttcctctggaagcttcaagattgttgctgtagaagagaagaaagagattgaagagacccagcagaccgacaaggacaga

SEQ ID NO: 101840 - DNA, 287 bp, Glycine max
aacaagtagttgagaactaagaagaaggaaatggcttcctcaatgatctcctccccagctgttaccaccgtcaaccgtgccggtgccggcatggttgctccattcaccggcctcaaatccatggctggcttccccacgaggaagaccaacaatacattacctccattgctagcaacggtggaagagtacaatgcatgcaggtaatgccaccaattggcaacaagaagttcgagactctttcctacttgccagacctcgatgatgcccaattggcaaaggaagtcgaa

SEQ ID NO: 101841 - DNA, 289 bp, Glycine max
  unsure (1)..(289): unsure at all n locations
agaagctcttgacgtatggtaacatgcttgtccaagaacaagagaatgtcaagagagtccaattggctgacaagtacttgaacgaggctgcacttggaaatgctaacgaggatgctattaacaggggaactttcttccaatcttgaattggaggaaagcaaacttggcaagtaaatatttctgttcctgaaggttgtgctgatccaagtgctagaagttgtgatgggacttgcgtgtaacattcttagaattctcaatgtcttaggtgcanagagaagatgccaagttt

SEQ ID NO: 101842 - DNA, 290 bp, Glycine max
  unsure (1)..(290): unsure at all n locations
gattcgcacgcattgcttcgcctcacaacagcagctgcagcagcaatggctcccaaacgaggtggaaaggctccggctcttgccgctaagaagaagcctgagaaggtcacgaatccgttgttcgagaagcgtccgaagcagttcggaatcggagggcgttgcctccgaagagagacttgactaggttcgtgaagtggccaaagaatgttcaaattcagaggaagaagaggattctgaagcagaggttgaaggttcccccagctttgaaccagtttaccanaactcttgac

SEQ ID NO: 101843 - DNA, 284 bp, Glycine max
tgctgtcttttctattgatgatgatgttatatttccttgctctacggtggaatttgcatttgatgtttggcaaagtgcacctgatacaatggttggatttgtacctcgtgtccattgggtggattcattggaaggtaatgacagcaaatttatatatggcggatggtggtctgtgtggtggacgggtacatatagcatggtgctttccaaggcagcattctttcacaaaaagtatttcaatatctacacaaatgagatgccatcatcaattagagaatatgtaa

SEQ ID NO: 101844 - DNA, 280 bp, Glycine max
ctttacaagcatattgcaaatattgcgggtaacaaaaagttggtattgcctgttcctgctttcaatgtcattaatggtggatcacatgctggaaacaaacttgctatgcaggagtttatggttcttcccgtgggagcttcctctttcaaggaagccatgaagatgggtgtagaagtatatcacaatttgaagtctgtgattaagaagaaatatggtcaagatgcagtaaatgttggtgacgaaggtggctttgcccctaacatccaggaaaacaaggaag

SEQ ID NO: 101845 - DNA, 279 bp, Glycine max
  unsure (1)..(279): unsure at all n locations
gaaattccaacaatttgtttaatcgatacaaattgtgacccggacctcgccgatatttcaattccagctaatgatgatgctatagcctcaattcgattaattctacacaaattagtatttgcaatttgtgagggccgttctagctatatacgaaatcttgattaataataaaataaaaaaattattggatttagttggaggggttcatagatttagggaatcgattactatactagtaataaattgtacaaaagatanaaatataaataatatagatat

SEQ ID NO: 101846 - DNA, 277 bp, Glycine max
atacgagcctttccatgtgccagaagatgttaaaaagcattggagtcgccatacccctgagggtgctaaacttgaagctgagtggaatgccaagtttgcagaatatgagaagaaatacagtgaggaagctgcagagctgaaggctattattactgtgaattaccagctggttgggagaaagcacttccgacatacactccagaaagccctgctgatgctacaagaaatctgtctcagcaaaatctaaatgcccttgttaaggttcttcctggtctac

SEQ ID NO: 101847 - DNA, 168 bp, Glycine max
agattatcctaagtctttgggaatagtgctgcaatggcttcaagtcaggaggaggtgaccttttgggagctactggaagcccatttgtgtgcagggttcatattgccctcaagttgaagggagttcaatacaaatatgtcgaagaaaatttgaggacaagagtgaact

SEQ ID NO: 101848 - DNA, 281 bp, Glycine max
aaattgagcgaaaataaaaaagattcaacaatttataagaataatccaatgatttctgaaacaaccatttcaattcaatcgataaattcagtaaattgttcattgaaaaaaaaaaaaaataaaggatcttaatgctaaaagaaaagcagtttaaaaaaaattgaaaaaattaaaaaggggcttgtaatttcagagacaaatattcattcaaacaaaacaacttatgatagtaaaagggtagaattcgaaaaaaaaaaattgcagatattaccaagaagaag

SEQ ID NO: 101849 - DNA, 285 bp, Glycine max
gattggtatctgagaggaagcataggagtaatgaaacacatggtggtttggataatggagaatatgcttctgatagagaaatcaggaggcgtttatcaaagttgaataaaaaatctttcgactcggagagtgagacatctgatgactttgtagatcttctgaagatggcaagagtgatagtgatactacaaccactgatattgaaagcgaccaagatgtccattcagaaagtcgaattggggactcgaggggagatgtgtatttcacacctgatgatgggttgga

SEQ ID NO: 101850 - DNA, 286 bp, Glycine max
cacccttgaggtggaaagctctgacaccatcgacaacgtcaaggccaagatccaggacaaggaaggaatccccccggaccagcaacgtctcattttcgccggaaagcaacttgaggacggccgtacccttgctgactacaacattcagaaggaagtactcttcacctcgtcctccgtctccgtggtggcatgcagatcttcgttaagacactcaccggcaagaccataaccctagaggttgaaagctccgacaccatcgataacgtcaaggccaagatccaggaca

SEQ ID NO: 101851 - DNA, 280 bp, Glycine max
cctctcttcattattaggcgtgtcataaagacgaggagcgtggaatacatgccatttactttgtcaatgtttttaaccatcaatgctgttatgtggttcttctatggccttctcctcagggattattacgttgctcttccaaacacacttggtttgtcttcggcataattcagatggggatgtatttgatgtacagaaacgccaccccagtggcactagaggagccagtgaaggctcaagaattgaatggccacatcattgacgttgggaagatgggaac

SEQ ID NO: 101852 - DNA, 165 bp, Glycine max
tgcaattgaagttgaagtcttgcccttctctcttcaactccaaacacaagacatcatcatccatggctgcctccgtctccactgtcggagctgtcaacagagctcttttgaacctgaatgggtctggacctggggtttcagctcccagtcatccttctttgggag

SEQ ID NO: 101853 - DNA, 164 bp, Glycine max
acggcctgtgcatcagtccatggtgccaataggcttggtgcaaattcacttctcgatattgttgtttttggtagagcttgtgcaaatagagttgcagaaatccgtagaccaggagagaaacaaaagcctctagagaaggatgctggtcgagaacaattgcatgg

SEQ ID NO: 101854 - DNA, 282 bp, Glycine max
ctcaattacagataggattcagattttcacctgatcgatgtacacaaagggaggtgcaacaacaacatcaacatcagactccactgttgcacctccctttgtgtacatcgatcaggtgaaaaactcaattacagataggattgaacttctgcccagaattcttgggtgggaaaaggtggggctttcacgggagaaatcagattggagcaactaaaagaccttggctgcaagtgggctattcttggacattctgagcgcagacatgtaattggagcaaatgat

SEQ ID NO: 101855 - DNA, 280 bp, Glycine max
ggcacactgtctccaaacttattggttcacctcctggatatgttggttacactgaaggtggtcaattgaccgaggcagttcggcgtcgtccttacactgttgtactgtttgatgagattgagaaagcccatcctgatgtgttcaacatatgcttcagatcctggaagatggaagactaacagacagtaagggcagaacagtggatttcaagaacacacttcttataatgacatcaaatgttggaagcagtgtgattgagaaaggaggccgcaaaattgga

SEQ ID NO: 101856 - DNA, 165 bp, Glycine max
gccatggccacccacgcggctctagcttctacaaggatccccactaacaccaagttcccatccaaggcttcacactctttcccaacccaatgcgcctcaaagagacttgaggtgacagaattctctgggctaagatccacttcatgtgtacatatgctaacgatg

SEQ ID NO: 101857 - DNA, 287 bp, Glycine max
cttccataaacgggtggtgcctctcttccatctccccagccaaaacctctctcaggaaggccacattacgcccttccgtcttcgcaacccttaacactccttcttctccttcctcttcatcttccttcccctctctcattcaagacaggctgtttttgctgcccctgcccccatcatcaccccaactgtgagagaggatatggcaaaggaatacgagaaagctattgaagaacttcagaaattgttgagggagaagagtgaactcaaagcgacagctgctgaaaaag

SEQ ID NO: 101858 - DNA, 162 bp, Glycine max
attctgaatgccaaagaagcctttgaattggccaacatcggtgctgagttctttgagttgcaacctaaggaaggccttgcccttgtgaatggcactgctgttggttctggcttggcctcaattgttctatttgaagccaacatcattgtgtcttgtctgaag

SEQ ID NO: 101859 - DNA, 285 bp, Glycine max
tctcgagccgattcggctcgagcctagaccacctccttctaagatactagatttcaaagattacccttctccaaacgccacgacctcgagtaagaaaaccggctcacatggtagatgaggagtacatagcaaaacttgaaaagggcattcactcatgaaagcactccctgatgatgacccacgtaatttcatacaacaagcaaaggtccattgtgcttattgtaacggtgcctatcacctaccccatccctttcagaacacaaaactcaacattcacaggtcttg

SEQ ID NO: 101860 - DNA, 278 bp, Glycine max
aataattcctgcagaaaaggtcatgaaatctggggattctttgtcctgaaagaacatcctgatatacgtttatttgcccgcgcccacaaaatgagtaaaagtaggggaaatgttgttaatccagatgatgttgtctctgagtatgtgcagattctcttcgattatacgaaatgttcatgggaccattgagagactcaaaaacatggagtactagtggcattgaaggtgtacaccggtttttaggaagaacttggaggctcattgttggttcacctttg

SEQ ID NO: 101861 - DNA, 279 bp, Glycine max
attttatatcctggtgataccacagaaggtggaaaacttctacggttgaagcagcagttctttctctgcagtgcatcactccaagacataatatcccgatttaaggagaggagacaagggccttggaactggtcagagttcccaacaaggttgctgtacagttgaatgatactcacccaacacttgcaataccagagttgatgcgattactaatggatgatgaagggcttggatgggatgaagcatgggatgtgatatcaaagactattgcttacacta

SEQ ID NO: 101862 - DNA, 163 bp, Glycine max
catgcaaggatgtggctttcgtgtactacggcgaagagtggagaccacagataaagacatgtaaggttgagcttatgagtctgaagaaggtgcggttgtttcattccattagacaagaagttgttacagagttggttgaagctatagtgaagcgtgtggtagt

SEQ ID NO: 101863 - DNA, 164 bp, Glycine max
cgaaacgatgtcattggtattgatttgggtacaaccaattcatgtgtttccgttatggaaggaaagaaccccaaagttattgagaattctgaaggtgcacgaacaacaccatctgtggttgctttcaaccagaaaggggagctgcttgaggtaccccagctaag

SEQ ID NO: 101864 - DNA, 281 bp, Glycine max
ggcttccctccctcctttgaagaaacaaattagaagagtgtgttgtgttgtgttgaagtagcaagctagcaaagatgtttggcatcttaggaggcaataaggggcacaagatcaagggtactgtggtgttgatgagcaagaatgtgtggacttcaacgaaatagtgtccactactcagggtggtttggttggtgctgccaccggcatcttcggtgctgccaccggtattgttggtggagttgtcgatggtgctactgccatcttcagtcgcaacattgcca

SEQ ID NO: 101865 - DNA, 273 bp, Glycine max
tttacaagtataaaaaataaataatttttatcataataacgaatttcgaacatttttatatttataaaaataaaaaatatatttgagctatttttaaacaaaattgtcaatgtacataatttgtcacggttaaatgtttaaaaacatttagaggctttatatagattttaaaaataaaatatgtgcacttttcttaaaactcatgagatacatatataaattttataaaaaaaaaacatgtgtaatttcgttaaactcaaagaaaatatgtgt

SEQ ID NO: 101866 - DNA, 278 bp, Glycine max
gtgaaaatggaaaccgttttgcagaaatgatgaggaaagacctaccacaggttgtcataccaagaacctaccataaatatacatcaaggagggttcttacgacagaatggattgatggagagaagctgtcacagagcacagaagtgatgttggagaattggttaatgttggagtcatctgctatctaaaacagcttctagatactggattttttcatgctgatccacacccgggaaatttgatccgcactcctgatggaaaacttgccatacttgact

SEQ ID NO: 101867 - DNA, 156 bp, Glycine max
gcagaagaacaagtagttgagaactaagaaaggagagccaatggcttcctcaatgatctcctccccagctgttaccactgtcaaccgtgccggtgccggcatggttgctccattcaatggcctcaagtccatggctggcttcctcaccagaagacc

SEQ ID NO: 101868 - DNA, 277 bp, Glycine max
tctcaattcagggtgatccttctcagagaattgcagcttacatggtggaaggacttgcagctcgtgtcgctacatccggaaaatgcatctatcaagcattgagatgcaaggaacctccttctaacgatcgcttagcagcaatgcaatactatttgaggtctgcccgtgtgttaaatttggatacatcgcggcaaatggtgccatagctgacgctgttagagatggcaagaaggttcacataatagactttgacatcagccaaggaactcaatacata

SEQ ID NO: 101869 - DNA, 289 bp, Glycine max
ggagaagaagaagggtgagctaaagtcaattttccttcctttcctttccactagtcacataatcccgctagtggacatggccagactcttcgccttgcacgacgtcgacgtcaccatcatcaccaccgcacataacgccaccgttttccaaaagtccatcgatttagatgcgagtcgcggtcgccccatcagaacgcacgttgtcaacttccccgccgcacaagtgggtctccccgttgggatcgaagccttcaacgtcgatacgcctcgggaaatgacccccagaatc

SEQ ID NO: 101870 - DNA, 285 bp, Glycine max
agtttctaagatgacttctccctacattaaatgtacagtctctttcttcatagcatttggaaatttggctgatgacaccatcaattttgaggcctttccccacaagctggtgcagtttggagaaattcaggaaaaagttgtattgaaattttcacaagaggaatttcttacagcttggtcaactcaggtgcgtcctgcaacaactctgttggctgatgggtgcccatatttgtatgctatggtgcatgatagttcagtgtctacaataccaggtgattttgtcat

SEQ ID NO: 101871 - DNA, 284 bp, Glycine max
tgagaagctgcaccaatctccctcagtgctgattcctgctcttcgtacagtgggaaatattgtgactggagatgatatgcagactcagtgtattatcaatcatggtgcactcccctgccttttgaacctgttgacaaataatcataaaaaaagcattaagaaagaagcttgttggactatatcaaacattactgctggaaataaagaacagatacagactgttattgaagctggtctggttgcaccccttgtcaatcttcttcaaaatgcggaatttgacatta

SEQ ID NO: 101872 - DNA, 283 bp, Glycine max
cgttgagaaataaggggaaaaaatggtgtcgctgaaactgcagaagcggctggccgcaagcgtgctcaagtgtggcagaggaaaggtgtggcttgaccccaatgaagtcaacgaaatctccatggccaattctcggcaaaacatcaggaagttggttaaggatgggtttatcatcaggaagccaaccaagattcactcacgctcgcgtgctcgtaggatgaaggaggcaaagaagaagggccggcactctggttatggtaagagaaagggtacaagggaggcg

SEQ ID NO: 101873 - DNA, 286 bp, Glycine max
tgaaaccaccaggtcatgtatatcctttagcgatattgtgccatgatataatgccccctccactgaaggttgagaaagaaattggggagaaaagaattatatcctttcatggggctggcatatcagtggctccagcattaagcttttctgaaaccactgctactagtgaaaatcctgaaaaggctaaggagttattctcaaaagccctgtacgattctgtgaccgagcaatataatgtgctgaaatctgcgatacatggcaaaaaaggatttgaagcatcaactcc

SEQ ID NO: 101874 - DNA, 287 bp, Glycine max
cacaacaccatcctcgtgctcctcgaagctccaaagcaacaacagcagaaacaagaagaagaaccttatatttctttgcaaaacctgcgatccgaggaagaaagcaacgatgtcgtcgccgggaagcgcacacgcaacggcgattctgaaggaagaggtggacatagtgatccctacgatacgtaacctggacttcttggacatgtggaggccattcttcgagggataccatttgataatagtgcaggacggtgatccttcgaaagttatcaaggttcctgaagggt

SEQ ID NO: 101875 - DNA, 285 bp, Glycine max
ctcgaagccaacctcgccgaacctggcaaagccagcttcgcgccgccaacgaccaagccgccttcaacttcttggcacgctccctcttcaactccaaccccgccgacaccaaacttggccgcgacggccctaaaatcgttcagaaatgggtcctatttcagctcggcccaatcctccgcttgggcctccctcaattcttggaagaatcaacaatccggagcttccgcctaccgttctctctgatccaaaaagattaccagagactctacgatttcttctaccagt

SEQ ID NO: 101876 - DNA, 288 bp, Glycine max
cattcattcgcatctttctctcttctctctccacccaaaccctaactcccgaccctgttcccctctcgtatccgtcatgaaaggaggaaagtccaagaccgaatctaagagagccgatcccaaacttgctgtgaataagaagggagccgccaccaaggctaggaaacccgccggcaaggggaaggcagcgaaagaccctaacaagccaaagaggcctccaagtgctttcttcgttttcatggaggagttcaggaaggtattcaacaaagaacatcctgaaaacaaagc

SEQ ID NO: 101877 - DNA, 285 bp, Glycine max
ctcgagcggttgagagttgctgcttggaagaaaggctgtttaatggtcaagattgcgatgtctgggaatgcagcagtcaaaaggagtgattgggcctcattggtacaagtgtttttaacaaacagcaacagtacagagcattttgatgcatgtaagtggacaaaatcagaaccacattcctgggaattgatcttcccaatagaggtatgtggtcccaataatggttttgaaatgtggagttctgagtgggcaaatcaaacttcatggcatttgagtttccttatt

SEQ ID NO: 101878 - DNA, 291 bp, Glycine max
ctagaaacaaaatccgaagctccaattcctcctaactgcagtagtaaccgaaacccgatgaccctagccatggtttagcttcaaacatggctccctgaaccctagcatttctccctcttcgcaacaacgccgatccgatcccgatccctttctgattccgatccgatccgatccaatggcgggggcagcctctgctctgttcctcctcgacatcaaaggccgcgtcctcatttggcgcgactaccgcggcgacgtcactgctgtcgaagccgaacgcttcttcaccaaact

SEQ ID NO: 101879 - DNA, 290 bp, Glycine max
ctcgatctccaccgtgcaaaggattctacccgccgctcgatgggaattgcgcttcaaggcgtctcgtagggctaatccgcctcacgagggtcaccaacggcacgtgcctttggggggccgaggcccctactgctggtcggcaaacggacggcgggcgcacgcgtcgcttctagcccggattctgacttagaggcgttcagtcataatccaacgcacggtagcttcgcgccactggcttttcaaccaagcgcgatgaccaattgtgcgaatcaacggttcctctcgtacta

SEQ ID NO: 101880 - DNA, 282 bp, Glycine max
ggccatagccaagacactcaaaaacacccattggataagacccagaccgtcatttggaatggaccaatgggtgtttttgagtatgataagtctgccacaggaacagaggccatagccaagaaactggcagagctgagtgggaagggagtaccgaccatcattggaggaggtgactctgttgccgctgtggagaaggttggtcttgcagacaagatgagccacatctccactggtggtggtgccagcttagagcttcttgaggggaagcaactccctggtgtc

SEQ ID NO: 101881 - DNA, 281 bp, Glycine max
ctcgagcgcttgtcaagagaggagttgcggttaaggatccatctgctccccatggagttcggcttttgattgaggactatccttatgcttctgatgggctagagatatgggatgccatcaagtcctgggtgcatgaatatgtctcattctactacaagtcagatgcagcaattcaacaagatcccgagctccaagcttggtggaaagaacttgtccaagtgggtcatggtgatttgaaagataagccatggtggcaaaagatgcaaactcgtgaagagttg

SEQ ID NO: 101882 - DNA, 281 bp, Glycine max
ctcgagcgaatcggctcgggtcacagtggagcagagtaagctactccaccacgtaacagccgatggtgggtttgacaaaacaagaggagtgcagcttatgctgaatgggagtccctactatgctaatggctttaatgcctattggcttatgtaccttgcctctgatccttcccagagaaacaaaatctcatcggtatttcaacaggcttcaaatcatggactcaacattgccagaacttgggccttcagtgatggtggatatcaacccctacaatactctc

SEQ ID NO: 101883 - DNA, 284 bp, Glycine max
tgaacctgttcaacaactccatcaacgaaaccctaccttcagaaatctccctctgtaaaaacctcatccacctcgacctctcccagaatcttctcacgggcccactcccaaacacgctcccgcaacttcttaatctccgctacctcgacctcaccggcaacaacttctccggccccatccctgactcattcggaacattccagaacctggaagttctctccctcgtttcgaatcttctagaaggcacaatcccttcctccttaggtaatgtgagtactctgaag

SEQ ID NO: 101884 - DNA, 285 bp, Glycine max
acaaaaagctctgttctttttcccacccaattcagtttctcaaatggctcgtacgaagcaaacggctcgcaagtccaccggcggcaaggcgccacgtaagcagctggccaccaaggcggctcgtaagtctgctccggctaccggcggcgtgaagaagccgcacagattccgtccgggaaccgtagcgctccgcgagatccggaagtaccagaagagcacggaacttcttatccggaagctcccgttccagcgattggttcgcgagatcgcgcaggacttcaagac

SEQ ID NO: 101885 - DNA, 286 bp, Glycine max
agaaaagttcaagcgcatgtgtgaaaagtccatgataaagaagcgatacatgcacctgacggaggagtttctgaaagagaacccgaacatgtgcgagtacatggcgccatcgctggacgtgagacaagacgtagtggtgatggaggtgccgaagctgggaaaacaagccgcaacgaaagcgattaaggagtggggtcaaccaaagtcaaagatcacacaccttgtgttctgcaccacttcaggcgtggacatgcccggagcagattaccagctcacgaagcttctc

SEQ ID NO: 101886 - DNA, 283 bp, Glycine max
cttctcttccctttgaccattcaaccttcctcgcctttgcctaccgtttccgtgactgagatggctggaggtgttattcagcagatattgaggaggaaactccaccctcggtttactaactctcccttgttgtcacccatcgtagcaaaaaaagatgatgctggctctactggcagtcagtccttaagagcacttgcattaattggagctggtttgtcaggtcttttcagtttttcaacaatggcagcagctgatgaagctgaacatggcctggcatgtccaa

SEQ ID NO: 101887 - DNA, 277 bp, Glycine max
ctcgagccgctccgcagcagccacacttcttcgccgtttcagctgaagagccatccgcagtaagcaatggttaagcataataatgttatccccaatgggcacttccggaaacactggcaaaactatgtgaagacttggtttaatcaaccagcccgaaagaccagaagacggttggctcggcagaagaaggctgtcaagattttccccaggcctactgctggatctctcaggcctattgttcatggccagactctgaaatacaacatgaaagtcagag

SEQ ID NO: 101888 - DNA, 279 bp, Glycine max
ctctgccatgggcctcattgatagggtactgaaaatgggagtgcttctaactgaggtttatatagatacagttggagatgcagggaaatatgaaatgaagctctctaatagttttccatctatcaaatttgtggttgcaaagaaggctgatagcctttaccccgttgtcagtggtgcaagcatagttgcaaaggtcacaagggaccgtgctttaagagaatgggtgcttgatgagactgctgaaaacatgcagaggaattttggatccggatatcctgg

SEQ ID NO: 101889 - DNA, 280 bp, Glycine max
ctgtcgccgccagatctcagacgagactcagtcacactttctctctttctcttccacaatgcagctcctccgggcggtgctcgcggcggcgctgctcctcctcgccactctctccgacgcccacaacatcacaaccatcctctcatcgcaccctgagttctccaccttcaaccactacctgaccctgacccacctggccccggaaatcaacggcaaaaccaccatcaccgtctgcgccgtggacaacgccgccatgtcggacctcctcagcaagcacccc

SEQ ID NO: 101890 - DNA, 281 bp, Glycine max
ttgggacggcggcgcagagccaagacgacggcaaggactaccaggagccggcgccggcgccactggttgacccgacggagtttacgtcatggtccttttacagagcagggatagcagagtttgtggccacttttctgtttctatacatcactgtcttaaccgtcatgggagtcgccggggctaagtctaagtgcagtaccgttgggattcaaggaatcgcttgggccttcggtggcatgatcttcgccctcgtttactgcaccgctggcatctcaggggga

SEQ ID NO: 101891 - DNA, 278 bp, Glycine max
gcaggaactgatagattattataatatctccacaccaagagactggactggaagggtgaagactttcgaaggtacaggtaaaattgaggacggtttgatgcctattctccataaatctgcaccacaagtagcaatgttttcggctagaggaccaaataaaggactttagcttccaagaggcagatcttctcaaaccagatatattagctcctggttcattgatttgggctgcttggtctctaaatggaaccgatgagccaaattatgttggagagggg

SEQ ID NO: 101892 - DNA, 290 bp, Glycine max
tgcacatttggaaagtgttgtttttctttttttcatttgcattgcaaagcaaaaaccttgcaaattgcaatggcttccaacaaggttattgccaccatcttggttctttctctccttgcctactcaacatcattcaccaatgcatgtggcacatgccacccaaaacctactccttctccccctcctccatcagggaagtgccccaaggacacattgaagctaggggtgtgtgctgatgttctaggacttgttaatgttgttgttggttcccctgtctctagcaagtgttg

SEQ ID NO: 101893 - DNA, 291 bp, Glycine max
tgcgagagaaagagaaccaaaccaagtactaagctcttggttggttcaccccttgtgcttatttgttgttgttgagaaagcacaaagaaaagaagaagaggttttgatcggatgcgatgagcacacaggggcaagtgattattgatgaggcggttctggatgacataatccggcgcttaacggaggtccgactggcccgacccggcaagcaggttcagctctccgagtctgagatcaagcaactctgcgtcgcttccagagacatcttcattaaccagcgcaatttgcttg

SEQ ID NO: 101894 - DNA, 277 bp, Glycine max
aagagaagcattagcaaaagcaagaagaactagtctaagcagaaatggcctcttcagtgatggcatctgtggccctcaaacctgcccctttcactgttgagaagtcctcagttagaggccttccctccctctcaaggaactcctcttcattcagagttgtggccagtggtggcaagaagatcaagactgacaagccttatggaattaatggtggcatggctttgagggaaggagttgatgcatctggcaggaaaggaaaggtttgtgcctcattaaa

SEQ ID NO: 101895 - DNA, 276 bp, Glycine max
ggaattaaggtaagtgacaagatggatccaaatgagcttgttagactcattgagatcttgaatccccaaaacaaaccagggagaataactgtgattacgaggatgggagctgaaaatatgagggtgaagcttccacatctcatcagggcagtgcgcagagcagggcaaattgtcacctgggtcagtgatcctatgcatggaaacaccattaaggctccatgtggtcttaaaactcgccccttcgatttcatcagggctgaagtgagagcattcttt

SEQ ID NO: 101896 - DNA, 277 bp, Glycine max
catcattcacccaacaaaatggctctgcttctgatagtacccatttcactggtaaccctctggctcggttacaccctataccagcggctacgcttcaagctccctcctggcccacggccctggccggtagtcggtaacctctacgacataaaacccgtccggttccggtgcttcgctgagtgggcgcagtcttacggccctatcatatcggtctggttcggttcgaccctaaacgtcatcgtttcaaactcggagttggccaaggaggttctgaagg

SEQ ID NO: 101897 - DNA, 277 bp, Glycine max
ccttagtaccttgaatcattatcattcgggtaatggacacatcactagtgtttactgtgaggaggagtgaggcagagctgatagctccggcgaagccacccctcgtgaagtgaagctactctcagacatagatgaccaagatgggttacgtttccaaattccggtgatacagttctatcgccacgacccatcaatggcagggaaagaccctgtcgatgtgataagaaaggctgtggccaaaacgcttgtgttttactatccttttgcaggtaggctt

SEQ ID NO: 101898 - DNA, 275 bp, Glycine max
tgttcgttcatgcatgagcggctcttaaagttgccttgcggattcgattgcgatatattgagactgcgatggcctcagccgtcgtgaatttcttgaacgcgacgttggattgggtgacgtttgcgtcggatggtccttctgcgcgagctgtagttttcggagtccatatcggtggacatttgtttatcgaagtgtttttgctagttgtcatacttttcttgctttcacagaaaagttacaagcctcctaaaaggcctttaacaaataaggaaatt

SEQ ID NO: 101899 - DNA, 273 bp, Glycine max
gataagcttgtgttggctaacacacaagaattctttgatggaaattttccagtggattcttggttactaatttttgtgaattgtctttatcctgtaagtcaattaccttcagaagctgtcgttgtaaatgttacatgtggtagtggacgtggtggtttacccaccactgcttggattagttctgcagttaataatcgctcctcagatatcaacaaaaagattcgcacagcacttgggaaaggtaagaaaattgtttttcttactagagttgat

SEQ ID NO: 101900 - DNA, 276 bp, Glycine max
cgttagttttttagaacggttccaatttaacaaatttataaaccggttcatcgtataaatgaattaaaaaagaactaataaccaacgcatcgcttcggattatctagatctaaagaactagtcaaaacaaaaaaaaaatataaaaaaagatatattatagcaactgaactattgtgaagcataaaagaacaaaaatcttatttagttgtaaagcaataaaaatatacagataaatgaagaggtgaaagaaagagagaaaaaaaatcaatgatatag

SEQ ID NO: 101901 - DNA, 279 bp, Glycine max
tttcaagtaacttaaggtttcaaacctaggaagttggaagtcatggcagcaacattgatggcagcaacaacaagttctggtactcttaaagcaactcctttccttggccaaggcaagggtgccaatgccaatgctcttagggatgttgtctccatgggaactgggaagtacaccatgggcaatgatttgtggtatggaccagacagagtgaaatacttgggacccttctcagctcagaccccttcatacttgaaaggagaattccctggggattatgga

SEQ ID NO: 101902 - DNA, 256 bp, Glycine max
ggaattgttgtaacttgttgattcctaaattctctataattcgaaattctaatttcgttaggggaaagagattgtttgtgtgtgagtgagtatggctggaaaaggcgagggtcctgctatcggaatcgatttgggaacgacgtactcttgcgtcggcgtgtggcaacacgatcgtgttgaaatcatagccaacgatcagggtaacagaactaccccatcctacgtggctttcacgacacggaacgttgatcggcga

SEQ ID NO: 101903 - DNA, 272 bp, Glycine max
gttcttcgagaccctctctgactcgccgggttgactcgctcgagtttgggggtttctgattcacccggggacggatctcaattttgtctcaggaaaagcaaagggcatcatattactatgaaggcactaattcttgttggagggtttggaacaaggttgaggccattgacactcagtgttcccaagcctcttgttgattttgctaacaagcccatgattctgcatcagatagaagctctcaaggccattggcgtcaatgaagtggtactagc

SEQ ID NO: 101904 - DNA, 274 bp, Glycine max
attgaaaagctttctagctggtcataatatcaccattactgatggtattgacaaaactagtgcaactttgcaatttagaaagttagcagattgtgattttctcaagagaaactttaagcagatgtctaatgttttgtgggtggctcctgaggacaaggcgagtttgtggtcacaacttcattatgtttcgtgtaataatctggaaatgcaagaagcttatcttgtcaatctcgtaaatgtgttacgagaattgtatttgcacagtccagaggaa

SEQ ID NO: 101905 - DNA, 276 bp, Glycine max
gagaaaaccctagttcgcttgcagtcacacaagaggccaatcctattcatagctcgagatgggtgaagaagtgaaggtagttgttccagaatcagtgttgaagaagcgcaagagggaggaggaatgggcgttggccaagaagcaagaactcgatgctgccaagaagaagagagccgagagccgcaaactcatctacaacagagctaagcagtacgctaaggagtacgatcaccaggagaaggaattgattcggttgaaacgcgaggccaagctgaa

SEQ ID NO: 101906 - DNA, 275 bp, Glycine max
gttcctcaatcaatctaattctcccatttctcttccaatggcgtcttctctttccaccaaaccattctcatccgacgctctctccgccttcgcttctctcaattccgatctcggatccctctcccccgcctacctccgactctcactccgtcctcgtcttcccaagagacttcacatacaggcggctgggagtacctatggaaatcactttcgtgttacaacatatggggaatcacatggaggaggtgttggttgtgttattgatggatgtcctc

SEQ ID NO: 101907 - DNA, 276 bp, Glycine max
ctgagttccagactaacctggtaccatatccgaggattcacttcatgctttcatcctatgctcccgtgatttcagcagagaaggcataccatgaacagctttcagttgcagagatcacaaacagcgcgtttgagccgtcctctatgatggccaagtgcgaccctcgccacggcaagtacatggcttgctgtctgatgtacagaggcgatgtggtccctaaagatgttaatgcagccgtagccattatcaagaccaagcgcactatccaatttgttg

SEQ ID NO: 101908 - DNA, 277 bp, Glycine max
tcataacacaaagcacaaagcaaagctcatccttgagttaaaaaatggcagcagcttcttccatggctctctcatccccatccttggctggcaaggccgtgaagctgggcccatcagccccagaagtgggaagggtgagcatgaggaagaccgtcaccaagcaggtctcctcaggaagcccatggtacggcccagaccgagtcaagtacttgggcccattctctggcgagcccccgtcctacctaaccggtgagttcccaggcgactacggctggga

SEQ ID NO: 101909 - DNA, 279 bp, Glycine max
tactgatccacttagtggcagtgttgtcgctgtgttactaccgcataactcacttgttactggaacctccaacagcgccatggcttctgatgaccgtagcggagcttcttctctcggtgctctggttcttcaaccaagccttccggtggcggccggtgtcgcggagcgtcatgacggagaagctgccgagggatgagaagctgccggggcttgacatcttcgtgtgcacgctggatcccgagaaggagcccaccgtggaggtcatggacaccatcatct

SEQ ID NO: 101910 - DNA, 281 bp, Glycine max
ctcgagccgtccaaacacctcaaagccatggacacctccaacttctctattgttctctccgtctccctgagccttcttaatggtgctacttaccaaggcacactcgagcgatagcgtatctttcaccttcaacacgtgcaactcagtccaaccatacattatgctccaaatagatgctagcattgcatcctctggggtgttacaactcaccacagttggcagcaacggtgtgaccacctcggaatctctcggtcgtgccctgtacgctgccccaatacaga

SEQ ID NO: 101911 - DNA, 270 bp, Glycine max
cacaaagcaaagctcatccttgagttaaaaaatggcatcagcttcttccatggctctctcatccccatccttggctggcaaggccgtgaagctgggcccatcagccccagaagtgggaagggtgagcatgaggaagaccgtcaccaagcaggtctcctcaggaagcccatggtacggcccagaccgagtcaagtacttgggcccattctctggcgagcccccgtcctacctaaccggtgagttcccaggcgactacggctgggacactgc

SEQ ID NO: 101912 - DNA, 271 bp, Glycine max
aaacagatttaaacaaatccagaatacactgaaactgcagcacttttcattttgttctcgttcttctttgaattattccgtcgttttctgctgcggcgtgcgtgcgtgaacaatatttagttcggattgttcgattgcgatggctaggaagatgcttatcgatggtgaagctgaattggctcaaggtggtggagaagaagtgtcgaattttgacttcgacttgtttattattggggctggaagtggtggcgttcgtgccgctagattttca

SEQ ID NO: 101913 - DNA, 271 bp, Glycine max
tatagcccaagccctatacaaccaaaccctaacacacacccatttgattcagtttccatggctagcctcaaggttgcatttttggctgcagtgctctgcatggttgtggtgagtgcacccatggcacatgcagctatcacgtgcgggcaggtgacgaatagcctgatcaattgcatcggttacctccagaacggaggaacgccgccgtcgggatgctgcaacggagtgaagagcctcaatgccgccgccaagaccaccgccgaccgccaga

SEQ ID NO: 101914 - DNA, 272 bp, Glycine max
atttcgcactgtattgtacaattcctttatttgtgggatttatttctcacacgataattcattaaattatagaatggatttttacctatgcctagatctcggataaatgaaaattttattgataaaaccttttcaattgtagccaatatcttattacgaataattccgacaacttcgggagaaaaaagggcattcacttattacagagatggtgcgatttgattctatttttttaccgaaatcggtaaaaagtggaaaaaacccacgcttgc

SEQ ID NO: 101915 - DNA, 275 bp, Glycine max
tatgactctggagaagctcttgacgtatggtaacatgcttgtccaagaacaagagaatgtcaagagagtccaattggctgacaagtacttgaacgaggctgcacttggaaatgctaacgaggatgctattaacaggggaactttcttccaatcttgaattggaggcaaagcaaacttggcaagtaaatatttctgttcctgaaggttgtgctgatccaagtgctagaagttgtgatgggacttgcgtgtaacattcttagaattctcaatgtctt

SEQ ID NO: 101916 - DNA, 308 bp, Glycine max
  unsure (1)..(308): unsure at all n locations
ctcgctctatttctcagtctctgtgtttgcggctgaggattccgaacgagtgaccttcttcgtttctcgcaaagtttaagtaatcatgggtaaggaaaaggttcacatcaacattgtcgtcattggacatgtcgactctgggaagtcaactaccactggtcacttgatctacaagcttggaggtattgacaagcgtgtgattgagaggttcgagaaggaggctgccgagatgaacaagaggtcattcaagtatgcctgggtgctcgacaagctcanagctgagcgtgaaagaggaattaccattgata

SEQ ID NO: 101917 - DNA, 306 bp, Glycine max
atttctgtccacctggtggttggtgtgaccctcccaatcaccactttgatctgtctcaacctgttttccagcacattgctcaatatagggctgggattgtgcctgtagtttacagaagggtgaggtgcaggagaaaaggtggaatcaggttcaccatcaatggccactcttacttcaatttagtccttgtaaccaatgttggaggggctgctgatgtgcatgctgtgtccatcaaaggttcaagaactagatggcaagccatgtcaaggaactgggggcaaaactggcaaagcaactcctacttga

SEQ ID NO: 101918 - DNA, 305 bp, Glycine max
tttcactctcactctcgcaactgctgcctcactctctcactctctcaggagtatataatctgagcgatgtcagatctcgaggctcccttgcgccctaagaggaagaaggtttgggtggactattttgttcagtttcgatggatccttgttatttttgtggtccttcccatctccttcaccatttatttccttacataccttggggatgtaagatccgagtggaagtcctataagacgcgtcgaaggaacatgatgccaatgtgaagaaagttatcaaacggctcaaacagaggaatccatcaaaa

SEQ ID NO: 101919 - DNA, 302 bp, Glycine max
cacttactagttcatattacagaggagcacaaggaataattatggtatatgatgtaacaaggcgggaaacctttacaaatctatctgatatatgggctaaagaaattgacttatactcaacaaatcaagattgcatcaagatgcttgttggaaacaaagttgataaggaaagtgaaagggttgtcagcaaaaaggaaggaatagactttgctagggatttggttgtctggatactgaatgcagtgcaaaaaccagagtcaatgttacacaagtgtttgatgagcttgtgatgaagatttgga

SEQ ID NO: 101920 - DNA, 292 bp, Glycine max
gcagagctgcgcgtcgatctagaaaatggcgaggataaaggtttacgagcttaggaacaagacgaaggcggagctgctgaaccagctgaaggatctcaaggcggacttgccctgctccgcgtcgccaaggtcaccggcggcgcccccaacaagctctccaaaatcaaggtggtgaggctttcgatagcgcaggttttgtcggttatttcccaaaagcagaaagcggcgctgagagaggcttacaagaagaagaagtatttgccacttgactacgtccagaaagacaccgcgc

SEQ ID NO: 101921 - DNA, 308 bp, Glycine max
gccacctcaagcgccaaatcagtccatgatttcaccgttaaagatgccaagggaaatgatattaatcttggtgactacaaaggaaaggtccttatcattgtcaatgttgcctcacaatgtggcttgactaattcaaattacactgagctcagtcagttgtatgagaaatacaaacagaaaggtctggaaattctggcatttccatgcaatcagtttggggcacaggagcctggatctaatgaacagatacaagagtttgtttgtactcgcttcaaggctgagtttcacgtttttgacaaggttgatgt

SEQ ID NO: 101922 - DNA, 304 bp, Glycine max
tcaacaatctgcaaagataaaataaacaaaaagaactcgaaagaaggaggaaaacaaaaagaaaaatttagtaactaccgataccatataataataagaatagtattattaaaagagaaagggaagggaaggtaacacgctatggcggcggaatcgggtggtacgccgacaaactttgatcttcccgaggaggtggtgcaagtgctaccgtccgatcccttccagcagctcgatgttgctcgcaagatcaacttccatgctctatgcgacacgtgtcacaccctcgaatcagagctgtcctcgc

SEQ ID NO: 101923 - DNA, 306 bp, Glycine max
  unsure (1)..(306): unsure at all n locations
cagactcagaatgatggcagcaactatggagcagcagcagcaacgcccccaacaacaagacgaagctgaagaaatacaacatggccctttacccgtcgagcaacttcaggcatcgggcatagccgccacggacgttaagaagcttaaagacgcgggaatttgcaccgttgaatccgttgcttacactcccaggaaagatcttttgcagatcaaaggtatcagtgaagctaaagttgacaagataattgaagcagcttctaagctggtgcctatgngtttcaccagtgctagtgaactccatgccag

SEQ ID NO: 101924 - DNA, 303 bp, Glycine max
ggaggacaagacctacggtgtcccccgccgccgcctcaccggacattctcacttcgtccaggacgtcgtcctctcatccgacggtcagttcgccctctccggctcctgggacggcgagctccgcctctgggacctcgcggctggcacctctgcccgccgcttcgttggccacaccaaggacgtgctctccgtggcgttctccatcgacaaccgtcagatcgtgtcggcctctcgtgaccgcacgatcaagctgtggaacaccctgggtgagtgcaagtacacaatccaagatggcgatgcgca

SEQ ID NO: 101925 - DNA, 282 bp, Glycine max
  unsure (1)..(282): unsure at all n locations
ttcacttgcccgcaaatccttggtcaatgcagacggtattatagagaaaacatttttgtggggtaggtacgctttggaaatgtctgctgttgtttacaangactgggttttcactgatcaagcactgcccaatgatcttgtcaagagaggagttgccgttaaggatccatctgctccccatggagttcggcttttgattgaggactatccttatgcttctgatgggctagagtatgggatgccacaatcctgggtgcagaatattgtcatctactacagtca

SEQ ID NO: 101926 - DNA, 210 bp, Glycine max
tggcagagtgcgtttgccctatgatacaattgggagcgttcgtgctcgaatcagtactgtagccccaaaccttgtgaaaatggatgagagagagcctgccacattaccatcttcactcagaccaaccttctctgagaaggtggacaccaccccattcgggactgtagttgagaatttctatatgactgatgccattccaagggattcaag

SEQ ID NO: 101927 - DNA, 107 bp, Glycine max
acctctttcaattttatcccttgttgtgagcttaattcaatttctgctcacacataatggcttgcacgctcgctgattcattactcctattcaagggttcttatcag

SEQ ID NO: 101928 - DNA, 302 bp, Glycine max
tggaaatgggtcaattgactatcttgaattcatttccatcaacatcagcagcatccatgagttgcttcacttcagcctcggatagtcttgatccgattcgagccaagccagtcttcagttcttcataggtgatggtgccactactgtcagtgtccatattggcaaacattgctttgagacctttaatctcctcttctgatagattttcagcgataaccttcaatgctagcttcttgagcttattcattgccctgaattgtttcattctggatagaactgcactatcgattggtttatcagat

SEQ ID NO: 101929 - DNA, 290 bp, Glycine max
  unsure (1)..(290): unsure at all n locations
cttccacactctatgatatctccctcnctgttccttccttctcgacctcatttgcaacccacagcaaaacctagaccccagttcatctctcttgaatcgaatcgatggcacggatgggtccagggttccgattccaccccagcgactaagagctggtggtgttatacctcaagcgcaatatgagcggaaacctgtcgcgctacgacgagatcgccgtcgctgacgtctacaagctcgagccctgggaccttccctctctgtcgaagctgaagacgaaggacttggagtgg

SEQ ID NO: 101930 - DNA, 301 bp, Glycine max
agcgagtccctctctctatctctcacacacactttctctctctctctctctcacccagatcttgtagcaatggcgagcgctcccactccacgcgaagagttcgtgtacatggcgaactggcggacaggccgagcgctacgaggagatggtggagttcatggagaaggtctccgcctccgccgagagcgaggagctgagcgtggaggagcgtaacctcctctccgtcgcctacaagaacgtgatcggcgctcgcgcgacatcctggcgcatcatctcctcaatcgagcagaaggaggagagc

SEQ ID NO: 101931 - DNA, 301 bp, Glycine max
gaaagcaagatgtcagcattgaatatgatgcgtgtacaattccaaatgattgtggttcattggttgttgccaaggttggaaatcacaaacaaattgttggtttccatgttgctggaagcacaggaagactgggatatgcttcattgataccatatgttgagccagttgtgcaagctcaaagtgctgaagtttattttgacttcttccctgtggaggttgatagtcaagagggagttgctcacattggtgaattgaaatctggtgtctatgttccattgcctacaaaaactaatttggtgga

SEQ ID NO: 101932 - DNA, 300 bp, Glycine max
aatacaatcaaccaaccccttcactctctctctctctctcttgcaatggctgccattgttttcatccacattgcatcattggtctctctttttgttgcaacaagtgcaagaatccctggagtttacaccggtggcccctggcagagtgctcatgccaccttctacggtggcagtgatgcttctggaacaatgggtggtgcttgtgggtacggaaacctgtacagccagggctacggagttaacaccgcggcgctgagcactgctctgttcacaacggtttaagctgcggcgcgtgcttcg

SEQ ID NO: 101933 - DNA, 295 bp, Glycine max
gtttcatttgatcagatcataacaatggtgtccgatagcactctcctgggcatgggtaaccctctcctcgacatctccgccgtcgtcgatgaagacttcttaaaaaaatatgatatcacctcgaacaatgcgattcttgcggaggacaagcacaagcctatgtatcaagaattggctgagacatataatgagaaatgacatgctggaggtgccactcaggattcaatcaaggttgctcaatggatgctccaagttcctggtagcacaagttacatgggtggcatagaaggataag

SEQ ID NO: 101934 - DNA, 302 bp, Glycine max
  unsure (1)..(302): unsure at all n locations
ttccataatacgttntctttgaaagacaattggcctcttcaacacataagtctgcatgtgaagaagaggccaattgtctttccaagatcacttatgttggctattgtaatcatgaacttcttctttgtgggtatggcattggcaaaggatataccttctgttgaaggagataaaatatatggcattgatacttttgcaatacgtataggtcaaaaacaagtattttggatttgtattttcctttttgaaatggctttcggagtttccctagtggcaggagcaacatcttctagccttttggt

SEQ ID NO: 101935 - DNA, 299 bp, Glycine max
aaagggtatgaggttcttttcatggttgatgccattgatgaatatgctgttggccagctcaaggaatttgagggcaagaagcttgtctctgccaccaaggagggtctcaaacttgacgagagtgaagatgagaagaagaagcaagaggagttgaaggagaagtttgacaacctatgcaaggtgatcaaggatgttttgggtgacaaggttgagaaggttgtagtctctgaccgtgttgttgattcaccatgctgtctggtgactggagaatacggttggactgcaaacatggaaaggat

SEQ ID NO: 101936 - DNA, 282 bp, Glycine max
gagaaaaaaaaacattggacatagtaaagccatggaagagatcaccaagaacctatcagggacttctcttttggtaccatcagttcaagaattggctaaagaaaagatatctaatgttccacaaagatacattcaacctcaacatgaagaggacattgtgatcctctctgaagaagctaatagtagccttgagattccagttattgacatgcagagcttgctttctgaagaatctgggagctcagaattggataaacttcaccttgcttgcaaagaatgggg

SEQ ID NO: 101937 - DNA, 291 bp, Glycine max
ctcattcttggtatttggggaggcaaaggtcaaggaaaatccttccaatgcgagctcgtctttgccaagatgggaatcaaccccatcatgatgagtgctggagagttggaaagtggaaatgcaggagagccagcaaagttgataaggcaaaggtaccgtgaagctgctgatataatcagcaaggggaagatgtgctgtctcttcataaacgatcttgatgcaggagctggtcgtcttggtggaaccactcaatacactgtgaacaaccagatggtgaatgccaccctcatg

SEQ ID NO: 101938 - DNA, 299 bp, Glycine max
gccatttgggagttaggttctgcacgctctgcttccagcgagtgttctttcttcgtttcaacaccttaatttgcacacgctgcttcttcagcttgagaaatggcacaagaaacctttctattcacatctgaatctgtaaacgagggtcaccccgacaagctgtgcgaccagatctctgatgcagtgctcgatgcgtgccttgaacaggaccctgacagcaaggttgcctgtgagacatgcaccaagaccaacatggtcatggtctttggagagatcacaaccaaggccaacgtagacta

SEQ ID NO: 101939 - DNA, 192 bp, Glycine max
gttcaacgcgatgctactactcttagttagctagcgctggcaatgctcgtggcaggtgcttggtcattaacggatgctacctggttgatcctgccagtagtcatatgcttgtctcaaagattaagccatgcatgtgtaagtatgaactaattcagactgtgaaactgcgaatggctcattaaatcagttata

SEQ ID NO: 101940 - DNA, 297 bp, Glycine max
ctcactcttctaacatggcgactcacatcctctctcgcatcttccccaaaaccctatcccctgtcctctcccgttctctctccaccgccccctctcctccctccctctccgcgctctccttcctccgccgcatctccgttgccgccaacccctccctccaccgcgccctcctccccaactctccctccctccgcgccctctccacacgcgccactacctcctccctcaacgaccccacccctaactggtccaaccgtcccccgaaagaaaccatcttgctcgacggctgcgatttcg

SEQ ID NO: 101941 - DNA, 299 bp, Glycine max
ctcaacaaccaatcaggctgagaagaatgctcctccaaatctcacagtaagaggctttgacttcattgacagaataaagagccttgttgaagctgaatgccctggtgtggtctcttgtgctgatatcctcactttggctgccagagacactattgtagccacaggtggacctttttggaaagttccaactggtcgaagggatggggtcgtctctaacttgacggaagccagacataacattcctgctccatcttccaactttaccaccctacaaacactctttgctaaccaaggacttg

SEQ ID NO: 101942 - DNA, 299 bp, Glycine max
gttttaaatccacaaaatccttttgtgttaaataggtggatgggaaaactgactttcccccagggcacttcccgaagtgttaagagaatgcctcttactatagggggaggagctggtgcaaagaatgctattctcatgaacatgccaaatgctgttctttcaatgtggagatatgttgttggagatcacctccttggagtttctaaggtggcttctccctacagtagaatgtacagtctctattcgtcacagcatattggaaatttggctgatgacaccatcaattttgaggcctttcc

SEQ ID NO: 101943 - DNA, 271 bp, Glycine max
tgacgatgacgtcaagtcatcatgccccttatgccctgggcgacacacgtgctacaatggacgggaccaaggatcgcgatcccgcgatggtgagctaactccaaaaacccgtcctcagttcggattgtaggctgcaactcgcctgcatgaagccggaatcgctagtaatcgccggtcagccatacggcggtgaattcgttcccgggccttgtacacaccgcccgtcacactatgggagctggccatgcccgaagtcggtaccttagccgca

SEQ ID NO: 101944 - DNA, 301 bp, Glycine max
gctcaaggggctgttggtgttataattagaagtaatgtttctttagctgtgtccgatgtatttcccctgccagcggctcacattactcacaatgacggggcacaaatatattcttatttaaagtcaacaagtaatccaacagcgactatatttaagagttatgaaggcaaagatccattagccccatatattgattcattctcaggtagaggtccaaacaaaatcactccaaatattctaaagcctgatttagctgctccaggggttaacattctagctgcatggtctccaattgctccta

SEQ ID NO: 101945 - DNA, 295 bp, Glycine max
ctgaacctgctaacgtttgatgtttatgtcgatggaaaacccacacagggtggctttgctgaaaccatgatcgttgagcaaaagtttgtggtgaagattccagagggtttggcgccagagcaagtggcaccattactgtgtgcgggtgtgacagtgtacagtccactggtacactttgggctgaaagagagtgggctaagaggtggaatattggggcttggaggagtgggacacatgggggtgaagatagcaaaggcactgggtcatcatgtgactgtgataactcttctgacaa

SEQ ID NO: 101946 - DNA, 299 bp, Glycine max
acgaagcaagaaggaagttctcaaatgctaaatctatttcttcatctcaattttttggagatcagaacaaagctgcagatgtggattctcaagctactttgtctaagttttcgggttcaagtgcaacttcagcgctgatctttttggtgactcaagagacaacaacatcgatcttactgctggtgacctcatcaatcgattatctttccaggcacaacaggatctctcttcccttaagaacattgcaggagagactggaaagaagctcagcgctcactggcctccacattgatgacaga

SEQ ID NO: 101947 - DNA, 298 bp, Glycine max
atcgagataactagaaacagtgtgatgaaaatgaaggtccttgttttcttcgttgctacaattttggtagcatggcaatgccatgcgtacgatatgttccctctccgaatgaacactggctatggtgcccgtactccggaggtgaaatgcgcaagttggaggcttgctgtggaagcacacaacatctttggctttgagaccattcctgaagagtgcgttgaagcaacaaaggaatacatccatggcgaacaatatagatcagactccaaaacagttaaccaacaagcttacttttatg

SEQ ID NO: 101948 - DNA, 300 bp, Glycine max
ttcagagtttgtgacgcacgcatccatggccaccaccaccaacgccgccgcagccccgccgcgccagctctcccagaaggaagccgacatccagatgatgttagccgccgacgtccacctcggcaccaaaaactgcgacttccaaatggaaccctacatcttcaagcgccgcaacgacgggatttacattattaaccttgggaagacatgggagaagcttcagttagcagctagggttattgttgcaattgagaaccctcaggatatcattgttcaatccgcaaggccttgatggtcaag

SEQ ID NO: 101949 - DNA, 287 bp, Glycine max
gtctctttcaaagtgttgctgctgccagcattgacctgagctagagcagtaaccgtcatcaccactgccagtacggtaccatggctgtgcttcaatctttcgtttcggtccacccagattctcacttccccatacagaacctcccctacggagtgttcaagccccaatccgcttctcctcctcgtcccggcgtcgccatcggagacatcgtcctcgacctctccgaaatctcttccgctggtctcttcgacggccctctcctcaaaaactccgattgcttcctccag

SEQ ID NO: 101950 - DNA, 298 bp, Glycine max
gacagatcacaagaaacaccagcagctataaaaacctgagacgaatttagatgtgggaagggagggacatcaagagtgattccagcttggatttgtccccacccaataagacgccaatgcttctcaacacgacgactaagtgcaatcttctcgcccttgctagtgcacacaggggaagtgagttgcaacttcgccaagtcattcttcacagcaactactctagcccccgtcgacattgatccaatgttcaacattaacatctctcctttagccagcttggatagctttcgctgtctct

SEQ ID NO: 101951 - DNA, 294 bp, Glycine max
gaaggattggacgcaaagcaaaatgctcctgtatcccttcctatggaaaccttcaagagttatgttctcaatgagcccatcggagttgttgcattaattactccatggaactatcctctattgatggctacatggacagttgctcctgctctagctgctggttgtacagcaatattgaagccatctgaattggcatctgtgacctgtttggagctggctgaaatatgcagagaagttggccttcctccaggggtattaaacattgttactggattaggcaatgaagctggtgct

SEQ ID NO: 101952 - DNA, 303 bp, Glycine max
aaattcttccaccaagttatgggtttccttgtgttgcttcttttctccctcttaggtctctcttctagttccagcatatcaactcatcgttccatattggaccttgacctaaccaagtttaccacacagaaacaggtgtcttcactgttccaactatggagagtgagcatggacgtgtctaccataaccacgaagaagaggcaaagagacttgagattttcaagaataacttgaactatatcagggacatgaatgcaaacagaaaatcaccccattctcatcgtttaggattgaacaagtttg

SEQ ID NO: 101953 - DNA, 306 bp, Glycine max
cgcgctcgaacttactaacactttccttagttcaatatggggaagcccttcttcactctctctctttcttccctttgcttgctactcttgtcgagtgcatgctttgctattacctccagcaagttcaacgagtgccaactcaacaacctcaacgcgttggaacccgccaccgcgttgagtccgaaggtggtcttattgaaacatggaactctcaacaccctgagctgcaatgcgccggtgtcactgtttccaaacgcaccctcaaccgcaacggcctccacttgccatcttactcgacttatcccc

SEQ ID NO: 101954 - DNA, 297 bp, Glycine max
taaacactcatcagtcatcaccatggccaagctagttttttccctttgttttctgcttttcagtggctgctagttcgctttcagttccagagagcagcctcagcaaaacgagtgccagatccaaaaactcaatgccctcaaaccggataaccgtaagagtcagaaggagggctcattgagacatggaaccctaacaacaagccattccagtgtgccggtgttgccctctctcgctgcaccctcaaccgcaacgcccttcgtagaccttcctacaccaacggtccccaggaaatctac

SEQ ID NO: 101955 - DNA, 293 bp, Glycine max
ctcttcttctcttgcggctagggttttagcgcgctcttctagatttaaggaagatgggtaaggagaaggttcacatcagtattgtggtcattggccatgtcgactctgggaaatccactaccactggtcacctgatttacaagcttggaggcttgacaagcgtgttattgagaggtttgagaaggaagctgctgagatgaacaagaggtctttcaagtatgcctgggtgctggacaaacttaaggctgagcgtgaaagaggaatcaccattgatattgctttgtggaagtttg

SEQ ID NO: 101956 - DNA, 297 bp, Glycine max
gcgaagagaatggctcccaagggtttaatctttttggctgtgttatgcttctcagcactgtcactgagtcgttgtcttgcggaggataatggacttgttatgaacttctacaaggaatcatgccctcaggctgaagacatcatcaaagaacaagtaagcttctctacaagcgccacaagaacactgctttctcctggctcagaaacatcttccatgactgtgctgttcagagttgtgatgcttcactgttgctggactccacaagaaggagcttgtctgagaaggaaacagatagaa

SEQ ID NO: 101957 - DNA, 298 bp, Glycine max
ccttgctctatactacacagtacacacactagaagaataatggcttccatcctccactactttttagccctctctctttcttgctcttttcttttcttcttatccgactcagtcacccctacaaaaccaataaaccttgttgttctacccgttcaaatgatggttccacagggctccattgggccaacctccaaaaaagaacccctctaatgcaagtaccagtcctggtggacctcaatggaaatcacttgtgggttaactgtgagcagcagtactcatccaaaacgtaccaagcacc

SEQ ID NO: 101958 - DNA, 297 bp, Glycine max
ttgcctttatagcagcttcaagaggatataagctaattttgacaatgcctgcttcaatgagtttagaaagacgggttcttttgaaagcatttggggccgagcttgttttgactgatgcagcaaagggcatgaatggagcagtacaaaaagctgaagaattttaaaaagtacccccaattcatacatgcttcaacaatttgataatccttcaaatcctaaggttcattatgagacaactggcccggagatatgggaagatactagaggaaagatagatattttagttgcaggaattgg

SEQ ID NO: 101959 - DNA, 299 bp, Glycine max
gttatgggtttccttgtgttgcttcttttctccctcttaggtctctcttctagttccagcatatcaactcatcgttccatattggaccttgacctaaccaagtttaccacacagaaacaggtgtcttcactgttccaactatggaagagtgagcaggacgtgtctaccataaccacgaagaagaggcaaagagacttgagattttcaagaataacttgaactatatcagggacatgaatgcaaacagaaaatcaccccattctcatcgtttaggattgaacaagtttgctgacatcact

SEQ ID NO: 101960 - DNA, 298 bp, Glycine max
agttcctcactgacctcaccatggcgaccagagccaagctttctttagctatcttccttttctttcttttagccttgatttcaaacctagccttgggcaaacttaaagaaaccgaggtcgaagaagatcccgagctcgtaacatgcaaacaccagtgcaacagcaacggcaatacactgagagtgacaagcgaacatgcttgcaacaatgtgacagtatgaagcaagagcgagagaaacaagtcgaagaggaaactcgcgagaaggaagaagaacatcaagagcagcatgaggaggag

SEQ ID NO: 101961 - DNA, 298 bp, Glycine max
agtttctgtgttgtgtcatttttattgctatatcctaattaaacttcaccctcaaaatgagtgatcccacactagcacaaccacacctagttgaagtccacacaacaacactcctaaccgttgttaccacacacaaccataaccatagaccctcaataatgcctcaggtgaaaagaagaaaattgtgggggtgttctacaaagggaatgagtatgctaaattgaaccccaatttcgtggggtgtgttgaaggagcattgggtatacgtgagtggctggaatcacagggtcatcagtac

SEQ ID NO: 101962 - DNA, 300 bp, Glycine max
cttatggtggatacctaggcacccagagacgaggaagggcgtagtaagcgacgaaatgcttcggggagttgaaaataagcgtagatccggggattcccgatataggtcaacctttcgaactgctgctgaatccacgggcaggcaagagacaacctggtgactgaaacatcttagtagccagaggaaaagaaagcaaaagcgattcccgtagtagcggcgagcgaaatgggagcagcctaaaccgtgaaaaggggttgtgggagagctatacaatgtcgtgctgctagcgaacagcagaga

SEQ ID NO: 101963 - DNA, 308 bp, Glycine max
ggctcgagggtttggcagagaacagagattgggaaattcctcaatcttttgaactcgacaagtgcgtgcaacactgtacaataatcttcatcgtccttgaaattcccaatcccctgtagtggtagtaagttgctagcaatcgagaatgggagggcacggagtctcaacattctcccccaaaagcgatggaacgtttacaatttcgacaacagagagaaggtccgtcgcgacgaagagcaagccgccagggaggagcagctcaagcgtgaagagacccggaagcgcgacgccgagctccgcctcgaccg

SEQ ID NO: 101964 - DNA, 297 bp, Glycine max
gttatctggtgcacacacattggggcggtctagaccagatcgcagtggttggggaaagcctgaaactaaatatacgaaagatggaccaggagcacccggaggacaatcctggacagtgcaatggttgaaatttgacaactcttacttcaaggaatcaaagaaaaaaaggatgaagatctattggtattgccaactgatgctgctctttttgaagacccatccttcaaggtatatgctgagaaatatgctgaagatcaggaagcattctttaaagattatgctgaagcccatgcaaaa

SEQ ID NO: 101965 - DNA, 294 bp, Glycine max
tgttcaatatcctagtacaccgtattaaagaatttaagatatactatgatgagagctcggttcccattactgttgctgggagttgttttcctggcatcagtttctgtctcatttggcattgcgtattgggaaaagcagaaccccagtcacaacagtgcctccgaagttgcaatagcgagaaagactcctacaggaaccaagcatgccacgctcgttgcaacctccttaaggtggaggaagaagaagaatgcgaagaaggtcaaattccacgaccacgaccacaacacccggaga

SEQ ID NO: 101966 - DNA, 294 bp, Glycine max
gttcaatatcctagtataccttaataaataatttaagatactatgatgagagcacggttcccattactgttgctgggacttgttttcctggcttcagtttctgtctcatttggcattgcttactgggaaaaagagaaccccaaacacaacaatgtctccagagttgcaatagcgagagagactcgtacaggaaccaagcatgccacgctcgttgcaacctaccttaaggtggagaaagaagaatgtgaagaaggtgaaattccacgaccacgaccacgagcacaacacccggag

SEQ ID NO: 101967 - DNA, 297 bp, Glycine max
ccattggtccttaaacactcatcagtcatcaccatggccaagctagttttttccctttgttttctgcttttcagtggctgctagttcgctttcagttccagagagcagcctcagcaaaacgagtgccagatccaaaaactcaatgccctcaaacggataaccgtatagagtcagaaggagggctcattgagacatggaaccctaacaacaagccattccagtgtgccggtgttgccctctctcgctgcaccctcaaccgcaacgcccttcgtagaccttcctacaccaacggtcccc

SEQ ID NO: 101968 - DNA, 293 bp, Glycine max
attctctccattgtctttgaacactcatcaccatggccaagcttgttctttccctttgtttccttcttttcagtggctgcttcgctctgagagagcaggcacagcaaaatgagtgccagatccaaaagctgaatgccctcaaaccggataacgtatagagtcggaaggtgggttcattgagacctggaaccctaacaacaagccattccagtgtgccggtgttgccctctctcgctgcacccttaaccgcaatgcccttcgtagaccttcctacaccaacggtccccaggaaa

SEQ ID NO: 101969 - DNA, 295 bp, Glycine max
gtgaaaattttgctcgcccaattcttggagggtctagcactcatccctaccctcgtaggggaagaactggtcgatatccaacaaggaaagatcagaattctgagaagccaggcgaagtttatgttccaagagatgaaaattttggtcacttgagtcctcggattttcttgcatatggaataaaatctttatctcaatatgtcttaccggcgttcgaatctgttttcgatttgaacttcacgccaaatgagtttgatagcttccaagatgtgcgtgacctccacgaaggtggaatt

SEQ ID NO: 101970 - DNA, 287 bp, Glycine max
gagagtttcttcctatctagcactgaagctcaacaatcctacttgcaaggattcagcaggaacattttagaggcctcctacgataccaaattcgaggagataaacaaggttctgtttagtagagaggaagggcagcagcaaggggagcagaggtgcaagagagcgtgattgtggaaatctcgaaggaacagattcgggcactgagcaaacgtgccaaatctagttcaaggaaaaccatttcttctgaagataaacttttaacttgagaagccgcgacccatctactc

SEQ ID NO: 101971 - DNA, 290 bp, Glycine max
ctttttctttttcttcttcttcttcttctttattttctcattttgccaaactaaaatagttgtgttggtagctttggcaaagatgttttcagcaggccataagatcaaagggacagtggtgttgatgcccaagaatgagttggaagttaacccgatggctcagcagttgacaaccttaatgctttcttgggccgtagtgtctcccttcagctcattagtgctaccaaggctgatgcacatggaaaaggaaaagttggaaaggatacgttcttggaagggattaatacttc

SEQ ID NO: 101972 - DNA, 298 bp, Glycine max
taattattaacacttccttagttcaatatggggaagcccttcactctctctctttcttccctttgcttgctactcttgtcgagtgcatgctttgctattagctccagcaagctcaacgagtgccaactcaacaacctcaacgcgttggaacccgccaccgcgttgagtccgaaggtggtttgattcaaacatggaactctcaacaccctgagctgaaatgcgccggtgtcactgttttccaaactcaccctcaaccgcaatggcctccacttgccatcttactcaccttatccccgga

SEQ ID NO: 101973 - DNA, 293 bp, Glycine max
tttcgagcgaatcggctgagcattggtccttaaacactccatagtcatcaccatgaccaagctagttttttcccactgttttctgcttttcagtggctgctgcttcgctttcagttccagagagcagcctcagcaaaacgagtgccagatccaaaactcaatgccctcaaaccggataaccgtatagagtcagaaggagggctcattgagacatggaaccctaacaacaagccattccagtgtgccggtgttgccctctctcgctgcatcctcaaccgcaacggccttcgtag

SEQ ID NO: 101974 - DNA, 306 bp, Glycine max
ctagctagtagtctcagttcgtttgagagagaaaaaatggcagagggtctcgttctccgcggaaccatgcgcgcccacaccgacgtcgtgacggcgattgccactcccatcgacaactccgacatgatcgtgacggcgtcgcgcgacaaatccatcatctctggcacctcaccaaggaggacaagacctacggtgtcccccgccgccgcctcaccggacattctcacttcgtccaggacgtcgtcctctcatccgacggtcagttcgccctctccggctcctgggacggcgagctcgtctctggga

SEQ ID NO: 101975 - DNA, 294 bp, Glycine max
ctctccattgtctttgaacactcatcaccatggccaagcttgttctttccctttgtttccttcttttcagtggctgcttcgctctgagagagcaggcacagcaaaatgagtgccagatccaaaagctgaatgccctcaaaccggataaccgatagagtcggaaggtgggttcattgagacctggaaccctaacaacaagccattccagtgtgccggtgttgccctctctcgctgcacccttaaccgcaatgcccttcgtagaccttcctacaccaacggtccccaggaaatcta

SEQ ID NO: 101976 - DNA, 281 bp, Glycine max
gaagcagcagctacaggacagtcaccagaagattcgtcacttcaatgaaggagacgtactcgtgattcctcctggtgttccttactggacctataacactggcgatgaaccagttgttgccatcagtcttcttgacacctctaacttcataaccagcttgatcaaacccctagggtattttaccttgctgggaacccagatatagagtacccagagaccatgcaacaacaacaacagcagaaaagtcatggtggacgcaagcaggggcaacaccagcagga

SEQ ID NO: 101977 - DNA, 283 bp, Glycine max
ctttttcttgttctttaattttctgattttagcaaattaaaatagtagtgttattggtaggttttggcaaagatgttttcagttccaggggtgttgggaatcctgaacagaggaggagggcataagataaaagggacagtggtgttgatgaggaagaatgtgttggacttcaacagcgtggctgatcttactaaaggaaatgttgggggactcataggcaccggcctcaacgttgttggctcaacacttgataacctcactgctttcttgggccgaagtgtcg

SEQ ID NO: 101978 - DNA, 291 bp, Glycine max
aaactacccttttgcttttgctctttgttctttgccatggagtggccacaacaacaatggccttccatgatgatgagggtggtgataaaaagtcaccaaaaagtttgtttttgatgagcaactccacgagggttttcaagactgatgacagggaaatgcgtgtgctgaaaagccatggtggtaggatattttataggcacatgcacattggcttcatctctatggaaccaaagtccttgtatgttcctcagtacctcgactccaatctcatcatattcatccgtagagggg

SEQ ID NO: 101979 - DNA, 291 bp, Glycine max
gtttattcacgctgggagcaatttcttgctgcttgtgctgagaatacagaaaagtcaacatttgttcgagatcgttttcccttcaaagagttcttctgtgatacaccacatcctgtatttacaggtgagtcttttgagaaagacatgcggactgcaatggggtgctttcgtcatcttaagaccatgtttcaagaacttgaagagtgtcgggcattcgaattacttaagtcaacagctgatagggctaactacttaatgaccaagcaggctaagattgtggcaatgacttgc

SEQ ID NO: 101980 - DNA, 294 bp, Glycine max
gctgaagtgtctgcttcttccgattccggcacgcccccatcaccatggtgaacgttccgaaaacaaagaagacatactgcaagagtaaggacgtgcaggaagcacaccctgcacaaggttacccaatacaagaagggtaaagatagcattgtgcccaaggaaaacgccgttacgatcgcaaacaatctggttatggcggacaaactaagcccgtcttccacaagaaggctaagaccaccaagaagattgttctgaggttgcaatgccagggttgcaagcatgtctcccaacacg

SEQ ID NO: 101981 - DNA, 291 bp, Glycine max
atcaaacagaagaggctcaaggtcgcagaagcagcagctacaggacagtcaccagaagattcgtcacttcaatgaaggagacgtactcgtgattcctcctggtgttccttactggacctataacactggcgatgaaccagttgttgccacagtcttcttgacacctctaacttcaataaccagcttgatcaaacccctagggtattttaccttgctgggaacccagatatagagtacccagagaccatgcaacaacaacaacagcagaaaagtcatggtggacgcaagcag

SEQ ID NO: 101982 - DNA, 284 bp, Glycine max
tgtccttgaatataatactcagcatggctaagcttgttctttccctttgttttctgcttttcagtggctgctgcttcgctttcagtttcagagagcagccacagcaaaacgagtgccagatccaacgcctcaatgccctcaaaccggataccgtatagagtcagaaggtggcttcattgagacatggaaccctaacaacaagccattccagtgtgccggtgttgccctctctcgctgcaccctcaaccgcaacgcccttcgcagaccttcctacaccaacgctc

SEQ ID NO: 101983 - DNA, 296 bp, Glycine max
gcataatagagaaatcttttttgccctcaaagcattccgttgagatgtcttcagcggtttataagaattgggttttcactgatcaagcactacctgcagatcttatacaagagaggagtggcaattaaggatccatctgccccacatggactcgacttctgatagaggactacccttatgctgttgatgggctagagatatgggctgcaattaagacatgggtccaagaatatgtgtccttgtactatgcaagagatgatgatgtcaaacctgattctgaactccaacagtggtgg

SEQ ID NO: 101984 - DNA, 267 bp, Glycine max
gttcaatatcctagtacaccgtattaaagaatttaagatatactatgatgagagctcggttcccattactgttgctgggagttgtgttcctggcatcagtttctgtctcatttggcattgcgtattgggaaaagcagaaccccagtcacaacgatgcctacgtagttgcaatagcgagatagactcctacaggttccaagcatggcacgctcgttagcagctccttaaggtggaggacgaggagaatgcgtgaaggtcaattccacg

SEQ ID NO: 101985 - DNA, 290 bp, Glycine max
cagtgccgccgtcttcttctggtagggtgagaccctccaggagtactggtggtgcaccgagcgcgccctcgactgatgccccggtggtggacccgacctcatcgtcgacgacggtggtgacgctacccttctcatccacgaaggcgtaaggccgaggagctctatgagaagaccggcgaactccccgaccccaactccaccgacaacgccgagtttcagatcgtgcttaccatcatcagagatgggttgaagaccgatcccaccaggtaccgcaagatgaaggagcgtct

SEQ ID NO: 101986 - DNA, 285 bp, Glycine max
aaaatgaagagcaccatcttctttgctctctttctcttttgtgccttcaccacctcatacctaccttcagccatcgctgatttcgtgctcgataatgaaggtaaccctcttgaaaatggtggcacatattatatcttgtcagacatacagcatttggtggaataagagcagccccaacgggaaatgaaagatgccctctcactgtggtgcaatctcgcaatgagctcgacaaagggattggaacaatcatctcgtccccatatcgaatccgttttatcgccgaag

SEQ ID NO: 101987 - DNA, 287 bp, Glycine max
agtgatttcagtgagtgatcggtgttcacttgatctcatcataatcgtcagcgtcaattgaagaagatgccgatcagaaacatcgccgtcggaaggcctgaagaggcgactcaccccgacacgttgaaggcggctttggctgagtcatctcaaccttcatcttcgtgttcgccggctcaggctccggcatcgcctacaacaagctcaccgacaacggcgctgcaacccctgccggcctcatctccgcctccatcgcccatgcattcgccctcttcgtcgccgtctcg

SEQ ID NO: 101988 - DNA, 288 bp, Glycine max
aacttattaacactttccttagttcaatatggggaagcccttcttcactctctctctttcttccctttgcttgctactcttgtcgagtgcatgctttgctattacctccagcaagttcaacgagtgccaactcaacaacctcaacggttggaacccgaccaccgcgttgagtccgaagcttcgtcttattgaaacatggaactctcaacaccctgagctgcaatgcgccggtgtcactgtttccaaacgcacgctcaaccgcaacggcctccacttgccatcttactc

SEQ ID NO: 101989 - DNA, 250 bp, Glycine max
agaggatctcatcaaacgccttgagtccgagatctctggtgactttgagagagctatgtaccggtggatgttgcagcctgcggatcgtgatgctgttttggtgaatgtggcaatcaagaatggcaccaaagactaccatgtgattcagagattgcttgtgtcctatcagctgaagagctcttggcagtgaggcgggcctaccaccgccgctacaagtgttccttggaggaaatgtggcagctaacaccac

SEQ ID NO: 101990 - DNA, 289 bp, Glycine max
atatcctagtataccttaataaataatttaagatactatgatgagagcacggttgccattactgctgctgggacttgttttcctggcttcagtttctgtctcatttggcattgcttactgggaaaaagagaaccccaaacacaacaatgtctccagagttgcaatagcgagagagactcgtacaggaaccaagcatgccacgctcgttgcaacctccttaaggtggagaaagaagaatgtgaagaaggtgaaattccacgaccacgaccacgtgcacaacacccggaga

SEQ ID NO: 101991 - DNA, 287 bp, Glycine max
ctccattgtctttgaacactcatcaccatggccaagcttgttctttccctttgtttccttcttttcagtggctgcttcgctctgagagagcaggcacagcaaaatgagtgccagatccaaaagctgaatgccctcaaaccggataccgtatagagtcggaaggtgggttcattgagacctggaaccctaacaacaagccattccagtgtgccggtgttgccctctctcgctgcacccttaaccgcaatgcccttcgtagaccttcctacaccaacggtccccaggaa

SEQ ID NO: 101992 - DNA, 288 bp, Glycine max
gcagaagaggctcaaggtcgcagcagcaactacaagacagtcaccagaagattcgtcacttcaatgaaggagacgtactagtgattcctcctggtgttccttactggacctataacactggcgatgaaccagttgttgccatcagcttcttgacacctccaacttcaacaatcagcttgatcaaaaccccagagtattttaccttgctgggaacccagatatagagcacccagagaccatgcaacaacagcagcagcagaagagtcatggtggacgcaagcaggggca

SEQ ID NO: 101993 - DNA, 289 bp, Glycine max
aacacttccttagttcaatatggggaagcccttcactctctctctttcttccctttgcttgctactcttgtcgagtgcatgctttgctattagctccagcaagctcaacgagtgccaactcaactacctcaacgcgttggaacccgccaccgcgttgagtccgaaggtggtttgattcaaacatggaactctcaacaccctgagctgaaatgcgccggtgtcactgtttccaaactcaccctcaaccgcaatggcctccacttgccatcttactcaccttatccccgga

SEQ ID NO: 101994 - DNA, 188 bp, Glycine max
ttcaatacaacgagtgcttgttttcttagggacaagcattgtacttatgtatgattctgtgtaaccatgagtcttccacgttgtactaatgtgaagggcaaaaataaaacacagaacaagttcgtttttctcaaataatgtgaaggtgaaaatggaaaaaaaaaaaaaaaaaagggcggccgccgact

SEQ ID NO: 101995 - DNA, 290 bp, Glycine max
ttccataaataggctgcagtcactaataagtgttacatctcaggctgtgtctaccacctcaactgccattattggccttagggactctgatcttgtccctcagcttgttgatctcatacatggattcatgtacatgtggagatcaatgaccactaccatgaaattcaaagcaatatagtgcagcaagtccgtggtcttgtgaacagatcatcaagaggtgactccattctgaactccacaggcaggcaatcgggaccttgaatcagccgtttcagcttggcacaacagtt

SEQ ID NO: 101996 - DNA, 289 bp, Glycine max
atgctatggtgcatgatagttcagtgtctacactacgaggtgattttgacattggtggtaagtttgacaaccataaacaatatgtgtgcatatgggctcaatcctggtatttcaggttctcgtcttttgggcaccattcctcagtctattcacagcaaactgtttggaatcaaatggcaacagtgagaacaccattgaattttgattctagcaagcagagcttttgtcaattttctattgaccttctcggtggaggaattttagtggacaaaactggagattggatcac

SEQ ID NO: 101997 - DNA, 299 bp, Glycine max
gtctcgtctcgagtaagaaagtcttccatagccccccaaaaatgtagagcaccatcttctttgctctctttctcttttgtgccttcaccacctcatacctaccttcagccatcgctgatttcgtgctcgataatgaaggtaaccctcttgaaaatggtgcacatattatatcttgtcagacataacagcatttggtggaataagagcagccccaacgggaaatgaaagatgccctctcactgtggtgcaatctcgcaatgagctcgacaaagggattggaacaatcatctcgtccccat

SEQ ID NO: 101998 - DNA, 286 bp, Glycine max
aaaattcttccaccaagttatgggtttccttgtgttgcttcttttctccctcttaggtctctcttctagttccagcatatcaactcatcgttccatattggaccttgacctaaccaagtttaccacacagaaacaggtgtcttactgttccaactatggaagagtgagcatggacgtgtctaccataaccacgaagaagaggcaaagagacttgagattttcaagaataacttgaactatatcagggacatgaatgctaacagaaaatcaccccattctcatcgtt

SEQ ID NO: 101999 - DNA, 282 bp, Glycine max
ctcgtgctatcatcaacttgtcagccattggttaaacactcatgcagttgttgagccattcatcatagcaacaaacaggcatctcagtgttgttcaccctatttataaactccttcaccctcactatcgtgacaccatgaactaaatggccttgctcggttatcactggtcaacgacggtggcgttatagaacaaacatttttgtggggaaggtattctgtggaaatgtctgctgtagtttacaaggattgggtttttacagatcaagcattgcctgctgat

SEQ ID NO: 102000 - DNA, 284 bp, Glycine max
ttgtcgttcaagggaagggagcaattggatttgcatttccgggatgtcctgagacgtttgagaagccacaacagcaatcaagcagaagaggctcaaggtcgcagcagcaactacaagacagtcaccagaagattcgtcacttcatgaaggagacgtactagtgattcctcctggtgttccttactggacctataacactggcgatgaaccagttgttgccatcagtcttcttgacacctccaacttcaacaatcagcttgatcaaaaccccagagtattttacc

SEQ ID NO: 102001 - DNA, 282 bp, Glycine max
gagggtgcatgagtggtaatcgggatgtttttgttgcacggctccatgcttgcgcatgcaacgtgtgacatgcatccttttcattgtcaccttagccttcgtggcttaggtgctgacgattggttcctgtgttgcctacctacaaacggtattcgtgtggctagtcagacccatctcatccaggcctctttgttggggacgctggaggatttcaaagtcccacacgtgaaccacgttagtcgtccatcataacggcttcctgtggcacacgtgtggtgattg

SEQ ID NO: 102002 - DNA, 271 bp, Glycine max
tcccacttttgtctttttggcaatagtgctagcaaccaataaataataataataataatgaataagataacaaaggctttagcttgccttatgttcactgtaaaataataatgtaagtactctctataatgagtcacgaaactttgcgggaataaaaggagaaattccaatgagttttctgtcaaaaaaaaaaagaaattagtttacctctgaaaataagggctacaatgaaaaggatagccaaaaagtggacaattaggtctttgagaaa

SEQ ID NO: 102003 - DNA, 282 bp, Glycine max
atatactatgatgagagtgcggtttcctttgttggtgttgctgggaactgttttcctggcatcagtttgtgtctcattaaaggtgagagaggatgagaataaccctttctacttgagaagctctaacagcttccaaactctcttgagaaccaaaacggtcgcattcgtctcctccagagattcaacaaacgctccccacaacttgagaaccttcgagactaccggattgtccagtttcagtcaaaacccaacacaatccttctcccccaccatgctgacgcc

SEQ ID NO: 102004 - DNA, 285 bp, Glycine max
attaacacttccttagttcaatatggggaagcccttcactctctctctttcttccctttgcttgctactcttgtcgagtgcatgctttgctattagctccagcaagctcaacgagtgccaactcaacaacctcaacgcgttggacccgaccaccgcgttgagtccgaaggtggtttgattcaaacatggaactctcaacaccctgagctgaaatgcgccggtgtcactgtttccaaactcaccctcaaccgcaatggcctccacttgccatcttactcaccttat

SEQ ID NO: 102005 - DNA, 269 bp, Glycine max
ggctcgagggtggaagcccttcactctctcattttcttccctttgcatgctactcttgtcgagtgcatgctttgctattagctccagcaagctcaacgagtgccaactcaacaacctcaacgcgttggacccgaccaccgcgttgagtccgaaggtggtttgattcaaacatggaactctcaacaccctgagctgaaatgcgccggtgtcactgtttccaaactcaccctcaaccgcaatggcctccacttgccatcttactcacctta

SEQ ID NO: 102006 - DNA, 284 bp, Glycine max
cttaattattaacacttccttagttcaatatggggaagccctttactctctctctttcttccctttgcttgctactcttgtcgagtgcatgctttgctattagctccagcatgctcaacgagtgccaactcaacaacctcaagcgttggaacccgaccaccgcgttgagtccgaaggtggtttgattcaaacatggaactctcaacaccctgagctgaaatgcgccggtgtcactgtttccaaactcaccctcaaccgcaatggcctccacttgccatcttact

SEQ ID NO: 102007 - DNA, 286 bp, Glycine max
cttgttctttccctttgtttccttcttttcagtggctgcttcgactctgagagagcaggcacagcaaaatgagtgccagatccaaaagctgaatgccctcaaaccggataaccgtatagagtcggaaggtgggttcattgagactggaaccctaacaacaagccattccagtgtgccggtgttgccctctctcgctgcacccttaaccgcaatgcccttcgtagaccttcctacaccaacggtccccaggaaatctacatacaacaaggtaatggtatttttggca

SEQ ID NO: 102008 - DNA, 279 bp, Glycine max
agatcatacatagtagtgttggtgggttgcaaagatgcttgggggtcttctccataggggtcataagataaaagggacagtggtgttgatgcgcaagaatgtgttggacgtgaatagcgtaaccagcgttgggggaattattgtcaaggtctcgacttagttggctcaacactcgatactcttactgccttcttgggccgatccgtgtctctccagcttattagtgctaccaaagctgatgccaacggaaaagggaaacttggaaaggctacctttttg

SEQ ID NO: 102009 - DNA, 288 bp, Glycine max
aagaaaatgtggcttgtgcagctctcaaccccatttctgaacggacatggtcattccaccacccttctctccaagcacagttcggcggtgactcagacccactgggccccaccgagtttcctgcctcaaatcaatgcgatgaagcaatgcaggggagagtggtgtgctccaccagcgacaagacggtggcagtggaggtggtgcggctggcccctcacccaaagtacaagaggcgcgtgaggaagaagaagaagtaccaggcccacgaccccgataaccaattcaaag

SEQ ID NO: 102010 - DNA, 279 bp, Glycine max
  unsure (1)..(279): unsure at all n locations
ggttgacctccttccaccccgaaatcgaagaacttctttacagctctgtggagaatgaagaacacatatgcgtgctgaaggaccgcagcaagccgattatcttcaccatggcaaggttggaccgtgtgaagaacatcacagactcgtggagtggtacggtaagaacgcgaantgagggagttggtgaaccttgtggttgttgccggagacaggnggaaggagtcgaaggacttggaagagaaggctgagatgaagaagatgtacggcctgatcgagacc

SEQ ID NO: 102011 - DNA, 278 bp, Glycine max
atcagcttcactgtgtgggatgttggtggtcaggacaagatccgtccactgtggaggcattatttccagaacactcagggtctcatttttgtggttgatagcaatgatagagatcgagtggttgaggcaagggatgagtgcacagaatgttgaatgaggatgaacttagagatgctgttttgcttgtttttgccaacaagcaagatcttcctaatgcaatgaatgctgcagaaataactgacaagcttggacttcattcactccgtcaacgccactgg

SEQ ID NO: 102012 - DNA, 273 bp, Glycine max
ttagttattaacacttccttagttcaatatggggaagcccttcactctctctctttcttccctttgcttgctactcttgtcgagtgcatgctttgctattagctccagcaagctcaacgagtgccaactcaacaacctcacgcgttggaacccgaccaccgcgttgagtccgaacgcggtttgattcaaacatggaactctcaacaccctgagctgaaatgcgccggtgtcactgtttccacactacacctcaaccgcaatggcctccacttg

SEQ ID NO: 102013 - DNA, 252 bp, Glycine max
gtccacgaagggagcaattgtggcctatacaaggggacttgctcttcagttggtgagtaagggaattcgggttaatggggtggctcctgggcctatttggaccccattgataccctcctctttcaaggaggaagaaacgctcaatttggtgcccaggtgccaatgaagagagctggccacctatgaggtgctcgcttatgtttctgctgcaacatgcccctacaactggacaatcctcaccaatgggaacgt

SEQ ID NO: 102014 - DNA, 296 bp, Glycine max
ccttggtgtatagctacacagtacacacactagaagaataatcgcttccatcgtcgactactttttagcagtctctcttcttgctcttttctgttctccttatccgactcagtcacccctacgaaacgaataaaccttgttgttctacccgttcaaatgatggttccacagggatccattgggccaacctccaaaaaagacatcctctaatgcaagtacgagtcctggtggacctcaatggaaatcacttgtgggttaactgtgagcagcagtactcatccaaaacgtaccaagca

SEQ ID NO: 102015 - DNA, 281 bp, Glycine max
aaattcttccaccaagttatgggtttccttgtgttgcttcttttctccctcttaggtctctcttctagttccagcatatcaactcatcgttccatattggaccttgacctaaccaagtttaccacacagaaacaggtgtctcactgttccaactatggaagagtgagcatggacgtgtctaccataaccacgaagaagaggcaaagagacttgagattttcaagaataacttgaactatatcagggacatgaatgcaaacagaaaatcaccccattctcat

SEQ ID NO: 102016 - DNA, 279 bp, Glycine max
cttattaacactttccttagttcaatatggggaagcccttcttagatctctctctttcttccctttgcttgctactcttgtcgagtgcatgctttgctattacctccagcaagttcaacgagtgccaactcaacaacctaacgcgttggaacccgaccaccgcgttgagtccgaaggtggtcttattgaaacatggaactctcaacaccctgagctgcaatgcgccggtgtcactgtttccaaacgcaccctcaaccgcaacggcctccacttgccatc

SEQ ID NO: 102017 - DNA, 284 bp, Glycine max
gcccctgacacaaaaaggcttgcagatgggcttgccttctttctcgcaccaattgacactaagccacaaacacatgcaggttatcttggtcttttcaccgaaaacgagtctggtgatcaagtcgtcgctgttgagtttgacctttccggaactcttgggatccaccaaatccacacatcggaattaacgtcaattctatcagatccatcaaaacgacgtcttgggatttggccaacaataaagtagccaaggttctcattacctatgatgcctccaccagcctc

SEQ ID NO: 102018 - DNA, 236 bp, Glycine max
ttctaccacgtgcacttgttctgtggttttggtctcttgtttaattgcagacaagtagtactctcgggtaaccagaatcaggtgtgaatgtgttgagattatttactgttttgcatgataggagaattgagaaagaatacgttataagatagagaggcataacatcaatgcagagttggaagatggctcccaagggctgacatggtgtgagtgtatgggtgtgtgactagcttctc

SEQ ID NO: 102019 - DNA, 290 bp, Glycine max
ggaatataagaactaagatggattggatcggagcgtaccgcggaggccagagaagcagggactggtgcgacccttcatcaccattcactgatttgtgggaccctcgtcgtgtcggtgacgctgatgatatcacctcctctctcgccatgctcacgttgactggcgtgagactgataaagctcatatcttccgtgctgatcttccaggggtgaagaaagaggatctgaaggtgcaggtggaggagaataagatcctgcagataagcggggagagggtgaaggagaaggagg

SEQ ID NO: 102020 - DNA, 297 bp, Glycine max
aatcggctccagtgtgaccatcaaagaagctttgaaagagaatgccctggagttgtatcatgtgctgatatcctcgttctctctggcagagatggcattgtttcgctaggaggtccccatatccctcttaagatcggaagaagggatggtagaaggagcagagctgatgtggttgagcagttcctcccagaccacaatgagtccatttctgcagttcttgacaagtttggtgccatgggaattgacacccctggcgcgttgcactgctaggagcacacagtgttcgtcgaaccattg

SEQ ID NO: 102021 - DNA, 289 bp, Glycine max
ctttcgatggtaggatagtggcctccatggtggtgacgggtgacggagaattagggttcgattccggagagggagcctgagaaacggctaccacatccaaggaaggcagcaggcgcgcaaattacccaatcctgacacggggaggtagtgacaataaataacaataccgggctcattgagtctggtaattggaatgagtacaatctaaatcccttaacgaggatccattggagggcaagtctgggccagcagccgcggtaattccagctccaatagcgtatatttaagt

SEQ ID NO: 102022 - DNA, 288 bp, Glycine max
gtcctagtcgaccaagccaaggaagcgtgaacaagaccaggaccaggacgaggacgaagatgaagatgaagatcaacctcgcaagagccgcgaatggagatcgaaaaagacacaacccagaagacctagacaagaagaaccacgtgaaagaggatgcgagacaagaaacggggttgaggaaaatatctgcaccttgaagcttcacgagaacattgctcgcccttcacgcgctgacttctacaacctaaagctggtcgcattagtaccctcaacagcctcgacctccca

SEQ ID NO: 102023 - DNA, 287 bp, Glycine max
ctcgagcgaatcggctcgaggctcattccatatccccgtttatccttcactcttgaaacccgattcatttccaccagcacaagaagcttggctgcaatatcaataccttctcacatgaaagcttggacatactctgagtatggaaaatccaaggaagttctcaagtttaatcagagtgtggctttgcctgaggtgaaggaagaccaggtcctcatcaaggtcgctgctgcttcccttaaccccttgatcataagagaatggcaggctatttcaagaacagcgactcc

SEQ ID NO: 102024 - DNA, 283 bp, Glycine max
tgcagatccgaggagttaccttcttttctttattcttttttctctttcctcattctacttaaaactcccaccagtgatggcaggtttggctccagagggaacacaattcgatggtcgccaatatgatgctaagatgagtgaattgctttccactgatgggcaagaattcttcacctcttatgatgaagtgtatgacagctttgatgcaatgggattgcaagagaatcttctgcgaggcataatgcttatggttttgagaggcttctgctatacagcaaggggg

SEQ ID NO: 102025 - DNA, 284 bp, Glycine max
ggcttatttgagaactattacatcaaagtttcaaactctagttgacctttcagtgatagagatcttgtcaaggcatgcttctgatgaggtctaccttggccaaagggacaacccacattggacctctgactcaaaagcattacaagcctttcaaaaatttggaaacaagctcaaagaaattgaggaaaaacttgcaaggaagaacaatgatcaaagtctctccaatcgacttgggccggttcactgccatacactttgctccatcctaacagtgaggaagggtt

SEQ ID NO: 102026 - DNA, 286 bp, Glycine max
aatacttgctcatgaaattaaggtgttcttctgcaagtacaatgatcccatctatgtaaaaatggaaaagttagaaattatgataaaactggcttcagaccgaaatatagaccaggttctattggaatttaaggagtatgctactgaagttgatgtggatttcgtaagacaggctgttcgagcaattggccgttgtgccatcaaattggagagagcagctgaacgatgcattagtgttttgcttgagttgatcaagataaaagttaattacgtggttcaagaggca

SEQ ID NO: 102027 - DNA, 287 bp, Glycine max
agttatgggtttccttgtgttgctcttttctccctcttaggtctctcttctagttccagcatatcaactcatcgtaccatattggaccttgacctaaccaagtttaccacacagaaacaggtgtcttcactgttccaactatggaagagtgagcatggacgtgtctaccataaccacgaagaagaggcaaagagacttgagattttcaagaataacttgaactatatcagggacatgaatgcaacagaaaatcaccccattctcatcgtttaggattgaacaagttt

SEQ ID NO: 102028 - DNA, 281 bp, Glycine max
aatcgagcgaatcggctcgaggacaaggaagatcaagaaaaaccaaaaagattgataccagattgagacaaagaatagatcctcaatacaatgaggttcaggctcagatggaaacaaatttgtttaaattgtctcttgatgatgttgaaactcctaaaggttccatgttggatcttaaaatttctcaatctaaaattgcacttcccaaaaacacagttggaggaaccatcctgcgtagtgactattggcaattttttgacagagggcaattttagagcaag

SEQ ID NO: 102029 - DNA, 285 bp, Glycine max
catcgttatccttaacgggactgcattcttaccttggtgaacaacgacgaccgagactcttacaaccttcaatctggcgatgccctaagagtccctgcaggaaccacatactatgtggttaaccctgacaacgacgagaatctcagaatgataacactcgccatacccgttaacaaacccggtagatttgagagtttcttcctatctagcactcaagctcaacagtcctacttgcaagggtcagcaagaatattctagaggcctcatacgacaccaaattcgagg

SEQ ID NO: 102030 - DNA, 285 bp, Glycine max
cttgcaacgattaacaatggcttaaccgacaagtcaccggacccaacgccggcgaagggtccggatccaactccggggaagccgatgagtgttggtcagcacgtgatcgacaagagtgcaatgatggtgcagtcgctggaccccattaagcagatgagtcagcacgtgtgctccttcgctatctacagccatgacatgtctcgccagatagagacacatcactactgctccagactccaccgaacttcatacaatgtgctgtctatgattccgatgaatccaaag

SEQ ID NO: 102031 - DNA, 268 bp, Glycine max
cgttcaatatcctagtataccttaatacatagttcaagacactatcatgagagcacggttcccattactgttgctgggacttgcgttcctggcttcagtctctgcctcattcagcattgcttactgggaaaaagagaaccccattacacaacaagtgtctccagagttgcaatagcgcgagagactcgtacaggaaccacgcatgcgacgctcgttgcaagctccttacggtggagtgagacgaagtgcagagggtgaacttccacga

SEQ ID NO: 102032 - DNA, 286 bp, Glycine max
cttaattattaacacttccttagttcaatatggggaagcccatcactctctctcacacttccctttgcttgctactcttgtcgagtgcatgctttgctattagctccagcaagctcaacgagtgccaactcaacaacctcaacgcgttggaacccgaccaccgcgttgagtccgaaggtggtttgattcaaacatggaactctcaacaccctgagctgaaatgcgccggtgtcactgtttccaactcaccctcaaccgcaatggcctccacttgccatcttactca

SEQ ID NO: 102033 - DNA, 289 bp, Glycine max
agcatcttgacatgttgatggtctgcatcatctgaatagggaaattccagaagacttagcttttgcatgttcaaggataagagaaggaacgattgctgccgaagatattttgcatgatattggggccattagcatcatatcttctgattctcaggctatgggtcgagttggagaggtgataagcagaacttggcaaactgccaataagatgaaggtacaacgaggaccactccagcctggtgaatcgacaatgacaacttccggatcaaacgatacattgcaaaataca

SEQ ID NO: 102034 - DNA, 292 bp, Glycine max
agctcgagcgatcaccatggccaagctgttctttccctttgattccttcttttcagtagctgcttcgctctgagagagcaggcacagcaaaatgagtgccagatccaaaagctgaatgccctcaaaccggataaccgtatagagtcggaaggtgggttcattgagacctggaaccctaacaacaagccattccagtgtgccggtgttgccctctctcgctgcacccttaaccgcaatgcccttcgtaaccttcctacaccaacggtccccaggaaatctacatacaacaagg

SEQ ID NO: 102035 - DNA, 287 bp, Glycine max
tccatttgtccttgaatataatctcagcatggctaagcttgttctttccctttgttttctgcttttcagtggctgctgcttcgctttcagtttcagagagcagccacagcaaaacgagtgccagatccaacgcctcaatgccctcaaaccggataaccgtatagagtcagaaggtggcttcattgagacatggaaccctaacaacaagccattccagtgtgccggtgttgccctctctcgctgaccctcaaccgcaacgcccttcgcagaccttcctacaccaacgc

SEQ ID NO: 102036 - DNA, 275 bp, Glycine max
gtccttgaatataatactcagatggctaagcttgttctttccctttgtcttctgcttttcagtggctgctgcttcgctttcagtttcagagagcagccacagcaaaacgagtgccagatccaacgcctcaatgccctcaaaccggataaccgtatagagtcagaaggtggcttcattgagacatggaaccctaacaacaagccattccagtgtgccggtgttgccctctctcgctgcactccaaccgcaacgcccttcgcagaccttcctacacc

SEQ ID NO: 102037 - DNA, 285 bp, Glycine max
tctctccattggtccttaaacctcatcagtcatcaccatggccaagctagttttttccctttgttttctgcttttcagtggctgctgcttcgctttcagttccagagagcagcctcagcaaaacgagtgccagatccaaaaactcaatgccctcaaaccggataaccgtatagagtcagaaggagggctcattgagacatggaaccctaacaacaagccattccagtgtgccggtgttgcctctctcgctgcaccctcaaccgcaacgcccttcgtagaccttcc

SEQ ID NO: 102038 - DNA, 286 bp, Glycine max
aagaaaacgaaggaggcagcatattgagtggcttcaccctggaattcttggaacatgcattcagcgtggacaagcagatagcgaaaaacctacaaggagagaacgaaggggaagacaagggagccattgtgacagtgaaaggaggtctgagcgtgataaaaccacccacggacgagcagcaacaaagatcccaggaagaggaagaagaagaagaggatgagaagccacagtgcaagggtaagacaaacactgccaacgcccccgaggaagccaaagcaaaagcaga

SEQ ID NO: 102039 - DNA, 282 bp, Glycine max
cacaatgaagacactcctgttgttgccgtttctattattgacaccaacagcttggagaaccagctcgaccagatgcctaggagattctatcttgctgggaaccaagagcaagagtttctaaaatatcagcagcagcagcaaggaggttcccaaagccagaaaggaaagcaacaagaagaagaaaacgaaggaagcaacatattgagtggcttcgcccctgaattcttgaaagaagcgttcgcgtgaacatgcagatagtgagaaacctacaaggtgagaacg

SEQ ID NO: 102040 - DNA, 282 bp, Glycine max
tgaacactcatcaccatggccagcttgttctttccctttgtttccttcttttcagtggctgcttcgctctgagagagcaggcacagcaaaatgagtgccagatccaaaagctgaatgccctcaaaccggataaccgtatagagtcggaaggtgggttcattgagacctggaaccctaacaacaagccattccagtgtgccggtgttgccctctctcgctgcacccttaaccgcaatgccttcgtagaccttcctacaccaacggtccccaggaaatctacat

SEQ ID NO: 102041 - DNA, 276 bp, Glycine max
ctctccattgtctttgaacatcatcaccatggccaagcttgatctttccctttgtttccttcttttcagtgagtgcttcgctctgagagagcaggcacagcaaaatgagtgccagatccaaaagctgaatgccctcaaaccggataaccgtatagagtcggaaggtgggttcattgagacctggaaccctaacaacaagccattccagtgtgccggtgttgccctctctcgctgcaccctaaccgcaatgcccttcgtagaccttcctacaccaac

SEQ ID NO: 102042 - DNA, 281 bp, Glycine max
gcacaatgagacttcgccaaacattggtcagaattcatcacctgacatctacaaccctcaagctggtagcatcacaaccgccaccagccttgacttcccagccctctggcttctcaaactcagtgcccagtatggatcactccgcaagaatgctatgttcgtgccacactacaccctgaacgcgaacagcataatatacgcattgaatgggcgggcattggtacaagtggtgaattgcaaggtgagagagtgtttgatggagagctgcaagagggaggggt

SEQ ID NO: 102043 - DNA, 282 bp, Glycine max
tgaaaactaaggaaggaaggaaagtgagcgtgaaagatgccttgggcgaggctttcagggtctccaaggctcgacgttgctattgacatgggcaatccatttctcaatctcactgttgatggtttccttaagatcggagctgtcgcagccacgcgatcagctgctgaagatacttatcatattatccaaaaggggaatatctcaagtcatgatttcgagaaaacgttgaagaagatgtgcaagaaggtgtatattggggaactatagctggcgtttatgttg

SEQ ID NO: 102044 - DNA, 284 bp, Glycine max
ccctcttgaaaatggtggcactattatatcttgtcagacataacagcatttggtggaataagagcagccccaacgggaaatgaaagatgccctctcactgtggtgcaatctcgcaatgagctcgacaaagggattggaacaatcatctcgtccccatatcgaatccgttttatcgccgaaggccatcctttgagccttaagttcgattcatttgcagttataatgctgtgtgttggaattctaccgagtggtctgttgtggaggatctaccagaaggacctgct

SEQ ID NO: 102045 - DNA, 289 bp, Glycine max
ctgacaacgacgagaatctcagatgataacactcgccatacccgttaacaaacccggtagatttgagagtttcttcctatctagcactcaagctcaacagtcctacttgcaagggttcagcaagaatattctagaggcctcatacgacaccaaattcgaggagataaacaaggttctgtttggtagagaggaggggcagcaacaaggggaggagaggctgcaagagagtgtgattgtggaaatccaaagaaacaaattcgggaactgagcaaacatgccaaatctagtt

SEQ ID NO: 102046 - DNA, 288 bp, Glycine max
ctcgagccgctcgagccgtttgaatagccattgctttgcttccaagttgaaaacccagcatgtggttctatctctctccctaaccttaaccttggtactggtgctactgaccagcaaggcaaactcagcggaaactgtttctttcagctggaacaagttcgtgccgaagcaaccaaacatgatcctccaaggagacgctattgtgacctcctcgggaaagttacaactcaataaggttgacgaaacggcaccccaaaaccctcgtctcttggtcgcgccctctactcc

SEQ ID NO: 102047 - DNA, 287 bp, Glycine max
tgagaccatcaaagaagctttggaaagagaatgccctggagttgtttcatgtgctgatatcctcgttctctctgccagagatggcattgtttcgctaggaggtccccatatccctcttaagactggaagaagggatggtagaaggagcagagctgatgtggttgagcagttcctcccagaccacaatgagtccatttctgcagttcttgacaagtttggtgccatgggaattgacacccctgggtcgttgcactgcttggagcacacagtgttggtcgaacccattg

SEQ ID NO: 102048 - DNA, 233 bp, Glycine max
gcgagagcgactcgtacaggaccaagcatgccacgctcgttgcaacctccttaaggtggacagagaagaatgtgtagaaggtgaaattccatgaccacgaccacgaccacaacacccgtagagggatcctcagcaacgcggttagtaggagtaagtcgcagttcagcaaccacggcctctcccattcccacggccacaacctcgacatgccgaagagcacgtgcttagatagg

SEQ ID NO: 102049 - DNA, 283 bp, Glycine max
cagagccaaggtaggttaacaatcttcttcatcgtcgtcgccgcaatgggacgtgtgatccgtgcgcacgtacagggagcacgctcggtcttcaagtcccacacgcaccaccgcaagggccctgcccgcttccggagcctggatttcggcgagcgcaacggctacctgaagggtgtcgtcactgacgtcatccacgatcctggccgtggcgcgcctctcgctaaggtcgccttccgataccgttccgctataacaagcagaacgagctcttcatcgccgccga

SEQ ID NO: 102050 - DNA, 282 bp, Glycine max
acgggcccttcggggcatctccccgggcgtcgaacagtcaactcagaactggtacggacaaggggaatccgactgtgtaattaagacaaagcattgcgatggtccctgcggatgttgacgcaatgtgatttctgcccagtgctctgaatgtcgaagtgaagaaattcgaccaagcgcgggtaaacggcgggagtaactatgactctcttaaggtagttaaatggctcgtcatctaattgtgacgcgcatcaatggattaacgagattcccactgtccctgtc

SEQ ID NO: 102051 - DNA, 278 bp, Glycine max
agaacaacaagatgaagataagatgaagacgaagatgatgaagatgaacaaattccctctcaccctcctcgccgaccaagccatggatagcgtgtacaagacgaggacgatgacgaagatgaagataaacctcgtcctagtcgaccaagccgaggaaagcgtgaacaagaccaggaccaggacgaggacgaagatgaagatgaagatcaacctcgcaagagccgcgaatggagatcgaaaagacacaacccagaagacctagacaagaagaaccacgt

SEQ ID NO: 102052 - DNA, 280 bp, Glycine max
agcaaagcaatggctacttaaagttgaaaacccagaatgtggttgtatctctctccctaaccttaaccttggtactggtgctactgaccagcaaggcaaactcagcggaaactgtttctttcagctggaacaagttcgtgccgaagcaaccagacatgatcctccaaggagacgctattgtgacctcctcgggaaagttacaactcaataaggttgacgaaaacggcaccccaaaacctcgtctcttggtcgcgccctctactccaccgccatccacatt

SEQ ID NO: 102053 - DNA, 283 bp, Glycine max
tgcggtttcctttgttggtttgctgggaactgttttcctggcatcagtttgtgtctcattaaaggtgagagacgatgagaataaccctttctacttgagaagctctaacagcttccaaactctctttgagaaccaaaacggtcgcattcgtctcctccagagattcaacaaacgctccccacaacttgagaaccttcgagactaccggattgtccagtttcagtcaaaacccaacacaaccttctcccccaccatgctgacgccgatttcctcctctttgtcc

SEQ ID NO: 102054 - DNA, 272 bp, Glycine max
cgagatttctccttccacgctgtatgctattgcctgtgtgatggaaaatgttcctttcattaatggaagtcctcagaacacttttgtaccatggctgattgatcttgccatcgcgaggaacactttgattggtggagatcacttcaagagtggtcagaccataatgatatctgtgttggttgatttccttatgggggctggtatcaagccaacatctataggtagttacaaccatctggggagcaatgatggtatgaatctctcggctccac

SEQ ID NO: 102055 - DNA, 283 bp, Glycine max
gcgattggcgtcgcggagatagggccaccggagagaataaggtgaggtccggtggggtgggtgaaaccgcacaagaagcagctactttcaacagtcacgtcatgcgagtccaagacatgacgaaactttccgatatcttaacggatgcggcggagaagctccccgtggacaaggcggtgacaaaagaagatgctgaggctgtgtatactgcagaggtgcagtttccatggcagagagatcggcggaagtggttgctgaacctggcggagtggcggcatccatg

SEQ ID NO: 102056 - DNA, 283 bp, Glycine max
gagaatcctactttgtggatctcagcctaagaagaaagaggaggggaataagggaagaaagggtcctttgtcttcaattttgagggctttttactgaataagtatgtactaaaatgtatgctgtaatagctcatagtgagcgaggaaagtatcgggctatgtaactatgactagagcttcaactatgaataaataaatcgacagcatatgatgcttttgttttgtgtccaaaaaaaaaaataaaaaataaaggggggccgaccaattggtgaattgtaccccc

SEQ ID NO: 102057 - DNA, 281 bp, Glycine max
gagatttctccttccacttgtatgctattgcctgtgtgatggaaaatgttcctttcattaatggaagtcctcagaacacttttgtaccagggctgattgatcttgccatcgcgaggaacactttgattggtggagatgacttcaagagtggtcagaccaaaatgaaatctgtgttggttgattttcttgtgggggctggtatcaagccaacatctatagttagttacaaccatctgtgaaacaatgatggtatgaatctctcggctccacaaaccttccgc

SEQ ID NO: 102058 - DNA, 268 bp, Glycine max
caatatcctagtatactttctacatactttacgatagtatgatgagagcacggttcccattactgtgctgagagtgtttacctggcttcagtttctgtctcatttggcattgcttactgggtcaaagtgaacccgcatccataacatgtgtctgcatagttgtaatgacgagcgagactcgttcagggaccaagcatgccatgctcattataacctccttaatgtcgatgttgagtctgtgatgacagtgtcattcgacgagcacgac

SEQ ID NO: 102059 - DNA, 275 bp, Glycine max
cattgttgaacgcattccagaggaagtgattcagcacactttcaacctaaaaagccagcaggccaggcagataaagaacaacaatcctttcaagttcctggttccacctcaggagtctcagaagagagctgtggcttagagcccttatagtatgtgctaccccacttttgtctttttggcaatagtgctagcaaccaatagataataatactcataatgaataagcaaacagaggattagcttgccttttggtcactgtagaataatgaatgtaa

SEQ ID NO: 102060 - DNA, 280 bp, Glycine max
cttccaccatcttctggcttccttctgttgccaccactctccatcttaagtccctcttctagttccagcatatccgctcatcgttccatcttcggagctcgacctaacctcgtttctccacagcacagacatggagtcattcacgtcgttccatactactggaacgagtgcaccctgacacgccagctacgcataacccacgtaatatgacggctatagatacttcgagacatccatgaatagcttgaactatatcgggacatgaatgctatcagacact

SEQ ID NO: 102061 - DNA, 278 bp, Glycine max
actcgagccgaatcggctgagaggaaatctacatacaacaaggacatggcatttttggcatgatattcccgggttgtcctcgcacttatcaagagccgcaagaatctcagcaacgaggacgaagccagaggccccaagaccgtcaccaaaaggtacatcgcttcagagagggtgatttgatcgcagtgcctactggtgttgcatggtggatgtacaacaatgaagacactcctgttcgtgccgtttctattattgacaccaacagcttggagaaccag

SEQ ID NO: 102062 - DNA, 252 bp, Glycine max
tcctagtataccttaataataatttaagatactatgatgatagaaatataacaattactgttgctgggacttgttttcctggcttcagtttctgtctcatttggcattgcttactgggactaagagaaccccatacactacaagtgtctccagagttgcaatagcgagagagactcgtacaggtacctagcatgccacgctcgttgctaacctccttaaggtggagaaagaagaatgtaagaaggtgctatt

SEQ ID NO: 102063 - DNA, 283 bp, Glycine max
ctccattggtccttaaacctcatcagtcatcaccatggccaagctagttttttccctttgttttctgcttttcagtggctgctgcttcgctttcagttccagagagcagcctcagcaaaacgagtgccagatccaaaaactcaatgccctcaaaccggataaccgtatagagtcagaaggagggctcattgagacatggaaccctaacaacaagccattccagtgtgccggtgttgcctctctcgctgcaccctcaaccgcaacgcccttcgtagaccttcct

SEQ ID NO: 102064 - DNA, 292 bp, Glycine max
agcgtatagtcgatcggtcactgttcaaatcacctcacgcatggcttcactggccatcttactccacttattcccggattatcatcaacgcccaagggaaggagcatttgtatttccattccaggatcgtctgagacgtttgaggcaccaccagtaccatccaacagaagatggtcaaggtcgcagatgctgcagctacaggacagtcaccagaagattcgtcacttcaatgaaggagacgtactcgtgcatcctcctggtgttccctactggtactataacactggcgatg

SEQ ID NO: 102065 - DNA, 276 bp, Glycine max
ggtatttttggcatgaattcccgggttgtcctagcacttatcaagagccgcaagaatctcagcaacgaggacgaagccagaggccccaagaccgtcaccaaaaggtacatcgcttcagagagggtgatttgatcgcagtgcctactggtgttgcatggtggatgtacaacaatgaagacactcctgttgttgccgtttctattattgacaccaacagcttggagaaccagctcgatcaatgcctaggagattctatcttgctgggaaccaagagca

SEQ ID NO: 102066 - DNA, 228 bp, Glycine max
cttaattattatcattccttagttcaatatcggggaagtccttcactctctctctttcttccctttgcttggtactcttgtcgcgtgcatgcgttgctattagctccagcaagctcgacgtgtgccaactcaacaacgtcatcgcgttggaactcgaccaccgcgttgagtccgaaggtggcttcattcatacatgggactctcatcacgctgagctgtgatgcgccg

SEQ ID NO: 102067 - DNA, 279 bp, Glycine max
ctcgagccgcgagtaggtgaggatagggttctctgctgccacgggactcgacatacctggggaatcgcatgacgtgctttcttggtcttttgcttccaatttgccacacgctagcagtaaccattgatcctttggatcttacaagctttgtgttgcatgaggccatctaaatgtgacagatcgaaggaagatagtgtaataagacgactctcactactcgatcgctagtgattgtcattgttatatataataatgttatctttcacaacttatcgtaat

SEQ ID NO: 102068 - DNA, 278 bp, Glycine max
tgcacaatgggtgccactagtatgtttcggtgctatggcgcaagaagcagtctgatgttatgagtttcttgcagcgggtgctgtgctgggagtattgtcagtatccttctatagtccgtccgacaaggtctactcgcccagataaggctcttcgcttgtgtttctaggcttcgcatggttacgtgattgactcgtgttcgcgcatgaatgcgtggccgtttgagaccagttccacaagtattgtatattgtaagcctatcaatcacggtgttactcaa

SEQ ID NO: 102069 - DNA, 278 bp, Glycine max
atttcttagcacaaccttcaacaccaacgaggacacagctgagaaacttcggtctccagatgacgaaaggaagcagatcgtgacagtggagggaggcctcagcgttatcagccccaagtggcaagaacaagaagacgaagacgaagatgaagacgaagaatatgaacaaactccctcttatcctccacgacgaccaagccatggaaagcatgaagatgacgaggacgaggacgagaagaagatcaacctcgtcctgatcaccctccacagcgaccaag

SEQ ID NO: 102070 - DNA, 267 bp, Glycine max
tgttgcagaccgatctatctagctagcaacctagctctagttggttgatcacgaggccatgccctcatgtgcttggcacgtgtttcactctacctctgagctctaactctatccgctgctcacggatgcaccactgttcaagacatctcgagaaagttccaactcgcgggacaacgaccttctgcgcacgcgagaccgagttcaacgttttcatcgagacttacgggatgagctactcacataggaggagtatttgcgccgtctggg

SEQ ID NO: 102071 - DNA, 279 bp, Glycine max
ttcgagcgattcggtcgaggcttgacaaggcattctacgaggtcgaggtgaaaaggctatgcttggcttttgagcaacatgtttcattatgctgtgttcttcgcatatatgaggttaagggaacaggagatcaggaacttaatgtggatttcagaatgtgttgctcagaatcagaagtccagagttcatgacagtgttgtcttcatattttagttggatggctcgttatagtttgatgttcgttgggacaatttgtatactttctgcattctccatctg

SEQ ID NO: 102072 - DNA, 282 bp, Glycine max
ctttcgtgctagtgaggaaagttctctctgcttctctctcttagactcgaaaccctattgcgtgctttgcaatcgaccccgattatggccaacagtaacctccctcgaagaatcatcacggatacgcagcgtttgctcagtgagccagcacctggaattagtgcgtccccttcggaagacaatatgcggtatctcaatgtgatgatccttggcccaactcagtcgccttatgaaggggagttttcaagttggaattattcttgccagaagaatatccaatgg

SEQ ID NO: 102073 - DNA, 277 bp, Glycine max
ctccattgtctttgaaactcatcaccatggccaagcttgttctatccctttgtttccttcttttcagtggctgcttcgctctgagagagcaggcacagcaaaatgagtgccagatccaaaagctgaatgccctcaaaccggataaccgtatagagtcggaaggtgggttcattgagacctggaaccctaacaacaagccattccagtgtgccggtgttgccctctctcgctgcaccctaaccgcaatgcccttcgtagaccttcctacaccaacggt

SEQ ID NO: 102074 - DNA, 270 bp, Glycine max
attctctccattgtccttaaacactcatcagtcatcaccatggccaagctagttttttccctttgtcttctgcttttcagtggctgctgcttcgctttcagttccagagagcagcctcagcaaaacgagtgccagatccaaaaactcaatgccctcaaaccggataaccgtatagagtcagaaggagggctcattgagacatggaaccctaacaacaagccattccagtgtgcggtgttgccctctctcgctgcaccctcaagcgcaacg

SEQ ID NO: 102075 - DNA, 275 bp, Glycine max
tggtccttaaaactcatcagtcattatcatggccaagctagttttttcccatcgttttctggtatgcagcggctgctgcctcgctttcagttccggagaacagactttggaaaacgagtgccagatccttacactccatgccctcattccggataaccgtataaggtcttgaggagggctcattgaggcatggtacccttccaacaagccattccagtgtgccggtgttgcctctctcgctgtagcctcaatcgcaacgctcttcgtagaccttc

SEQ ID NO: 102076 - DNA, 275 bp, Glycine max
caaaatcaacggcaaaaggttgcttttgacacccccttaggtgggggcgcgcagctgagcacggtcgtgccttacaccactcttcaaacctcgatctatgataacttcgaaagcgcttatttgaaagccgcttcgtctatggacatgaaaagggtcgatccagtttcccccattgggctttgcttcgaatccaatggcgttggaagctcccaagtggggcccaacgtgccgatcattgatctggtgctgcagagcgagatggtgaagtggagcat

SEQ ID NO: 102077 - DNA, 277 bp, Glycine max
ctcgagccgcttcacatctctcttttcactcaaaactacaaactttatttcctctccgtaatctcacatttccacaacatggacgaccatattcgacatggcggcggcggacccatgggcgaggacttcgacttcgccggcagcggcagcaaccccgtcctgaaggtcggcgaggagaaggagattgggacagagggtttgaagaagaagctcctgaaagaaggtgaaggatggacacccctgaagctggtgacgaagttcaagttcactatactgg

SEQ ID NO: 102078 - DNA, 275 bp, Glycine max
caatatcctagacaccttaataaataatttacagatactatgttgagagcacggttcccattactgttgctgggacttgacttcctggcttcagtttctgtctcattcggcattgcgtactgggattgagagatgcccaaacacaacaagtgtctccacaggtgcaatagcgagagagtctcgtacaggaaccaagcatgccacgctcgttatcaacctccttaaggtggagtagaagtatgtgaagatggtgaaattccacgaccacgcccacg

SEQ ID NO: 102079 - DNA, 277 bp, Glycine max
ggaatataagaactagatggattggatcggagcgtaccgcggttgccagagaagcagggactggtgctgaccttcatcaccattcactgatttgtgggaccctcgtcgtgtcggtgacgctgatgcaatcacctcctctctcgcccatgctcacgttgactggcgtgagactgctaaagctcatatcttccgtgctgatcttccaggggtgaagaaagaggatctgaaggtgcagtggaggagaataagatcctgcagataagcggggagagggtga

SEQ ID NO: 102080 - DNA, 278 bp, Glycine max
ggaatataagaactagatggattggatcggagcgtaccgcggaggccagagaagcagggactggtgcgacccttcatcaccattcactgatttgtgggaccctcgtcgtgtcggtgacgctgatgatatcacctcctctctcgcccatgctcacgttgactggcgtgagactgataaagctcatatcttccgtgctgatcttccaggggtgaagaaagaggatctgaaggtgcagtggaggagaataagatcctgcagataagcggggagagggtgaa

SEQ ID NO: 102081 - DNA, 280 bp, Glycine max
ggaatataagaactagatggattggatcggagcgtaccgcggaggccagagaagcagggactggtgcgacccttcatcaccattcactgatttgtgggaccctcgtcgtgtcggtgacgctgatgatatcacctcctctctcgcccatgctcacgttgactggcgtgagactgataaagctcatatcttccgtgctgatcttccaggggtgaagaaagaggatctgaaggtgcaggtgaggagaataagatcctgcagataagcggggagagggtgaagg

SEQ ID NO: 102082 - DNA, 281 bp, Glycine max
  unsure (1)..(281): unsure at all n locations
tgaaaaaccactgtttcctttgcatcctgctactgatgatcaccattcctcatcaaagcctgctgttttgggtaacaaaagagggttctcagatgtcatgagtggattcgccgaggagaaattgcttgttagttctgaggccaacacaatattgtcaccaaggccttctcctaatgtggcattgaaaccaagctctatgcttgagatgttggggctcagcaatccaagccaaagaactcgcaacagcgaaggttggtctgagaggtccatgttncaatgat

SEQ ID NO: 102083 - DNA, 191 bp, Glycine max
cgtaaattggttgtctttccaaaacgtgaatagtttaaagaagggagttctttatttgtacttctaaatccaactgtttagttaaggggtgtttatctcttgtagagcttttagtttgatttagagttttcttgttgaaatctggttaagtttgtatcaatataattggcttatcattcgctttctgctgt

SEQ ID NO: 102084 - DNA, 288 bp, Glycine max
gaagctttgagagagagagagggaggagggagagtgttgacgctccatcaagatgggtatttctagggattccatgcacaagaggcgtgccactggtggcaagaagaaggcatggagaaagaagagaaagtatgagcttgggcgtcaggccgcaaacaccaagttatcaagcaacaaaactatccggaggattcgtgttcgaggtggcaatgttaaatggagggcattgaggttggataccggcaattactcatggggtagtgaagcagttactcgcaagactcgtat

SEQ ID NO: 102085 - DNA, 289 bp, Glycine max
ctcgaccgtttttatttccccccatttcagttggcaaagagatcgtagatctgtgcttggatcgcgtccgaaagctcgcagacaactgcactggtctccagggcttcctcgtcttcaacgctgtcggcggtggcaccggttccggtctcggatctctcttgttagagcgtctctccgtcgattacggcaataagtccaaattagggttcaccatttacccttcccctcaggtttcaaccgcagtcgtggagccctacaacagcgtcctctccacccactcccttctgga

SEQ ID NO: 102086 - DNA, 287 bp, Glycine max
  unsure (1)..(287): unsure at all n locations
gaagccccaaacctttgccagcctagtctccgctattctctacgagaaaaggtttggtccatacttttgccagcctgtaattgctggactaggagatgatgacaaaccattcatttgcacaatggatgccattggagcaaaggaacttgcaaaagattttgtagtggctggcactgcatccgagtctcttcatggtgcttgtgagtcaatgtttaagcctgacatggaaccagaagaattgttcgagacaatctcncaagcactgctatcatctgtagatcgtgatg

SEQ ID NO: 102087 - DNA, 289 bp, Glycine max
acaatattattctcctcattccttcatttttaaacctagctccatctccctccactcaccataacatggcatcagaagcaaatgctgccaacaccaacttctgtgtaaatgttagcaacaatggctacattagtgctaatgaccccttgaactggggtccggcggcggaggctatggctgggagccacctcgacgaggtcaagcgcatgctagaggagtaccggaggcccgtcgtcaagctcggtggagagaccctgaccatctcgcaggtcgcggcgatcgcggccca

SEQ ID NO: 102088 - DNA, 264 bp, Glycine max
tgaaggcgagaggagtctcacaaaggattgccgccttcttgggaaatttgatctgtctggaattcctccagccccaaggggtacgcctcaaattgaagtgaccttcgaagttgatgccaacggcattctaaatgtgaaggcagaagacaagggcactggtaaatcagaaaagatcaccattacaaacgaaaagggacgtcttagccaggaagaaattgagagaatggttcgcgaacagaggagtttgcagatgaagacaagaag

SEQ ID NO: 102089 - DNA, 284 bp, Glycine max
gtcttcctcgatccatggctagttgtatggtttatgcgtgttacatttatattgttctgggaatattagtgttgaaaggtgcagaggcacagcgtgcgttctttgtgtttggggattctcttgtggataatgggaacaacaactttttggcaactacagctcgagcagatgctcctccttatggcattgatttcccaaccggaagacccactggccgtttctctaatggctacaacattcctgacttcatcagtcaatcacttggggccgaatccacattgcct

SEQ ID NO: 102090 - DNA, 285 bp, Glycine max
tcagactagagagagtaagagtaagagaagagatggaaagagtagcatcagtatctcggccactgaaaatatacttcctcccattcttctcaccggggcacctaatccctctggtccagctggctcgcttggtggcggcacgaggccagcacgtgaccatcatcaccacccccgccaacgctcaactcttcgaccagaacatcgacaaggacaccgcctccggccaccacatccgcgtccacatcatcaagttccccaacgcccacgtagggctaccggaaggca

SEQ ID NO: 102091 - DNA, 290 bp, Glycine max
cggagaatccagagaaagagagatgtctggtatcgcccgtggacgtcttgccgaggagcgaaagtcatggcgcaaaaaccaccctcatggtttcgttgccaagcccgagactctccctgatgccaccgttaatttgatggtctggcattgcactattcctggcaaggctgggactgattgggagggtggatatttcccactgacaatgcacttcagtgaagattaccctagcaagcctcccaagtgcaaattccctcaaggtttctttcaccccaatgtgtatccatctg

SEQ ID NO: 102092 - DNA, 122 bp, Glycine max
atcatcatgttttgttgcttttggttcttgaacagcgtttgcagctagctataatgctttaattcgactttctatatattgttgaaccgtgttgtcgacaccatgccagcttgttttgcatc

SEQ ID NO: 102093 - DNA, 286 bp, Glycine max
gcagaaagcaagctcatcctagagttttaaaaatggcagcagcctcctccatggctctctcttccccatccttggctggcaaggccgtgaagctgggcccatcagcccccgaagtcgggagggtcagcatgaggaagaccgtcaccaagcaggcctcctccggaagcccatggtacggcccagaccgcgtcaagtacttgggcccattctctggcgagcccccgtcctacctcactggcgagttcccaggtgactacggctgggacactgctgggctttcggccga

SEQ ID NO: 102094 - DNA, 288 bp, Glycine max
tacccttccaattctcttagccaaagcgtttcgtcgtcgtcgcttgatgttggagtggtgccggacgggaacacggtgtcagacatgtcgtattcttttggtcggaacagttcggattcgagtgggattgttgttgtgtcaggaaatagtgtggggcaaggtgcgacgcagttgtgtggaatggatcgggaagcgagggtactgcgatacagagagaaaaggaagaaccgaaaattcgagaagacaattcgatacgcatcgcgaaaagcatatgcggaaacccggccc

SEQ ID NO: 102095 - DNA, 287 bp, Glycine max
ctcgagccgatagacttggcaggtaatgaagataacagaaggacatgtaatgaagggatacgtctccaagagagtgccaagataaatcagtcattgtttgcgctgtcaaatgtgatatatgcattgaacaacaataaaacaagggtaccctaccgagaaagtaaattgacccgtatattgctcgactctctaggcggaacaagtcgtgcactgatgattgcttgcctgaatccaggagaataccaggaatctgttcatactgttagtttagctgctcgatcaaggca

SEQ ID NO: 102096 - DNA, 285 bp, Glycine max
ctcttctcggcgtccatctgaaatttccaaggtaaaaagatgaatctgaagaacatgaagattccgaacgttccaggcggcggtgcgtcctctgcgctgctgaagcttgggcttcttggtggaattggtttatatgcagctgctaacagtctctacaacgttgaaggaggtcaccgagccattgttttcaaccgtctagttggtgtcaaagacaaggtctatcctgaaggaacacactttatgattccgtggtttgagaggcctgttatctatgatgtccgtgca

SEQ ID NO: 102097 - DNA, 287 bp, Glycine max
cccatttttcacaccaccaacacaagatgtttctccacattgtgttcctccttttccttctctcatccacttcccatgccactgtccaagacttctgtgtggcagacctcaaaggtgcagacacccctgcaggctacccctgcaagccacctgctaatgtcacttcagatgactttgtgtacactggcttagctgaagctgcaaatgtcacaaacataatcaatgctgctgtgaccccagcttttgttgctcaattcccaggtctcaatggccttgaactatctgca

SEQ ID NO: 102098 - DNA, 278 bp, Glycine max
tgaaggtctacaatctttggggattgattctctggaaaagttccgtgaaaagataccttatatgcgctctgagctgaaagatgaacagaaattccgtgagatatataattttgcttttggctgggcaaaagagaagggtcaaaaatctcttgcattggatactgctattggtatgtggcaattattatttgctgagaagcagtggccgctggttgatcattggtgccagttcttgcaggctcggcataacaaagcaatatctagggacacatggtctc

SEQ ID NO: 102099 - DNA, 282 bp, Glycine max
aagcacagtcacatacacatactactactcgtttcatttgcctcttgtagtagccaatagccatggttttccaaacaagcaataatcaacatttcgtattgtttcccctaatggctcaaggccacatcatccccatgatggacattgcaagactattggcgcggcgtggtgtgattgttaccatattcactaccccaaagaatgcatcacgtttcaattctgttctttctcgtgctgtttcatcaggcctccaaatccggctagttcaactccactttccat

SEQ ID NO: 102100 - DNA, 276 bp, Glycine max
accgaatgagagcattaacctcttcttcttccactttcattccaaagcgttattccttcttcttcttcctctccattctcttcgctcttcgatcctcgtccgggggctgctccgaataccaccaccaccacgcgccgatggccacgataggaggcctacgcgactcccaaggctcctagaacagcgtccaaaccgaggccctcgctcggttcgccgtcgatgaacacaacaagaagcagaattcacttctggcagtttctacggtggtgaggacac

SEQ ID NO: 102101 - DNA, 286 bp, Glycine max
agctgagcgattcggctcgaggcaaaaatggcatcattcaccaagacagcttccatcctacgcagcccagccgtcaccaatcggtcggcagtagcaacgcagaggagatcactcgtagtgaatgctgccaaagctgttgaagcagaaaaggtcagttatgacaatgacatggatggtagcaatggaaggaggaacttgatgttcgccgcggcggcggctgctgtttgctctgttgctgggatggcagtggcagatgagcctaaaccaggaaccccagaagccaaga

SEQ ID NO: 102102 - DNA, 289 bp, Glycine max
cccataccgaacactcttcttcaatcaagcgaaggtggtctcgattgcaagtgctccacgatacactctacgcttcacaaaaccttcaaacccaattccacagaattcttctgcatcaccatgccaccaaagcctttagactatgggtcaataaatgaaaacgtgaagaagagtcaatatgctgtcagaggtgaattataccttcgagcttctgaacttcagaaagagggcaaaaagattatctttactaatgttggcaacccgcatgcatagggacagaaaccactga

SEQ ID NO: 102103 - DNA, 282 bp, Glycine max
  unsure (1)..(282): unsure at all n locations
ggccggtgggcggtggcggcacggcaggatctgtgccgcgatgacgacgtcgaacacggcgcggatggaggacagcggcggcgacctagcggacaccatcaagaagtggaatatcatctaccctgtctacctcaactccaagaggnaggtcgccgatggccgccgcatcgccgctgccaaggcctgcacggaccccacctgcatcgagatcgctgactgctgttcgcacctcaagatcgcccacgccatcgagttggataaggcgtaccctcgggatttctt

SEQ ID NO: 102104 - DNA, 283 bp, Glycine max
atttcattccatggccgattcaacctcaagcgattcactctctttagacatcgattccttatctccttcacctcaggaacatatcatcagaacacgtcatggttccgtatctgttgctgtatatggagaccaggataagccagctcttatcacatacccacatttggctttaaattatgtctcctgctttcaggggttattattttgtcccgaggcatattaccttctgctccataatttctgcatttatcatattagtccacctggacatgagttgggagct

SEQ ID NO: 102105 - DNA, 280 bp, Glycine max
catcgacctcattgaaaaggctctaggaccaaagagcaagagcacagaaggggtgaaaaattggccgagcaaacacgttggagtgcattctgttggtgattatacagccattgagctaattggcagagaccgcccaggtctcttgtctgagatttcggctgttcttgccaacctccattttaatgtttttgcagcagaagtttggactcataacaggcgaattgcttgcgttctttatgtcaatgatgcaacaaaccaagttgcggatgatccaaaaaga

SEQ ID NO: 102106 - DNA, 273 bp, Glycine max
cagctgttgtctttccttttaggtaaactaatgggggatgattcttttcctagtttggacaaattgagggctaactggactccatctcaagatcgatattttcttcagcttttgctgtcccatgttcacaaagggaataaaactgggaaagtgtttagcagacaagcctgggtaaatatgattgaacaatttaacaccaagtttggtttcaagtatgatgtagaagtgttgaagaaccgtcacaaaagattcaggaagcaatacaatgatatg

SEQ ID NO: 102107 - DNA, 280 bp, Glycine max
aaagtcctggaatctgggcacccagattataaggaaggtgatttagtgtggggctttaccaaatgggaagagtatagcttgttaccctcagctcaaatactcttcaaaattgagcacactgatgttccacttacctactacactggaattcttggtatgccaggagtgactgcatatgcaggtctatttgaagtaggatctcttcagaaaggagaaaatgtttttgtttcggctgcctctggcgcagttggtcaacttgttgggcaatttgctaaactga

SEQ ID NO: 102108 - DNA, 287 bp, Glycine max
cgacgccctcggcagcgctctcacgaacaaatactccgagggcatgccgggcaaccgctactacggcggcaatgaatacatcgaccagatcgaaaacctctgccgctcacgcgccctccaagccttccacctcgacgcccaatcctggggcgtcaacgtccagccctactccggctccccggccaacttcgccgcctacaccgccgtcctcaacccccacgaccgcatcatggggctagatctcccctccggcggccacctcacccacggctactacacctccggcg

SEQ ID NO: 102109 - DNA, 298 bp, Glycine max
ttcggctcgagcgagtagattatgggcaccaagaaggtgcggagaaatttgggaaagatccaagatcttatgaggtattgactaagcggtttgtgggagatgaaaatggagttgtgaagggacttgaagtaatacgtgttcgctgggagaaggatgaaactgggaggtttcaaattaaggaaattgagggctccgaggagattattgaggctgacctagttttactggccatgggattccttggccctgagtctacaattgcagagaagttgggtattagacgagacaataggtcaaa

SEQ ID NO: 102110 - DNA, 282 bp, Glycine max
gtggtgccttatcgctgtggttatcatcttcttcttcctctttcttagatctcttctttctctacgccgcacgccgaaaccatggccggaaaaggagagggtcctgctatcggaatcgatctcgggaccacctactcttgcgtcggtgtgtggcaacatgaccgcgttgaaatcatcgccaacgaccaggggaacagaaccacgccgtcttacgtcggattcactgacaccgagcgtctcatcggtgatgcggccaagaatcaagtcgccatgaaccccatc

SEQ ID NO: 102111 - DNA, 275 bp, Glycine max
aacgggtggtgcctctcttccatctccccagccaaaacctctctcaggaaggccacattacgcccttccgtcttcgcaacccttaacactccttcttctccttcctcttcatcttccttcccctctctcattcaagacaggcctgtttttgctgcccctgcccccatcatcaccccaactgtgagagaggatatggcaaaggaatacgagaaagctattgaagaacttcagaaattgttgagcttccttgcaaattgagtagccttgtgttgaaa

SEQ ID NO: 102112 - DNA, 259 bp, Glycine max
gaaagactagctaagatgaagaaggaagcaattcttataaactgcagtagaggacctgttattgatgaagctgcacttgtggagcatttaaaacagaacccgatgtttcgagtaggccttgacgtgtttgaggaagagccctacatgaaatccgggcttgcagagttgaagaatgccattgtggtaccccacattgcatctgcctccaagtggactcgtgagggaatggctacactagcagctctaaacgtgctgggga

SEQ ID NO: 102113 - DNA, 282 bp, Glycine max
gagaaagcgaaacgcatagaatcgaaagaggggaaaagaaaaagaaaagttagggttagggattttgagagatggcatcgactaagaagatcaccctgaagagttcggacggtgaggccttcgaggtggaggaggcggtggcgctggagtcgcagacgatcaagcacatgatcgaggacgactgcgccgacagtggaatccctctccccaatgtcaccagcaagattctggcgaaggttatcgagtactgcaagaagcacgttgaggcgaacagtgctgatg

SEQ ID NO: 102114 - DNA, 283 bp, Glycine max
  unsure (1)..(283): unsure at all n locations
ggaaaattagcctcacaaaagcaaagatcaaacaaaccaaggacgagaacacgatgttgcttgaacttgcacttggtttattggttttggctctgtttctgcacttgcgtcccacacccactgcaaaatcaaaagcacttcgccatctcncaaacccaccaagcccaaagcctcgtctacccttcataggacaccttcatctcttaaaagacaaacttctccactacgcactcatcgacctctccaaaaaacatggtcgcttattctctctctactttggctc

SEQ ID NO: 102115 - DNA, 280 bp, Glycine max
tctggagaagctcttgacgtatggtaacatgcttgtccaagaacaagagaatgtcaagagagtccaattggctgacaagtacttgaacgaggctgcacttggaaatgctaacgaggatgctattaacaggggaactttcttccaatcttgaattggaggcaaagcaaacttggcaagtagatatttctgttcctgaaggttgtgctgatccaagtgctagaagttgtgatgggacttgcgtgtaacattcttagaattctcaatgtcttaggtgcaaaga

SEQ ID NO: 102116 - DNA, 284 bp, Glycine max
acaatgtcttcttcttttctcttccctcaaactcaatccacagtcatcccagacccttcaacctacttctcaccaaacctcctttcatcaccactccccacaaactctttcttccaaaactttgttattcctaatgggacacagcctgagtacattcatccttacctcatccaatcctcaaactcttcactctcagcctcataccctcttctgggtcttcacacagcactcctgtaccaagcatttgtgccagatctcactatctctgcctctagaacatactc

SEQ ID NO: 102117 - DNA, 283 bp, Glycine max
cgttcactgtcactttacccaatcctaacactttcttctctctgttttccttcttcctcgcatcaatggagttggacggcgttctcctcggcatgtgcaaccctctcctcgacatctctgccgtcgtcgacgacgctttcttgcaaaaatacggtatcaagttgaacgatgcgattctcgccgaggataaacacaaacctatgtatgaagaattggctaacaatcctaatgtggagtacattgctggaggtgctactcagaattcaatcagggttgctcagtg

SEQ ID NO: 102118 - DNA, 281 bp, Glycine max
ggcactttctagttttgaatatgtcgaacctagtggtaaggatgtgggactcaatgtaaggaagaaggctgaaaacattgtgtcgcttttgaatgataaagataagatacatgaagtcagaaataaagctgctgcaaaccgtgacaagtacattggagtttcttctagtgggatcacatacaagtctgggtcagcctcctcttatggtagtggcagcagctttcagagcagtggtaaatatggaggctttggatctagagatggcgacaggtttaatgata

SEQ ID NO: 102119 - DNA, 278 bp, Glycine max
atagtatggcacaatctagtggcaaaaaattggttgagtggctggttgcagcattattgttcattgccttgttgagtggtagtgcacatgctgttgcaatatgtaacattgactcaagtcaactgaacttgtgtcgtgctgcagttactggtcaaaaccctccaccacctgatgagaaatgctgtgcagttattcgccaggccaatttgcgttgcctctgcagttacaagtctatcctaccttcatttggaattaaccccaaaaatgctttggccttg

SEQ ID NO: 102120 - DNA, 267 bp, Glycine max
aaacaagtagttgagaactaagaagaaggaaatggcttcctcaatgatctcctccccagctgttaccaccgtcaaccgtgccggtgccggcatggttgctccattcaccggcctcaaatccatggctggcttccccacgaggaagaccaacaatgacattacctccattgctagcaacggtggaagagtacaatgcatgcaggtgtggcaaccaattggcaagaagaagttcgagactctttcctacttgccagacctcgatgatgc

SEQ ID NO: 102121 - DNA, 274 bp, Glycine max
ctactgctaagctaactgaactctccctctctccttcctcgttcctttcgcctctcactacaaatacacatctcatctcatccgtctctcacttttaattattctctgcaatctgaaccttccggatttcgtttctctttgttccggtagccagccagccagccatggtgctcttcaatgtttcacgcgttgagaccactcccttcgatggacagaagcctggaacctctggtctccgcaagaaggtgtcagtattcgtgcaatctcattacct

SEQ ID NO: 102122 - DNA, 277 bp, Glycine max
aaaaccctaggtagagagctcttcctccctttctcacagcaatggccgccgcagcacgccctctcgtcaccgtgcaggccctcgacggtgacatggcaaccgatgcctccaacaccgttcccatccctgacgtcatgaaggcctctatccgccccgacatcgtcaatttcgtacactcgaacatctccaagaacagccgccagccatacgcatgcagtcgtcgcgctggtcaccagacctccgccgaatcctggggtaccggccgagccgtctcccg

SEQ ID NO: 102123 - DNA, 200 bp, Glycine max
  unsure (1)..(200): unsure at all n locations
tgaccggagaattccctggtgactacggatgggacatgctggattatcagctgacncggaaaccttcgccaggaaccgggagctggaggtgattcacagcagatgggcaatgcttggtgcccttggctgcaccttcccagagatccttgaagaagaatggtgtcaaattcggcgaggccgtgtggttcaaggccggtgca

SEQ ID NO: 102124 - DNA, 288 bp, Glycine max
tatttttgaaaccaaagaagttaaaaaagcagatccaagggtaaaaaggacaaagatggcgagagtgagaatgttcctgaacagaaaacaattgcccgacttcaggagtgtggtcctcgtttcacattaaaattgattagcctgcagcatggaacatttgacaccaagggtggggaatatgagtgggttcacaagccggaaatggacacaagccgaaggaggttcttccaatgacttgtttgggaaggttgcattttggacatcttttttgctggaaataggttttat

SEQ ID NO: 102125 - DNA, 287 bp, Glycine max
atttatataagattgtgttcttgcaagttcaagttccaagttccaagttcatgcacaaccgatcttttcctctgcgaagacgtgtcggtagctgaagcattttataagcctccactttcctgaactagttttaacatacaatctttcaagtacacctccccagcttccatttaagaatggagatcactagaataggccaatggttaagtcttctgatatgtgtactactattactgcagacagaaggggttcctgtgggaatcacttttgttgaaaatgcagtggca

SEQ ID NO: 102126 - DNA, 280 bp, Glycine max
ggacttgattactttggccgtactatatttacaaaattcttcctgtaggcattcatatgggcaggcttgaatctgtattaaatcttcaatctacatcagctaaattgaaagagattcgggaagagtttaagggtaggaaggtgattcttggtgttgatgacatggatatctttaagggcatcagtctgaagcttctagctgttgagcagctactgcagcagaatcaagatttgaagggcaaagttgtcctagtacagattgtgaatcctgctaggagttc

SEQ ID NO: 102127 - DNA, 279 bp, Glycine max
gcaattgaagttaaaagccttagccttccctaaactccaaacacatagacatcatcatccatggctgcctccgtctccactgtcggagctgtcaacagagctcttttgaacctgaatggttctggagctggagcttcagctcccagttcagccttctttgggaccagcttgaagaaggttattgcctcaagggtccccaacagcaaggtttccggtggaagcttcaagattgttgctgtagaagagaagaaagagattgacgagacccagcagatcgac

SEQ ID NO: 102128 - DNA, 290 bp, Glycine max
ctcctccaattagggtttttgtgatctgcagctacgatgggtaagggaacggggagtttcggtaagaggaggaacaagacccacaccctctgtgtgaggtgtggccgccgcagcttccacctccagaagagtcgttgctctgcgtgcgcttaccccgctgcgcgcaccaggaaatataactggagcgtgaaggccattaggagaaagaccaccggaactggaaggatgaggtacttgcgtaacgtgcctcgcagattcaagagcggcttcagagagggtacgaagctgca

SEQ ID NO: 102129 - DNA, 290 bp, Glycine max
  unsure (1)..(290): unsure at all n locations
tgcacatttggaaattgtggttttccttttttcatttgcattgcaaagcaaaaaccttgcaaattgcaatggcttccaacaaggttattgccaccatcttggttctttctctcccttgctactcaacatcattcaccaatgcatgtggcacatgccacccanaacctactcctatctcccctcctccatcagggaagtgccccaaggacacattgaagctaggggtgtgtgctcctgttctaggacttgttaatgttgttgttggttcccctgtctctagcagtgttgtg

SEQ ID NO: 102130 - DNA, 149 bp, Glycine max
aaaagatctgattagaaagatgctgtgttctcagcttcagaacggttgactgctcatcaagtgttatgtcatccttggatatgtgagaatggagttgcccctgacagatcactggaccctgctgttctttctcgtctcaaacagttttc

SEQ ID NO: 102131 - DNA, 287 bp, Glycine max
tcaaaacactcataacacaaagcacaaagcaaactcatccttgagttaaaaaatggcagcagcttcttccatggctctctcatccccatccttggctggcaaggccgtgaagctgggcccatcagccccagaagtgggaagggtgagcatgaggagaacgtcaccaagcaggtctcctcaggaagcccatggtacggcccagaccgagtcaagtacttgggcccattctctggcgagcccccgtcctacctaaccggtgagttcccaggcgactacggctgggacac

SEQ ID NO: 102132 - DNA, 285 bp, Glycine max
ctgatgcaacatttttaagaactgtagttgtgatcgatcaacgattcttctgcagaatgttggtctggttgttgcttcatttattattgccttcatgttgaactggaggataacgcttgttgtattggccacataccctttaatcattagtggtcacattagtgagaaactatttatgcaaggatttgggggcaacctgagcaaagcatatctaatagccaacatgttggctggggaggctgtgagtaatatccgcactgtggctgcattttgtgctgaacaaaa

SEQ ID NO: 102133 - DNA, 287 bp, Glycine max
attattcctcttcccattctagggttcccaatggacgctggcggaaagatcaagaagggcgccggaggaagaaagggcggcggccctaagaagaagccggtttcaaggtccgtcaaggccggtctccaattccccgtcggaagaattggccgttatttgaagaaaggaaggtacgcccagcgtgtcggtaccggtgctcccgtttacttggccgcagttctcgagtacctagctgctgaggtgcttgagttggctgggaatgctgcacgtgacaacaagaagaacag

SEQ ID NO: 102134 - DNA, 281 bp, Glycine max
attccatcagcccgagaactatcacgcttgttggagtctgcaaagccccaatcattcaacactttgctgaaacaatttctggtactacaactattagaagctttgatcagcagtcaagatttcaggaaacaaatatgaaactgactgatggatattctcggccaatgttcaatattgctggtgccgtggaatggttgtgtttccgtttggatatgttgtcttctatcacatttgccttttccttaatattcttaatatctattccacagggattcatagat

SEQ ID NO: 102135 - DNA, 282 bp, Glycine max
gaagcaataagatgaaaatgaaagtgcttttttgtttgttgctacagttttggtagcatatgaatgccatggctcagactaccaaaagttccctctccaaatgaaaactgggtttggtgggcaatacagcaatgaggtggcatgtgccagttggaggcttggcgtggaagcaaacaacgtagtcaagtggcaaactgttcctgcagcttgcggagagtacatagctgactacgttctaggagaccaatatagatcagattccaaaacagttaaccaacaagc

SEQ ID NO: 102136 - DNA, 271 bp, Glycine max
  unsure (1)..(271): unsure at all n locations
gcaaagctcatccttgagttaaaaaatggcacagcttcttccatggctctctcatccccatccttggctggcaaggccgtgaagctgggcncatcagccccagaagtgggaagggtgagcatgaggaagaccgtcaccaagcaggtctcctcaggaagcccatggtacggcccagaccgagtcaagtacttgggcccattctctggcgagcccccgtcctacctaaccggtgagttcccaggcgactacggctgggacactgctgggcttt

SEQ ID NO: 102137 - DNA, 292 bp, Glycine max
cgcacactgtcacaggtgtagcggcgaaactgaggtcgtagaaagaatggcgaaaacgacgtcgttgttgctctttacactgctcctcttcggaaccttagctctcatccaggcgaagaaatcgaaggaggatttgaaggaagtgacccacaaggtttactttgatgttgagattaatggaaaagaagcaggtcgtattgtgatgggtctttttggaaaggctgttccaaaaactgcagaaaactttcgagctctttgcactggggaaaagggaactggtaaaagtggcaag

SEQ ID NO: 102138 - DNA, 288 bp, Glycine max
gcgtgtgtttgcgaattgtgcaattttcagatctgaatcagagaatagataataatggctacaccggaccacctgttcaacctccgcaacaacttgtatctcggggcgtaccaagccgccatcaacagcggcgacgtcaccaacctctccaaagaagactccctcgagcgcgacaccctcgtccagcgctaatacagcgccctgggccagcttcagttcgtcatctccgagatccatgacgacgctcccacacctctccaagccgtcaaactcctcgctctctatttc

SEQ ID NO: 102139 - DNA, 286 bp, Glycine max
caggacccagacagcaaggttgcctgcgaacatgcaccaagaccaacttggtcatggtcttcggagagatcaccaccaaggccaacgttgactacgagaagatcgtgcgtgacacctgcaggaacatcggcttcgtctcaaacgatgtgggacttgatgctgacaactgcaaggtccttgtaaacattgagcagcagagccctgatattgcccagggtgtgcacggccaccttaccaaaagacccgaggaaatcggtgctggagaccagggtcacatgtttggcta

SEQ ID NO: 102140 - DNA, 275 bp, Glycine max
ttcactactagttttcccacatgcttaactagcgcttttttttctttctatattcattatccaatggcttcttctattcctctttatcaaccaaccaacaccttattctccaacacccagttcaaaggttcgcgccgtggcacagtgctgcaccccttaaaataaagcgtcttgcacatgatcctcaaaggttcgcttgggcagtaggtattgcacagtcacgatgtattaacatgcaaacgagaattggtgctctaaatcaagaagcaaatatg

SEQ ID NO: 102141 - DNA, 282 bp, Glycine max
gcattgtctttgagaagcttggaccagcttatttgattttctaaagagaaataaatactgcccattccctgtggatcttgttcgggaatttggacgtcagcatttggaatctgtagcatatatgcatgaactacgcctaatccacactgacctaaagccagaaaatatacttcttgtttcctctgaatatgtaaagctccctagctataagagaatttcctcagatgaaatgcaattcaggtgcttgcccaagtctagtgctattaagctgattgattttgg

SEQ ID NO: 102142 - DNA, 275 bp, Glycine max
gaaaaacttagctactaaggaaggatcaaagagaatggctcaagcaatggcatcaatggctggcttgcgtggttcctctcaggctgtgttggaaggtagccttcaggtgagtggctccacacgcttgaatgtggggagtggaagcagggtggcctcagtcacacgtgcagggttcacagttagagcacaacaacaacaagtgagtggtgaggtacaaagcagccgtagggcagtgctttcacttgttgctgctggtttggccactggctcttttg

SEQ ID NO: 102143 - DNA, 280 bp, Glycine max
aaaatttaaagaaatcaacacacacaacacaacaacatatggaggtgctaagggtgcaaaccatagcttccaaatccaaagatgctgccatcccagccatgtttgttagggcagagacagagcaaccaggcatcacaaccgttcaaggggtgaaccttgaggtgccaattattgattttagtgacccagatgaagggaaagtggtgcatgagattttggaggcaagtagggactggggcatgtcccaaattgtgacccatgacatacctagtgatgttat

SEQ ID NO: 102144 - DNA, 286 bp, Glycine max
  unsure (1)..(286): unsure at all n locations
gtgaatgcgtataaaaggaaaataaaaaattagcgtcaaaatgttgggtgtgttcagcagctccatagtgtcgccgccggacgagctcgtggcagccggcngccgtactccgtcgccgaagatgacggcggcggcgctgcggaagctgttcgaggagaagaacccctccgccgtgtcggtggaggtcggagagcatgtccagctcgcttatacccaccacaacgagtcgccgtttcagcccagatcctttgctgtcagggatgaggtgttctgcttgtttgaggga

SEQ ID NO: 102145 - DNA, 139 bp, Glycine max
  unsure (1)..(139): unsure at all n locations
catcgcaacatggagatggtttcgagaagaattagtagatctccagngccttcgacncgctcggcttctccaaggaccccgccaagttcgaggagtacaagctcaaggagatcaagaacggccgcctcgccatgctggc

SEQ ID NO: 102146 - DNA, 277 bp, Glycine max
ggaagaagcagcaatggcgccgagataacacgcaaggtcagcagaaaccccgaattgataaggggaatcggaaagtactcgaggtcgcagatgtaccacaagaggggcatttgggctatcaaggccaaaaacggtggcgttttacctcgccacgaccccaaacccaaacctgaaactcccactgaaaaaccacccaaattttaccccgctgatgatgtcaagaaaccccttgtcaacaagcacaaacccaaaccagctaagctcagggctagcatta

SEQ ID NO: 102147 - DNA, 279 bp, Glycine max
aaaagccttagccttccctacaacccaaacacaaagacatcatcatccatggctgcctccgtctccactgtcggagctgtcaacagagctcttttgaacctgaatggttctggagctggagcttcagctcccagttcagccttctttgggaccagcttgaagaaggttattgcctcaagggtccccaacagcaaggtttccggtggaagcttcaagattgttgctgtagaagagaagaaagagattgaagagacccagcagaccgacaaggacagatgg

SEQ ID NO: 102148 - DNA, 283 bp, Glycine max
catttttgttggttcgagtgagcggggaagatgtactctagagattcatggggtggtccgttggagataaacgcgacggactcggcaacggaggacgagcggagccggaacctgcaggacgtggacagggcggcgctgtcgcgtcccttggacgagacgcagcagagctggctcctaggccccggcgagcagaagaagaagaagtacgtcgatctcggctgcatcatcgtcagccgcaagatcttcaagtggaccctcggcaccctcctcttcgccgccttcc

SEQ ID NO: 102149 - DNA, 276 bp, Glycine max
ctggaggaattatagggcttggagagcagaggaggatcgtgtaggtttgttacatacattgtcaacactccccacccatccagagagtgttcctattaatgcacttgttgctgtaaagggaacccctcttgaggatcagaagcctgttgaaatatgggagatgattcgcatgatagcgactgcacgtatcataatgccaaaagcaatggtaagattatcagctggtcgagttcgattctccatgcctgagcaggcattgtgctttctggccggtgc

SEQ ID NO: 102150 - DNA, 282 bp, Glycine max
cggcgctcgatccagatccatggtgcatcgagatcggccatacctttttgcggatttctcgaaggaatcttgccctactgtgaagaacattttacttctggattctgaaggaaagcgtgttgctgtaaagtatttctcagatgattggccgactaatgcatcaaagttagcctacgaaaagtctgtttttactaaaactctaaagacaaatgcacggacagaagctgagataacattgtttgatggttatattgtcgtttacaagtttgtacatgaccttca

SEQ ID NO: 102151 - DNA, 275 bp, Glycine max
agttgaacgagtttgcaacccacacacaaaaaccaaacccttaaaaatgtcatccccctcgccggtggccacggtggtctccgccgccgcgctgtacgaccgcgccaaagccgtgaaagaattcgacgaaaccaaggtcggagtcaaaggtttgatcgattcgggaatcagaaccatcccccctttcttcgtccacccgcccgaaaccctagcggacctcaagcgcggaaccaaacccgggtccgcgccggagatccccacggtggacctcgccg

SEQ ID NO: 102152 - DNA, 280 bp, Glycine max
gaagatattagtgttgaagactctacaactatatatttaaacctctcttacttggatcaactcacaaccactctcttttattcttagctttcctttccagttcatacttcatcctattattactttccctctttgcattccaaatggccactgttgaggttgcacagcaaacaccaacaactgtgacagagaatgaaacaacgactgaggtaaccaagattgaggaaactaccccagaacagccagccaccgaggttactgccccagaaacagtcaacga

SEQ ID NO: 102153 - DNA, 273 bp, Glycine max
ggctcatacaaaggttgctgaggagataagattgcagtagtgctaagtgctaacacctgcagtgaacaatggcctctgcatcagcatctctgctcaagtcttcacttgttcttgacaagtctgagtgggtgaagggacaaacccttcgccaaccttctgcatcagttgtgagatgcaaccccaccaccccatcaggcctcaccatcagagctggttcctatgctgatgagctcgttaagaccgcgaaaacagtggcttcaccagggaggggta

SEQ ID NO: 102154 - DNA, 276 bp, Glycine max
gccatccctcactctcctccaagccatcgtccccgtcccagcctccccggactccaggggcaaaagctgcagcgtcgagatggtgaaggggcgcacggggcagcgcgtgaggctctacgtccggggcaccgtccttggataccagcggtccaagtcgaaccagtacgagactacgtcgctggtgcagatcgagggggtgaacaccaaggaggacgtcgcgtggtactgcgggaagcggatggcctacatctacaaggccaagaccaagagcagcgg

SEQ ID NO: 102155 - DNA, 277 bp, Glycine max
ctctgccactttctgagtacatacaacactgccatggctgcctcagtctccactattggagctgtcaacagagctccactgagcttgaacagctctgaagctggagattcggttcccagttcagccttctttggcacaagcttgaagaaggttactgcctcaagggtccctaacgtcaagatttcttctggaagtttcaaaatcgttgcggcggagaaagagattgatgagcaacaacagacaaacaaggacagatggaaaggtcttgcctatgata

SEQ ID NO: 102156 - DNA, 276 bp, Glycine max
cctcttagtcccaattttctaggttttattcattttccgatggcttctgcagatgttgagtaccgttgctttgtcggtgggctcgcttgggccactgacgaccatgccctcgagagagccttctctcagtacggcgaaatcgttgaaacgaagattatcaacgatcgtgagactggcagatccaggggttttggatttgtctccttcgcctcggagcagtccatgaaagctgcgatcggagcgatgaatggacagaacttggacggccgtaacatc

SEQ ID NO: 102157 - DNA, 221 bp, Glycine max
aagtagttgagaactaagaagggaagcaaatggcttcctcaatgatctcttccccagctgttaccactgtcaaccgtgccggtgccggcatggttgctccattcactggcctcaagtccatggctggcttccccaccagaaagaccaacaatgacattacctccattgctagcaacggtggaagagtgcaatgcatgcaggtgtggctaccagttggcaag

SEQ ID NO: 102158 - DNA, 243 bp, Glycine max
  unsure (1)..(243): unsure at all n locations
ctctatattaactgagtactcccaagggggagcctatatcgtctgntgcatanggcagatagtcgaattgatgaagtacggaggctaaaaatggcattcgatgtggcaaaagggatgaactacctgcactctagccatcctaccattgttcaccgtgacctgaaatcccccaatcttttagtggatacaaattggggtgttaagggtctgcactttggcatgtccaggttgaaacatcatact

SEQ ID NO: 102159 - DNA, 230 bp, Glycine max
ctttgattgagatacttcctgattatgctcgtgttatcgatgatggcttttatagagctgtggatatgtacttgaaggcacatccagcactaacagaacaagaatgcaagaagctttgcaagttgatagactgccagaagctgtctcaagaagcaagcaaccatgcagcccaaaatgacaggcttccactgcagatggtggtgcaagtcctgtacttcgagcagctgcgt

SEQ ID NO: 102160 - DNA, 274 bp, Glycine max
cgttgactcctcgttgacatggtcatgggagatgacatggtgaaggtcattgcttggtatgacaatgaatggggctactcccaaagggttgtggatttggctgacattgttgccaacaaatggaagtgagagccaaacaaattctcattggtaattaaattattatgtatgtaccatgccattgtaattttgtatgcttactactactactaccactacaacacttgttgcttcatttttcttttaaacttgtactgagaaacagaaccatcaa

SEQ ID NO: 102161 - DNA, 277 bp, Glycine max
cagattcattggttctccattttaactctttcatgatggtcatcttccttactggattggtgtcaatgatattgatgcgaactctgagaaatgactatgcaaagtatgctcgggaagatgatgatttggaaagtctggagagagatgttagtgaagaatctggctggaaacttgtgcatggtgatgtttttcgaccgcctcgcaacttagttattctttcagctgtagttggcacaggtgctcagcttgcgttgctggttcttcttgtcgtcttgtt

SEQ ID NO: 102162 - DNA, 274 bp, Glycine max
gcataatctcactcgtatagcgttgctgagagagaaagacaaatggcaacaagcgaagaagtggttgcagcggcgcggaggagccgcgctggaggcagggctgaagcacaaactggagagaaaatggacgttttggtgcgacaaccaatccaaacccaaacagggcgctgcttggggtacctctcttcgcaaggtctacaccttcgacaccgttgaagagttctggtgtttgtatgatcaggtattcaagcccagcaagttgcaaatcaatgcg

SEQ ID NO: 102163 - DNA, 276 bp, Glycine max
cacaaggcagaaagcaagtcatcctagagttttaaaaatggcagcagcctcctccatggctctctcttccccatccttggctggcaaggccgtgaagctgggcccatcagcccccgaagtcgggagggtcagcatgaggaagaccgtcaccaagcaggcctcctccggaagcccatggtacggcccagaccgcgtcaagtacttgggcccattctctggcgagcccccgtcctacctcactggcgagttcccaggtgactacggctgggacactgc

SEQ ID NO: 102164 - DNA, 288 bp, Glycine max
caaatggctcatctgaagatggtaaagagcatctaacagtgatgctcctgagaacaatcctcagtatactactgtttatgtgggtaaccttgctccagaggtaactcaacttgatctccatcgccacttccatgctcttggggctggagtgatggaggaggttcgggtccagcgtgataaagggtttggttttgtgaggtacagtactcatgctgaagcagctctggctattcagatggggaacgccagtctcttctatgtggaaaaccattaagtgctctttgggga

SEQ ID NO: 102165 - DNA, 287 bp, Glycine max
atgctacaagagcttggcaagcaaaatcccatcttatgagattgattcgagaccatcaagctgacttccttcgcttgataaatgaacctgctgaaggtggcgaagggaatatattggggcagatggcttctggaatgccacaagcagtaactgtcacccctgaggagcgccaagcaattgaacgtcttgaagcaatgggttttgatcgtgcaatcgtattggaggtgtacttcgcttgcaacaaaatgaggaattggctgccaactaccttttagatcacatgcatg

SEQ ID NO: 102166 - DNA, 285 bp, Glycine max
caaagcacaaagcaaagctcatccttgagtaaaaaatggcagcagcttcttccatggctctctcatccccatccttggctggcaaggccgtgaagctgggcccatcagccccagaagtgggaagggtgagcatgaggaagaccgtcaccaagcaggtctcctcaggaagcccatggtacggcccagaccgagtcaagtacttgggcccattctctggcgagcccccgtcctacctaaccggtgagtcccaggcgactacggctgggacactgctgggctttccgc

SEQ ID NO: 102167 - DNA, 287 bp, Glycine max
cttcaaaacactcataacacaaagcacaagcaaagctcatccttgagttaaaaaatggcagcagcttcttccatggctctctcatccccatccttggctggcaaggccgtgaagctgggcccatcagccccagaagtgggaagggtgagcatgaggaagaccgtcaccaagcaggtctcctcaggaagcccatggtacggcccagaccgagtcaagtacttgggcccattctctggcgagcccccgcctacctaaccggtgagttcccaggcgactacggctgggac

SEQ ID NO: 102168 - DNA, 276 bp, Glycine max
atttctttattttatatttaggttacgagaaattatcatgaatccaattatttctgctgcttctgttattgctgctgggttggccgtagggcttgcttctattggacctggggttggtctcggcactgctgcagggcaagctgtagaagggattgcacgacaaccggaggcagagggaaaaatacgaggtactttattgcttagtttggcttttatggaagctttaacaatttatggactggttgagcattagacttttatttgctaatcctttgt

SEQ ID NO: 102169 - DNA, 291 bp, Glycine max
gcttcggctactctctctgtagccaaaccacccttcaggcaaatgggaaaggcttctctgaattctctggcctccgcagctcatcaggcttccttcccttttctagaaaatcttcagaggatttccattctgtcattgccttccagacctatgcagttggaagcagtggaggatacaagaagggtgtgacagaagcaaaactgaaggttgccataaacggatttggaaggattggaaggaacttcttgaggtgctggcacggtcgcaaagactcccctcttgatgtcattg

SEQ ID NO: 102170 - DNA, 286 bp, Glycine max
tttttgtgatctgcaagctacgatgggtaaggaacggggagtttcggtaagagaaggaacaagacccacaccctctgtgtgaggtgtggccgccgcagtttccacctccagaagagtcgttgcgccgcgtgcgctttccccgctgcgcgcaccaggaaatataactggagcgtgaaggccattaggagaaagaccaccggaactacgtagatgaggtacttgcgtaacgtgccccgtagatttaagagtgcttcagagacggtaccgaagctgcacccaggaagag

SEQ ID NO: 102171 - DNA, 285 bp, Glycine max
cacttcattcaacatttctccccttagctgtttcaccaatggctgctgcggttagtgctgcagtctcttttccatccaccaagtctacctctcttccaagcaggacctccctcattgccccagagagagttgtgttcaagaaggcttcattgcaaaacagaactgtttctagcagtggacgggtagtttccatcagagctcaagtcaccactgaggcaccagccaaggttgaaaaagagtccaagaacaggatgaaggtgtggttgtgaacaagtttaaacccaa

SEQ ID NO: 102172 - DNA, 287 bp, Glycine max
gtaaaacaagtagttgagaactaagaagaaggaatggcttcctcaatgatctcctccccagctgttaccaccgtcaaccgtgccggtgccggcatggttgctccattcaccggcctcaaatccatggctggcttccccacgaggaagaccaacaatgacattacctccattgctagcaacggtggaagagtacaatgcatgcaggaatggccaccaattggcagtaagaagttcgagactctttcctacttccagacctcgatgatgcccattggcaaaggaagtcg

SEQ ID NO: 102173 - DNA, 293 bp, Glycine max
cttcgctacgctgtgctgtgtggccgagtatctgagatgacagaggactattcagttggaaacttgatgggaaggaccgatgcttacttgaatgaagtggcactaaagaccattgcaggggctgtgtctgttttacatatgtcagagaatctccttgcaatagcagagagagcacagttggtgagtagatgcatagatgccattgcatttatagcatgcacagaaagccaattctgttcatctgcaagaagtagagtggttctgtgggagtagtgtcttccatggcatcaaac

SEQ ID NO: 102174 - DNA, 286 bp, Glycine max
ctctctcacgttttccgcttcagtttctcgggaaaatcatggtgaaaggtccaggcctctactctgacattggcaagagagctcgcgatcttctgttcaaggattatcagaatgaccacaagttcaccatcaccacttacacttccaccggagtggaaatcacttcaactggagtcaggaaaggtgagatatatttggccgatgtcagcactaaggtgaagaacaagaacatcacaactgatgcaaagtggacactaactcaaatctgcgtacaatcattactgtg

SEQ ID NO: 102175 - DNA, 287 bp, Glycine max
gattatcctaagtctttgggaatagtgctgcaatggcttcaagtcaggaggaggtgacccttttgggagctactggaagcccatttgtgtgcagggttcatattgccctcaagttgaagggagttcaatacaaatatgtcgaagaaaatttgaggaacaagagtgaactgcttctcaaatccaacccagttcacaagaaggttccagtgtttattcacaatgagaagcccatagcagagtctctgtgcatgttgaatacattgatgagacatggaagaacaacccca

SEQ ID NO: 102176 - DNA, 279 bp, Glycine max
atcggatttggggacataatcttaccggacttatagtggcattttcactaaggtatgattggttggcaaagaagaaccttcgggctggatacttcttgtgggcaatgactgcctacggtttaggtctcctcatcacatatgtggctttgaacttgatggatgggcatggtcagccagctttgctttatatagtcccatttacacttggcaagtataattaatcagactcatttaaatctaaatagaaacacctatgatggcagctggtgtgtatcttta

SEQ ID NO: 102177 - DNA, 289 bp, Glycine max
gtaaaaccctagttcatccatcaccagtcgaggaagaagatggtgaagttccttaagcccaacaaggctgtcatcgtcctgcagggccgctacgccgggcgcaaggcggtgatcgtgaggtccttcgacgagggaaccagggagcgcccctacggccactgcctcgtcgccggaatcaagaagtaccccagcaaggtcatcaagaaggactccgccaagaagacggccaagaaatctagggttaagcgttcgtgaagctcgtgaactaacagcacctcatgcccacgcg

SEQ ID NO: 102178 - DNA, 285 bp, Glycine max
cccgccactatgatgatgaccgccctgacattggtggctttggctgtgccaatggcaaggtccagatcatccagcagatcaaccatgagggtgaggttaacagggctcgctacatgccccagaaccccttcatcattgccaccaagaccgttagtgctgaggtttatgtcttcgattatagcaagcatccctctaagccccctcttgatggtgcctgtaaccctgatttaaggcttaggggtcataacactgaaggctatggtttgtcctggagtaagttcaagc

SEQ ID NO: 102179 - DNA, 287 bp, Glycine max
gagtactgaaaccataaaaccttaggcacattcatagttgtagagaagcttgcaatggccaaagactacggagaagttgagttgtttggtgtggggggaagcccttttgccagaagggtgcagattgccctggaactgaagggagtccaatacacttactttgaagaagatcttaggaacaagagtgatcttcttatcaaatacaaccctattcacaagaaggtacctgtgcttgtccacaatgaagaccattggctgagtcccttgtgatccttgaatacattgat

SEQ ID NO: 102180 - DNA, 116 bp, Glycine max
tgtagaagaacaagtagttgagaactagacggagaagcaaatggcttcgctcaatgatctcttccccagctagatatcactgtacacagtcccggcgccagcatggttcatccctg

SEQ ID NO: 102181 - DNA, 285 bp, Glycine max
caaagtaatttattaattaataaaaaatggcggcggcggcggcagtgacggtgctactcccacctaggattccgaccgccaccaacgttacccgctgctcttctttgccttctctgcctcctcgcggcaccaacactaaaaccactttgctcttatcttccctcaaccacttctcagtgtcccgaaaatcttctctgcttcagaccagagcttcttcagaggaatcatcctcagtagatgcaatgaggtgttcacagatttgtaggaaaagtgggatgctcttga

SEQ ID NO: 102182 - DNA, 285 bp, Glycine max
atagctagttcacagcttcagttctttttgttgatcctgtgaacttatggctgacggggtggttctgttggatacatgggccagcatgtttgggatgagggttaggattgcattagctgaaaagggtgttgagtatgaatacaaggaagaaaatctcaggaacaagagtcctttgcttttgcaaatgaacccaattcacaagaaaattccagttctgatccataatggcaaaccaatttggaatctgcaattatagtgcagtacattgatgaggtctggaatgat

SEQ ID NO: 102183 - DNA, 288 bp, Glycine max
atccagcttttatggacaaacttgttgttcacattaccaagaacttcatgaccctgcccaacatcaaggttcctctcattcttggtatctggggaggcaagggacaaggaaaatctttccaatgtgagcttgtctttgccaagatgggaatcaaccccatcatgatgagtgctggagagttggaaagtggaaatgcaggagagccagcaaaactgatcaggcagagataccgtgaagccgcagactgatcaagaagggaaagatgtgtgctctcttcatcaacgatct

SEQ ID NO: 102184 - DNA, 291 bp, Glycine max
tatttggctctgcccttcccaattgagaaggcccccactaagaaaattgcaagtttaaatggtggggtgaagatatctgaactgttgaagtatccagttagaggtctcgtctttgagggtggcgatacgctggaagatttatcaaatgttgtttcagatgcctgtatatgtcttcagaacaacaacatacctttcaatgttcttatctctgactgtggaaagcaagtctatctgttaccacagtgtttgcagagaaacagctcttggagaagtggatgctgagcttcttga

SEQ ID NO: 102185 - DNA, 292 bp, Glycine max
cttcctcctcgccgtcgaagagtctttccatcaccggccgtggcaccgtcgccactggccgtgtagagcgtggcaccatcaaagtaggggaaactgttgaccttgtaggtttgagagaaacaaggaacacaaccgtcacaggtgtagaaatgttccagaagattctagacgaagccctggctggagacaacgtggggctgttgcttagaggggttcagaagactgacattcagaggggaatggtgttgctaaaccaggcacgattacgccgcacaccaagttctcagcgatt

SEQ ID NO: 102186 - DNA, 281 bp, Glycine max
cttcacaccgtgacttgagaaggccagggctgcagcactgaacattgtcccaaccagcactggagctgccaaggctgtgtctctagtgttgccacagctgaagggcaagcttaatggaatagcgctccgtgtgcctacacccaatgtttcagttgttgaccttgttgtgaatgttgagaagaagggtcttactgctgaagatgtgaatgcagcattcagaaaggcagctgagggtccactaaagtgtgttggactgtgtgatgttcccttgtgtctatcga

SEQ ID NO: 102187 - DNA, 283 bp, Glycine max
gaaggaattgtcatcagattctcacagcatgtccggtctgctttggcttcagtaataatgggaatggctccagtgttgggaaaggaagcaacaattgagcagcttcttcctattttcctttcccttttgaaggatgaatttcctgacgtacgcctaaacattatcagcaagcttgatcaagtgaatcaggttataggaatcgatctgttatctcagtcttagttaccagccattgttgacttgctgaggataggcattggagggtccggcttgcaattataga

SEQ ID NO: 102188 - DNA, 272 bp, Glycine max
atcatattgtctcctcctggactggtattcctgtggagaaagtctcaactgatgaatctgatcgtctcctcaagatggaagagactttacacaagcgagtcataggtcaggatgaagcagtgaaagccataagcagggccatccgtcgagccagggttggactgaagaaccctaaccgtccaattgccagcttcatcttttctgggccaactggtgtggggaagtctgagttggccaaacattggctgcatactactttggttctgaagaag

SEQ ID NO: 102189 - DNA, 278 bp, Glycine max
ggaaaaccacaaaacagctttacaaggctgtcaatatcccagatgtgattgtttatccaagatccgaagaggaggtctctaagattgtcaaattatgcaacagtcataaggttcctattgtaccatatggtggagctacatcaattgagggtcacaccttatcccctcatggaggagtttgcattgacatgtcattaatgaaaagagtgaaagaattacatgttaatgacatggatgtgttgttgagcctggcattggatggatggagcttaatgagt

SEQ ID NO: 102190 - DNA, 279 bp, Glycine max
atcggattctaaggattagtgagacttcgacaattttcggaagaggaccgagagagatcgcctttcactggtcacaaatgctcagggtgaagttgtggagagtttgttgcctgtattggataatttcgacagagcaaaaacccagattaaggtggagacagagggagaggagaaaataaacaacagctatcagagcatatataaacagttcattgaaattctaaattcacttggagttgaccagtggagacagttggaacacctttgatccattgctac

SEQ ID NO: 102191 - DNA, 284 bp, Glycine max
ctaggagtcacgcacttcacttcgcccatttacctgtcattgcggtcttttactcttctcaataccttattaaaaccctatctcactcactcactcacaccgttccatttctcaacaacttctgctacttcctactccaaccgcacttctgctccgcaattatcatgggcaaggtcaagatcggaatcaacggatttggaagaattggccgtttggtagccagagtggctctgcagagagcgatgttgaactcgttgccgttaacgaccctttcatcaccaccg

SEQ ID NO: 102192 - DNA, 290 bp, Glycine max
ctactgttaaagctgcatatgctgagttgcagtatgctcagtcaccttttgaccctgatggcattgaagctgctgatcaattgctagtgtctgagttgaagaacttatctgagctaaagcaatgttacttgaagaaacagtttgatccttcacccaagactgcaatactcgaggccgaatccaaggaattgcagggtgtgatcaaaacctacgagatcatggggaagaagttggagtcacaggtgaggctcaaggattccgagataatttttcttagggagaagttggag

SEQ ID NO: 102193 - DNA, 289 bp, Glycine max
agtgaatgcgtataaaaggaaaataagaaattagcgtcaaaatgttgggtgtgttcagcagctccatagtgtcgccgccggacgagctcgtggccgccggcagccgtactccgtcgccgaagatgacggcggcggcgctgcggaagcggttcgaggagaagaacccctccgccgtgtcggtggaggtcggagagcatgtccagctcgcttatacccaccacaacgagtcgccgtttcagcccagacctttgctgtcaaggatgaggtgttctgagtgtttgagggagcc

SEQ ID NO: 102194 - DNA, 302 bp, Glycine max
acgcgagctcgggatccggctcgatctcgagccgctcgcattcgcgggccgttcttcctcttccgcaaagcccaaggcgggcccggtggcctggcgggctgggaggagccatggacttcgggcggaacaagtccaagttccaggaagtccccgagaccggcgtgagcttcgctgacgtggactgcgcggaccaagcgaagcttgaattacaagaggttgttgatttcttgaagaatcccgataagtacaccgcgctgggcgcgaggattcgaaagggtgtctaatggtgggccaccgggaac

SEQ ID NO: 102195 - DNA, 276 bp, Glycine max
atagtgaccgagaactttcgcctgagaatgagcttggccgtggtggatttggggttgtttataagggggagttggatgatggtactaaaattgcagtgaaacgaatggaagcaggtgtgattagtagtaaggccttggatgaattccagtgctgagattgcagttctatcgaaagtccgacaccggcatctggtgtatcttttgggttattctacagagggtaatgacacaattcagtgtacgagtgtatgccacaaggggctctcagtaagcatc

SEQ ID NO: 102196 - DNA, 280 bp, Glycine max
attttatttaatttagtgatgatgaacaagctggtggtagaagatgtggaggcgagcgacctcatgcccaaagatggggaagggtcagctagcccctttgtagaggtcaagttcgatgagcagcagcacagcactgaaacgatgcacgaagacctgaatccttgttggaatgagaagcttgtgttcaacatcaataaccccagagatcttgcccacaagacaattgaggtggttgttacaataacaatcacaatgatcggaaccacaataacttccttgg

SEQ ID NO: 102197 - DNA, 278 bp, Glycine max
ctcttccacatatttctctaaccagtaagttatcttctagtatttttcaagtaacttaaggtttcaaacctaggaacttggaagtcatggcagcaacattgatggcagcaacaagttctggcactcttaaagcaactcctttcctaggccaaggcaagggtgccaatgccaatgctcttagggatgttgtatccatgggaactgggaagtacaccatgggcaatgatttgtggtatgaccagacagagtgaaatacttgggacccttttcagctcaga

SEQ ID NO: 102198 - DNA, 279 bp, Glycine max
ctcgagccgaatcggctcgggagaaacaaagttagaagtaaagaggatcatggcttctctagcaaccttggctgctgttcaaccagctacgatcaatggccttgctggaagttccctctctggaactaagctctctttcaagccctctcgccacagtgtcaaatccaagaacttcaggagtggtgccgtggtagcaaagtatggtgacaagagtgtgtactttgatttggaggatctggcaacactacagggcagtgggacttgtatggctcagatgca

SEQ ID NO: 102199 - DNA, 248 bp, Glycine max
gacagatgatgatggagatgggaacgaaacgctgtcgttgcggcactcgcggcgttggtgctactcgcggcgagtgtggcggtggatgctcaggagaactcggacgtgaagacgctggtgaagtacaagcacgggaagaagtactgcgacaaaggatgggaatgtaagggctggtcaatttactgttgtaacctcaccattaccgattatttccagacctaccagttcgagaatctgtctccaagcgg

SEQ ID NO: 102200 - DNA, 288 bp, Glycine max
gtaatagtaatatacataagtacataaccaatggaagcgcgtgcaggagccaatcagcgtattgcaagaatctctgctcatcttcagcctccaaatttccaggaagggagtgatgttcttcttaagagtgctgagtgcagagcaaagggtggggcacctggattcaaagttgcaattttgggggctgctgggggaattggtcaacccctttctttgctgatgaagatgaacccattggtttcagtcttcatctttatgatgttgtcaacacccctggtgtcactgctg

SEQ ID NO: 102201 - DNA, 276 bp, Glycine max
agatctgataatcgagtgcgttgtgtgtttgggaaatggcgtcgagtgtgttgaagagtctcatgagattttcgtcatcgaggaacacgaccaccagaagtttctgtctcgtgacctctcaaatcagcaaccacactgccaagtggatgcaggatacaagcaagatatctccgatggagctgattaatgaagttcctccaattaaggttgaaagcaggatacttgcttgtgaagccataccaattctgcccttggccacccgattgaacttatatg

SEQ ID NO: 102202 - DNA, 267 bp, Glycine max
cataaacacaagccaaggaaagtgagataaaataaaaatcaaagagcataatgtcagggatcattcacaagattggggagacccttcatgtgggagggcacaagaaggaggaggagcataagggtgagcaccatgctggagaatacaaaggggagcaccatggtgaacacagtagtgagtacaaaggagagcatcatggtgaacacaaagctggagagtaccatggtgagcacagccagagcacaaagatgggttcctagacaaagt

SEQ ID NO: 102203 - DNA, 279 bp, Glycine max
atgatttccttgtgggcgccggcatcaagccaacatctatagtgagttacaaccatctgggcaacaatgatggcatgaatctctcagcccctcaaaccttccgctctaaggaaatctccaagagcaatgttgttgacgatatggtcaacagcaacgccatcctctatgagcccggtgaacatccagaccatgtggttgtcattaagtacgtgccttatgtaggggacagcaagaggccatggatgagtacacttctgagatattcatgggtggaaagaa

SEQ ID NO: 102204 - DNA, 278 bp, Glycine max
atacattgtttgttgtggaagaggaatcttgagaaatggcaggggacagcaagagcaagattctgttcatcggagggactggttacatcggaaaattcatcgtggaagccagcgccaaagctggccacccaactttccttttggtgagggagtccactctctccaaccccgcaaaatcacccctcatcgacaatttcaaaggcctcggtgtcaatcttgttttaggagatctatcgatcaccaaagtttggtgagtgctataaagcaggtcgatgtgg

SEQ ID NO: 102205 - DNA, 278 bp, Glycine max
gggaagaccgcattggtgttgcaccggaattttccgcactgatggtattcctgaacaggacattgtcaagcttgttgacaccttccctggccaatccattgatttctttggtgcactgagggccagagtatatgatgatgaagtgaggaagtggatttctggtgttggtgttgacagtgttgggaagaagcttgtgaactcaaaagatggacctccaacctttgagcagcccaagagactctggagaagctcttgctgtatggtaacatgcttgtcca

SEQ ID NO: 102206 - DNA, 300 bp, Glycine max
ctcactcctacaccggcgaccaaaggcttctcgacgcgagccaccgtgacctgaggcgcgccagggcggcagctctcaacattgtccccacttcaacaggagcagcaaaggcagtggcccttgtcctcccaaccctcaagggcaaactcaatggcattgcactccgtgtgccaacaccaaacgtctcagtggtggacctcgttgttcaggtctcaaagaagacctttgcagaagaagtgaatgcagcattcagagagagtgcagacaatgagctccagggaatcctctctgtgtgtgaga

SEQ ID NO: 102207 - DNA, 292 bp, Glycine max
ctttaaggcagatgtgaaaatactagacaatgaaaccatcactgttgatggtaagtccatcaaggttgtttcaagcagggaccctcttaagcttccatgggctgagcttggaattgacattgttattgagggaacgggagtgtttgtggatggccctggggctggcaaacacatccaagcaggtgctaagaaggttatcatcactgctccagcaaagggtgctgatattccaacttatgttgtcggagtaaatgaaggggactacactcatgagatctctaacattataagc

SEQ ID NO: 102208 - DNA, 295 bp, Glycine max
aagtagttgagaactaagaaggagaagcaaatggcttctcaatgatctcttccccagctgttaccactgtcaaccgtgccggtgccggcatggttgctccattcactggcctcaagtccatggctggcttccccaccaggaagaccaacaatgacattacctccattgctagcaacggtggaagagtgcaatgcatgcaggtgtggccaccagttcgcaagaagaagtttgagactctttcctacctgccagaccttgatgatgcacaattggcacaggaagtagaatacttctt

SEQ ID NO: 102209 - DNA, 290 bp, Glycine max
ggcaccagagacgaggaagggcgtagtaagcgacgaaatgcttcggggagttgaaaataagcgtagatccggggattcccgatataggtcaacctttcgaactgctgctgaatccacgggcaggcaagagacaacctggtgaactgaaacatcttagtagccagaggaaaagaaagcaaaagcgattcccgtagtagcggcgagcgaaatgggagcagcctaaaccgtgaaaacggggttgtgggagagctatacaagtgtcgtgctgctaggcgaacagcagagatgct

SEQ ID NO: 102210 - DNA, 295 bp, Glycine max
tgcagtagtgctaagtgctaacacctgcagtgaacaatggcctctgcatcagcatctctgctcaagtcttcacttgttcttgacaagtctgagtgggtgaagggacaaacccttcgccaaccttctgcatcagttgtgagatgcaaccccaccaccccatcaggcctcaccatcagagctggttcctatgctgatgagctcgttaagaccgcgaaaacagtggcttcaccagggaggggtattttggccatggatgagtccaatgctacctgtgggaagcgtttggcttcaattg

SEQ ID NO: 102211 - DNA, 296 bp, Glycine max
caaacccgaaatcatccctggagagcaaggagtcattgaggccgctcgtcaccctgatgccaccactgtagttacaggcatagttggttgtgcaggattaaagccaacagttgcagcaattgaagcagggaaagacatagcattggccaacaaagagacaatgattgcgggagccccttttgttcttcctcttgctcacaaacataacataaaaattcttcccgctgattcggaacattctgcaatttttcagtctatccaggggttgccaaagggtgcacttaggaaaatccttt

SEQ ID NO: 102212 - DNA, 295 bp, Glycine max
agcgttgccattctcatcctcttctttctctctctaccattgccatggatccctacaagcaccggccatccagcgccttcaattctcccttctggactacaaattctggtgctcctatttggaacaacaactcctctttaaccgttggagctagaggtccaattctgctggaggattatcatcttgtggagaagcttgcaaattttgatagggaacgtatcccagaacgtgttgtccatgccaggggcgctagtgcaaagggtttctttgaggtcacccatgacatttctcactg

SEQ ID NO: 102213 - DNA, 294 bp, Glycine max
gcacatttgacgggtcgaccctacagagtgtttagtcttgacactgggagactgaatccagaaacctacaaattttttgatgcggttgagaagcattatggaattcacattgagtacatgttccctgatgcggttgaggttcaggcattagtaagaactaaagggctcttctcattttacgaggatgggcatcaagagtgctgccgagtaaggaaggtgaggcccttgaggagagcccttaagggtctcaaagcatggatcactggacagagaaaagatcagtctcctggtcta

SEQ ID NO: 102214 - DNA, 295 bp, Glycine max
ctctttctctagtcctgttatttctcagcgcgtaaagcatggctttgttggtggagaaaaccacgagtggtcgcgagtacaaggtcaaggacctttcccaggccgacttcggccgcctcgagatcgagctggccgaggttgagatgcccggcctcatggcctgtcggaccgagttcggcccctcccagcccttcaagggggcccgcatcaccggctccctccacatgaccatccagaccgccgttctcattgagaccctcaccgcccttggcgccgaggtccgctagtgctctga

SEQ ID NO: 102215 - DNA, 291 bp, Glycine max
tgaaaatcaaggtggttgcacctcctgagagaaagtacagtgtctggattggtggctctatcttggcatcacttagcaccttccaacagatgtggatctctaagggcgaatatgatgaatctgggccagctatcgttcatcggaagtgcttctaagttgggtcaagagctggatggtgatcaagttcttcatgcacccagtcctgtgccatatttcagtcaagtttggttgacttatttgatatttgaagctttgggtttttaatagatatatctagtttaatgaatggat

SEQ ID NO: 102216 - DNA, 289 bp, Glycine max
catcatggctatgtaagagtatgatgggttctaaaggactcaccgaagcatcaaaaacagccattttgaatgcaaactatatggcaaaacgattggagaatcattaccctgttcttttccgtggggtcaatggaacagttgctcatgagttcattgttgacttaagaggctttaagaatactgctgggatagagcctgaagatgttgcaaagcgtcttatggactatggcttccatagtccgacaatgtcatttcctgtgcccggcacactcatgattgaaccaactga

SEQ ID NO: 102217 - DNA, 291 bp, Glycine max
cactgcactgtgtggaaacgaaacatggcaagagtggtggcactccaacagaaccaactatctttctctaccttagcttcctctctttctgacttcagtggaaccagacttcaaactcaacttcagttcaagagaaagcaatgccatccaaaagggtctttctacgtctccgcatcgagcaccaagaaaatcctaataatgggaggcaccaggtttattggtgtgtttttgtctaggctccttgtcaaagagggtcaccaggtgactttattcacaagaggtaaagcgcct

SEQ ID NO: 102218 - DNA, 294 bp, Glycine max
ctttcttcttcttctcttaaaagagcctttgctttttctttaacgcctttccgaattaagtacttgtttcattttctctcgaagcaagaaaaatgttcatcgagagtttcaaggttgagagtcctaacgtgaagtacacagagactgagattcagtccgtgtacaactatgaaaccactgaacttgttcacgagaacaagaatggcacttatcagtgggttgtcaagcccaaaactgtcaaatatgaatttaaaaccaacacccatgtccctaaactaggggtaatgcttgtgg

SEQ ID NO: 102219 - DNA, 295 bp, Glycine max
aagccccactcaaccaccacacctctcctcgttcacgctacccctttctgctcttcttctacctttcaagttttaaaagtataaagatggcagagacattcctatttacctcagagtcggtgaacgagggacaccctgacaagctctgcgaccaaatctccgatgctgtcctcgacgcttgcctcgagcaggacccagacagcaaagttgcctgcgaaacatgcaccaaaaccaacttggtcatggtcttcggagaaatcacgaccaaggccaacgttgactacgagaagatatg

SEQ ID NO: 102220 - DNA, 289 bp, Glycine max
ctagtttcttacaaggctctactctactgcttcaccttctgcactagaaaattcagtggtgatacatggcttcggctactctctctgtagccaaaccagcccttcaggcaaatgggaaaggcttctctgaattctctggcctccgcagctcatcaggcttccttcccttttctagaaaatcttcagaggatttccattctgtcattgccttccagacctatgcagttggaagcagtggaggatacaagaagggtgtgacagaagcaaaactgaaggttgccataaacgg

SEQ ID NO: 102221 - DNA, 293 bp, Glycine max
aaaagctcagaattcagagcaagtcaaatccgcatcttcacgggctgctctagctgcacttatcgtctcctccgcgagcctctctgtgaccccagaagccctagccgctgataacttgacccctccccccgtgattgaagcgcaacagagccaaccctcatcccctttctcacagaacctcctcctcgatcggcctaagccccaatcctcttccgacctccccgaaggcaccaattggtgctacagcgacttcttaaacgccgtcaagaagggtaaggtcgagcgagtcaggt

SEQ ID NO: 102222 - DNA, 289 bp, Glycine max
ccttgaagcgagtctgggccacagcaaccagcgacaacaactcaatcagctagggttgctttgcttgctatcttgttggaggattttctgttcaagagaagatggtaactagaattgtggatcttcgtttagacacagttacaaagccaactgaagcaatgagagctgctatggcaagtgctgaagttgatgacgatgttctaggctatgatccaactgcttttcgcttagaaacagagatggcaaagacaatgggcaaagaagctgctctttttgttccatctggcac

SEQ ID NO: 102223 - DNA, 294 bp, Glycine max
catccaccttcaacatatgtcatgaacaacccagctatggaatcaaatgtttatatgcaccatcaaaaacaaatgctggttgaagagtttccagaaaggcctggtgaacccgaatgcagctatttcttaaaaactggggattgcaagtttaaatctaattgtaaatttcaccatccaaagaatcggatagcaagattacctctatgcaacctcagtgacaagggtctacctttgagaccggaccagaatgtttgcacatattacagacgttatggaatttgcaaatttggacgg

SEQ ID NO: 102224 - DNA, 291 bp, Glycine max
gctgttgttgttgctgcaccaccgaacaacttcccctgtaaatcgcgtttcgtttgtgcaaggttttaaaagatggctgatgctgaggacattcaacctcttgttgttgataatggaactggaatggtcaaggctggttttgcaggtgatgatgctcctagggccgtgttccccagcattattgggagaccacgccatactggtgtaatggttgggatgggtcagaaggatgcttacgtgggtgatgaagcccaatcaaaaaggggtatactcaccttgaagtatcctata

SEQ ID NO: 102225 - DNA, 290 bp, Glycine max
gggaaattcgatgcagggcttacagagagccagatgatagagcacatgaaggacttggcctcaaagaacaaggtttttaagtcctacattggcatggggtactataacactcatgttccaccagtgatcctgaggaacataatggagaaccctgcttggtacactcagtacacaccttaccaggctgagatatctcaggggaggcttgagtcattgctgaattaccaaaccatgatcaccgacctcaccggcttgcctatgtcgaatgcttcattgcttgatgagggtct

SEQ ID NO: 102226 - DNA, 288 bp, Glycine max
attgaattcaaaaacttaagttcattccttgtgctttgctttcttcctcaaaaccaaacatgtcgaacacatgcggcaactgcgactgcgctgacaagactagctgcaccaagggaaacagctatggtgttattgtagagactgagaagagttacatcgagactgttgtcatggatgttccagcagctgagcatgatgggaagtgcaagtgtggcactaactgcacttgcacggactgcacctgtggccattaaggaatatgtatgaaaatgtaattgccatgtgttt

SEQ ID NO: 102227 - DNA, 288 bp, Glycine max
tctaaaaattgccagttacattcccttcacaagattctcacaaacaactcttgagaaagaaagaatggctgccaacacattgatgagttctgccatctcagccttcccatctctcctttcctcctcaaaatccagatttgccgcagcagttcctctttccagctttgttgtcaccaatgcctcttcttctcgcttttccatgagtgctgactggatgcctggccagcctagacccccctaccttgatggttcagcacctggtgactttggattcgacctcttcgtctt

SEQ ID NO: 102228 - DNA, 284 bp, Glycine max
caattgagagctcatttgcaccaggaaagtatgcttagagattagctccgctgcttatgctctcgaatggcggtttgacaagcaggcactaccagcagatctaattagaaggggaattgctgttgaagatccattttctccacatggcttaaagcttaccattcaagactatccttttgccaatgatggactccttctgtgggatgctataaagctatgggtcactgactatgtcaaccactactaccctgaaccaagtcttgtagagtcagatgaagagctgc

SEQ ID NO: 102229 - DNA, 287 bp, Glycine max
ttgagaactaagaagaaggaaatggcttcctcaatgatctcctccccagctgttaccaccgtcaaccgtgccggtgccggcatggttgctccattcaccggcctcaaatccatggctggcttccccacgaggaagaccaacaatgacattacctccattgctagcaacggtggaagagtacaatgactgcaggtgtggccaccaattggcaagaagaagttcgagactctttcctacttgccagacctcgatgatgcccaattggcaaaggaagtcgaataccttct

SEQ ID NO: 102230 - DNA, 287 bp, Glycine max
gtctctccgcagcagccacacttcttcgccgtttcagctgaagagccatccgcaggtaagcaatggttaagcataataatgttatccccaatgggcacttccggaaacactggcaaaactatgtgaagacttggtttaatcaaccagcccgaaagaccagaagacggttggctcggcagaagaaggctgtcaagattttccccaggcctactgctggatctctcaggcctattgttcatggccagactctgaaatacaacatgaaagtcagagccgggagaggattt

SEQ ID NO: 102231 - DNA, 290 bp, Glycine max
ggaggtttctattacagatgaaattgcaggcactatggagctcaaccctgataggctgggtgagctcaaagcatttgatgacacaaaagctggtgtgaaaggccttgttgatgaaggggtcgcaaagatcccaagattatttcatcatccacctgatgaatttgtcatggcttcaaagttaggcaacacagaatacactatacctgttatagaccttgcagaagttggcaaagatccaagttcacgccaagaaattataggcagaataagggaagcttctgagagatggg

SEQ ID NO: 102232 - DNA, 290 bp, Glycine max
ctcacacacccctcgcatccaacaatgtctctcaccattccctccaacctctccaaagctaaggtccgccgccacaaccaccatcgtctgcagcaccaccaacaacaacaacaacaacaacgtgtcctccgacctgaaggcgttctccgccgcgctggccctctcctccatcctcctctccgcccctctccccgccggcgccgacatctcggggctcaccccatgcaaggagtcgaagcagttcgcgaagctgagaagcagtcgataaagaagctggagtcgtcgctgag

SEQ ID NO: 102233 - DNA, 286 bp, Glycine max
ccatcacaaggcttgatatccgggttggcctcataataaaagctcaaaaacatcctgatgcagatgcactatatgttgaagagattgacgtcggtgaagaacagaccagaactgttgtcagtgggcttgtcaaatttataccactcgatgaaatgcagaaccgaaaggtctgtgttctttgcaacctaaagccagtaaccatgaggggcattaaatctcaagcaatggttcttgctgcttccgatggtgatcacaccaaggttgagttggttgagcctcccagttc

SEQ ID NO: 102234 - DNA, 288 bp, Glycine max
ctggattggccaaggggttccaaaaagcatactacaacaggtatcggaggtggtgccaactctgttgctgatggctacaacaatggtactgctttgggtgctgagattattggtaccttcgttcttgtctacactgtcttctctgccactgaccctaagaggaacgctagggattcccatgttcctgtactggcgccacttcctattggatttgccgtgttcatggttcacttggctacaatcccaattactggtactggcattaacccagcaaggagtttcggagag

SEQ ID NO: 102235 - DNA, 289 bp, Glycine max
aattatggcattcactttgaccacccttccaacgcccaatgtgtctgtgacgtccttcacccgacgcaccgtctccaactccaaaccaaccctttcatgcaccctctcttcccacccttttaagagagagtacacgagcgtgatgatagtgccgacggggattggcgccgctattggaggatatgccggtgacgctttgcctgtggctcgcgcactctcctccgtcgttgattgccttatctctcaccctaacgtgcttaatgcagcaatgctatactggccaatgcca

SEQ ID NO: 102236 - DNA, 287 bp, Glycine max
tgagcccattttggcaggttgggttggatatttttggctgatcttggatctggggtttaccattgggccattgacaattatggcgatgcttcaatcccaattgttggaacccaaattgaagcctttcaaggtcatcacaagtggccttggaccatcactaagcgtcaatttgctaacaatttgcatgcattggcacgtgcagtgacctttacagtgcttcctatagtccttctttgccatgaccctattgttgaagggtttgttgggatgtgttcaggttgcatctg

SEQ ID NO: 102237 - DNA, 282 bp, Glycine max
cggctcgagggcatcgttagcagttttgtagattcaacctcaatttgcagagttacgttctaatatatttacacaagactgataagagaaaatgtctctgattccaagtttcttcggtggccgaaggagcagtgttttcgaccctttctccctcgatgtgtgggaccccttcaaggattttccatttcccagttctctttctgctgaaaattcagcgtttgtgagcacacgagtggattggaaggagacaccagaagcacacgtgttcaaggctgatattcc

SEQ ID NO: 102238 - DNA, 287 bp, Glycine max
aaagccttgttgctgccatggccacccacgcggctcttgcttctacaaggatcccttcaaacacaaggttcccatccaaggcctctcactctttcccaacccaatgcgccttaaagagacttgaggtgacagaattctctgggcttagatccacttcatgtgtcacatatgctaacagtgctagagaatcttccttttttgatcttgtagcttcccaactcactcccaagaccaatggatcaactcctgtgaggggagagacagtggccaagttgaaggtggcaata

SEQ ID NO: 102239 - DNA, 283 bp, Glycine max
gacgacctcaaccaccgcaacctcaccgatctcgccaaaaaattcggtgacatcttcctcctccgcatggggcagcgtaatctcgtcgtggtttcttccccggagctcgccaaggaggttctccacacgcagggcgtggagttcggctcccgcactcgcaacgtcgtcttcgacatcttcaccggcaagggccaggacatggtcttcaccgtctacggcgagcactggcgcaaaatgcgccgcatcatgaccgtccccttcttcaccaacaaggtggtgcaac

SEQ ID NO: 102240 - DNA, 286 bp, Glycine max
ctcgagccgtgcgcttcagcacaatgggtgctacaagtatgtttcggagctatggcgcaagaagcagtctgatgttatgagattcttgcagcgggtgaggtgctgggagtatcgccagcaaccttctattgtccgtttgacaaggtctactcgcccagataaggctcgtcgcttgggtttcaaggctaagcagggttacgtgatttaccgtgttcgcgtacgaaggggtggccgtaagagaccagttccaaagggtattgtttatggacagcccaccaaccaagtg

SEQ ID NO: 102241 - DNA, 283 bp, Glycine max
cccaacgcacacgttgctgccatattgtccagtgcattctatgcaatatggagccttttctcaggcttcgttattcccttgtctagaatacctatatggtggaagtggtactattggatctgccctgtggcgtggaccttgaatggattggtggcttcccaatatggagacaacagggacaaacttgagaatggtcaaagggttgaagaatttgtgaagagttattttgggtttgaacatgattttctaggggtagtggcatctgtggtggctggcttctcac

SEQ ID NO: 102242 - DNA, 281 bp, Glycine max
gttgatttgttcaggtccatggagtcctgaatgcactgagctgggggattttgatgcccgttggtgccataatagcaaggtatttgaaggtgttcaaatctgcagaccctgcttggttttaccttcatgttacatgccaaacctctgcctacatagttggtgttgctgggtggggaactggtctcaaactcggaagtgactcggttggtattaagtataacacccatagagcactcgggatcaccctcttctgccttggaacccttcaggtttttgctctg

SEQ ID NO: 102243 - DNA, 286 bp, Glycine max
ctctggaacagacaagtgggttgcatgggctatcaatcccagcaacaacctcaattcagctatgacgggagcacaagcactggtggctatcataccatctagcggtgccccaaatgcatatacttcttccatccaaaatcccggaaccacactggcagagggagccatctcttataatcactcaggattgacggctacccatcagaacactgaggtcaccatctatgctaccctcactcttcccagtggtaccaccactttggtccacctttggaacgatggtctg

SEQ ID NO: 102244 - DNA, 274 bp, Glycine max
ggcatccaccactctatcccctacaaccccttctcagctatgctcaggaaagagtgggattttcagtccctcacaggcacttcttgtgaagccagtgaagaggcagatgatggggaagagcaagggaatgagaattgcatgccaagccaccagcattcctgctgatagagtccctgacatgggcaaaagacagctcatgaatctgcttcttcttggtgccatttcactcccctctgctggaatgcttattccctacacctacttttttgtccct

SEQ ID NO: 102245 - DNA, 277 bp, Glycine max
tcattatcgatacttatggaggatggggtgctcatggtggtggtgctttctccgggaaggaccctaccaaggttgataggagtggtgcttacattgtgagacaggctgctaagagcattgtggcaagtggacttgccagaaggtgcattgtgcaagtgtcttatgccattggtgtgcctgagcctttgtctgtgtttgttgacacctatggcactgggaagatccatgataaggagattctcaacattgtgaaggaaaactttgatttcagcctggt

SEQ ID NO: 102246 - DNA, 282 bp, Glycine max
  unsure (1)..(282): unsure at all n locations
agataaacaagtagttgagaactaagaagaaggaaatggcttcctcaatgatctcctccccagctgttaccaccgtcaaccgtgccggtgccggcatggttgctccattcaccggcctcaacaccatggctggcttccccacgaggaagaccaacaatgacattacctccattgctagcaacggtggaagagtacaatgcatgcaggtgtgngccagcaattggcaagaagaagttcgagaatctttcctacttgccagacctcgatgatgcccaattggca

SEQ ID NO: 102247 - DNA, 280 bp, Glycine max
gaacaagtagttgagaactaagaaggagaagcaaatggcttcctcaatgatctcttccccagctgttaccactgtcaaccgtgccggtgccggcatggttgctccattcactggcctcaagtccatggctggcttccccaccaggaagaccaacaatgacattacctccattgctagcaacggtggaagagtgcaatgcatgcaggtgtggccaccagttggcaagaagaagtttgagactctttcctacctgccagaccttgatgatgcacaattggca

SEQ ID NO: 102248 - DNA, 282 bp, Glycine max
cttcatcacttcattcaacatttctcccttagcttgtttcaccaatggctgctgcggttagtgctgcagtctcttttccatccaccaagtctacctctcttccaagcaggacctccctcattgccccagagagagttgtgttcaagaaggcttcattgcaaaacagagatgtttctagcagtggacgggtagtttccatcagagctcaagtcaccactgaggcaccagccaaggttgaaaaagagtccaagaaacaggatgaaggtgtggttgtgaacaagt

SEQ ID NO: 102249 - DNA, 280 bp, Glycine max
cagacactgagtatagtggctgagttccagaaagatttaaagttgtgagccttgctgctggctctaatattactcttcttgctgaccagattaaaacatttaagcctgaagttgttggtcttagaaatgagtctttaattgatgaactcaaagaggctttggctgatgtggatcacaaacccgaaatcatccctggagagcaaggagtcattgaggccgctcgtcaccctgatgccaccactgtagttacaggcatagttggttgtgcaggattaaagcc

SEQ ID NO: 102250 - DNA, 150 bp, Glycine max
cttcttctcttgcggctagggttttagcgcacttcttctagatttaaggaagatgggtaaggaaaaggttcacatcagtattgtggtcattggccatgtcgactctgggaaatccactaccactggtcacctgatttacaagcttggagg

SEQ ID NO: 102251 - DNA, 304 bp, Glycine max
caattcccaattcctaattgtttaaacctaattctcatttcttcatcgttcgattcttctcctcctaaagatgcagatcttcgtgaaaactttgaccggtaagaccatcacccttgaggtggagtcctccgacaccatcgataacgtgaaagctaagattcaagacaaggaagggatcccacctgaccagcagagacttatctttgcgggtaaacagcttgaggatggtcgaacccttgccgactacaacatccaaaaggaatccactctccacctcgtgcttcgctcaggggtggcatgcaaa

SEQ ID NO: 102252 - DNA, 295 bp, Glycine max
agaaactggagtggtgctctgaataatccctgtcgcgtaaagactattcctcgtcccattcctgaaaagaagtggtaccttacaccctctgtggtttctctgatgggaggactgctaccctttggcagcatattcattgaaatgtattttgtattcacttccttctggaattacaaggtgtactatgtgtatggctttatgctgctagtctttgtgattcttatcatcgttaccatttgtgtgacaattgtggggacagcttattgttaaatgctgagaactccatggcatggac

SEQ ID NO: 102253 - DNA, 122 bp, Glycine max
cgaaactggagtggtgctctgaataatccctgtcgcgtaaagactattcctcgtcccattcctgaaaagaagtggtaccttacaccctctgtggtttctctgatgggaggactgctaccctt

SEQ ID NO: 102254 - DNA, 304 bp, Glycine max
agttaatttgtctttctctatctctatcggtcatgggtgcttttgcttttgatgaggaaaactcctccaccgtggctccggcaacactctacaaagctctgacaaaagatgctgacactatcatcccaaagattattggggccatccaaactattgaaatcgttgaaggaaatggaggacccggaaccgtcaagaagataacagctagtgaaggtgaccaaaccagtttcgtgctgcaaaaagtggatgcaattgacgaggctaacttggtatacgactacagcatagtgggaggacggggttg

SEQ ID NO: 102255 - DNA, 292 bp, Glycine max
tgaacactggctatggtgcccgtactccggaggtgaaatgcgcaagttggaggcttgctgtggaagcacacaacatctttggctttgagaccattcctgaagagtgcgttgaagcaacaaaggaatacatccatggcgaacaatatagatcagactccaaaacagttaaccaacaagcttacttttatgccagagacctcgaagtccatcccaaggacacatttgtgttcagtatagatggcaccgtactctctaatattccatactacaaaaaacatggataggggtggag

SEQ ID NO: 102256 - DNA, 302 bp, Glycine max
tggaagcagaagtgaagatcgaaacggtgaagaagcctaacagcagcaaagagcgttagagctgatcgcttgagataaggtcaatttgcagttgcacgcttcccaattcgcacacccatatcacatcacatctttctccacacgcaacgcaacctttttataatcaatcatcctcactcgcatttgaagacgcagcaatctttcccgtgaaaagggaccatggaggcaaattcaggtgccagcgaccgaatttcgagaatcgccggccacctccgcccccagaggaggatgatgtttgtttg

SEQ ID NO: 102257 - DNA, 293 bp, Glycine max
agatactggagtggtgctctgaataatccctgtcgcgtaaagactattcctcgtcccattcctgataagaagtggtaccttacaccctctgtggtttctctgatgggaggactgctaccctttggcagcatattcattgaaatgtattttgtattcacttccttctggaattacaaggtcgtactatgtgtatggctttatgctgctagtctttgtgattcttatcatcgttaccatttgtgtgacaattgtggggacatactttttgttaaatgctgagaatacactggcaa

SEQ ID NO: 102258 - DNA, 301 bp, Glycine max
  unsure (1)..(301): unsure at all n locations
caccttgcttgtgcattttcctagacttgtaaattcgtctgataaagattatgagacgtatttggatggcgtatttggtgatcataaacccagttacggagacctcattaaaggggttgagggtgtgacaggaattctgatggtgattttgatggcaatagcatttactcttgcaacaaaatggttcaggagaaatctcgttaagctccctaaaccgtttaataggctcactggtttcaatgcgttctggtattcctcacatctatatgtgantgttatgtctgtcactatcatggtgtat

SEQ ID NO: 102259 - DNA, 299 bp, Glycine max
tgacaacccagagagcgcgtcttaataaacgctcttctctgaaaacccccatttcttttcttctttcttcttctctttcgcttcttcgatcttcgatcttcgtcgctgaaaatgagagagtgcatttcaatccacatcggccaggccgggattcaggttggaaacgcctgctgggagctttactgcctcgaacacggcattcagcctgatgggcagatgccaagtgacaagaccgttggtggaggtgatgatgctttcaacaccttcttcagtgaactggggaggaaagccgtgcccgt

SEQ ID NO: 102260 - DNA, 205 bp, Glycine max
atatcactggagtggtgctctgaataatccctgtcgcgtaaagactattcctcgtcccattcctgaaaagaagtggtaccttacaccctctgtggtttctctgatgggaggactgctaccctttggcagcatattcattgaaatgtattttgtattcacttccttctggaattacaaggtgtactatgtgtatggctttatgctg

SEQ ID NO: 102261 - DNA, 287 bp, Glycine max
cgatactggagtggtgctctgaataatccctgtcgcgtaaagactattcctcgtcccattcctgaaaagaagtggtaccttacaccctctgtggtttctctgatgggaggactgctaccctttggcagcatattcattgaaatgtattttgtattcacttccttctggaattacaaggtgtactatgtgtatggctttatgctgctagtcttgggattcttatcatcgttaccattgtgtgacattgtggggacatactttttgttaaatgctgagaacaccatggc

SEQ ID NO: 102262 - DNA, 293 bp, Glycine max
tggaagatctgtcaaaggtggataggaaaaggacaccttggctgcttgtgttatttcatgtgccatggtataatagtaacaaggctcatcaaggtgcaggagatgatatgatggcagctatggagccgttgctttatgctgctagtgttgatttagttatcgctggtcatgttcacgcttatgaacgttcagtatgtctttatggtttagcattttatcctctttgtaagcaccatttagtgggaaccgggttttaatactctctctgattgtcagaacgtttgtataatgga

SEQ ID NO: 102263 - DNA, 290 bp, Glycine max
atatactggagtggtgctctgaataatccctgtcgcgtaaagactattcctcgtcccattcctgaaaagaagtggtaccttacaccctctgtggtttctctgatgggaggactgctaccctttggcagcatattcattgaaatgtattttgtattcacttccttctggaattacaaggtgtactatgtgtatggctttatgctgctagtctttgtgattcttatcatcgttaccatttgtgtgacaattgtggggacatactttttgttaaatgctggaactacactggc

SEQ ID NO: 102264 - DNA, 294 bp, Glycine max
tacatttcctaaacaccacaacaattggagttgtttctctaatcttcctcttgtgtttgtttttgtatggtcccttaaaaaaagttcacggtagcagcaaagaggctcccacagttggtggtgcatggccaatatttggccacctcccattgttgattggttctaagtcacctcataaagccttgggtgctttggctgagaagcatggacccttgttcaccatcaagctcggtgccaagaaggctttggtagttagcgactgggaaatggctagggaatcttcacaacgaacga

SEQ ID NO: 102265 - DNA, 299 bp, Glycine max
ccctgtttcccttctccggccaccgtaatggatttcactccgccgccgatcgaggacggtttcaccgccgagaaactcttcacgcagggcttctcctacacatacgatgacgtcatctttctcccccactacatcgacttcgctgccgacgtcgtggacctctccacgcgcctcacgcgccgccttccccttgccgtgccgtttgttgcctctccgatggacaccgtgtcggagtccgccatggcctccgccatggcctccctcggcggcatcgcgtcgtcactccaacgtcccgccgc

SEQ ID NO: 102266 - DNA, 299 bp, Glycine max
tacagcattcttctgcaattcaaatcaaattttcaaaccatggcttcctccaccaacgctcttcctcccaccggcaacggcctcatcgtgagcttcggcgagatgctcatcgatttcgtccccaccgtctccggcgtgtcccttgcggaggctccgggcttcctcaaggcccccggcggcgcccccgccaacgtcgccatcgccgtcgcgaggctcggcggaaaggcggcgttcgtcggaaagctcggcgacgacgagttcgggcacatgctggctggaacctgaaggagaacgacgtc

SEQ ID NO: 102267 - DNA, 269 bp, Glycine max
atacaagaaggagcttgtctgagaaggaaacagatagaagctttgggttgagaaatttcaggtacattgagaccatcaaagaagctttggaaagagaatgccctggagttgtttcatgtgctgatatcctcgttctctctgccagagatggcattgtttcgctaggaggtccccatatccctcttaagactggaagaagggatggaaaaggagcagagctgatgtggttgagcagttcctcccagaccacaatgagtccatttctgcag

SEQ ID NO: 102268 - DNA, 162 bp, Glycine max
tgttgaaatggagtggagtgagcattgaggaatggtggagaaatgagcaattctgggtcattggtggtgtgtcagcacatctctttgctgtcatacaaggtcttctgaaggttttggctggaattgacaccaacttcactgttacatccaaggaagcagttg

SEQ ID NO: 102269 - DNA, 294 bp, Glycine max
aaggattgcaattttggtttccaaagcagcacttcaatttatccagagcgtgcaactaaacgattacgaaactgccagaggaagttaaagatgcaggttttcaaatctgcggcgatgaattagggtctattgttgaagtccatgatgtaaagaagttcaaacatcatggtggggttgatggcattgcagagaagctttctacatcaaccactgagggtcttaacagtgatactgagttactgaataggagacagcagatatatggaatcagcaaatttactaaagtgcagctac

SEQ ID NO: 102270 - DNA, 288 bp, Glycine max
atccacgttaaatcatggaaccgccattgcagcaaaaatcgccgcaaccgccaccacgaaccgccaccatcctcgggaagtaccagctgacgcgcttcctcggccgcggaagcttcgccaaggtctaccaggggagatccctcgtcgacggctccgagtcgccgtgaaaataatcgacaaatcgaaaaccgtggtcgccggcatggagccacgtataatccgcgagatcgacgccatgcgccgcctccaccaccaccctaacatcctcaaaatccacgagtgctcgca

SEQ ID NO: 102271 - DNA, 295 bp, Glycine max
aattggctcagaagaaaagaaaagcaaccaaaaatggttctcacatccactgccacacacccagatgaaaaagaccagagcctaaactatacttttgcttccagatatgtgcgtgaacctattccaaagttcaagatgccggagaaatccataccaaaagatgctgcttatcagataataaacgatgagttgatgttggatggtgcaccaaggctcaacttggcctcgtttgtgaccacttggatggagcctgagtgtgacaagctcataatggcttcactaacaagaactacgt

SEQ ID NO: 102272 - DNA, 284 bp, Glycine max
cttctcttgcggctagggttttagcgcacatcttctagatataaggaagatgggtaaggaaaaggttcacatcagtattgtggttattggccatgttgactctgggaagtccactaccattggccactggtctacaagcttggaggcattgacaagcgtgttattgagagatttgagaaggaagctgctgagatgaacaagaggtctttcaagtatgcctgggtgcttgataagcttaaggctgagcgtgaaagaggaatcacaattgatattgcatgtggaag

SEQ ID NO: 102273 - DNA, 295 bp, Glycine max
cttaattctctctactactgctagctgtgacttgttttgagatcaatcaaatcgcattggtatctgaaatcaggaaagatggttagcgtactgagatcaggcaggcacaaagggcagaaggcccagcaaccatccttgccattggaactgcaaacccaccaaaccgtgttgatcagagcacctatcctgattactacttcagaatcaccaacagtgaccacatgaccgagctcaaagagaaattcagcggatgtgtgacaagtctatgatcaagacggatatatgtacctaaacg

SEQ ID NO: 102274 - DNA, 296 bp, Glycine max
ctcaaacacacaagccaaacccaaacacaacaacacaaagaaaaaaagagcacaaacagaccaattccaacggttgaatttttaggctgaagacaccccaccgacgttagtcaaataaaacatgtcttgctccgtcgcggtttccaattcgccggtgttctctccttcttcttccctcttctgctcgaagccctccatcatctcttcttcgccggaatccctctcgctctctctctcgcatctcaaaccttccaactcttctacgacgtcgctatgttctcaccctctgctgctgc

SEQ ID NO: 102275 - DNA, 290 bp, Glycine max
tattcatttgaattagggttactctttttcttcgtttcatcatggacgctcagagagctctactcgacgaactcatgggtgcagcgcgcaacttgacggaggaagagaggaaggggtacaaggaagtgagttgggacgataaggaagtgtgtggattctacatggtgcgcttttgccctcacgatctctttgtcaacacgcgcagtgatctcggaccttgccccagaatacatgacccgaagttgaaagaaagttttgagaaatctccaagacatgtgcatatgtaccga

SEQ ID NO: 102276 - DNA, 292 bp, Glycine max
ctgagcttcaggaccaagatatattaaatgccatcaaccaagagcttagagtccctggatggggggatgccaacaactcaaattactgcacttggcaaggtgtcagctgtggtaaccactcaatggtggaaggcttggatctgtctcaccggaatcttcgaggtaatgtaactctaatgtctgagctcaaagctttgaagcggctagatctttcgaataataactttgatggatcaattcctcctgcttttggaaatttatctgatcttgaagtctagatttgtcttcaaat

SEQ ID NO: 102277 - DNA, 295 bp, Glycine max
attcgcacgcattgcttcgcctcacaacagcagctgcagcagcaatggctcccaaacgaggtggaaaggctccggctcttgccgctaagaagaagcctgagaaggtcacgaatccgttgttcgagaagcgtccgaagcagttcggaatcggaggggcgttgcctccgaagagagacttgactaggttcgtgaagtggccaaagaatgttcaaattcagaggaagaagaggattctgaagcagaggttgaaggttcccccagctttgaaccagtttaccaaactcttgacaaaaac

SEQ ID NO: 102278 - DNA, 299 bp, Glycine max
atttccttgatatcttagttatctaattacctcaattaatcccttaattgcaagcatcatggctgaggagaaacaccaccaccacttccaccaccacaagggcgatgatgtgcctggcgaggttgattataagaaggaggagaagcaccacaagcatcttgagcaccttggggaacttggtgctgcggctgccggtgcttatgccttgcatgagaagcatgaggccaagaaagacccagagcatgctcacaggcacaaggtagaagaggagattgcggcacagctactgttggtgctgg

SEQ ID NO: 102279 - DNA, 291 bp, Glycine max
cctagcgcttattctctcgcattccgtggagatctagtgcttctgctgcaagacctcgctgaaaattagggtttcgattcggaggtagacgaagatgttcggaagggctccgaagaaaagcgacagcaccaggtactacgaaatcctcggcagtttccaagaacgcttcgccggatgacttaaagaaggcttacaagaaagccgccattaagaaccatcctgacatatgcggggatcccgagaagtttaaagagcttgctcaagcctatgaggttctgaggacctgagaag

SEQ ID NO: 102280 - DNA, 293 bp, Glycine max
gatgaaatgaagcttcaaagaagtaagttagataaggagaaacaagaagctgatgagaataaaaaacatcttgaaaggcaaaggatggaaatgcaagaggacatagatgtacttgttgacctcaacaggaagctgaaaaatcagcgggaacaatttattgtggaaagacgacgctttattgagtttgttgagaaacttcggagttgccagaactgtggggaaatgatctctgaatttgtgctttctgatttacaatcctctgttgacattgagaactggaagtagcatctctc

SEQ ID NO: 102281 - DNA, 146 bp, Glycine max
gcttaacacatgcaagtcgaacgttgttctcggggagctgggcagaaggaaaagaggctcctagcgtgaaggttgcttgtctcgcccaggaggtgggaacagttgaaaacaaagtggcgaacgggtgcgtaatgcgtgggaatctg

SEQ ID NO: 102282 - DNA, 291 bp, Glycine max
cgcagagaaagcaaaagacagtcgcagcattcgtcctggaaaggggaaaatgcgtaaccgtcgctacatctcacgccgtggaccactcatcgtgtacggaacggaaggagccaaagccgttaaggccttccgtaacgtccccggcgtggaagtcgctaacgtcgagaggcttaaccttctgaaacttgctccaggaggacacctcgggaggtttgtggtttggacaaaaagcgcttttgagaagctggattcgatttatgggtcttttgataagccctgagaagagaaggg

SEQ ID NO: 102283 - DNA, 203 bp, Glycine max
  unsure (1)..(203): unsure at all n locations
atccctttctgtgagggaattatggtaattgatatcgaggttttgactcatggattctgatcgccccagaaaaccttccaaaaatttagttcactctcgcttcttccttttcggcttctattgctgggattgggagttcttaaccgctctcctcctttttagttgttccccttaatcttgttcctcaaanttttntttttncc

SEQ ID NO: 102284 - DNA, 292 bp, Glycine max
gtttcagttaactgttaatgtggttgcattaatagtgaatttcacatcagcctgcttaacaggaactgcacccctcacagctgttcaactcttgtgggtgaacatgataatggacacactgggagcacttgctcttgctactgaacctccaaatgatgatttaatgaaacgttcacctgttggaaggaagggaaatttcatcagcaatgtcatgtggaggaacatcttaggtcaatccttgtatcagtttatggtgatatggtttcttcagtcagaggaaaatcaatctttt

SEQ ID NO: 102285 - DNA, 286 bp, Glycine max
ggtaacccactttgagaattctcataaagttgcatgcttttggattggaaggttgttgcaatggggaaggttgtgttgttgtttctttgcatggtattggtggtggtgcctttggcttgtactgattcaattcagaagcttgaggttcagaagcacttgaagaacttgaataggcctcctgttaggtccatcaagagtcctgatggagatgttattgattgcatccatgttacacaccagccagcttttgatcaccctgacctcaaaaatcaaagattcagatgaa

SEQ ID NO: 102286 - DNA, 286 bp, Glycine max
tgttcatttctacacatccctagctctgtcgttccgtcgttgacgatggcgtttcgggtgcgaaccctgacctccgctctctctttcttctctctctcttgtccatcgcttccgccaatgtcttcttcgaagagcgtttcgatgacgggtgggaaaatcgatgggttaaatcagattggaaaaaagatgagaacgtggctggggagtggaaccacacctctggtcaatggaatggagacgctaatgacaaaggtattcaaaccagtgaggattcagattctatgct

SEQ ID NO: 102287 - DNA, 285 bp, Glycine max
gctggatgggttggcttctaggtctgctgaatactacaagcaaggtgctcgatttgccaagtggaggacagttgttagcattccatgtggtccttctgcattagctgtcaaggaagcagcgtgggggcttgcacgttatgctgctatctctcaggacaatggtcttgtgccaatcgtagagcctgaaattcttcttgatggagaccacccaattgagaggacgctggaagtggccgagaaggtctggtcagaagtcttcttctatttggctgaaacatgtctttt

SEQ ID NO: 102288 - DNA, 289 bp, Glycine max
tcttaaaagagcctttgctttttctttaggcctttccgaattaagtacttgtttcattttctctcgaagcaagaaaaatgttcatcgagagtttcaaggttgagagtcctaacgtgaagtacacagagactgagattcagtccgtgtacaactatgaaaccactgaacttgttcacgagaacaagaatggcacttatcagtgggttgtcaagcccaaaactgtcaaatatgaatttaaaaccaacacccatgtccctaaactaagggtaatgcttgcgggtggggtgga

SEQ ID NO: 102289 - DNA, 286 bp, Glycine max
attttggttcatggcgtgggcgaagaagccaggtgactcaaataatgtaggctttatgagatggttagcgttggtgttggtgttggtgttgtcatcgggcttttggtgtgtttcgggtgtgaaagaaggaaaaaggaatgcgtacgcgacaatgatatacgtaggtacgccgagggactacgaattctacatagccatacgcgagcttctgaaatcgctggctacgctcgacgctcaagccgatcttgttgtcattgcttcacttgatgtcctctcgctggattcg

SEQ ID NO: 102290 - DNA, 289 bp, Glycine max
atcattcatgaggttaagatcaatgtttcacatggctcttctttccattgcactgagccagggtggtttagggtgtgctatgccaacatggatgatatggctgtgcaaattgcattgcaaagaattcgaaccttcgtgcttcaaaacaaggaggtcatggttcctaacaagaaacattgctggcacagtaacttgaggttgagcctcaaaaccagaaggtttgatgatatcatgatgtcacctcactcccctatacctcagtcccctttggttaaagccacaatttgag

SEQ ID NO: 102291 - DNA, 281 bp, Glycine max
ggataccgtgatcaggttttgcactctggtgaaggttcaatacatgctgtgaaatggagagcaagtcttgttgcttgggctaatgatgcaggagtgaacgtttatgatactgccaatgaccagcgtattacatttattgaaaaaccacgggggagcccacgccctgagcttttgcttcctcaactggtttggcacgatgacagcctcttagttattggctggggaaaatctgtcaaaattgcttcaattaggacaaatcaccaaaaagcagccatgggtca

SEQ ID NO: 102292 - DNA, 265 bp, Glycine max
tgggaactttgagctcatggagaagagactggagccagagaacttcagatccagcatgtgctaggctcctgtattcggcctctgcactgaatttagcaaccagagtttgctttttagaccatcacgacaccagattaggagcacaaaagatacgagtccctgaagtgggcctcctatcatcgatatcagaggcacaatctgcatcaccgaaagcattaatgctgagagggtgtatggtggtggcatgcaggtaggtgcgaccatg

SEQ ID NO: 102293 - DNA, 281 bp, Glycine max
gccatttgggagttaggttctgcacgctctgcttccagcgagtgttctttcttcgtttcaacaccttaatttgcacacgctgcttcttcagcttgagaaatggcacaagaaacctttctattcacatctgaatctgtaaacgagggtcaccccgacaagctgtgcgaccagatctctgatgcagtgctcgatgcgtgccttgaacaggaccctgacagcaaggttgcctgtgagacatgcaccaagaccaacatggtcatggtctttggagagatcacaac

SEQ ID NO: 102294 - DNA, 281 bp, Glycine max
ccagaattctgtaccattggagaaaagccaggactgcagttgggctcctatttatgttaggacctccaactttagactcccttctgataataaagtgcctataatcatgattggtcctggcactggattggctcctttcagaggtttcttgcaggaaagattagctctgaaagaaggaggagctgaactcggcccctcagttttattctttggatgcaggaaccgtcaaatggactacatctatgaagacgagttgagtcacttcgttaatactggcgcac

SEQ ID NO: 102295 - DNA, 271 bp, Glycine max
ctcggaagcaaacgcagcattgggagatagatagagagatagatagagagagagagaaagacccttacccttctctatcgctcgctttcctttgacgcttctgacccttgctttgtctgcgtcttccttctttctttctttctttctctgtgtgtcgtaatggctctcccagactcttcttcccgtcgcaactccctgatcccctccttcatctactcctcttcctccaaaacgctccctctccaccacatgctcaacaccgcctccgctg

SEQ ID NO: 102296 - DNA, 263 bp, Glycine max
  unsure (1)..(263): unsure at all n locations
gtttgtgcagattcggttctactgtttgcaaaaccgagggagctgcgcgtcgtttatggcgaaggcggccattaactctcacgcgcgggctctgtatgcgctggccgtgattcagttcaacggcagcggtggcacgaagagcgacaaggacctacgcgccggcgtggcgctgtgcgccgnagcggcgtttcttggccacgtcgatgcgatgcgcgaactcggccactgcctgcaggacggttacggcgtgcggcagaacatcg

SEQ ID NO: 102297 - DNA, 284 bp, Glycine max
ttgaattttcgtcattcttactttaccttccttcctcaccttctaattctgcaacaagttccaaactttcaaatctcaccgccccaaaaattcttttttggttacccatttgactttagcctctgcaacagagtctcagatctctgcattccaattcccatggctggtcgctatgacagtaaccccttcgatgaggaagaagttaaccctttctctaatcctggaagtgttcccgctgccactaattcaaggcttccacctcttaagccagaacctgttgatta

SEQ ID NO: 102298 - DNA, 282 bp, Glycine max
cgcggagtacatttctcttgccctggttgccaacaaacttgccctcaacaccgtgattgttgtggagcaggaggaggaggttgatttgatcgttgaattgagcaagaagctctgtattaagcccgtgattgggattcgtgcgaagcttcggaccaagcattccggccatttcggtgggacttcaggagagaaggggaagtttgggctgaccaccgctcagattcttagggttgtgaagaacctggacctcgcgggcatgctggattgcctgcaactgctgca

SEQ ID NO: 102299 - DNA, 281 bp, Glycine max
agaaactggagtggtgctctgaataatccctgtcgcgtaaagactattcctcgtcccattcctgaaaagaagtggtaccttacaccctctgtggtttctctgatgggaggactgctaccctttggcagcatattcattgaaatgtattttgtattcacttccttctggaattacaaggtgtactatgtgtatggctttatgctgctagtctttgttattcttatcatcgttaccatttgtgtgacaattgtggggacatactttttgttaaatgctgagaa

SEQ ID NO: 102300 - DNA, 280 bp, Glycine max
  unsure (1)..(280): unsure at all n locations
atatactggagtggtgctctgaataatccctgtcgcgtaaagactattcctcgtcccattcctgaaaagaagtggtaccttacaccctctgtggtttctctgatgggaggactgctaccctttggcagcatattcattgaaatgtattttgtattcacttccttctggaattacaaggtgtactatgtgtatggctttatgctgctagtctttgtngatacntatcatcgttaccatttgtgtgacaattgtggggacatactttttgttaaatgctgag

SEQ ID NO: 102301 - DNA, 283 bp, Glycine max
atatcctggagtggtgctctgaataatccctgtcgcgtaaagactattcctcgtcccattcctgaaaagaagtggtaccttacaccctctgtggtttctctgatgggaggactgctaccctttggcagcatattcattgaaatgtattttgtattcacttccttctggaattacaaggtgtactatgtgtatggctttatgctgctagtctttgtgattcttatcatcgttaccatttgtgtgacaattgtggggacatactttttgttaaatgctgagaact

SEQ ID NO: 102302 - DNA, 285 bp, Glycine max
tagaaaccatctcttcctctctcagctgtctttttaatcccccttttctcattttcccttttgcaattttcactaacagtccttctttctatcttagctctcagaaacttcaataacaatgaagaaagttgtgttgaaggtggaagtacatgaagacaaaatcaagcaaaaagctatgaaggttgtctctggcatttcaggggttgagtcagtttctgtggacatgaaagacaagaaattgaccgtaattggggacattgatccagtaaaagtagcagccaagct

SEQ ID NO: 102303 - DNA, 273 bp, Glycine max
aagccctcaaagcataatctcactcgtattagcgttgctgagagagaaagacaaatggcaacaagcgaagaagtggttgctaccggcggaggagccgcgctggaggcagggctgaagcacaaactggagagaaaatggacgttttggtgcgacaaccaatccaaacccaaacagggcgctgcttggggtacctctcttcgcaaggtctacaccttcgacaccgctgaagagttctggtgtttgtatgatcaggtattcaagcccagcaagttg

SEQ ID NO: 102304 - DNA, 280 bp, Glycine max
acttgctccctcagaagcgaagaagaagccacagagaactagtctcctactctcacccgcaagaaaaaaatggcatctcacatcgttggatacccccgtatgggtcccaagagagagctcaagttcgcactcgagtctttctgggatggcaagcgcagcgccgaggatttgcagaaggtgtcttctgatctcagggcatccatctggaagcagatggctgatgctgggatcaagtacatccccagcaacactttctctcactatgaccaggatctcgacg

SEQ ID NO: 102305 - DNA, 283 bp, Glycine max
ctgctcgagcacatttcagcctatgaaaaccagaacaacaagggtgtagaaattgagaagataatacctatggatgctgctccccttggtgttgccatccagggctaatacaaagatgtgacaaagaataatttgggcgacaatgaagataactaagctaaaggtgaatgaaaaatttgcctgcagtgtaatttcatctgggcaaagcttttatagtttatagttataaggctttctaaaaagtgttgcgtattgtattatcttgaatgctgtgatttgaagt

SEQ ID NO: 102306 - DNA, 283 bp, Glycine max
attcttctcactcttcagatctctctcccttccttccatcccaaccacaaggttgctgagaagacataaaaaatggtgaagatttgctgcattggagctggctatgttggtggcccaaccatggctgtaattgccttgaagtgtcctgagatcgaggtggtcgtggtggacattgctgcaccgcgaatcaacgcgtggaacagcgaccacctcccgatatatgagcctggccttgatgatgtggtgaagcagtgcagggggaagaatctcttcttcagcactg

SEQ ID NO: 102307 - DNA, 283 bp, Glycine max
ctaatcttcgttaagaccctcactggtaagaccatcactctcgaagtcgagagttcagataccatagacaatgtaaaggccaaaattcaagacaaggaagggatcccaccagatcagcaacggctcatttttgctggcaagcagcttgaggatggacgtacccttgctgattataacatccaaaaggagtccactctccacttggttcttcgtctccgtggtgggatgcaaatctttgttaagaccttgacgggaaagacaatcaccctagaggtcgagagct

SEQ ID NO: 102308 - DNA, 289 bp, Glycine max
  unsure (1)..(289): unsure at all n locations
gagcttggaaaattagcctcacaaaagcaaagatcaaacaaaccaaggacgagaacacgatgttgcttgaacttgcacttggtttattggttttggctctgtttctgcacttgcgtcccacacccactgcaaaatcaaaagcacttcgccatctcccaaacccaccaagcccaaagcctcgtcttcccttcataggacaccttcatctcttaaaagacaaacttctccactacgcactcatcgacctctccanaaaacatggtccttattctctctctactttggctcc

SEQ ID NO: 102309 - DNA, 286 bp, Glycine max
atgcgattaagactgagcaatggtgaacctgagaagcccttgatagttcatgttggacggcttggagttgagaagagtttagattttctcaaaagtctcatggataggcttcctgaagcacgaattgcctttatcggagatggaccttacagagaggaactagagaaaatgtttgaaggcatgccagcagtgttcacaggaatgttaggaggggaagaactatctcaagcctatgcaagtggagatgtctttgtgatgccgtcagagtcagagacacttggccttg

SEQ ID NO: 102310 - DNA, 283 bp, Glycine max
catcgagcgaatcggctcgagggtttctagagagagaaagttacttatagagagagaaaccgcgctgctgcttcttctgctgctgcttcgacagtgagaagagagagagaagcgctcttctccgtaccgtttctagagagagaaactgatggccggagttaatccgaacggcgtcgccgattttccggcgactccaacgcacggcggacagttcattcagtacaacatattcggaaacctcttcgaggttacggcgaagtaccgtcctccgatcatgcctgtc

SEQ ID NO: 102311 - DNA, 277 bp, Glycine max
attcttctcactcttcagatctctctcccttccttccatcccaaccacaaggttgctgagaagacataaaaaatggtgaagatttgctgcattggagctggctatgttggtggcccaaccatggctgtaattgccttgaagtgtcctgagatcgaggtggtcgtggtggacattgctgcaccgcgaatcaacgcgtggaacagcgaccacctcccgatatatgagcctggccttgatgatgtggtgaagcagtgcagggggaagaatctcttcttca

SEQ ID NO: 102312 - DNA, 247 bp, Glycine max
ctacaagatagagcttgtctgagaatgcaatagatagatagctttggctgggcaatttcatgtacattgagaccatcaaagaagctttggaaagagaatgccctggaggtttttcatgtgctggtatccacgttctctctgtcagatatggcattgtatcgctaggaggtacccatatcactcgtaagactggaagcagggattgtacaatgctcagagctgatgtggttgcaccagttcctcccag

SEQ ID NO: 102313 - DNA, 283 bp, Glycine max
cgaccatgtagagcaagtaattgatggacttgaccaatctgtgaagaacatgaagaaaggggaaattgcattgctgatcatacagcctgaatatgcttttggtccatctgggtcctctcaggaattggctaatgttcctcctaattccactgtttactacgaatgtgagctgctttcctttgtaaaggaaaaggaatcgtgggatctgaatacacaagagaagattgaggcagctgggaagaaaaaggaagaagggaatgccttttttaaggttggcaaatat

SEQ ID NO: 102314 - DNA, 281 bp, Glycine max
atcctaagtctttgggaatagtgctgcaatggcttcaagtcaggaggaggtgacccttttgggagctactggaagcccatttgtgtgcagggttcatattgccctcaagttgaagggagttcaatacaaatatgtcgaagaaaatttgaggaacaagagtgaactgcttctcaaatccaacccagttcacaagaaggttccagtgtttattcacaatgagaagcccatagcagagtctcttgtgattgttgaatacattgatgagacatggaagaacaacc

SEQ ID NO: 102315 - DNA, 278 bp, Glycine max
tctctttcgctcgacaaaccctagcgatttgatgctgtgcgatgcgactcgctgagttgaaccggataaagatctgagtcgcggtgatcggttcgacgccctcatgggtgctgcgggctccaagctcgagaaggctctcggcgaccaattccccgaatgtagagcgttactttggcctcgagaattttggcaatacttgttactgcaacagcgttttgcaggcactatacttctgtgttccatttcgagaacaattgctagaatattatgcaaataac

SEQ ID NO: 102316 - DNA, 285 bp, Glycine max
cacgggcacagattgcatagggacatccattcggcatgggtgtagtagcattgtaaatctggaacttctccctcagccaccacaaactagagccccaggcaacccttggccacagtggcctcgcatataccgagtagattatgggcaccaagaaggtgcagcaaaatttgggaaagatccaagatcttatgaggtattgactaagcggtttgtgggagatgaaaatggagttgtgaagggacttgaagtaatacgtgtcctctgggagaaggatgaaactgggag

SEQ ID NO: 102317 - DNA, 279 bp, Glycine max
attcttgagttcatggaagggaaaccagatcttgttattggaaattacactgatggaaatttggtagcatcactaatggctagaaaacttgggataactcagggaactatagcacatgctttagagaagaccaagtatgaagactcagatgtcaagtggaaagagttggaccccaagtaccacttctcgtgtcaattcatggcggatacagtggcaatgaatgcatctgatttcatcataaccagcacataccacgaatgtcgtggaagcaaagataga

SEQ ID NO: 102318 - DNA, 280 bp, Glycine max
cttgcagtcgcagaggaaaaccctagctagtagtctcagttcgcttgagagagaaaaaatggcagagggtctcgttctccgcggaaccatgcgcgcccacaccgacgtcgtgacggcgattgccactcccatcgacaactccgacatgatcgtgacggcgtcgcgcgacaaatccatcattctctggcacctcaccaaggaggacaagacctacggtgtcccccgccgccgcctcaccggacattctcacttcgtccaggacgtcgtcctctcatccgac

SEQ ID NO: 102319 - DNA, 283 bp, Glycine max
ttaccatcaagtttcagttccaaacaaaacccatcaaagtctttctccctcagtgatcatatattcattcagttctatacaaaatcctcaaaaactcttcctctctgccatgaccatggaatacagaaccttagaactcaacatcatatccgcaaaggacatcaagaatgttaatctcttctccaagatggacgtatacgccgccgtttcgctctccggtgaccctctccaccctcagggcgccaccacccacgtccacaaagacgccggcagcaaccccacg

SEQ ID NO: 102320 - DNA, 281 bp, Glycine max
ataatccaaacaacaatggacctccgtgaatcgataagcaaccaaaccgacgtcgctctgagcatcacaaagctcctgttgtcgaaaaacgctcgggacagtaacctcgtgtactcgccgctgtcgttgcacgttgttctgagcatcatcgcttctggctccaagggccccacactcgatcagcttctctccttcctccgatccaagtccaccgaccatctcaactccttcgcctctcagctcgtcgccgtcgtgctctccgacgccgctcccgccggcgg

SEQ ID NO: 102321 - DNA, 278 bp, Glycine max
atcgatcttcgcgctgttgctcaccttctacctctttgtgaaggcggtgaacactggctcgctggcgtggaccctgggttcggcgttcgggtatttctacatggtgtcggcgtggggaggttatgtgtttataataaacttggtgccgctttatgtgctggtgctgcttgtgacggggaggtactcgatgaggctctatgtggcgtataactgcatgtatgtgttggggatgctgctcgccatgcagattaggtttgtggggttccagcatgttcagt

SEQ ID NO: 102322 - DNA, 277 bp, Glycine max
ataaggttggctgcgatatctcagacatttaacatccgagttgagttccacggcgtgcctgttttagctccagatgtgacaaaagacgtgcttgatgttaggcctggtgaggctttggctgtgaacttccctttgcaactccatcatacagctgatgaaagtgttgatatgagtaatccaagggatggacttttgagattggtgaaatcactttctcccaaggtaactacattggttgagcaagagtcaaacacaaataccactcctttcttcaaca

SEQ ID NO: 102323 - DNA, 125 bp, Glycine max
gttttgtccatttgaaattaacaagtagcaaagatgtttggaatcatcggaggagacaagggccacaagataaaggggaacttggtgattatgcgaaaggatgtgttggatatcagcagcattac

SEQ ID NO: 102324 - DNA, 276 bp, Glycine max
gataaccataaccataccatagcttacaaattaagctccgctcactctctttctctctagaatccatggcagccattggtctgaatggcgtaaaggttgggacgacgtcgtctcaggcgtaccttgaaggcaaggcagtgaaggagacgatcgcgttgatggctgaactgtgtcgccatttctacacccttggatgggtgacagggacaggtcgtcacatctccatgaaggtccacgatgactgcatccccaggtctcgacagctcatactcatgg

SEQ ID NO: 102325 - DNA, 279 bp, Glycine max
aacagcaaggcagtaagagaggccatgtgctttttaatggaccccaacctagggaagaagctgtgttatgtccaatttccacaaagatttgatggtattgatcgccacgatagtcttgctaagcgaaacacagtgttctttgatatcaatatgaaagggcttgatgggattcaaggtccagtatatgttggtactggaactgtgttcaacaggcaggcattgtatggctatgatccaccagtatctgagaaaaggccaaagatgacatgtgactgttgg

SEQ ID NO: 102326 - DNA, 92 bp, Glycine max
actctccgcggtttcccatgtacgaaaacgacttcggctggggcagacccgttgcgattcggagtgggaaagcgaacaagttcgacggaaag

SEQ ID NO: 102327 - DNA, 271 bp, Glycine max
agctcccaacacacaaccctgatgcacccgttatgttggaccgtatattgcgcctcttggcttgctacaatatcctctctttttctcttcgcactctccctcatggcaaggttgagagcgctctatggtctcgccactgttgctaagtacttggtcaggaacgaagatggtgtctccattgctgctctcaacctcatgaaccaggacaaaatcctcgtggacagctgggactatgtgacagatgcagtccttgaaggtggtactccattta

SEQ ID NO: 102328 - DNA, 279 bp, Glycine max
atgttgtaactttttgattcctaaattctctaaaattcgaaattctaatttcgttaggggaaagagattgtttgtgtgtgagtgagtatggctggagaaggcgagggtcctggtatcggaatcgatttgggaacgacgtactcttgcgtcggcgtgttggcacacgaacgtgcctgcaatctaattctatgttcagggtgctagtattaccccaagctacgtggctttctccgacgacgttgacggatggtcggcgatgcggcgctgtgacatgtcgct

SEQ ID NO: 102329 - DNA, 279 bp, Glycine max
atcaagatcaaggaagaggatgtcgaaagaggatgtgtttgttggcgcgatcgaccaaggaacgagcagcagcaggttcataatatacgacgcgaagactggagtagtaggatgccaccacgtggagttcacccagttctacccgcaagccgggtgggtggagcatgaccccatggagatcttggagagtgtgaaggtgtgcgtggccaaggccgtcgataaggccaccgctgatggcttcaacgtcgataaaggcttgaacgccattggtctcaccaa

SEQ ID NO: 102330 - DNA, 278 bp, Glycine max
ctacaaagtcagtggccagttccccacgcaagctattcagaacaaccagttagtcttcctggacctcaggttcaaccagcttaccgggccgatagacccgaaactcttccagagggacctcgatgtgatctttgtcaacgataaccagttcaccgggtgcctcccggagaatttcgggtccacgccggcccggtaccttacatttgccaacaacagactctccgggtcactcccgaagagtctcggctacgcgccgagtctcaccgaggtgctcttct

SEQ ID NO: 102331 - DNA, 279 bp, Glycine max
atgctaagtttgctgagtatgaaaagaaatacaaggaggaagctgcagaattgaaatctattatcaatggtgaattccctgctggttgggagaaagcacttccgacatacactccagagagcccagcggatgccaccagaaacctgtctcaaacaaaccttaatgcccttgcaaaggttcttcccggtctgcttggtggcagtgcagatcttgcttcttccaacatgaccttgctcaaaatgttcggggacttccagaaggatactccagcagagcgta

SEQ ID NO: 102332 - DNA, 269 bp, Glycine max
ttctcctaaaacatctccagtgggttcttcttcttctattacaacaacgtcgtccaagaccatgaccatggccatggccacgatcctgctcctgttcacggtcttcgcggtttcatcggccctagacatgtcgataatctcgtacgacaacgcccacgccgccacgtcgcgcagactagtcgagctgatgtccatgtacgagcagtggctagtaaagcacgggcaaggtgtacaacgcgctcggagagaaggagaagaggttccagatc

SEQ ID NO: 102333 - DNA, 278 bp, Glycine max
  unsure (1)..(278): unsure at all n locations
taatttcggtgtttgaaggatgcaatancggggcaaatcagagctgcaaacaagagtttgggagaagaggattgttttggtgctaaaattgaaggatctaggctcaaatatgtggaccatcatctaaggcaacagagggctattcagcaactgggnatgatccatcacaatgcttggagaccccagagaggattgccagagagatcggtttctgttctgcgtgcttggctctttgaacactttcttcatccttaccccaaggactcagacaagcacat

SEQ ID NO: 102334 - DNA, 277 bp, Glycine max
atcccagccatgagcctcttcggtataggcagaaaccagagaacattccgcccgaaaaaaagtactccttctggaagtaagggagctcaacttcgaaaacatattgatgccacgttaggtagtggaaatctgagggaagcagtaaagctacctcctggggaggatttaaatgagtggctagctgtcaacactgttgatttcttcaatcaggtgaatctgctttatggtacgcttacagagttctgtactcctgagaattgtcggacaatgtctgcag

SEQ ID NO: 102335 - DNA, 279 bp, Glycine max
atcccagccatgagcctcttcggtataggcagaaaccagagaacattccgcccgaaaaaaagtactccttgctggaagtaagggagctcaacttcgaaaacatattgatgccacgttaggtagtggaaatctgagggaagcagtaaagctacctcctggggaggatttaaatgagtggctagctgtcaacactgttgatttcttcaatcaggtgaatctgctttatggtacccttacagagttctgtactcctgagaattgtcggacaatgtctgcagg

SEQ ID NO: 102336 - DNA, 272 bp, Glycine max
agcagcgcggaggccgcacgatgcctggagttactgtaaaagacgtgaaccagcaggagttcgtcagagctctggcagccttcctcaaaaagtccgggaagctgaaagtccccgaatgggtggataccgtcaagctggccaagcacaaagagcttgctccctacgatgagaactggttctacacgcgagctgcttccacagcgcggcacctgtacctccggggtggcgctgaggttggctccatgaccaagatctatgggggacgtcagaga

SEQ ID NO: 102337 - DNA, 275 bp, Glycine max
ctaacatttccctttacttgctaaaacatggtccaagaaaagaaactagttgacgaggtgtccggttggctcaaaatttatgacgacggttcagtggaccggacatggtccggaccggaccaattcaagttcatggccgaaccggcccctccccatgaacaattcatagacggcgttgccattcgcgacgtcgccgttactcacggtggtggccatagtggccaccatgtccgactttatctgccagagataaagccggaacacagccaaaaact

SEQ ID NO: 102338 - DNA, 277 bp, Glycine max
atcccagccatgagcctcttcggtataggcagaaaccagagaacattccgcccgaaaaaaagtactacctctggaagtaagggagctcaacttcgaaaacatattgatgccacgttaggtagtggaaatctgagggaagcagtaaagctacctcctggggaggatttaaatgagtggctagctgtcaacactgttgatttcttcaatcaggtgaatctgctttatggtacccttacagagttctgtactcctgagaattgtcggacaatgtctgcag

SEQ ID NO: 102339 - DNA, 256 bp, Glycine max
  unsure (1)..(256): unsure at all n locations
aaaacctagggttgagccttttgctcaggttttcagcgcttctttcttacaatggttctacagaacgatattgatttgctgaatcctccagctgagttggagaagagaanncaancttcnaagcgtcttgtgcagtcaccaaactctttcttcatggatgttaagtgccagggctgcttcaacataacaactgtgtttagccactctcagactgttgtggtttgcggaaactgccagactgtgttgtgccaaccaa

SEQ ID NO: 102340 - DNA, 294 bp, Glycine max
cgccagatctcagacacacactctcactctctctccctcaccttccataatgcagctcctccggccactgctcgcggcggcgctgctcctcctcgccaccctctccgacgcgcacaacatcaccagcatcctcgcaaagcaccccgagctctccaccttcaaccactacctcaccctcacccacctcgcccccgaaatcaacggcaaaaccaccatcaccgtctgcgccgtcgacaacgccgccatgtcggaccttctctcgaagcacccctccatctacaccgtcaagaacgt

SEQ ID NO: 102341 - DNA, 285 bp, Glycine max
gcgcagtttccagaggagtgttcgtgtcctcttccgccggcaacgatggtcccagcggaatgtcagtgacgaaccttgctccatggttaacaacagtaggcgcaggcaccattgatcgtgacttcccctcacaggtgattctgggcacggtcggagactctccggcgtgtcgctatacgccggagcagctttgaaggggaaaatgtatcaacttgtttacccagggaaatcagggattcttggagactcactctgcatggagaattctctagatccgaacatggt

SEQ ID NO: 102342 - DNA, 286 bp, Glycine max
gagaaagagagaattcgtaaaccctaatttcggaaagatcggcgatgactgcctccaaggatcgcgagaacttcgtctacatcgccaaactcgccgagcaggccgagcgttacgaagagatggtggaatcaatgaagaacgttgcgaactcgacgttgaactgacggtggaggagcggaatttgctttctgttgggtacaagaatgtgattggtgctcgcagacgtcctggaggatcctgtcttccattgagcagaaggaagaaacaaaagggaacgagttgaatg

SEQ ID NO: 102343 - DNA, 290 bp, Glycine max
gcctctcttccatctccccagccaaaacctctctcaagaaggccacattaggcccttctgtcttcgcaaccgttagcactccttcttctccttcttcttcttcttcttcttccttcccttctctcattcaagacaggcctgtctttgcgcccctgcccccatcatcaccccaactgtgagagaggatatggcatcaggaatacgagcaagctattgaagaactccagaaattgttgagggagaagagtgaactcaaagccacagctgctgagaaagtggagcagataaca

SEQ ID NO: 102344 - DNA, 287 bp, Glycine max
gtgcgattttcgattctcttctctgcaactatgcctaaccctaaggtcttcttcgacatgaccatcggcggtcaacctgccggccgcatcgtgatggagctctacgccgacgtgactccgagcaccgccgagaacttccgcgcgctcgcaccggcgagaagggcgccgggcggagcggcaagcccctccactacaaaggctcgtccttccaccgcgtgatcccgaacttcatgtgccagggcggcgacttcaccgccggaaacggcaccggaggcgagtcgatctac

SEQ ID NO: 102345 - DNA, 281 bp, Glycine max
tgaaaggttgcctgatgagatgaatggcatgaaaattagggatgaaagggaaatggaagcaactgtggtagatggaaatgggactgaaacaggacatataattgttactaccattggtggtaaaaatggccagccaaagcagacaaaagctacatggctgagcgagttgttggaaatggatcatttggtgtagttttccaggcaaagtgcttggagacaggggaaactgtggctataaagaaggttcttcaagacaagaggtacaagaaccgggaattgca

SEQ ID NO: 102346 - DNA, 282 bp, Glycine max
gcagaaagcaagctcatcctagagttttaaaaatggcagcagcctcctccatggctctctcttccccatccttggctggcaaggccgtgaagctgggcccatcagcccccgaagtcgggagggtcagcatgaggaagaccgtcaccaacaggcctcctccggaagcccatggtacggcccagaccgcgtcaagtacttgggcccattctctggcgagccccgttctaacttaactgccgagttccaggtgactacggctggacactgctgggctttcggcga

SEQ ID NO: 102347 - DNA, 288 bp, Glycine max
aaaaccctcttttttctctctcttgcaaaacctaattttcatttcttccctcaaatttcaaaatgcgtgagatccttcacatccagggtggccaatgcggcaaccagatcggcgccaagttctgggaggtggtttgcgcggagcacaggatcgaccctaccggaaggtacggtggggactcggagttgcagctcgagaggatcaatgtctactacaacgaggccagttgcggtcggttcgtgccgcgcgcggttctcatggacctcgaaccgggcaccatggacagcg

SEQ ID NO: 102348 - DNA, 284 bp, Glycine max
gccgcccaaaacttctcatacccttttattcattccattcgtttctagggttttcttttctttgccgagaaaatgagagagtgcatttcgatccacattggccaggccggtatccaggttggaaacgcctgctgggaactctattccttgaacacggcattcagcccgatggacagatgccgagtgacaagaccgttggcggaggagacgacgccttcaacacatttttcagcgagaccggcgccggaaagcacgtgccccgcgccgtcttcgtggatcttgaa

SEQ ID NO: 102349 - DNA, 286 bp, Glycine max
  unsure (1)..(286): unsure at all n locations
acacacaccacctcgcactcgcagggacagagagtggggactgcnnaacacagactaaatggcgccaaatgctctctttctcttctctttcctcgccatgctcctccttctgctccgctcaaccgccgccggccacaactaccgcgagccctccgcaaaagcattctcttcttcgaaggccagcgctccggcaaactccccgccgaccagcgcctccgctggcgccacgactctgcattgcacgacggcgccaccgccggagtggacttgagtggagggtactacg

SEQ ID NO: 102350 - DNA, 283 bp, Glycine max
caaccctcttcttccccaccatcacaccaaccaaacctcactctccctttctcccctgaccctctccctgccatggtcatgggagcctttggccacttcgaaccggtctccaaatgcagcaccgagaaccggtctaaccaaaccgtgcctcggacttggacggcaccctcctggtgtcccccagcgacatttccttactacatgctggtcgccatcgaagccggcagcttcctccgtggccttgtcctccttgcctccgtccctttcgtgtacttcacgtaca

SEQ ID NO: 102351 - DNA, 284 bp, Glycine max
agcgagacggcagcacgcgcaaaaatggtgaagtttctgaaaccaaacaaagccgtcatcgtccttcagggacgctacgccggcaaaaaagccgtgatagtgcgaaccttcgatgaaggcacgcgcgaggcccctacgggcactcttggtggcagggataaagaagtaccctgcgaaggtgatcaagaaggattcggccaagaagacggccaagaagtcgcgtgtgaaggcgttcgtgaagctcgtgaactaccagcacctcatgcccacgcgctacacgctcg

SEQ ID NO: 102352 - DNA, 283 bp, Glycine max
gcaggtgagtgagtgagtgagcaagagtgaagagcgaagagaatggctcccaagggtttaatctttttggctgtgttatgcttctcagcactgtcactgagtcgttgtcttgcggaggataatggacttgttatgaacttctaaaggaatcatgccctcaggctgaagacatcatcaaagaacaagtcaagcttctctacaagcgccacaagaacactgctttctcctggctcagaaacatcttccatgactgtgctgttcagagttgtgatgcttcactgtt

SEQ ID NO: 102353 - DNA, 282 bp, Glycine max
ctagcttttgctgcccaaaaaattgttgaagttaacgcattggctaaagcattgtctggccacaaggatgaggccttcttctctggtaatgctgctgctctggcttcaaggaagtcttctccaagagtgaccaacgaggctgtcagaaggctgctgctgcattgaagggttcagatcatcgccgtgcaacaaatgtcagtgccagactggattctcaacaaaagaagctcaaccttccaatcctgccaaccaccactattggatccttccctcagactgtag

SEQ ID NO: 102354 - DNA, 276 bp, Glycine max
cttcacatccagggtggccaatgcggcaaccagatcggcgccaagttctgggaggtggtttgcgcggacacgggatcgaccctaccggaaggtacggtggggactcggagttgcagctcgagaggatcaatgtctactacaagaggccagttgcggtcggttcgtgccgcgcgcggttctcatggacctcgaaccgggcaccatggacagcgtccggtccgggccgtacgggcagatcttcaggcccgacaactttgtgtttgggcagtccggggc

SEQ ID NO: 102355 - DNA, 286 bp, Glycine max
gcaccacattcacctgaggcttccaaagcaatggcttcccttgcagcatccactgctgctgcttcccttggcatgtcagaaatgcttggaaaccccatcaacttcagtggtgccacaaggccagctccatctgcttctagtcctgctccttcaagactgtggctcttttctccaaaaagaaggctacaccaacacctccaaaaaaagctgctgctgctgctcctgccaatgatgagcttgccaagtggtatggtcctgacagaaggatcttcttgcctgagggtct

SEQ ID NO: 102356 - DNA, 291 bp, Glycine max
cacacacactctttctctctctctctttccctgatcatcaaaatcagaaaaaattgggggaatggagaccaacaaccagcaacaacaacaacaaggagctcaagcccaatcgggaccctaccccgtcgccggcgccggcggcagtgcagtgcaggtgcaggcgctcctccccctttccagcaccttctccagcagcagcagcagcagctccagatgttctggtcttaccagcgtcaagaaatcgagcacgtgaacgactttaagaatcaccagctccctcttgcccgcatc

SEQ ID NO: 102357 - DNA, 287 bp, Glycine max
aaattctgttacggcgtcaacttcgagataacggtccacaacgtcgccgttttgcgatgcgccgcggagttcctccagatgacggatcagtactgcgagaacaaccttgcaggccggacagaggagtttctcacgcaggtcgcgtcttcacgcttaccggcgccgtcacggtgctcaagtcctgccgccatctcctcccctatgctgacgatatcaacgtcgtgaaacgctgcgtcgaagccgtcagcgccaaggcctgcagcgaggccaatttcgccagccgctcg

SEQ ID NO: 102358 - DNA, 279 bp, Glycine max
ccactttcttttttcccgcagtcatgggcaaggtcaagatcggaatcaacggatttggaagaattggccgtttggtggccagggtggctctgcagagagacgatgttgaactcgttgccgttaacgatcctttcattaccacgattacatgacatacatgtttaaatacgacagtgttcacgggcactggaagcatcacgatgtcaccgttaaggatgagaagacccttctcttcggtgacaagccagtcactgtttttggacacaggaacctgaagag

SEQ ID NO: 102359 - DNA, 283 bp, Glycine max
aggcgtgcaacctgttctgcctccctgagaactaccagatgaagtactacctctatcacatcctctcctggccccagctcctctacgtcgccgaagactacaacggccgcatcgtcggctacgtcctcgccaagatggaggaaaaaccaccgactgccacggccacatcacctccctcgccgtcctccgcacccaccgcaagctcggcctcgccaccaagctcatgaccgcagcccagaacgccatggaacaggtgtttggtgccgagtacgtgtccctccac

SEQ ID NO: 102360 - DNA, 281 bp, Glycine max
caacgaaccactctgaagccgctcacgttatccacaacactctcaactctccttaaaccctaaccaatccaaccatggcttcttcttccaccttcactgcaatgtccgcctgcaagctctcctcctccgccgccatctcctcctcccctcccgccgccgctccaacgccgtcgttctgtcgaggcgcagcgcgccgccagggtctccgccatggccaaggagttgcacttcaacaaagacggcaccgcaattaagaagctccagagcggtgtgaacaagct

SEQ ID NO: 102361 - DNA, 285 bp, Glycine max
caaatttctccatagttatgggcacttccattctcgacgccctgaacgttcgcgtggaaggttccggcgacaagtaccttgtcctggcccacggcttcggcacggaccaatccgcgtggcagcgcgtgctcccttacttcaccccaactacagcgtcattctctacgacctcgtctgcgccggcagcgtcaaccccgaccacttcgactaccgccgttataccaccctcgacgcctacgtcgacgacctcctcaacatcctcgacgccctccgcgtcccccgctg

SEQ ID NO: 102362 - DNA, 279 bp, Glycine max
gtgttgtttttctttttttcatttgcattgcaaagcaaaaaccttgcaaattgcaatggcttccaacaaggttattgccaccatcttggttctttctctccttgcctactcaacatcattcaccaatgcatgtggcacatgcacccaaaacctactccttctccccctcctccatcagggaagtgccccaaggacacattgaagctaggggtgtgtgctgatgttctaggacttgttaatgttgttgttggttcccctgtctctagcaagtgttgtgca

SEQ ID NO: 102363 - DNA, 285 bp, Glycine max
attcttcaagattcaggtactgcgtttcggaagcagacacagatggctcgtacgaagcaaaccgctcgtaagtccacaggaggaaaggctcctaggaagcagcttgcaaccaaggctgcacgtaagtctgcaccaactactggtgtgtgaagaagccccaccgttatcgtcctggtaccgttgctcttcgtgagattaggaaataccagaagagtaccgagcttttgatccggaagctccccttccagaggctggttcgtgaaattgctcaggacttcaagactg

SEQ ID NO: 102364 - DNA, 281 bp, Glycine max
  unsure (1)..(281): unsure at all n locations
ctcaagtccaacctacccctttttcttctcccaccaacttcaccgtcnctcttcctcgatcatgtctcacttcaagggcaagtaccatgatgagcttattgccaatgctgcttacattggcactcctggaaagggtattcttctgctgatgagtcaacagggacaattggcaagcgtttggccagcatcagtgtagagaatgttgaatccaacaggcgtgctcttagggagctgcttttcaccgctcccggtgctcttaaatatctcagtggtgtcatcct

SEQ ID NO: 102365 - DNA, 277 bp, Glycine max
ggcagttctgattctctgggtgctctcatgacgatttgtccaccaacagacgaacacagtccgaggaacaaccacgcgtatgggagggagtttcagtccatgctggaaggactcgacgaagaagggtgcgtggaagaacagggcaccactctgagaagaaacgacgactaagcgtggatcaggtgaaggctttggagaagaacttcgaagtagagaacaaactcgaacctgaccgaaattgaagctggcacaagaacttggcttgcaaccaagacaa

SEQ ID NO: 102366 - DNA, 278 bp, Glycine max
gttttccaaaaccctaatttctcgaaaggtagggttttgcagaacctcgtcctcctctcacggtttcttctttttatcttctcacctttcttcttccactgctctaatctaatatgggcaagtcaagcaagaaatcagctctcaaggtcgacgctgttccagctgtggttccgccatccaagtctgccaagaagggaggcaagagacaagctcaagatgaaattgagaagcaattgagtgccaaaaaacagaagataaatgaggttgctcagaaacaa

SEQ ID NO: 102367 - DNA, 281 bp, Glycine max
  unsure (1)..(281): unsure at all n locations
ctcactcttccgcgccattgctattgtggtgtgatctgcaacaagcaagatctgcgagaanaacaacaaacaaaacaatggcgagtcggttcgggttatcgtcttcgtcttcctctgcgtccagcatgagagttaccaaacgcccgcgagcgacctcgccctcaccaacctcgccttctgttccccctccgatctccgcaatttcgtcgtccctggccacaataacctctacctcgccgccgtcgccgattccttcgtcttatctctctctgctcatgaca

SEQ ID NO: 102368 - DNA, 274 bp, Glycine max
ggagatccttcacgtgcagggagggcaatgcgggaaccagatcggttccaagttctgggaagtggtgtgcgacgagcacggcatagatccgacggggaagtacgtcggaaactcagatctgcaactcgagcgcgtgacgtctactacaatgaagcctcgtgcgggcgcttcgtgccacgcgcggtgctgatggacctggagcccggaaccatggacagcgtgcggaccgggccgtacgggcagatcttccgccccgacaacttcgtgttcgggc

SEQ ID NO: 102369 - DNA, 275 bp, Glycine max
ttatttttaagtgtggagtgctgtgcaggtcaaggcccttttacttgttcgtccggttgttcccatcttctctctcgtaccaatcaaatcacacttttgtgttgtgttgggaaaccctaaaccccgttttcggtgagtcgagatcgatcgaacatggatgaggagtacgatgtgatcgtgttgggcacgggtctcaaggagtgcattctcagcggtcttctctccgtcgatggcctcaaggttctgcatatggataggaacgactattacggagg

SEQ ID NO: 102370 - DNA, 271 bp, Glycine max
ctcagaaccttctgaggttaaagcaaaaaacaaagagagagagagagagaaaatgatgaagccatcgatgctcagatctctccactccgccgccacccgcggcgcctctcatctcttccgccgtgggtacgctccgagccggtgccggagcgcaaggtagccgttctcggcgccgccggcgggatcgggcagcctctctcccttctcatgaagctcaatcccctcgtttcgagcctctccctttacgatatcgccggaactctcggcgtcg

SEQ ID NO: 102371 - DNA, 278 bp, Glycine max
ccgcactccgtcttcatcaatcagcatcaccaccgctccaacacaggggaaaatgagggagatccttcacgttcagggagggcaatgcgggaaccagatcggttcgaagttctgggaagtggtgtgcgacgagcacggctagatccgacggggaagtacgtcggaaactcagatctacaactcgagcgcgtgaacgtgtactacaacgaagcttcctgcgggcggtttgtcccacgcgcagtgctgatggacctggagcccggaaccatggacagcgt

SEQ ID NO: 102372 - DNA, 277 bp, Glycine max
caaacactcacactctctctttctttcttcctgctgctacaatatggagcctctctcttccaccaaacacaacaaccgtctctccaagccttcctccctccacacggaggctccgccgccggaggccagtcccctccggagatcatggtggtggcctccatcgacgccggggtgcaattcgggtgggccctacaggtctctctacttaccccttacgtccaactgctggggattccccacacttgggccgccttcatctggctctgcggcccaatct

SEQ ID NO: 102373 - DNA, 278 bp, Glycine max
gaaaacccaaagtgcttctctcctctgtctttttctctctcttgctatccttttggctagtggcactgctgcaagtgcaactccaagaagcgcagtgccaagccaccatgtttcaacattcaacagaagcctttttcctccacttttctctttggaattggttcttctgcttaccaggcagaaggagcagcaagtgtagatgggagaggaccaagcatatgggacacctacactagacagcatactgaaaagatttgggatcatagcaccggtgacat

SEQ ID NO: 102374 - DNA, 270 bp, Glycine max
ttgtgaggttgaggggaaaaacaatggggtctctaatggcctctgcaacattgactcttgtattggctatagtgtctctaagcttgccaacacaaatcttagctgataactacttgtactcatcacctccaccacccagaagtacccaccggtgtctcctccataccactatccttcaccacctccaccaccaaaatattactaccactctccagcaccaccttctccttcgccaccaaagaagccatattattatcactctcctcctcc

SEQ ID NO: 102375 - DNA, 278 bp, Glycine max
ccaatccaaaggaagttgacggaataaaagttcttcagctggaaactgcagctggtgctgcaataaggttctttgacaaggctattgggattaatgttcctcgatcacgattccttcctgtgaaggcaacttcagattgcttcttgtccagtctgacctctacactttggaagacggatttgtcattcggaacaaagctagggaaaatcctgaaaacccttctattgaactgggaccagaatttaagaaggttagcaacttcttgggccgctcaagtc

SEQ ID NO: 102376 - DNA, 271 bp, Glycine max
acaacacacacacactgtgtttgtgaaactctcacacagacaagtcacaacaacaagtttctgttggtccaatggcatcagcaacacccattttgaaagatgagctggacatcgtgatcccaacgatcaggaacctgatttcttggagatgtggaggccattctttgagccttaccatctcattattgtgcaagatggagacccttcaaagatcatcaaggtccctgaaggctttgactatgagctctacaaccgcaatgacatcaacgat

SEQ ID NO: 102377 - DNA, 268 bp, Glycine max
caattatttgaattcaagaatgtctcaacccgactcgttggtggctgagattgaggtgaaaacctctgctgatcacttttacgacaccttgaagggtaagaaacagcatcgtattcatgatgttgcccctcatcaatccataaggtggaagttcatgaaggtgagtgggataaatctggcaatatcaaggtgcttacattcgctgatggggacactgttgagaccttaaaggagagagttgattttgatgatgaaaacaagaagataa

SEQ ID NO: 102378 - DNA, 273 bp, Glycine max
ccaagcccatgaccactaacaggagccctatcagctcttctactcacatccggcttagtaatatgattccattacaactccacaattctcctatcattaggcctcctgacaaacatcctaactatatatcaatgatacgagatatcatccgtgaaggaacataccaaggccaccacacccctattgtacaaaaaggcctccgatacggaataatcctgtttattgtctccgaagtattcttctttgccggatttttctgagcattttatcatt

SEQ ID NO: 102379 - DNA, 277 bp, Glycine max
tgcaagaatggcacttcgttgcttggtgatgtccctttctgttctcttcactcttggtcttgcgagagaaagccatgccagagacgaagatttttggcatgctgtttggccaaacactcccattccaagttcattgcagatcttctaaagcctggccctgcaagtgttgaaatcgatgatcaccctatgcaaattgaagaaacacagtacccgaaaaccttcttctataaagaagaccttcatccaggcaaaacaatgaaagtacaattcagcaagc

SEQ ID NO: 102380 - DNA, 272 bp, Glycine max
tgagatggaacttgtgcgaaccttttcatgtttctatcaatataagattggtagagtttaagagacagaggaagaaaagatgagcctgaaatgaaggtttattttttatttttttatgcagcttttcggatcttcaaatccacaaggagatcttgatgggaaagcatgcgcagctgttgggcagagtagtctcatggctctctatgatctcatgtttagtcagcttgatgttacttcatcccaacttcttgtgaatgatgggttttttaggg

SEQ ID NO: 102381 - DNA, 271 bp, Glycine max
tgacattcacaagtgtgctgccgtcaccgagcgtgtccttgcagcatgctacaaggctttgaatgatcaccacgtccttcttgagggtaccctattgaagccaaacatggtcacccccggatccaattctgctaggtttcccctcaggtggttgcggagcacactgttagagcccttcagagaaccgtgcctgctgcagttcctgctatcgttttcttgtctggtgggcagagtgaggaggaggcatccgttaacctcaatgccataacca

SEQ ID NO: 102382 - DNA, 273 bp, Glycine max
ccaaacttcagagcgcaggcaaacaacttcttctctcagacatggcatctcaaggtttgtgtccttcgataaaaaatattcttcttttggactctgaagggaagcgtgtggcagtcaagtattactcagatgactgccaacaaacaatgcaaagttagcttttgagaagtttgtatttaccaagactgttaagacaaatgctcgtacagaagctgaggtaacactacttgagaacaatatcattatttacaaatttgtacaagacctgcattt

SEQ ID NO: 102383 - DNA, 275 bp, Glycine max
caacaatggcttctgtgcctcaaccaaaaatctcccttctaaccttattcttcttctcgtccttcaccatcattgcgcatgcaattgttcctcaaaacgaaaccttcaaatttgagaactcaggtgaacttggacctacatcgttgagtacggtgcagattacagaatgataagcatcttcaactctccattccaagttggtttctacaacaccaccccaaatgccttcactctagctttgcgtgtagggctccaacgctcggagcagctatttc

SEQ ID NO: 102384 - DNA, 292 bp, Glycine max
  unsure (1)..(292): unsure at all n locations
gtgtgggctttgtctgaactcagtgaaccacaccacacaacacagacgatttctcagtctcaatctcagtgttggagacttgatcttaagagaaatcatagtttgtttaatttcaattctgagcaaaggccaacatgcaagtttttcccagtgaaggcgaaagtgctttgtcagttgttggtccaaggccaatggaatggtctactgttccatacaatgcccctcaagctcctgggccanatggaaagcagcggacctcaagtttagaatcaccaatcatgttgctgtcagg

SEQ ID NO: 102385 - DNA, 289 bp, Glycine max
ctcgagccggttctggatttgagggtccctggacctctaatcctcttattttcgacaactcatacttcacggagttgttgagtggtgagaaggaaggtctccttcagctaccttctgacaaggctcttttgtctgaccctgtattccgccctctcgttgataaatatgcagcggacgaagatgccttctttgctgattacgctgaggctcaccaaaagctttccgagcttgggtttgctgatgcctaagcaacgtttaggggattgttgaagaggcatggtgcccataa

SEQ ID NO: 102386 - DNA, 285 bp, Glycine max
gccgcagcgttgatcatcggatcagaccccgacccagcagtggagcggccgatattcgagatgatatcggccgcccagacaatcctgcccgactctgacggtgctatagatgggcaccttcgggaggtgggactcacgttccacctcttgaaagatgtgcccgggatcatctcgaagaacattgagaagagtcttgttgaagcttttgagcccatcgggatcagcgactggaactctatcttctggatcgcacatcccggtggtcccgcgatcctcgatcaagtc

SEQ ID NO: 102387 - DNA, 279 bp, Glycine max
tgttcccctttctctcgttttttctcagaaccttctgaggttaaagcaaaaaacaaagagagagagagagagaaaatgatgaagccatcgatgctcagatctctccactccgccgccacccgcggcgcctctcatctcttccgccgtgggtacgcctccgagccggtgccggagcgcaaggtagccgttctcggcgccgcggcgggatcgggcagcctctctcccttctcatgaagctcaatcccctcgtttcgagcctctccctttacgatatcgccg

SEQ ID NO: 102388 - DNA, 286 bp, Glycine max
gtgaaaacaaagtttatggcgaatttctaatgaatgctcagggagaggatgtagttgctggaatcaggacacctgaagatttggaggttatgaaaacttgcatgccagaagcttataaggaacttgaggagaactgtgaaattctagagaaacattacaaggatatgatggatattgaattcactgtccaagaaaataggttgtggatgttgcaatgtcgaagcggaaaacgtaccggtaaaggtgcattcaaaatagctgtagatatggttgatgaggggcttgt

SEQ ID NO: 102389 - DNA, 281 bp, Glycine max
caagtccttctcctcacacacataaaaacaaatatcctccacttcttctacccccagcagtagaacaagaggtgccggagcaagtttcgtcacgccggaacgatgaccggcggcggatccacggggaggttgccgacgtggaaggagagagagaacaacaagaggagagagagaagacgaagagcgattgcagctaagatctacactggccttcgagcccaggggaactacaagcttccaaagcactgcgacaacaacgaggtcctgaaagctctctgcgc

SEQ ID NO: 102390 - DNA, 279 bp, Glycine max
cttttccttcactttcccgagaaaaaaaaaacactctttcactttcttgactacggtctcacttcgacatggctcgtactaagcaaactgctcgcaagtccaccggcggcaaggcgccacgtaagcagttggcgaccaaggccgcccggaagtccgctcccgcgaccggaggagtgaagaagccccaccgcttcaggccgggaaccgtggcgctgagggaaatcagaaagtatcagaagagcaccgagcttctcatcaggaagctctccgtttcagaga

SEQ ID NO: 102391 - DNA, 279 bp, Glycine max
ctcttcgttttgttcttctttgcgctcctcctcgttcgttcgtgctccctcgcgtagatcggcaatggcggagaccgagacgtttgctttccaggctgagatcaaccagctccttagtctcatcatcaacaccttctactccaacaaggaaatcttccttcgtgaactcatcagcaacgcctctgatgctttggacaagattagatttgagagtttgacggacaagagcaagctcgatgctcagccagagttgttcattcatattattcccgacaagac

SEQ ID NO: 102392 - DNA, 278 bp, Glycine max
gcttcggcgacttctcgatattattttttctgacagagccaccgacagagccggcggttcccgtggcggtttgagaatggccgacaagtacaacctgaagaaccccgccgtgaagcggatcctccaggaggttaaggagatgcagtccaacccttccgacgatttcatgagcctccctctcgaggaaaatatatttgagtggcaatttgcgattagagggcctcgtgatacggaatttgagggtggtatttatcatggaaggatccagttgccttcag

SEQ ID NO: 102393 - DNA, 285 bp, Glycine max
tcgttgttgtagttgttgtttggttgagatggctcaggttcaggttccgcctcagaatgcgatgccaggtcccaacggtggtggtggtgccggtggtgctggaaaccagttcggaacgacgtcgctttacgtcggagatctcgacccgaacgtcaccgacgcgcactctatgacttgttcaaccaattggggcaagtcgtgtccgttagggtttgcagggatttgaccagccggagatcgctcggttatggttatgtcaactttagcaacccgcaagacgctgct

SEQ ID NO: 102394 - DNA, 285 bp, Glycine max
gtggtttcagtgagtgatcggtgttcacttgatccttcataagtcgtcatcatcatcatcatcatcaccgttgattgaagaagatgccgatcagaaacatcgccatcggaaggcctgaagaggctactcaccccgacacgttgaaggcggggttggctgagttcatctccaccttgatcttcgtgttcgccggttcaggttccggcatcgcctacaacaagctcaccgacaacggcgccgccactcccgccggcctcatctccgcttccatcgcccatgctttcg

SEQ ID NO: 102395 - DNA, 283 bp, Glycine max
ctctttctctagtcctgttatttctcagcgcgtaaagcatggccttgttggtggagaaaaccacgagtggtcgcgagtacaaggtcaaggacctttcccaggccgacttcggccgcctcgagatcgagctggccgaggttgagatgcccggcctcatggcctgtcggaccgagttcggcccctcccagcccttcaagggggcccgcatcaccggctccctccacatgaccatccagaccgccgttctcattgagaccctcaccgcccttggcgccgaggtccg

SEQ ID NO: 102396 - DNA, 284 bp, Glycine max
caaatcccagggagccaccaaccatggcttccaagctctgcgactcatgcaaatcagccactgctaccttgtactgccgccccgacgcggccttcctctgcggcgcctgtgactctaaggttcatgccgccaacaagctcgcatcgcgccacccgcgcgtcgtgctctgcgaggtgtgcgagcaggcgcccgcgcatgtgacctgtaaagccgacgccgccgcgctctgccttgcctgcgatcgcgatatccactccgccaaccccctcgccagccgccacgag

SEQ ID NO: 102397 - DNA, 286 bp, Glycine max
atccctctttcttcctcttcctcagtagtgcgattttcgattctcttctctgcaactatgcctaaccctaaggtcttcttcgacatgaccatcggcggtcaacctgccggccgcatcgtgatggagctctacgccgacgtgactccgagcaccgccgagaacttccgcgcgctctgcaccggcgagaagggcgccgggcggagcggcaagcccctccactacaaaggctcgtccttccaccgcgtgatcccgaacttcatgtgccagggcggcgacttcaccgccg

SEQ ID NO: 102398 - DNA, 282 bp, Glycine max
tgggaaaggaaaagttggaaaggctacagcatttaagaggacaagtgtcgttaccaaccttgggagctggcgaagatgcatacgatgttcatttagaatgggacagtgacttcggaattcccggtgcattttacattaagaacttcatgcaagttgagttctatctcaagtctctaactctcgaagacattccaaaccacggaaccattcacttcgtatgcaactcctgggtttacaactcaaaatcctaccattctgatcgcattttctttgccaacaata

SEQ ID NO: 102399 - DNA, 281 bp, Glycine max
ggaaagtgttgtttttctttttttcatttgcattgcaaagcaaaaaccttgcaaattgcaatggcttccaacaaggttattgccaccatcttggttctttctctccttgcctactcaacatcattcaccaatgcatgtggcacatgccacccaaaacctactccttctccccctcctccatcagggaagtgccccaaggacacattgaagctaggggtgtgtgctgatgttctaggacttgttaatgttgttgttggttcccctgtctctagcaagtgttg

SEQ ID NO: 102400 - DNA, 280 bp, Glycine max
ctcgagccgcgagataactagaaacagtgtgatgaaaatgaaggtccttgttttcttcgatgctacaattttggtagcatggcaatgccatgcgtacgatatgttccctctccgaatgaacactggctatggtgcccgtactccggaggtgaaatgcgcaagttggaggcttgctgtggaagcacacaacatctttggctttgagaccattcctgaagagtgcgttgaagcaacaaaggaatacatccatggcgaacaatatagatcagactccaaaaca

SEQ ID NO: 102401 - DNA, 282 bp, Glycine max
  unsure (1)..(282): unsure at all n locations
ctctatggatcgctctcagcttcttttgctgggtgtcnctctcttcctcttctgctcagacctcttctcccttttcactcatcatccaccaccgccaccccaccaccatcacccccaccaccatccacctcaccaccaccatccacctcaccaccaccaccacccgcctcaccacacaccccaccaccaccatcacccgccccaccaccatcagcagccggtgataatagagttccctcccgagaaacccatcagcaatattgcaactccgggtctcggcaa

SEQ ID NO: 102402 - DNA, 279 bp, Glycine max
cttcctcagtagtgtcatttacgcttctcttctctgcagcaactatgcctaaccctaaggtcttcttcgacatgaccatcggcggtcaatctgctggccgcatcgtgatggagctctacgccgacgtcactccccgcaccgccgagaacttccgcgcgctttgcaccggcgagaagggcgtagggcggagcggcaagcccctccactacaagggctcgtccttccaccgcgtgatcccgagtttcatgtgtcagggtggcgacttcaccgccggaaacg

SEQ ID NO: 102403 - DNA, 277 bp, Glycine max
ctaaaaaaaacccttagccaacacaaccatcatggccacctctgctattcagcaatcagcattcactggtcaaactgctctgaagcagctcaatgagttcgtccgcaagaccggtggcgccggcaaaggtcgcactaacatgcgccgcaccgtcaagagtgctcctcagagcatttggtatggccctgaccgtcccaagtacttgggtccattctcggagcagattccatcatacctgaccggagaattccctggtgactacggatgggacactgct

SEQ ID NO: 102404 - DNA, 276 bp, Glycine max
ttagtttccaacacaacaacaccataaccaacaccagccacagaaataagtttgtggaaaataagataacaacattttactgttgttaccgttctaccttgagaacaacctcaaactcaaacacaacacaataagagttgtttcggtttttgctatagtagtaatagtacaatacaactactgcaaccatatcaaaccaaagaagcattgtgtggaattattgactcagaaatttgaaaaccactttgtcccatcccacttggacttccacctcac

SEQ ID NO: 102405 - DNA, 272 bp, Glycine max
ctgcactcttcatcaagctccgctccaacacaggggaaaatgaaggagatccttcacgtgcagggagggcaatgcgggaaccagatcggttccaagttctgggaagtggtgtgcgacgagcacggcatagatccgacggggaagtacgtcggaaactcagatctgcaactcgagcgcgtgaacgtctactacaatgaagcctcgtgcgggcgcttcgtgccacgcgcggtgctgatggacctggagcccggaaccatggacagcgtgcggac

SEQ ID NO: 102406 - DNA, 272 bp, Glycine max
ctactggatgcacgccaatgggaccctccctccaataagtctaacggatttttgttcaagaatgaaatcttattggaactgtccagttcaccctttggaaccatatcacatcccggatatgatgaaataggatgaattgagacggtattttgtaagtacataattatcttgaataaattcactatttctttattttccgatcgcctggaaagaacaagatgtttcttttgttctttcttcaacaatttctgatctctagtagacctctcagt

SEQ ID NO: 102407 - DNA, 273 bp, Glycine max
ctttccttccctctttttccgaatctgaatcgaaatggcttcggagactgggacgtttgcttttcaggccgagatcaaccagctcctcagtctaatcatcaacaccttctacagcaacaaggaaacatatcttcgtgagctcatcagcaatgcctctgcatgctttggacaagattcgatttgagagtcttacagacaagagcaagcttgatgctcagccagagttgttcattcacattattcctgacaagaccaacaacacattgtctatca

SEQ ID NO: 102408 - DNA, 277 bp, Glycine max
ctctgtgtttgcggctgaggattccgaacgagtgaccttcttcgtttctcgcaaagtttaagtaatcatgggtaaggaaaaggttcacatcaacattgtcgtcattggacatgtcgactctgggaagtcaactaccactggtcacttgatctacaagcttggaggtattgacaagcgtgtgattgagaggttcgagaaggaggctgccgagatgaacaagaggtcattcaagtatgcctgggtgctcgacaagctcaaagctgagcgtgaaagagga

SEQ ID NO: 102409 - DNA, 276 bp, Glycine max
ctgaaatcttgaccaagattgacaggcgatctggtaaggagcttgagaaggagcccaaatttttgaagaatggtgatgctggtatggttaagatggttccaaccaagcccatggtggttgaaactttctctgagtatcctccccttggtcgttttgctgtgagggacatgcgtcagaccgtagctgttggagtcatcaagagtgttgagaagaaagaccccaccggagccaaggtcacaaaggctgccgccaagaagaagtgattgcattttggca

SEQ ID NO: 102410 - DNA, 277 bp, Glycine max
cagagaacgatcccgtgaccgtgaccgtgatcgtgaacgatctcgagaccgtgatcgtgaccgcgaaaaggatcaccgtgagcgtgacaggcacagagaagatagggagagatatgcagatcatcataggtacagagaccgggaagcagagcacgatgatgagtgggagaggggacggtcatcaaggactcacagcaagtcacgattatcgcaagaggaggaacaccattctagaccaagagatgctgattatgtgaagaggcggcggcttacttct

SEQ ID NO: 102411 - DNA, 277 bp, Glycine max
cggaactgggttacggtgcccaactgcgcgctaacctagaccccacaaagggtgttggtcgattaagacagcaggacggtggtcatggaagtcgaaatccgctaaggagtgtgtaacaactcacctgccgaatcaactagccccgaaaatggatggcgctaaagcgcgcgacctatacccggccgtcagcgcaaggaccaagccccgatgagtaggagggcgcggcggtcgctgcaaaacccagggcgcgagccgaggcggagcggtcgtcggtgca

SEQ ID NO: 102412 - DNA, 278 bp, Glycine max
acaacacacacacactgtgtttgtgaaactctcacacagacaagtcacaacaacaagtttctgttggtccaatggcatcagcaacaccccttttgaaagatgagctggacatcgtgatcccaacgatcaggaacctggatttcttggagatgtggaggccattctttgagccttaccatctcattattgtgcaagatggagacccttcaaagatcatcaaggtccctgaaggctttgactatgagctctacaaccgcaatgacatcaacgatccttgg

SEQ ID NO: 102413 - DNA, 267 bp, Glycine max
  unsure (1)..(267): unsure at all n locations
cctacccctttttcttctcccaccaacttcaccgtcttcttcctcgatcatgtctcacttcaagggcaagtaccatgatgagcttattgccaatgctgcttacattggcactcctggaaagggtattcttgctgctgatgagtcaacagggacaattggcaagcgtttggccagcatcagtgtagagaatgttgaatccaacaggcgtgctcttagggagctgcttttcaccgctcccggtgctcttanatatctcagtggtgtcat

SEQ ID NO: 102414 - DNA, 278 bp, Glycine max
gaccgccaaagaacatctgaggagactaagcatgaaagaacgtgagcacggagaaaaggagaggcaggtgtcagaggcagaggaacatgggacaattggatatgagagaacatacacacctacatgaccatgtttcaacgtgcgcaacgttgcggcggcgggcagaggactactacagatgcaacaatcaccccttctgcaagaaagcctctttgcaaccggtgcacttacaatttggtattacctgggagtgaaaagagatattacagccatgccta

SEQ ID NO: 102415 - DNA, 274 bp, Glycine max
cgagctccaagcttggtggaaagaacttgtagaggtgggtcatggggagttgaaggataagccatggtggcaaaagatgcaaactcgtgaagagttggttgaagcttccgctaccctcatatggattgcttcagctcttcatgctgctgttaactttggacagtatccatatggaggtttaatcctgaataggccaactattagcaggagattcatgcctgagaaagggtctcctgaatatgatgcgttagctaagaaccctgagaaggagttt

SEQ ID NO: 102416 - DNA, 274 bp, Glycine max
cttgcggctagggttttagcgcagttcttctatctttaaggaatctgggtaaggaaaaggttatcatcagtattgtggttattggccatgttgactctgggaagtccactaccactggccacctgatctacaagcttggaggcattgacaagcgtgttattgagagatttgagaaggaagctgctgagatgaacaagaggtctttcaagtatgcctgggtgcttgataagcttaaggctgagcgtgaaagaggaatcacaattgatattgcctt

SEQ ID NO: 102417 - DNA, 270 bp, Glycine max
gctgttttggccaatgttgccatcaagagtggcaaaaactacaatgtcattgtggaaattgccactatcctctccccggaagagcttttggcggttagacgcgcctatctcaaccgctacaagcactccttggaagaagatgttgcagctcatacctctggccatctacgccagcttttagtggggttggtgaccgcattcaggcatgttggtgatgagatcaatccaaaattggcacaatctgaggctgaaattcttcatgatgctgta

SEQ ID NO: 102418 - DNA, 267 bp, Glycine max
ttcatttctacatccctggctctgttccgtcgatgacgatggcgtttagggtgcgaaaccctgacctccgctttctcattcttctctctctcttgtccatcacttccgccaaggtcttcttcgaggagcgtttcgatgacggatggggaaatcgttgggttaaatcagattggaaaaaagatgagaacctggctggggagtggaaccacacctctggccaatggaatggagacgctaacgacaaaggtattcaaaccagtgaggatt

SEQ ID NO: 102419 - DNA, 265 bp, Glycine max
cacaaactcagggtagggcagagagagagagagagagagagagagagagagagaatgggagggtgggctatcgcggtgcattgtggcgctggtgtcgaccctaatctcccactcgagcgccaagaaggagcgaaacaacttctcacgcgctgtctcaatcttggaatctctgctctaaattctaatcttcccgacatagatgtcgtcgaacttgtggtgagggaattggaaacggatccgctgttcaattcggggcgtggatctg

SEQ ID NO: 102420 - DNA, 267 bp, Glycine max
caggtgctctgctcgttcactcctctctcatacagcctctggctcctcctccggtgaaagagggtgagaagaggagttagcaagcaatttttgtttcttttgggagttgggacccctcactcacatggacgcatcaacggctttaatgatcctataccgcaatagcggcctatttaatatggttcaccttcgtcactcgctccctaaaaggtccacgtgtctggcccctattcggcagcctccctggcctcatccaacacgccaacc

SEQ ID NO: 102421 - DNA, 277 bp, Glycine max
cctccctctgtgggtgacctcccttacctcgagtccctcgtcttccacaaattccccaaactcgtgggcccaatccagcccgcaatcgccaaactcaccaaactcaagtaccttgatctctccaacaacaatctctctggcccaatacccgattttttcgcgcaactcaagaacctcgacgatatcgacctttcctttaacaacctctccggccccataccaagctcgcttggtaaactgcctaaactcgcgtatctagatttgagccgcaacaagc

SEQ ID NO: 102422 - DNA, 274 bp, Glycine max
gttaaatttcaggttgtgctgccagatggatccaaagatcccactgttgagattccttttgaagtgaagcaacatctagagatcaagtattcataccttgatgttgtcggcagaactgtggtggttctagaaaaaagaaatgcagttcctgagaataatactcctttccaggtatttcctaagcccaatgtgaacaaataaataaaaatttctaaaattgatttggaatgtgggcatttcacatgttctaacttctaagagcaagaaatttgtt

SEQ ID NO: 102423 - DNA, 272 bp, Glycine max
gtaaaggttaggtgagcttgaagtgaaggttgacacactccaatctaagccatcggagatgccttatgagaaagaggaattgctaaatgctgctgtatgtcgggtggatgctttggaagcagagctaattgcaactaaaaaggctctttatgaagcactaatgaggcaagaagagctgcttgcttacattgatagtcaagaaaaagctaggttacggaagaagttttgctggtgagttttggttgctgatagaaagggactctgggagaggg

SEQ ID NO: 102424 - DNA, 272 bp, Glycine max
ctcaagttcaatttgctctagagcgtggtattccagctgttcttggtgtcatttctacacagagacttcctttcccatcaaactcctttgatatggctcattgctccagatgccttatcccatggacagaatttggtggtatttatctcatggaaatacaccgtattcttcgtcctggaggattttggattttgtccggtccacctgttaactacgagcgcagatggcgtggatggaacacaaccattgaagaccaaagatcagattatgag

SEQ ID NO: 102425 - DNA, 269 bp, Glycine max
ctggtcttgagcaacagattgctcttccacgggattcctaccttcagggttatttcagtaacatatccgagtaccttagagttggaccacccttatattttgttgtaaaggattacaactacagtttggaatccaaacacacaaaccagctatgctccattagccactgtgattcaaattctcttttaaatgagatatctagagcatcattagtgcgggcatcaagctacatagccaaaccagctgcctcatggcttgatgattttctt

SEQ ID NO: 102426 - DNA, 259 bp, Glycine max
tgaacactcatcaccatggccaagcttgttctttccctttgtttccttcttttcagtggctgcttcgctctgagagagcaggcacagcaaaatgagtgccagatccaaaagctgaatgccctcaaaccggataaccgtatagagtcggaaggtgggttcattgagacctggaaccctaacaacaagccattccagtgtgccggtgttgccctctctcgctgcacccttaaccgcaatgcccttcgtagaccttcctaca

SEQ ID NO: 102427 - DNA, 254 bp, Glycine max
gctccaagagaaagatttgttagagggaaatttttcctttgatattaaatctcgctctagattggaaaaagtttcctctacaaaagcacaatttgttagtggaaaaaccttcaaatatgatataattggtgctggttcacattcttcaggagattttcctgaaaaggaagatcaagaaaaacccaaaaagattgataccagattgagacaaagaatagatcctcaatacaatgaggttcaggctcagatggaaa

SEQ ID NO: 102428 - DNA, 249 bp, Glycine max
  unsure (1)..(249): unsure at all n locations
tgaaattttaataaaccgcgatcacaggttgccgcaccttaaaaccggaaacaaaagcaatcgttacttgatttcaagaatttctcaatttcttcctacttctttgtgtacgatttcttaagggaaagaaaatcactctctgtgctggtcacagacttcgtgaatcattttcttttccactcctcatataaattaagaacactcncctatnggatataggacttcgtgtcagatttaaactttttctgt

SEQ ID NO: 102429 - DNA, 254 bp, Glycine max
acatgagcttgccaaagagttgcaaggcaagccagatctgattgtcggaaactacagtgatggaaacattgttgcctctttgttggcacataaattaggagtcactcagtgtaccattgctcatgcacttgagaagaccaaataccccgaatccgacatttactggaaaaaattggaagagagataccacttctcttgccaattcacagctgatctatttgccatgaaccacacagatttcattatcaccagta

SEQ ID NO: 102430 - DNA, 252 bp, Glycine max
aaaggattctacccgccgctcgatgggaattgcgcttcaaggcgtctcgtagggctaatccgcctcacgagggtcaccaacggcacgtgcctttggggggccgaggcccctactgctggtcggcaaacggacggcgggcgcacgcgtcgcttctagcccggattctgacttagaggcgttcagtcataatccaacgcacggtagcttcgcgccactggcttttcaaccaagcgcgatgaccaattgtgcgaa

SEQ ID NO: 102431 - DNA, 254 bp, Glycine max
ctgggaaccaagagcaagagtttctaaaatatcagcagcagcagcaaggaggttcccaaagccagaaaggaaagcaacaagaagaagaaaacgaaggaagcaacatattgagtggcttcgcccctgaattcttgaaagaagcgttcggcgtgaacatgcagatagtgagaaacctacaaggtgagaccgaagaggaggatagtggagccattgtgacagtgaaaggaggtctaagagtcacagctccagccatg

SEQ ID NO: 102432 - DNA, 260 bp, Glycine max
agattcgggcactgagcaaacgtgccaaatctagttcaaggaaaaccatttcttctgaagataaaccttttaacttgagaagccgcgaccccatctactccaacaagcttggcaagttctttgagatcaccccagagaaaaacccccagcttcgggacttggatatcttcctcagtattgtggatatgaacgagggagctcttcttctaccacacttcaattcaaaggcgatagtgatactggtaattaatgaaggagat

SEQ ID NO: 102433 - DNA, 257 bp, Glycine max
gtctttgaacactcatcaccatggccaagcttgttctttccctttgtttccttcttttcagtggctgcttcgctctgagagagcaggcacagcaaaatgagtgccagatccaaaagctgaatgccctcaaaccggataaccgtatagagtcggaaggtgggttcattgaaacctggaaccctaacaacaagccattccagtgtgccggtgtagccctctctcgcagcacccttaaccgcaatgcccttcgtagacct

SEQ ID NO: 102434 - DNA, 260 bp, Glycine max
tctcgagcgaatcggctcgagcaatccttcaaaaattttgactctttgtgtgtgtatggtgatgacaacttaattagtgtacatgaatatgtcaagccttactttagtggttctaaattgaaaagctttctagctggtcataatatcaccattactgatggtattgacaaaactagcgcaactttgcaatttagaaagttagcagattgtgactttctcaaaagaaactttaagcagatgtctaatgtcttgtgggtggc

SEQ ID NO: 102435 - DNA, 256 bp, Glycine max
ctcgagccgttttgtcaattttctattgaccttctcggtggaggaattttagtggacaaaactggagattggatcacacttatacaaaattctccaattagtaacttgttgagagttgctgcttggaagaaaggctgtttaatggttaagattgtgatgtctgggaatgcagcagtcaaaaggagtgattgggcctcattggtacaagtgtttttaacaaacagcaacagtacagagcattttgatgcatgtaagt

SEQ ID NO: 102436 - DNA, 255 bp, Glycine max
agaaaatgaagagcactagcttgttcgctatctttctactttgcgccttcacctcatacctaccttccgccaccgcccaggacgtgctcgacgtggatggcgatccgattcggaacggtttcatatactacgttttgccggcaataagaggaaacggtggcggaatagaacgagccgcactcgggaaagacacttgccctatcactgtagtgcaatctcccaatccaaactctaaggggttagaaattaagtttg

SEQ ID NO: 102437 - DNA, 250 bp, Glycine max
atagtagtgttggtgggttgcaaagatgcttgtggggtcttctccataggggtcataagataaaagggacagtggtgttgatgcgcaagaatgtgttggacgtgaatagcgtaaccagcgttgggggaattattggtcaaggtctcgacttagttggctcaacactcgatactcttactgccttcttgggccgatccgtgtctctccagcttattagtgctaccaaagctgatgccaacggcaaagggaa

SEQ ID NO: 102438 - DNA, 252 bp, Glycine max
aattgttgtaactttttgattcctaaattctctaaaattcgaaattctaatttcgttaggggaaagagattgtttgtgtgtgagtgagtatggctggaaaaggcgagggtcctgctatcggaatcgatttgggaacgacgtactcttgcgtcggcgtgtggcaacacgatcgtgttgaaatcatagccaacgatcagggtaacagaactaccccatcctacgtggctttcaccgacacagaacggttgatcg

SEQ ID NO: 102439 - DNA, 250 bp, Glycine max
gatccatccttattcgttcctcactcaccagccacagattctctcttctctattcagtaaacggctgttttgtatacgagctgtcccagtctcagcctatacatcccaaaacatcaaaacaactggttgggctccttgtatggcttcttcctcagttggtagaagggctacatattcaacacaatctgtatcaacaaatgagccagttgtatctgtagattggctttatgataacctgaaggagccagat

SEQ ID NO: 102440 - DNA, 254 bp, Glycine max
gagcagcagcgagagagcgaagaaagtgaagattctgagttacgaagacataagaataagaacccttttctcttcggctctaacaggttcgaaactctcttcaaaaaccaatatggtcgcattcgcgtcctccagaggttcaaccaacgctccccacaacttcagaatctccgagactaccgcattttggagttcaactccaaacccaacaccctccttctccccaaccatgctgacgctgattacctcatcgt

SEQ ID NO: 102441 - DNA, 253 bp, Glycine max
ctcgagcgcaataattccttcacttgcagaacttagttctctgttgcatcatcatcatcttcattagtgttagccctaaacttcaccttcaaccatgaccacagtgccaccacacagtgtccaagtgcacacaacaacacaccgctacgaagccggcgtcgtcccgccggctcgttttgaggcgccgcgttacgaagccggcatcaaggcgccctcttccatttaccattccgagagaggtccgacgacctct

SEQ ID NO: 102442 - DNA, 247 bp, Glycine max
cgcaacaaaaagaaagaatcccaggcgaggagaaagatggaggggaaggagcaggatgtgtcgttgggagcgaacaagttccccgagagacagccgattgggacggcggcgcagagccaagacgacggcaaggactaccaggagccggcgccggcgccgctggttgacccgacggagtttacgtcatggtcgttttacagagcagggatagcagagtttgtggccacttttctgtttctctacatca

SEQ ID NO: 102443 - DNA, 250 bp, Glycine max
atgaacaaattccctctcaccctcctcgccgaccaagccatggaaagcgtgaacaagacgaggacgaggacgaagatgaagataaacctcgtcctagtcgaccaagccaaggaaagcgtgaacaagaccaggaccaggacgaggacgaagatgaagatgaagatcaacctcgcaagagccgcgaatggagatcgaaaaagacacaacccagaagacctagacaagaagaaccacgtgaaagaggatgcga

SEQ ID NO: 102444 - DNA, 249 bp, Glycine max
attgtctttgaacactcatcaccatggccaagcttgttctttccctttgtttccttcttttcagtggctgcttcgctctgagagagcaggcacagcaaaatgagtgccagatccaaaagctgaatgccctcaaaccggataaccgtatagagtcggaaggtgggttcattgagacctggaaccctaacaacaagccattccagtgtgccggtgttgccctctctcgctgcacccttaaccgcaatgccc

SEQ ID NO: 102445 - DNA, 253 bp, Glycine max
acaattagtaacttgttgagagttgctgcttggaagaaaggttgtttaatggtcaagattgtgatgtctgggaatgcagcagtcaaaaggagtgattgggcctcattggtacaagtgtttttaacaaacagcaacagtacagagcattttgatgcatgtaagtggacaaaatcagaaccacattcctgggaattaatcttcccaatagaggtatgtggtcctaataatggttttgaaatgtggagttctgagt

SEQ ID NO: 102446 - DNA, 257 bp, Glycine max
ggagtgagagagagtgttcttcgtttgctaccttctcccagaaatggttacgctcaggtttcaccagtaccaggtggtcgggagggctctcccaacggaagcagatcagcatccgaagatctaccgaatgaagctctgggccaccaacgaggttcgcgccaagtctaagttctggtattttttgaggaagctgaagaaggtgatgaagagcaatggtcaggtgctagctatcaacgagatttttgagacgaccccaa

SEQ ID NO: 102447 - DNA, 258 bp, Glycine max
ttcaaaccttgctctatactacacagtacacacactagaagaataatggcttccatcctccactactttttagccctctctctttcttgctcttttcttttcttcttatccgactcagtcacccctacaaaaccaataaaccttgttgttctacccgttcaaaatgatggttccacagggctccattgggccaacctccaaaaaagaacccctctaatgcaagtaccagtcctggtggacctcaatggaaatcacttg

SEQ ID NO: 102448 - DNA, 260 bp, Glycine max
cggctcgagcaaaactggagattggatcacacttatacaaaattctccaattagtaacttgttgagagttgctgcttggaagaaaggctgtttaatggttaagattgtgatgtctgggaatgcagcagtcaaaaggagtgattgggcctcattggtacaagtgtttttaacaaacagcaacagtacagagcattttgatgcatgcaagtggacaaaatcggaaccacattcctgggaattgatcttcccaatagaggtat

SEQ ID NO: 102449 - DNA, 255 bp, Glycine max
ctataatcctgaaaatgcagttcgtagtatttttgttgcgcctttcagaggcggaatgcccattcgggtggttacatttccgaatagcattgtgcagatatgaaccaggcatgaatccaaggtttcatctattgagtaccactaccaatggtgattttgttcaaggagaagatctcggattggttaaagttaatgtagcatgtagctgcagttggcttgacatcatgttacactcgaactccattgtggcaatct

SEQ ID NO: 102450 - DNA, 251 bp, Glycine max
acgatttgaagcctggaatgaagggctactcttatcatgcttcgagtgtgacgaccttgatgacatgtgtggacatgatatttgaagatgccctctgccatcgatcaccagtgctatcttcgttgcatgtgagttgtagtgaatagtactcatagatctctgggtgatgttggtaaaggtaagcatgagattgagtctttgaagccaactcttttcatcatcgtcaggaccaacttcagttaaacgaccat

SEQ ID NO: 102451 - DNA, 248 bp, Glycine max
gatgcaaacattgaacttgttggcctaaaagaacaacaacaggagcagcaacaggaagagcaacctttggaagtgcggaaatatagagccgaattgtctgaacaagatatatttgtaatcccagcaggttatccagttgtggtcaacgctacctcaaatctgaatttctttgctattggtattaatgccgagaacaaccagaggaacttcctcgcaggttcgcaagacaatgtgataagccagatacc

SEQ ID NO: 102452 - DNA, 249 bp, Glycine max
tgtggacgcaagcaggggcaacaccagcaggaggaagaggaagaaggtggcagcgtgctcagtggcttcagcaaacacttcttggcacaatccttcaacaccaacgaggacaaagctgagaaacttcagtctccagacgacgaaaggaagcagatcgtgacagtggaaggaggtctcagcgttatcagcaccaagtggcaagaacaacaagatgaagatgaagatgaagacgaagatgatgaagatgaa

SEQ ID NO: 102453 - DNA, 248 bp, Glycine max
agaagatgggtttgaagaacaacatggtggtgctaaaggtgtgtttggtgctacttttccttgtggggggtactactagtgccaacttgaggctgagtaagcttggcctgctcatgaaaagtgatcatcatcaacactcaaatgatgatgagtcttcaaaaccatgctgtgatcaatgcgcatgcacaaagtcaaaccctcctcaatgccgctgttcagatatgaggctgaattcgtgccattcagct

SEQ ID NO: 102454 - DNA, 255 bp, Glycine max
atgtctttgaacactcatcaccatggccaagcttgttctttccctttgtttccttctagtcagtggctgcttcgctctgagagagcaggcacagcaaaatgagtgccagatccaaaagctgaatgccctcaaaccggataaccgtatagagtcggaaggtgggttcattgagacctggaaccctaacaacaagccattccagtgtgccggtgttgccctctctcgctgcacccttaaccgcaatgcccttcgtag

SEQ ID NO: 102455 - DNA, 224 bp, Glycine max
cagcagcaacagcagctaccttcgctattggaaccaccggttccctcggccacagaggaagctcgcttcctcaatcaaagtccttatgggctgaaattcaactctctgaatcatttgaacagcttctgtggcctcaaggctatgtcatccgtgagatgcgagtcggaatcctccttcatcggtaacaaaaccggcgctgctatacgggcgtctttcgcatccaa

SEQ ID NO: 102456 - DNA, 250 bp, Glycine max
gtggcttcaagctctgcctcgtgctctagttgttggttttgtaaaaactgacatagagtttcagaaaaaaggggaaacttcaggaacaacagctacatttgttctggttgatggatggactgttactgttgcatctgttggggattcccgttgcatattagatactcaaggaggtgttgtttctctcttgacagttgatcacagattggaagaaaatgcagaagagagggaacgcgttactgccagtggt

SEQ ID NO: 102457 - DNA, 249 bp, Glycine max
caccaacgaggacatagctgagaaacttcagtctccagacgacgaaaggaagcagatcgtgacagtggaaggaggtctcagcgttatcagccccaagtggcaagaacaacaagatgaagatgaagatgaagacgaagatgatgaagatgaacaaattccctctcaccctcctcgccgaccaagccatggaaagcgtgaacaagacgaggacgaggacgacgatgaagataaacctcgtcctagtcgacc

SEQ ID NO: 102458 - DNA, 247 bp, Glycine max
gtggacatacgtgaagattttaattatcagtctaaatatttcattagcacttaatacttttctgttatattcctatcctataagtagtcccgattctcccaacattgcttattcacacaactaactaagaaagtcttccatagccccccaaaaatgaagagcaccatcttctttgctctctttctcttttgtgccttcaccacctcatacctaccttcagccatcgctgatttcgtgctcgataatg

SEQ ID NO: 102459 - DNA, 264 bp, Glycine max
  unsure (1)..(264): unsure at all n locations
ttcggctcgagcangagcagcgagagagccaaagagtgcagattctgagttaccacgacataagaataagaacctatatctcttcggctacaacaggttcgaaactctcttcaaaaaccaacatggtcgcattcgcgtcctccagaggttcaaccaacgctccccacaacttcagaatctccgagactaccgcattttcgagttcaactccaaacccaacaccctccttctccccaaccatgctgacgctgattacctcatcgt

SEQ ID NO: 102460 - DNA, 246 bp, Glycine max
aaacactcatcagtcatcaccatggccaagctagttttttccctttgttttctgcttttcagtggctgctgcttcgctttcagttccagagagcagcctcagcaaaacgagtgccagatccaaaaactcaatgccctcaaaccggataaccgtatagagtcagaaggagggctcattgagacatggaaccctaacaacaagccattccagtgtgccggtgttgccctctctcgctgcaccctcaac

SEQ ID NO: 102461 - DNA, 108 bp, Glycine max
caataaaggaaattaggcatgaccctcttgttgagtatgctctgcctatttgaaaatttccacacctcttttaattatcgtaatgatgtgtgaagtgtgtgttatttt

SEQ ID NO: 102462 - DNA, 254 bp, Glycine max
cttaattattaacacttccttagttcaatatggggaagccctatcactctctctctttcttccctttgcttgctactcttgtcgagtgcatgctttgctattagctccagcaagctcaacgagtgccaactcaacaacctcaacgcgttggaacccgaccaccgcgttgagtccgaaggtggtttgattcaaacatggaactctcaacaccctgagctgaaatgcgccggtgtcactgtttccaaactcaccct

SEQ ID NO: 102463 - DNA, 254 bp, Glycine max
gaaacaaaactacccttttgcttttgctctttgttctttgccatggagtggccacaacaacaatggccttccatgatgatgagggtggtgataaaaagtcaccaaaaagtttgtttttgatgagcaactccacgagggttttcaagactgatgcaggggaaatgcgtgtgctgaaaagccatcgtggtaggatattttataggcacatgcacattggcttcatctctatggaaccaaagtccttgtttgttcct

SEQ ID NO: 102464 - DNA, 251 bp, Glycine max
gaaagatatcagtggcaaccccagagcacttaggaggttgaggactgcctgtgagagggcaaagagaactctatcttcaactgcccaaaccaccattgaaattgattctctctatgagggaattgatttctactccaccattactcgtgctagatttgaggagctcaatatggatctcttccgcaagtgcatggaaccagttgagaagtgtttaagagatgctaagatggacaagaggactgtccatgatg

SEQ ID NO: 102465 - DNA, 247 bp, Glycine max
ctcttccctctgccgccgcaccctgcaaattcaatggcttcagagaagaaactatcgaacccaatgagggaaataaaggtgcagaaactcgtcctcaatctccgttggtgagagtggagatcgtctcaccagagccgccaaggtgttggaacagcttagtggccaaaccccagtgttttccaaagcaaggtacactgttcggtcctttgggattagaagaaatgagaagattgcatgctatgtcact

SEQ ID NO: 102466 - DNA, 243 bp, Glycine max
ggtttgattaccaagcaagttatgagcaagatggcagaaatgataaacagtctttgtggtggtgatgaaaaattgatgcgtgaaaggacgcacctgctgttggcttgttgttcaaggatggcaatttgtaagaaagatgtttggagagttgaatgtggaatcccttctggatttccgctcacagttatttgcaatagcatttttaatgagatgctcattagatatagctatgaaaaattactg

SEQ ID NO: 102467 - DNA, 248 bp, Glycine max
gttcaatatcctagtataccttaataaataatttaagatactatgatgagagcacggttcccattactgttgctgggacttgttttcctggcttcagtttctgtctcatttggcattgcttactgggaaaaagagaagcccaaacacaacaagtgtctccagagttgcaatagcgagagagactcgtacaggaaccaagcatgccacgctcgttgcaacctccttaaggtggagaaagaagaatgtga

SEQ ID NO: 102468 - DNA, 242 bp, Glycine max
ggaaaaagttgtattgaaattttcacaagaggaatttcttacagcttggtcaactcaggtgcgtcctacaacaactctgttggctgatgggtgtccatatttgtatgctatggtgcatgatagttcagtgtctacaataccaggtgattttgtcattggtgttaagttgacaaccataaacaatatgtgtgcatatgggctcaatcctggtatttcaggttctcgtcttttgggtaccattc

SEQ ID NO: 102469 - DNA, 244 bp, Glycine max
cgctcttctctctagagctgctgcgttgctaaaacgcaccggtttgttcctgttctcgttcaaaagaaaactgacacaagtgaagcttggtgcataaacagcaatggcagtaaaaccccaaccggttcgggttctctactgcggcgtgtgcagtttgccccccgaatactgcgaattcggatccggtttcgagaaatgcaaaccctggttgatccaaaacgtccctgacctatacgctgatctt

SEQ ID NO: 102470 - DNA, 243 bp, Glycine max
ccagaggcgacgagttttagcgacaagggtttcggtcctgttccatcccgatggaaaggcacctgcatgacatcaaaagacttcaattcctcttgttgtaacaggaagataattggcgcgaggttttaccctaacccagaggagaaaacggcaagggatttcaacggacatgggactcacgtttcgtcgacggcagtgggcgtgccggtgagtggcgcatcgttctatggtctggcggcgggg

SEQ ID NO: 102471 - DNA, 247 bp, Glycine max
caatagcaaagaaatgtgataagccagatacctagtcaagtgcaggagcttgcattccctgggtctgcacaagctgttgagaagctattaaagaaccaaagagaatcctactttgtggatgctcagcctaagaagaaagaggaggggaataagggaagaaagggtcctttgtcttcaattttgagggctttttactgaataagtatgtactaaaatgtatgctgtaatagctcatagtgagcgagga

SEQ ID NO: 102472 - DNA, 234 bp, Glycine max
gaatccatggcagccattggtctgaatggcgtaaaggttgggacgacgtcgtctcaggcgtaccttgaaggcaaggcagtgaaggagacgagagcgttgatggctgaactgtgtcgccatttctacacccttggatgggtgacagggacaggtggcagcatctccatgaaggtccacgatgactccatccccaggcctcaacagctcatactcatggccccttctggtgttcag

SEQ ID NO: 102473 - DNA, 253 bp, Glycine max
tggatccagacgcgttggcaaaggcattcgtggagcactactacagcaccttcgacaccaacaggaacggcttagcgaatctctaccaggagggttccatgctcactttcgaagggcagaagatccaaggcgcttccaacatcgttgccaagctcacctccctcccttttcagcagtgccaccactcaatctccaccgtcgactgccagccctccggcgtcaacgccggcatgctcgtcttcgtcagcggaaa

SEQ ID NO: 102474 - DNA, 251 bp, Glycine max
agaagacgaacactatcatggcttcttcactcagaatctcaagacttatctctcgctccttttcttctacttctttcttttcacgaggtgggaatggtttccttggttcaagacaaagtaaattcagcacttctgctgccattgaggaagaacccattaaaccatcaatacaagtagaacacactcaactcttaattgatggaaaatttgtagatgctgcttctggtaaaacttttcaaactttagatcct

SEQ ID NO: 102475 - DNA, 227 bp, Glycine max
ctgccgtttcctttgttggtgttgctgggaactgtcttcctggcatcactctgtctctcattaaaggtgagacacgatgagaataaccctttctacttgacaagctctaacagctttcaaactctctttgagaatcataacggtcgccttcgtctcgttcagacatctaacaaacgatgcccacaacttgagaaccttcgagactaccggattgtccagtttcagtc

SEQ ID NO: 102476 - DNA, 247 bp, Glycine max
cggctcgagctcgagccgaatacggctcgaggcaacaaagaccccaggaagaggaagaagaaactgagaatgagaagccacagtgcaagggtaaagacaaacactgccaacgcccccgaggaagccaaagcaaaagcagaagaaatggcattgacgagaccatatgcaccatgagacttcgccacaacattggccagacttcatcacctgacatctacaaccctcaagccggtagcgtcacaaccgc

SEQ ID NO: 102477 - DNA, 242 bp, Glycine max
cagaggaacaatggcgggtagggtttcgacgtgcttcttcttcgtgtttgctctttctctccttcttccttttcagatctccgctgaggaatcatcggagaaagagttcgtactcacattggatcactctaactttcacgacactgtcagcaagcacgatttcatcgtcgtcgagttctacgctccatggtgtggccactgtaagaagcttgctcccgagtatgagaaagctgcttctatct

SEQ ID NO: 102478 - DNA, 240 bp, Glycine max
gagaaattcaatttcattggaacaattggaacaccggcttttcatcgccaaatagctgcacatttggaaaagatgccattgtggcaaaaagcaattttgtgtggaatgggacattgtttgtctcggaaaagcaaagaaacctggtatactggtgtgaaggagaaatttgtgcagatgatgaaaagcatctatgaaactgaggtcacagattggccagtgccattgaaaatcatttctggt

SEQ ID NO: 102479 - DNA, 243 bp, Glycine max
ctttgaacactcatcaccatggccaagcttgttctttcccttagtgtccttcttttcagtggctgcttcgctctgagagagcaggcacagcaaaatgagtgccagatccaaaagctgaatgccctcaaaccggataaccgtatagagtcggaaggtgggttcattgagacctggaaccctaacaacaagccattccagtgtgccggtgttgccctctctcgctgcacccttaaccgcaatgcc

SEQ ID NO: 102480 - DNA, 240 bp, Glycine max
ctcgtgctcagacttgtcactaataacatgagaccatcagggttccacgtggggcaaggtgttggagtaggacacatgcttatacttgagataatcatgacatttgggctaatgtacactgtgtatggtactgcaattgatcccaaaaggggttctgttagcaacattgcacctttggcaattggactcattgttggggcaaacatccttgttggtgggccatttgatggagcctgcatg

SEQ ID NO: 102481 - DNA, 244 bp, Glycine max
gtattctgatcgctccctgagagagctcgtcgcggcggttgcagaagaagattgcaagatgaagttcaacatcgcgaatcccaccactggatgccagaagaagctcgagatcgacgacgatctgaaactgcgagcattttgggacaagaggatctcacaggaggtcatcggagatgcactcggtgaggaatttaagggctatgtcttcaaaattaccggaggttgtgacaaacaaggatttcca

SEQ ID NO: 102482 - DNA, 247 bp, Glycine max
atggaatcaggcgtttagtgctgtctaagaacaaaccattagtggttcagtttcagaaatttagagtactatcttctttgctctctttctagtttgtgccttcaccatctcatacctgccttcagccaccgctcagttcgtgctcgacactgatgatgatcctcttcaaaacggtggcacatactatatgttgccagttatgagaggaaagggcggtggaatagaagtagattcaactggaaaagaa

SEQ ID NO: 102483 - DNA, 250 bp, Glycine max
gtggacgcaagcaggggcaacaccagcaggaggaagaggaagaaggtggcagcgtgctcagtggcttcagcaaacacttcttggcacaatccttcaacaccaacgaggacagtgctgagaaacttcagtctccagacgacgaaaggaagcagatcgtgacagtggaaggaggtctcagcgttatcagccccaagtggcaagaacaacaagatgaagatgaagatgaagacgaagatgatgaagatgaaca

SEQ ID NO: 102484 - DNA, 249 bp, Glycine max
caatatcctagtataccttaataaataatttaagatactatgatgagagcacggttcccattactgttgctggtacttgttttcctggcttcagtttctgtctcatttggcattgcttactgggaaaaagagaaccccaaacacaacaagtgtctccagatttgcaatagcgagagagactcgtacaggaaccaaacatgccacgctcgatgcaacctccttaaggtggagaaagcagaatgtgaagaa

SEQ ID NO: 102485 - DNA, 250 bp, Glycine max
cgaaacttcataaagaaagtcactaaaaaaccgcgggtggggacaccggctcgaccgggttcggctcttccgtcttttttattcgccctcttcaatgagaatcagaaaccgggtccgagtacggagcggcatttcgggttgttgcacccgaacgggtcgagggtttacgacgtggattcgtccgaggaaacgccggaggccagtatccggccgcttccggtgccggagaataatgaaaagtttaagggga

SEQ ID NO: 102486 - DNA, 254 bp, Glycine max
accgtattaaagaatttaagatatactatgatgagagcgcggttcccattactgttgctgggagttgttttcctggcatcagtttctgtctcatttggcattgcgtattgggaaaagcagaaccccagtcacaacaagtgcctccgaagttgcaatagcgagaaagactcctacaggaaccaagcatgccacgctcgttgcaacctccttaaggtggaggaagacgaagaatgcgaagaaggtcaaattccacg

SEQ ID NO: 102487 - DNA, 252 bp, Glycine max
aacctacctctttttcttctctctcaacaacttcacctacttcctcctcgatcatgtctcacttcaagggcaagtaccatgatgagcttatcgccaatgctgcgtacattggcactcctggaaagggcattcttgctgctgaggagtcaacagggacaattggcaagcgtttggccagcatcagtgtcgagaacattgaatccaacaggcgagctcttagggagctgcttttcactgctcctggtgttcccc

SEQ ID NO: 102488 - DNA, 251 bp, Glycine max
gttttaaatccacaaaatccatgacagataaataggtggatggggaaactgactttcccccagggatcttcccgtcgtgttaaaagaatgcctctttcaatagggggaggagctggtgcaaagaatgctattctcataaatatgccaaatgctgttctttcaatggggagatattttattggagacctcgtctttgaagtttctaagatgacttctccctacattaaatgtacagtctctttcttcatagc

SEQ ID NO: 102489 - DNA, 236 bp, Glycine max
gagtggagtaagtgtcgttcagatttcaataaagtatgggctgagatttatgctaaaaatcactacaaatcacttgatcatcgtagcttctacttcaaacagcaagattcaaagaacttgagcaccaaatctttggttactgagattaaagaccttaaagaaaagcagcagaaagaggacgatattattcagtctattgcagctggaaataaacagcctctaatttcacatctgga

SEQ ID NO: 102490 - DNA, 163 bp, Glycine max
ctcgagccgctagttttgatggtttgattaccaagcaagttatgagcaagatggcagaaatgataaacagtctttgtggtggtgatgaaaaattgatgcgcgaaaggacacacctgctgttggcttgttgttcaaggatggcaatttgtaagaaagatgtttg

SEQ ID NO: 102491 - DNA, 252 bp, Glycine max
aaatgatatacttcgagtggtcacaccattacaagaagattgggagatacggtttgcaattattaacgattttcgaagcattgttgaatctgtggaaagcctgagaggagcaactgttgagccatatggatcatttgtgtctaatctcttcacgcgatggggtgacttggatatttcaattgagctatcaaatggtttgcatatttcatctgcagggaaaaaacaaaaacagactttattgggggaggtttt

SEQ ID NO: 102492 - DNA, 250 bp, Glycine max
ctccattggtccttaaacactcatcagtcatcaccatggccaagctagttttttccctttgttttctgcttttcagtggctgctgcttcgctttcagttccagagagcagcctcagcaaaacgagtgccagatccaaaaactcaatgccctcaaaccggataaccgtatagagtcagaaggagggctcattgagacatggaaccctaacaacaagccattccagtgtgccggtgttgccctctctcgctg

SEQ ID NO: 102493 - DNA, 254 bp, Glycine max
ctcactcgcaagcaaaaagaaagaatcccaggcgaggagaaagatggaggggaaggagcaggatgtgtcgttgggagcgaacaagttccccgagagacagccgattgggacggcggcgcagagccaagacgacggcaaggactaccaggagccggcgccggcgccgctggttgacccgacggagtttacgtcatggtcgttttacagagcagggatagcagagtttgtggccacttttctgtttctctacatca

SEQ ID NO: 102494 - DNA, 251 bp, Glycine max
gtggcttcaagctctgcctcgtgctctagttgttggttttgtaaaaactgacatagagtttcagaaaaaaggggaaacttcaggaacaacagctacatttgttctggttgatggatggactgttactgttgcatctgttggggattcccgttgcatattagatactcaaggaggtgttgtttctctcttgacagttgatcacagattggaagaaaatgcagaagagagggaacgcgttactgccagtggtg

SEQ ID NO: 102495 - DNA, 253 bp, Glycine max
cggggaacagaagaagaaggtaaatttcttatctgctgatgattttgaaccccctcttatccctcccaagacaatcccagatcctgatgataaaaaacctgaggactgggatgagagagagaaaattccagactcaagtgcagtaaagccagatgactgggatgagaatgcacccttggaaattgttgatgaagaagctgagaaacctgaaggatgggacaatgaacctgaggagatagatgatccagaggca

SEQ ID NO: 102496 - DNA, 253 bp, Glycine max
tgcaatttagaaagttagcagattgtgattttctcaagcgaaactttaagcagatgtccaatgttttgtgggtggctcctgaggacaaggcgagtttatggtcacaacttcattatgtttcgtgtaataatctggaaatgcaagaagcttatcttgtcaatctcgaaaatgtgtcacgagaattgtatttgcacagtccagaggaagctcgccaattgagaaggaaagctctctctcgtattgaatggctgcc

SEQ ID NO: 102497 - DNA, 247 bp, Glycine max
cacctgagttgaccaagctgtaagaaattcctcttgtgcgtcctgcaacagggttgttgcaggagcacctgagttgaccaagctgtaagaaccctgttggctgatgggtgtccatatttgtatgctatggtgcatgacagttcagagtctacaataccaggtgattttgttattggtgttaagttgacaaccataaacaatatgtgtgcatatgggctcaatcctggtatttcaggttctcgtcttt

SEQ ID NO: 102498 - DNA, 241 bp, Glycine max
aaatgaccaagttcacaatcctcctcatctctcttctcttctgcatcgcccacacttgcagcgcctccaaatggcagcaccagcaagatagctgccgcaagcagctccagggggtgaacctcacgccctgcgagaagcacatcatggagaagatccaaggccgcggcgatgacgatgatgatgatgacgacgacaatcacattctcaggaccatgcggggaagaatcactacataaggagg

SEQ ID NO: 102499 - DNA, 244 bp, Glycine max
ctggtaattaatgaaggagatgcaaacattgaacttgttggcctaaaagaacaacaacaggagcagcaacaggaagagcaacctttggaagtgcggaaatatagagccgaattgtctgaacaagatatatttgtaatcccagcaggttatccagttgtggtcaacgctacctcaaatctgaatttctttgctattggtattaatgccgagaacaaccagaggaacttcctcgcaggttcgcaag

SEQ ID NO: 102500 - DNA, 227 bp, Glycine max
gttgtggtcaacgctacctcaaatctgaatttctttgctattggtattaatgccgagaacaaccagaggaacttcctcgcaggttcgcaagacaatgtgataagccagatacctagtcaagtgcaggagcttgcattccctgggtctgcacaagctgttgagcagctattaaagaaccaaagagaatcctactttgtggatgctcagcctaagatgaaagaggaggg

SEQ ID NO: 102501 - DNA, 257 bp, Glycine max
caagaaacggggttgaggaaaatatctgcaccttgaagcttcacgagaacattcctcgcccttcacgcgctgacttctacaaccctaaagctggtcgcattagtaccctcaacagcctcaccctcccagccctccgccaattccaactcagtgcccaatatgttgtcctctacaagaatggaatttactctccacattggaatctgaatgcaaacagtgtgatctatgtgactcgaggacaaggaaaggttagagtt

SEQ ID NO: 102502 - DNA, 254 bp, Glycine max
gtccccgccgtaatcaccgttgcgctcctgagcctggggttcctcgcctcgagtgggttcggtgtggcggcgatcacggtgctggcgtggatctacaggtacgtcaccggcaagcaaccacctggcgcggatcagttagacagcgcgcgtcacaagatcatggacaaggcgcgtgagatcaaggactacggacagcaacaaatcagcggggtccaggcttcttaattctgcactcgcacgcacatgatcgtatc

SEQ ID NO: 102503 - DNA, 250 bp, Glycine max
ggtgatgaaaaattgatgcgtgaaaggacgcacctgctgttggcttgttgttcaaggatggcaatttgtaagaaagatgtttggagagttgaatgtggaatcccttctggatttccgctcacagttatttgcaatagcatttttaatgagatgctcattagatatagctatgaaaaattactgcgccaggctaaagctccaagtatgtttatacaatccttcaaaaattttgtgtctttgtgtgtgtatg

SEQ ID NO: 102504 - DNA, 244 bp, Glycine max
actcgagcgccagttcaatatcctagtacaccgtattatagaatttacgatgtcctatgatgagatcgtggttcccattactgttgctgggagttgttttcctggcatcagtttctgtctcatttggcattgcgtattgggataagcagaaccccaatcataacaagtgcctccgaagttagcatagcgagaaagactccgacagggaccaagcatgccatgctcgttgcaacctccttagggt

SEQ ID NO: 102505 - DNA, 251 bp, Glycine max
cgctgaagctctcagaaaggcttgcgaaggatggggaactgatgagaacactgtcatagtaattttgggtcatagaactgtgtatcagaggcagcaaatcagaagagtttatgaggaaatttaccaggaggatcttgtgaagcgcctagagtctgagatcaaaggagactttgagaaagccgtgtaccgatggatactggaacctgcagatcgtgatactgttttggccaatgttgccatcaagagtggca

SEQ ID NO: 102506 - DNA, 237 bp, Glycine max
ccaccattatatgcttgatggctgctacccctcttcatcgacgtgccaaggtgttacgtatggttgttagtacctatcaggctgctagtggtgcgggtgctgctgcaatggaagagcttcagctgaaaactcgtgaggtgttggaaggaaaacggcccacttgtaaaatatttacccgacagtatgcttttaatctattctcgcataatgcgtctgttctttcaaatggatataatg

SEQ ID NO: 102507 - DNA, 246 bp, Glycine max
cggaacattttagaggcctcctacgataccaaattcgaggagataaacaaggttctgtttagtagagaggaagggcagcagcaaggggagcagaggctgcaagagagcgtgattgtggaaatctcgaaggaacagattcgggcactgagcaaacgtgccaaatctagttcaaggaaaaccatttcttctgaagataaaccttttaacttgagaagccgcgaccccatctactccaacaagcttggc

SEQ ID NO: 102508 - DNA, 252 bp, Glycine max
caggaacattttagaggcctcctacgataccaaattcgaggagataaacaaggttctgtttagtagagaggaagggcagcagcaaggggagcagaggctgcaagagagcgtgattgtggaaatctcgaaggaacagattcgggcactgagcaaacgtgctcaatctagttcaaggaaaaccatttcttctgaagataaaccttttaacttgagaagccgcgaccccatctactccaacaagcttggcaagtt

SEQ ID NO: 102509 - DNA, 247 bp, Glycine max
  unsure (1)..(247): unsure at all n locations
tgccgtttctattattgacaccaacagcttggagaaccagctcgaccagatgcctaggangttctatcttgctgggaaccacgagcacgagtttctaaaatatcagcaagagcacggcggtcatcaaagccagaaaggaaagcatcagcaagaagacgaaaacgaaggaggcagcatattgagtggcttcaccctggaattcttggaacatgcattcagcgtggacaagcagatagcgaaaaaccta

SEQ ID NO: 102510 - DNA, 243 bp, Glycine max
atggaatcaggcgtttagtgctgtctaagaacaaaccattagtggttcagtttcagaaatttagagtactatcttctttgctctctttctagtttgtgccttcaccatctcatacctgccttcagccaccgctcagttcgtgctcgacactgatgatgatcctcttcaaaacggtggcacatactatatgtcgccagttctgagaggaaagggcggtggaatagaagtagtttcccctggaaa

SEQ ID NO: 102511 - DNA, 235 bp, Glycine max
tcaagatggaagtgattagatctcaaggcattcctgctgacgatcttgcaaagcgagctcatgactttgacaaagatctagctcatgaaagcctcaaggattaaattcctgccgttgaccccttatattctactagggtaaataagtttgccgaaattatgatgcttagacccagtgtcgttggtgatcttaaacttctaactgacgggaagttatctgagggtaagcatattcc

SEQ ID NO: 102512 - DNA, 227 bp, Glycine max
atacaaggtgagaacgaagaggaggatagtggagccattctgacagtcaaaggacgtctaagagtcacagctccagccatgaggaagcgacagcaagaagacgatgacgatgatgagcgtgagctgccacagtgcgtgcagacagccaaaggttgccaacgccaaagcatgaggcgcaaatttggcattcatgcgcccgatggacacacttcgactgcgccagaaca

SEQ ID NO: 102513 - DNA, 112 bp, Glycine max
tgaagaggaagatgaggatgaggatgaggaacaagatgaacgtcaatggccattcccagggccacctcatcagaaggaagagcgaaagcaagaggaagatgaggatgatgag

SEQ ID NO: 102514 - DNA, 245 bp, Glycine max
gaaggagaagcaaacattgaacttgttggcattaaagaacaacaacagaggcagcaacaggaagagcaacctttggaagtacggaaatatagagctgaattgtctgaacaagatatttgtctactcccagcaggttatccagttgtggtcaacgctacctcagatctgaatttctttgcttatggtatcaatgccgagaacaaccagaggaacttccttgcaggttcgaaagacaatgtgataag

SEQ ID NO: 102515 - DNA, 180 bp, Glycine max
cgagtatctaaaatatcagcagcagcagcaaggaggttcccaaagctagacaggaacgcaccaaggagcagactacgaaggaagcaacatattgagtggcttcacacctgaattcttgaaagaaacgttcggagtgctcatgcagatagtgagaaacctacaaggtgagagcgacgagga

SEQ ID NO: 102516 - DNA, 150 bp, Glycine max
cgcaaagcaatggctacttcaaagttgaaaacccagaatgtggttgtatctctctccctaaccttaaccttggtactggtgctactgaccagcagggcaaactcagcggaaactgtttctttcagctggaacaagttcgtgccgaagcaa

SEQ ID NO: 102517 - DNA, 248 bp, Glycine max
caatagcaaagaaatgtgataagccagatacctagtcaagtgcaggagcttgcattccctgggtctgcacaagctgttgagaagctattaaagaaccaaagagaatcctactttgtggatgctcagcctaagaagaaagaggaggggaataagggaagaaagggtcctttgtcttcaattttgagggctttttactgaataagtatgtactaaaatgtatgctgtaatagctcatagtgagcgaggaa

SEQ ID NO: 102518 - DNA, 227 bp, Glycine max
ccatagcaaagaaatgtgataagccagatacctagagcaagtgcaggagcttgaataccctgggtctgcacaagctgttgagaagctattaaagaaccaaagagaatcctactttgtggatgctcagcctaagaagaaaaaggaggggaataagggaataacgggtcctttgccttcaatttagctggctttttactgaatacatatgtactaaaatgtatgctata

SEQ ID NO: 102519 - DNA, 244 bp, Glycine max
tcgaggaggaagaagaagaagaagatgtcgtacctgttgcctcacttgcactctggatgggccgtcgatcaagcaatcctcgccgaagaggagcgtctcgtcgtcatccgtttcggccacgactgggacgaaacctgcatgcagatggacgaggtgttggcgtcagtggcggagacgataaagaactttgcggtgatatacctggtggacataacggaggtgccggatttcaacaccatgtacg

SEQ ID NO: 102520 - DNA, 247 bp, Glycine max
cgcatctgatggtttatgggagcacttgagtaatgagaaagccgtggatattgtaaacagcaatccacatgcgggtagtgccaagagacttatcaaggctgctctacacgaagcagcaagaaaacgagaaatgcgatattcagacctccgtaagattgacaagaaggttcgacgccattttcatgatgatatatccgttattgttttattcttaaatcacgaccttatttccagaggcacagtgcta

SEQ ID NO: 102521 - DNA, 245 bp, Glycine max
caacaagcttggcaagttgtttgagattaccccagagaaaaaccctcagcttcgggacttggatgtcttcctcagtgttgtggatatgaacgagggagctctttttctgccacacttcaattcaaaggccatagtggtactagtgattaatgaaggagaagcaaacattgaacttgttggcattaaagatcaacaacagaggcagcaacaggaagagcaacctttggaagtgcggaaatatagag

SEQ ID NO: 102522 - DNA, 226 bp, Glycine max
aaacttattaacactttccttagttcaatatggggaagcccttcttcactctctctctttcttccctttgcttgctactcttgtcgagtgcattctttgctattacctccagcaagttcaacgagtgccaactcaacaacctcaacgcgttggaacccgaccaccgcgttgagtccgaaggtggtcttattgaaacatggaatctcaacaccctgagctcattgcg

SEQ ID NO: 102523 - DNA, 180 bp, Glycine max
caaattagcaatcaaagtatctggaattcactggtggtacaaagttgaaaatcatgctgcagagcttactgctggatattacaaccttaatgatagagacggataccgccccattgcaaggatgctgtctcgccatcatgccattttgaactttacatgtcttgagatgagggattcaga

SEQ ID NO: 102524 - DNA, 245 bp, Glycine max
ggattcagcaggaacattttagaggcctcctacgataccaaattcgaggagataaacaaggttctgtttagtagagaggaagggcagcagcaaggggagcagaggctgcaagagagcgtgattgtggaaatctcgaaggaacagattcgggcactgagcaaacgtgacaaatctagttcaagaaaaaccatttcttctgaagataaaccttttaacttgagaagccgcgaccccatctactccaa

SEQ ID NO: 102525 - DNA, 244 bp, Glycine max
gtttagtggtaaaagtgcgattcgttccatggacccctaaatagttaagggatcccccgtttgattcatattccgatcaaaaactttatttcttacttaaagggaatcctttataccctcaatgaatgatttgcggtataatatacattatcgtaatttgtatacaagaagtatcaattctaaattgacaacttgagttctaaaattatgaaacataagtttttagaattggatctataatccg

SEQ ID NO: 102526 - DNA, 244 bp, Glycine max
taagaaatgaagagtactatcttctttgctctctttctagtttgtgccttcaccatctcatacctgccttcagccaccgctcagttcgtgctcgacactgatgatgatcctcttcaaaacggtggcacatactatatgttgccagttatgagaggaaagggcggtggaatagaagtagattcaactggaaaagacatatgccctctcactgttgtgcaatcacccaatgagctcgataagggga

SEQ ID NO: 102527 - DNA, 146 bp, Glycine max
tggcgaacttcctgaagacgaagacgaccaccgaccgcgtgaagatctacgacgtgaacccggacatcctgcgggccttcgccggcagcggcatctccgtgacggtgaccgcccccaacggcgacatcgccgccttgaaccaaaat

SEQ ID NO: 102528 - DNA, 238 bp, Glycine max
tttcgcttcttcgatcttcgatcttcgtcgctgaaaatgagagagtgcatttcaatccacatcggccaggccgggattcaggttggaaacgcctgctgggagctttactgcctcaaacacggcattcagcctgatgggcagatgccaagtgacaagaccgttggtggaggtgatgatgctttcaacaacttcttcagtgacactggaggcaggaaagcacgtgccccgtgcgattttt

SEQ ID NO: 102529 - DNA, 239 bp, Glycine max
gccgaccaagccatggaaagcgtgaacaagacgaggacgaggacgaagatgaagataaacctcgtcctagtcgaccaagccaaggaaagcgtgaacaagaccaggaccaggacgaggacgaagatgaagatgaagatcaacctcgcaagagccgcgaatggagatcgacaaagacacaacccagaagacctagacaagaggaaccacgtgaaagaggatgcgagacaagacacggggtt

SEQ ID NO: 102530 - DNA, 183 bp, Glycine max
gttattatcagataattaattaaattcctcgtggaatcttgttgaagccatgtctacagctggtcaggtcatcaagtgcagagctgcgagtggcatggtgaagcagggaagccactatcgatagaaaccatagaagtggcaccaccccaaaaaggtgaagtgcgtttgaagatcctcttaaac

SEQ ID NO: 102531 - DNA, 200 bp, Glycine max
aattccttcacttgcagaacttagttctctgttgcatcatcatcatcttcattagtgttagccctaaacttcaccttcaaccatgaccacagtgccaccacacagtgtccaagtgcacacaacaacacaccgctacgatgccggcgtcgtcccgtcggctcgttttgaggcgccgcgttacgaagccggcttcaaggcgc

SEQ ID NO: 102532 - DNA, 143 bp, Glycine max
gtcttccatagccccccaaaaatgaagagcaccatcttctttgctctctttctcttatgtgccttcaccacctcatacctaccttcagccatcgctgatttcgagctcgataatgaaggtaaccctcttgaaaatggtggcac

SEQ ID NO: 102533 - DNA, 270 bp, Glycine max
aatttttgttcctcactgaccaagccacaacgatgagaaccaaactttctttagctatctttttcttagctcttctaaccttattttcaaacctagcctttggcaaatgtacagaaaccgaggtagaagacgaagaccctgagctcgtaacatgcaaacaccaatgggaacagccacagcaatacactgagggtgacaagcgggtatgcttgcaaagatgtgacaggtatcatcgtatgaagcaatagcgatagaaactaatccacgagg

SEQ ID NO: 102534 - DNA, 119 bp, Glycine max
tcaagcgggtcgtcgcgtgccagtcaggggacggattcggaacgggcccttctggagctctttcccgggcgtcgaacagtcaactcagaactggtacggacaaggggtatccgactttt

SEQ ID NO: 102535 - DNA, 136 bp, Glycine max
ctagttcaatatcctagtataccttaataaataatttaagatactatgatgagagcacggttcccattactgttgctgggacttgttttcctggcttcagtttctgtctcatttggcattgcttactgggaaaaag

SEQ ID NO: 102536 - DNA, 251 bp, Glycine max
gttgaatcatggatcagaaagtcgatttcagtgctccgcattccatgggaaccactatcatcggcgttacttacaacggcggtgtcgttctcggagccgactctcgaaccagcactggagtgtatgttgccaaccgagcatcgcacaaaatcacacagctcactgataatgtttacgtgtgtcgctctggatcggctgctgattctcagattgtctctgactatgtgcgctacttccttcaccaacacacg

SEQ ID NO: 102537 - DNA, 175 bp, Glycine max
tttgtttaaattgtctcttgatgatgttgaaactcctaaaggttccatgttggatcttaaaatttctcaatctaaaattgcacttcccaaaaacacagttggaggaaccattctgcgtagtgatctattggcaaattttttgacagagggcaattttagagcaagtgttgatttg

SEQ ID NO: 102538 - DNA, 183 bp, Glycine max
cattgactttcccccagggcacttcccgaaatgttaaaagaatgcctctttctatagggggaggagctggtgcaaagaatgctattctcatgaatatgccaaatgctgttctttcaatgtggagatattttgttggagatctcgtctttgaagtttctaagatgacttctccctacattaaat

SEQ ID NO: 102539 - DNA, 132 bp, Glycine max
ggagcagaaatggcattgatgagaccatttgcacaatgagacttcgccaaaacattggtcagaattcatcacctgacatctacaaccctcaagctggtagcatcacaaccgccaccagccttgacttcccag

SEQ ID NO: 102540 - DNA, 102 bp, Glycine max
tgacttaggaacactttccttcgttcaatatggggaagctggtcttcactgctctctctggcttccctttgcttgctactcttgtctagtgcatgctttgct

SEQ ID NO: 102541 - DNA, 133 bp, Glycine max
ccgaaacttcataaagaaagtcactaaaaaaccgcgggtggggacaccggctcgaccgggttcggctcttccgtcttttttattcgccctcttcaatgagaatcagaaaccgggtccgagtacggagcggcat

SEQ ID NO: 102542 - DNA, 131 bp, Glycine max
aattgattggtttatttcctctcaggaatgtgttcccaggacctattgtgttttaaatccacaaaatccttttgtgttaaataggtggatgggaaaactgactttccctcagggcacttcccgaagtgtta

SEQ ID NO: 102543 - DNA, 238 bp, Glycine max
agaagatgggtttgaagaacaacatggtggtgctaaaggtgtgtttggtgctacttttccttgtggggggtactactagtgccaacttgaggctgagtaagcttggcctgctcatgaaaagtgatcatcatcaacactcaaatgatgatgagtcttcaaaaccatgctgtgatcaatgcgcatgcacaaagtcaaaccctcctcaatgccgctgttcagatatgaggctaaattcgtg

SEQ ID NO: 102544 - DNA, 89 bp, Glycine max
caaagcaatggctacttcaaagttgaaaacccagaatgtggttgtatctctctgcctaaccttaaccttggtatgggtgctactgacca

SEQ ID NO: 102545 - DNA, 115 bp, Glycine max
tcctagtacaccgtattaaagaatttatgatatactatgatgagatcgcggttcctattactgttgctgggcacttgttttcctggcatcagtttctgtctcatttggcattgcg

SEQ ID NO: 102546 - DNA, 254 bp, Glycine max
ttcaatatcctagtataccttaataaataacttaagatactatgatgagatcacggttcccattactgttgctgggaattgttttcctggcttcattttctgtctcatttggcattgcttactgggaaatagagaactccaaacacaacaagtgtctctagagttgcaatatcgagagatactcgtacaggaaccatgcatgccatgctcgttgcaacctccttaaggtggctgaagaagtatgtgcagaaggt

SEQ ID NO: 102547 - DNA, 120 bp, Glycine max
attctctccattggtcctgaaacactcatcagtcatcaccatggccaagctagttttttccctttgttttctgcttttcagtggctgctgcttcgctttcagttccagagagcagcctca

SEQ ID NO: 102548 - DNA, 264 bp, Glycine max
ccctgctgcataggaagaaaccctagcctctcaccctccctgcgacacgatgcagatcttcgtgaaaaccctaacgggtaagacgatcacccttgaggtggagtcttctgacaccatcgacaacgtgaaggccacgatccaggacaaggaaggcatccctccggaccagcagcgcctcatcttcgccggaaagcagctggaggacggccgcaccctcgccgactacaacatccagaaggagtccacctccaactcgtcctccgt

SEQ ID NO: 102549 - DNA, 260 bp, Glycine max
ctgacaaggaaaaccctaagagatgaagagaactcctatcttgttccctctcttctttcttctttgtgccttcacctcatatctaccttcagccaccgctgatgatgatcatgtgtacgacactgacggcgataagcttcaatacggtgtcaattatttcgtgttgccagtgataagaggccatggcggtggactacaagtagcatcagccggaaacgatacttgtcctctgactgtggtgcaatctggcaacgagctct

SEQ ID NO: 102550 - DNA, 256 bp, Glycine max
agcacgagcagaaggaggaacacgaatggcatcgcaaggaggaaaaacacggaggaaagggaagtgaagaggaacaagatgaacgtgaacacccacgcccacaccaacctcatcaaaaggaagaggaaaagcacgaatggcaacacaagcaggaaaagcaccaaggaaaggaaagtgcagaagaagaagaagaccaagacgaggatgaggagcaagacaaagagagccaagaaagtgaaggttctgagtctcaaag

SEQ ID NO: 102551 - DNA, 252 bp, Glycine max
tgagattactgacatttctctggctgattatatcggagtggcgacatccaagcacgccacgtatgtgcctcacaccgccggcaggtactcggtgaagcggttcaggaaggcgcaatgccccattgttgagaggctgaccaactctctcatgatgcacggtagaaacaatggcaagaaactcttggctgtcaggatcatcaaacatgctatggagattattcattggttgactgaccagaaccccattcaggt

SEQ ID NO: 102552 - DNA, 108 bp, Glycine max
cactaaaggaaattaggcatgaccctcttgttgagtatgctctgcctatttgaaaatttccacacctcttttaattatcgtaatgatgtgtgaagtgtgtgttatttt

SEQ ID NO: 102553 - DNA, 243 bp, Glycine max
cttaaacactcatcagtcatcatcatggccaagctagttttttccctttgttttctgcttttcagtggctgctgcttcgctttcagttccagagagcagcctcagcaaaacgagtgccagatccagaaactcagtgccctcaaaccggataaccgtatagagtcataaggagggctcattgagacatgcacccctaagaacaagccattccagtgtgcaggtgttgcccactctcgcgacacc

SEQ ID NO: 102554 - DNA, 251 bp, Glycine max
gcgcctttcagaggcggaaggcccattcgggtggttacatttccgaataccattgtgcagattgaaccatacatgaattcaaggtttcagcttttgagtaccactaccaatggtgattttgttcaaggaaaagatctcgcaatggttaaagttaatgtagcatgtgctgctgttggcttgacatcaagttacactccaactccattgtggacatctggtttgcaaccagacagagggttaattgtagagta

SEQ ID NO: 102555 - DNA, 256 bp, Glycine max
catgcattggggacactcttgaacagcgtgaagctggtacaacaacggctgttgttgctgagcaaacaaaagcaattgcagctaaaatatcaaattgggacaatgtcgttttggcctatgagccagtttgggccattggaacaggaaaggttgcaactcctgctcaggctcaagaggttcatgctgatttaaggaaatgggttcatgacaatgtgagtgctgaaattgctgcatctgtaagaattatctatggagg

SEQ ID NO: 102556 - DNA, 257 bp, Glycine max
attgtctttgaacactcatcaccatggccaagcttgttctttccctttgtttccttcttttcagtggctgcttcgctctgagagagcaggcacagcaaaatgagtgccagatccaaaagctgaatgccctcaaaccggataaccgtatagagtcggaaggtgggttcattgagacctggaaccctaacaacaagccattccagtgtgccggtgttgccctctctcgctgcacccttaaccgcaatgcccttcgtaga

SEQ ID NO: 102557 - DNA, 253 bp, Glycine max
acacgcttcagaagacatggcctcattgggtgggttacaaaatgtgagcggcatcaattttcttatcaaagagggtccaaaagtcaatgcaaagttcgagctgaagccgccaccatatccactgaatggtttggagccggtgatgagccagcagacacttgagtttcactgggggcagcaccacaagacttatgtggaaaatctgaaaaaacaagttgttgggacagagcttgatgggaagtcactagaagag

SEQ ID NO: 102558 - DNA, 249 bp, Glycine max
ctcgagccgctcgagccggtctttgaacactcatcaccatggccaagcttgttctttccctttgttcccttcttttcagtggctgcttcgctctgagagcgcaggcacagcaaaatgagtgccagatccaaaagctgaatgccctcaaaccggataaccgtatagagtcggaaggtgggttcattgagacctggaaccctaacaacaagccattccagtgtgccggtgttgccctctctcgctgcaccc

SEQ ID NO: 102559 - DNA, 248 bp, Glycine max
cccatatgtgcatgttgtggactcttttacagatgatgagcctcaagatccatacgagtctcgctccacattgcttttcttccgagggagaacttacaggaaggatgaagggattgtccgtgttaaactagcaaagatattggctggttatgatgatgttcactatgagagaagtgttgctccagaagaaaacataaaagcgtgctctaaagggatgcgttcatcaaagttctgtttgcatccagcag

SEQ ID NO: 102560 - DNA, 230 bp, Glycine max
gaccctcaataaatgcctcaggtgaaaagaagaaaattgtgggggtgttctacaaagggaatgagtatgctaaattgaaccccaatttcgtggggtgtgttgacggagcattgggtatacgtgagtggctggaatcacagggtcatcagtacattgtcactgatgacaaagaaggaccagattctgaacttgagacacacattccagatgcccatgtcatcatatctact

SEQ ID NO: 102561 - DNA, 223 bp, Glycine max
ctcgagcgctccattggtccttaaacactcatcagtcatcaccatggccaagctagtattttccctttgttttctgcttttcagtggctgctgctttgctttcagttccagagagcagcctcagcaaaacgagtgccagatccaaaaactcaatgccctcaaaccggataaccgtatagagtcagaaggagggctcattgagacatggacccctatcaacaag

SEQ ID NO: 102562 - DNA, 243 bp, Glycine max
attttgttggagatctcgtctttgaagtttctaagatgacttctccctacattaaatgtacagtctctttcttcatagcatttggaaatttggctgatgagaccatcaattttcaggcttttccccacaagctggtgcagtttggagagattcaggaaaaagttgtattgaaattttcacaagaggaatttcttacagcttggtcaactcaggtgcgtcctgcaagaaccctgttggctgatg

SEQ ID NO: 102563 - DNA, 241 bp, Glycine max
gaggcctcctacgataccaaattcgaggagataaacaaggttctgtttagtagagaggaagggcagcagcaaggggagctgaggctgcaagagagcgtgattgtggaaatctcgaaggaacagattcgggcactgagcaaacgtgccaaatctagttcaaggaaaaccatttcttctgaagataaaccttttaacttgagaagccgcgaccccatctactccaacaagcttggcaagttct

SEQ ID NO: 102564 - DNA, 132 bp, Glycine max
gttcaatatcctagtacaccgtattaaagaatttaagatctactatgatgagcgcgcggttcccattactgttgctgggagttgttttcctggcatcagtttctgtctcatttggcattgcgtattgggaaa

SEQ ID NO: 102565 - DNA, 116 bp, Glycine max
gctcggacttctcctcgaggccaaggaaagcgtgaacaagaccaggaccaggacgcggacgaagatgaagatgtcgatcaacctcgcaagctccgcgaatggagatcgaaaaagac

SEQ ID NO: 102566 - DNA, 249 bp, Glycine max
gtctttgaacactcatcaccatggccaagcttgtactttccctttgtttccttcttttcagtggctgcttcgctctgagagagcaggcacagcaacatgagtgtcagatccaaaagctgaatgccctcaaaccggataaccgtatagagtcggaaggtgggttcattgagacctggaaccctaacaacaagccattccagtgtgccggtgttaccctctctcgctgcacccttaaccgcaatgcccttc

SEQ ID NO: 102567 - DNA, 246 bp, Glycine max
ctgaaaaggaagatcaagaaaaacccaaaaagattgatgccagattgagacaaagaatagatcctcaatacaatgaggttcaggctcagatggaaacaaatttgtgtaaattgtctcttgatgatgttgaaactcctaaaggttccatgttggatctgaaaatttctcaatctaaaattgcacttcccaaaaacacagttggaggaaccattctgcgtagtgaactattggcaaattttatgacag

SEQ ID NO: 102568 - DNA, 121 bp, Glycine max
ggctcgagattctctccattgtctttgaccactcatcaccatggacaagcttgttctttccctttgtttccttcttttcagtggctgcttcgctgctgagagcgcaggcacagcaaaatga

SEQ ID NO: 102569 - DNA, 133 bp, Glycine max
ataccgtgaagctgctgagcaatataaacaacagggtgtcagctttgtggtgggagatgttgagtctagtcaaggtgctttccagtattttggactggaagaagagcaagtacctctaattatcattcaacat

SEQ ID NO: 102570 - DNA, 128 bp, Glycine max
cttgacatcaagttacactccaactccattgttggaatctggattgcaaaaagacagagggttcattgtggagtattttggaaggatgtcttacgtggctcataacgttaatcagccccaagagaaag

SEQ ID NO: 102571 - DNA, 115 bp, Glycine max
agcaatacaaggaaagttaggcatgaccctctgtgttgagtatgctctgcctattttgaaaatttccacacctcttttgaattatcgtaatgatgtgtgaagtgtgtgttatttt

SEQ ID NO: 102572 - DNA, 257 bp, Glycine max
ctaccaatggtgattatgttcaagggaaagatctcacaatggttaaagttaatgtagcatgtgctactgttggcttgacatcaagttacactccaactccattgttggaatctggtttgcaaaaagacagagggttaattgtggagtattttggaaggatgtcttacgttgctcataacgttaatcagccccaagaacagatttgttagagggaaattttcctttgatatgaaatctcgctctagattggaaaaagt

SEQ ID NO: 102573 - DNA, 246 bp, Glycine max
agagattgttcctactagatcatcatgacccaatcatgccatatttgaggcgaataaatgcaacctccacaaaggcttatgctaccagaaccatccttttcctgaaaaatgacggaactttaaggccacttgccatagagttgagtttgccacatcctcagggagatcaatctggtgcttttagtcaagtttttctgcctgcagatgcaggtgttgaaagttctatttggctgctagcaaaggctt

SEQ ID NO: 102574 - DNA, 133 bp, Glycine max
aagatttgaaattttaataaaccgcgatcacaggttgccgcaccttaaaaccggctacaaaagcaatcgttacttgatttcaagaatttctcaatgtcttcctactgctttgtgtacgatgtcttaagggaaa

SEQ ID NO: 102575 - DNA, 138 bp, Glycine max
gaagatggaactttaaagccagtggccatcgaattaagtttgccacattctgctggggatctgtcagctgccgtcagtcaagtcgtcttacctgctaaggaaggtgttgagagcacaatttggctactagccaaagct

SEQ ID NO: 102576 - DNA, 220 bp, Glycine max
ggaaaggaaagtgaagaagaagaagaagaccaagacgaggatgaggagcaagacaaagagagccaagaaagtgaaggttctgagtctcaaagagtaccacgaagacataagaataagaacccttttcacttcaactctaaaaggttccaaactctcttcaaaaaccaatatggccacgttcgcgtcctcaagaggttcaacaaacgctcccaatagcttc

SEQ ID NO: 102577 - DNA, 237 bp, Glycine max
cagatctgattgttggaaactacagtgatggaaacattgtcgcttctttgttggcacataaattaggtgtcactcagtgtaccattgctcacgcacttgagaagaccaaataccccgaatccgacatttactggaaaatattggaagagagataccacttctcttgccaattccccgctgatctatttgccatgaaccacacagatttcattatcaccagtaccttccaggagattg

SEQ ID NO: 102578 - DNA, 97 bp, Glycine max
gcaaatcaagcacagaacagttgaagtgaatggcataaaaatgtctgttgcagagaaaggagagggtccagtggtgttgttcctccacggcttccct

SEQ ID NO: 102579 - DNA, 271 bp, Glycine max
gttcaatatcctagtataccttaataaataatttaagatactatgatgagagcacggttcccattactgttgctgggacttgttttcctggcttcagtttctgtctcatttggcattgcttactgggaaaaagagaaccccaaacacaacaagtgtctccagagttgcaatagcgagagagactcgtacaggaaccaagcatgccacgctcgttgcaacctccttaaggtggagaaagaagaatgtgaagaaggtgaaattccacgaccac

SEQ ID NO: 102580 - DNA, 284 bp, Glycine max
cggctcgagaattctgttgtgccacactgaccaagccccaacgaagagaaccaaactttctttagctatctttctcgataatctgatagcctgatcttcaaacctagcctctggcaaatgtaaagaaaccgaggtagaagaagaagaccctgagctcgtaacatgcaaacaccaatgccaacagccacagcaatacactgagggtgacaagcgggtatgcttgcaaagatgtgacaggtatcatcgtatgaagcaagagcgagagtaacacatccaagaggaaa

SEQ ID NO: 102581 - DNA, 277 bp, Glycine max
agccaggcaagccccactcaaccaccacacctctcctcgttcacgctacccctttctgctcttcttctacctttcaagttttaaaagtataaagatggcagagacattcctatttacctcagagtcggtgaacgagggacaccctgacaagctctgcgaccaaatctccgatgctgtcctcgacgcttgcctcgagcaggacccagacagcaaagttgcctgcgaaacatgcaccaaaaccaacttggtcatggtcttcggagaaatcacgaccaag

SEQ ID NO: 102582 - DNA, 274 bp, Glycine max
ggaaaaggttcacatcaacattgtcgtcattggacatgtcgactctgggaagtcaactaccactggtcacttgatctacaagcttggaggtattgacaagcgtgtgattgagaggttcgagaaggaggctgccgagatgaacaagaggtcattcaagtatgcctgggtgctcgacaagctcaaagctgagcgtgaaagaggaattaccattgatattgctttgtggaagtttgaaaccaccaagtactactgcacggtcattgatgctcctgga

SEQ ID NO: 102583 - DNA, 274 bp, Glycine max
tatcgagccgagattactgagtaagggcaacgatattctgtgtagcgattatgctagttacgatggtttgattaccaagcaagttatgagcaagatggcagaaatgataaacagtctttgtggtggtgatgaaaaattgatgcgcgaaaggacacacctgctgttggcttgttgttcaaggatggcaatttgtaagaaagatgtttggagagttgaatgtggaatcccttctggatttccgctcacagttatttgcaatagcatttttaatgag

SEQ ID NO: 102584 - DNA, 276 bp, Glycine max
ccttagttcaatatggggaagcccttcttcactctctctctttcttccctttgcttgctactcttgtcgagtgcatgctttgctattacctccagcaagttcaacgagtgccaactcaacaacctcaacgcgttggaacccgaccaccgcgttgagtccgaaggtggtcttattgaaacatggaactctcaacaccctgagctgcaatgcgccggtgtcactgtttccaaacgcaccctcaaccgcaacggcctccacttgccatcttactcacct

SEQ ID NO: 102585 - DNA, 281 bp, Glycine max
ctccaaccatgtcctctattccaaccgatccgccgcatacgcctccctcaaaaactacgcagatgcattagcggatgccaaaaagacagttgaactcaagcccgactggtccaagggttacagccgtctcggtgccgcgcatcttggcctttcccaatacgatgatgctattttggcttacaaaaggggtctcgaaatcgaccctcacaacgagccccttaagtctggtttggcagatgcgcagaaggccttggccgcggcctccaggcctcgcccctcgg

SEQ ID NO: 102586 - DNA, 265 bp, Glycine max
caacttttcacacatgaccatgctccctcattcattaactatgattgcaacactaataatcatttttcttgcacaaacacttgtgggggtgagttcacttcctgaagctgataaaataaccaatttgccggggcagccacgggtcgaatttcagcaatattctggttatgtcaccgtggatgatcaaaatcaaagagctttgttttactactttgttgaggctgaagaaaacccttcttccaagccattagtcctatggttgaat

SEQ ID NO: 102587 - DNA, 176 bp, Glycine max
gataaacctcgatcacaggttgccgcaccttaaaaccggacacaatatcaatcgttacttgatgtcaagaatctctcaatttctgcctacttctttgtgtacgatttcttaagggaaagaaaatcactctctgtgctggtcacagacttcgtgaatcatttccttttcgacacatt

SEQ ID NO: 102588 - DNA, 279 bp, Glycine max
attatcaatgaaggtaataactaaaaatattgctcgtatactatttattcaatttcccgaatggtcggaagattttagggattggaagagagaaatgtatattaaatgcacatataatggtgttcaattatccgaaagagaatttccagaataatggctaacagatggtattcagataaagatcttatttccttttcgtctcaaaccttggcacaaatctaagctacgatccaatgaaaagaaaaaggatctaatgaataaaaagaacttttgtctgct

SEQ ID NO: 102589 - DNA, 288 bp, Glycine max
caatcctcctcatctctcttctcttctgcatcgcccacacttgcagcgcctccaaatggcagcaccagcaagatagctgccgcaagcagctccagggggtgaactctcacgccctgcgagaagcacatcatggagtacgatccaaggccgcggcgatgacgatgatgatgatgacgtcgacaatcacatgtctcaggaccatatcggggaagaatcaactacataaggaggaacgaaggctcagacgaagacgtagaagatgtaggacacatgcagaagtgctgcaca

SEQ ID NO: 102590 - DNA, 277 bp, Glycine max
tttggaagtatagcatgatttgtcgtggatgggtaaaatgccaagagatgaaccagcctcagtgttagtttggatctaatagtcttggatcgattgctattgttgctgggggaagtgatcagtatggaaatgttctaaaatcagctgagttgtatgactcttcaacaggtatgtgggaacttttaccaaacatgcacacatcgcgtagatagtgttctggtttttatatggatggcaaattctacgtgattggtagaatgtctagtacaactgtttc

SEQ ID NO: 102591 - DNA, 285 bp, Glycine max
cttagttgccaagttggaatcaatccatactccatggaatggaccggtttggccaacagactactgagtaagggcaacgatattctgtgttgcgattatgctagttttgatggtttgattaccaagcaagttatgagcaagatggcagaaatgataaacagtctttgtggtggtgatgaaaaattgatgcgtgaaaggatacacctgctgttggcttgttgttcaaggatggcaatttgtaaaaaagatgtttggagagttgaatgtggaatcccttctggattt

SEQ ID NO: 102592 - DNA, 272 bp, Glycine max
actccagctgaataattagaggtctcttcccaactcggaactcagtccattccgcatttcaattttctcttcacttggcaaagcccaaaccaaaccctggctgaagaagagaattgactgagaagaagaacacagaaatgggctccgaactgattttcagagggcacgagacccagcccgtggacgacgcgtactcaccaaagccccacaaaccctggctcaccgtgactcgcccgattcactacatgctccgtgagcagcgactcctcttc

SEQ ID NO: 102593 - DNA, 274 bp, Glycine max
cgcgctcgcgcgagatcgacttcgagaacccgccgccgtgggacgagcagcagaaccaaaactacaaggccaagttcatgtgcagctacggcggcgacaccaagatcctcgccgtcgaccgctccgttaagttctccgccttcctctccaagctctccgccctctgcgactccccgccacaggacctcaccttcaagtaccagctccccggcgaagacctcgacgccctcatctccgtcaccaacgacgacgacctcgaacacatgatgcacga

SEQ ID NO: 102594 - DNA, 272 bp, Glycine max
ccaactaacaataattccttcacttgcagaacttagttctctgttgcatcatcatcatcttcattagtgttagccctaaacttcaccttcaaccatgaccacagtgccaccacacagtgtccaagtgcacacaacaacacaccgctacgaagccggcgtcgtcccgccggctcgttttgaggcgccgcgttacgaagccggcatcaaggcgccctcttccatttaccattccgagagaggtccgacgacctctcaggttctcgcagttgtcg

SEQ ID NO: 102595 - DNA, 271 bp, Glycine max
agaagatgatgatgatgaggaagagcagccacagtgcgtggagacagacaaaggttgccaacgccaaagcaaaaggagcagaaatggcattgatgagaccatttgcacaatgagacttcgccaaaacattggtcagaattcatcacctgacatctacaaccctcaagctggtagcatcacaaccgccaccagccttgacttcccagccctctggcttctcaaactcagtgcccagtatggatcactccgcaagaatgctatgttcgtgcca

SEQ ID NO: 102596 - DNA, 273 bp, Glycine max
caaagaaattcagaggaacttcctcgcaggttcgcaagacaatgtgataagccagatacctagtcaagtgcaggagcttgcattccctgggtctgcacaagctgttgagaagctattaaagaaccaaagagaatcctactttgtggatgctcagcctaagaagaaagaggaggggaataagggaagaaagggtcctttgtcttcaattttgagggctttttactgaataagtatgtactaaaatgtatgctgtaatagctcatagtgagcgag

SEQ ID NO: 102597 - DNA, 274 bp, Glycine max
tgggaaaactgactttcccccagggcacttcccgaagtgttaagagaatgcctctttctatagggggaggagctggtgcaaagaatgctattctcatgaatatgccaaatgctgttctttcaatgtggagatattttgttggagatctcgtctttgaagtttctaagatgacttctccctacattaaatgtacagtctctttcttcatagcatttggaaatttggctgatgacaccatcaattttgaggcttttccccacaagctggtgcagtt

SEQ ID NO: 102598 - DNA, 174 bp, Glycine max
gtttctgtctcatttggcattgcttactgggaaaaagagaaccccaaacacaacaagtgtctccagagttgcaatagcgagagagactcgtacaggaaccaagcatgccacgctcgttgcaacctccttaaggtggagaaagaagaatgtgaagaaggtgaaattccacgacca

SEQ ID NO: 102599 - DNA, 278 bp, Glycine max
caactaacaataattccttcacttgcagaacttagttctctgttgcatcatcatcatcttcattagtgttagccctaaacttcaccttcaaccatgaccacagtgccaccacacagtgtccaagtgcacacaacaacacaccgctacgaagccggcgtcgtcccgccggctcgttttgaggcgccgcgttacgaaccggcatcaaggcgccctcttccatttaccattccgagagaggtccgacgacctctcaggttctcgcagttgtcgccggcctt

SEQ ID NO: 102600 - DNA, 270 bp, Glycine max
ctctctgcaaagaccgttgttgtgagctttgcttgtcagcttattatcttcctttatctgcttgacaatgacacctcttggatgaatcttgcaagctctggaattggttgtgttattgagttctggaaaattggaaaagccatgcgcatagagattgataggacaggaaggatacctatgttgaagctccgcgatcgagagtcatatgtacggaataagacaaaggaatatgatgatattgctatgaagtatttgttctatgttctattt

SEQ ID NO: 102601 - DNA, 271 bp, Glycine max
aaattagttcattctctttgcgcagttccctacctctcctttcaaggttcgtagatttcttctgtatttttatcttcttctttattgtttgttctacatcagcatgatgataatttgattgtgttttctatcgtttcatcgattataaattttcataatcagaagattcagcttttattaatgcaagaacgtccttaattgatgattttataaccgtaaattaggtctaattagagtttttgtcataaagattttcagatccgtttacaac

SEQ ID NO: 102602 - DNA, 271 bp, Glycine max
  unsure (1)..(271): unsure at all n locations
ctcgagccgttttgccctttcttcaagccaacctcttcacaactcttctttgttcctttcactnctctcactaccaccatgatcacagtaagcgtaagatggcaaaaggagattttcaaagatgtagaacttgacactacccagtctgcttatgtttttaaatgccaattgtatgatttgactggtgtgcctcctgaaagacaaaaaattatggtcaagggtggtcttttgaaggatgatgctgattggtcaacagtaggggtgaaagagg

SEQ ID NO: 102603 - DNA, 263 bp, Glycine max
cttctaaaaaaataaaattaagaaattttcatggtaaccattcgtgcagatgaacttagtaaaattatccgtgaacgcattgagcaatataatacgatagtaaaaattgtaaatacgggtaccgtacttcaagtaggcgacggtattgctcgtatttatggtcttgatgaagtaatggcgggtgaattagtggaatttgaagagggtactataggcattgctttgaatttggaatccaaaaatgttggtgttgtattaatggg

SEQ ID NO: 102604 - DNA, 269 bp, Glycine max
gttcaatatcctagtataccttaataaataatttaagatactatgatgagagcacggttcccattactgttgctgggacttgttttcctggcttcagtttctgtctcatttggcattgcttactgggaaaaagagaaccccaaacacaacaagtgtctccagagttgcaatagcgagagagactcgtacaggaaccaagcatgccacgctcgttgcaacctccttaaggtggagaaagaagaatgtgaagaaggtgaaattccacgacc

SEQ ID NO: 102605 - DNA, 274 bp, Glycine max
tgcggtttcctttgttggtgttgctgggaactgttttcctggcatcagtttgtgtctcattaaaggtgagagaggatgagaataaccctttctacttgagaagctctaacagcttccaaactctctttgagaaccaaaacggtcgcattcgtctcctccagagattcaacaaacgctccccacaacttgagaaccttcgagactaccggattgtccagtttcagtcaaaacccaacacaatccttctcccccaccatgctgacgccgatttcct

SEQ ID NO: 102606 - DNA, 276 bp, Glycine max
agttcagcaagaatattctagaggcctcatacgacaccaaattcgaggagataaacaaggttctgtttggtagagaggaggggcagcaacaaggggaggagaggctgcaagagagtgtgattgtggaaatctcaaagaaacaaattcgggaactgagcaaacatgccaaatctagttcagagaaaaccatttcttctgaagataaacctttcaacttgagaagccgcgaccccatctattccaacaagcttggcaagttgtttgagattaccccag

SEQ ID NO: 102607 - DNA, 275 bp, Glycine max
caacacaggcgcagagcgtgatccattgacgaagatggtgcagcgtctcacctaccgcaagaggcacagctatgccaccaaatccaaccaacacagggtcgtcaaaacccctggtgggaagctcgtttatcagaccaccaagaagagggccagctggcccaagtgccccgtcactggcaagaggattcaggggattccacacttgaggcctgcagagtacaagagatcaaggttacccagaaaccgtatgactgtcaaccgtgcatatggcggag

SEQ ID NO: 102608 - DNA, 278 bp, Glycine max
gaagtttttaaattttgtgaggttcattatgaagaaaagggacaagcttagttgtcaagttggaatcaacccatactccatggaatggaccggtttggccaatagattactgagtaagggcaacgatattctgtgttgcgattatgctagttttgatggtttgattaccaagcaagttatgagcaagatggcagaaatgataaacagtctttgtggtggtgatgaaaaattgatgcgtgaaaggacacacctgctgttggcttgttgttcaaggatgg

SEQ ID NO: 102609 - DNA, 276 bp, Glycine max
gcgaacacagcacagcactgcactcttcgcaacacaacataaaaagacaacccagagagcgcgtcttaatatacgctcttctctgaaaacccccatttcttttcttctttcttcttctctttcgcttcttcgatcttcgatcttcgtcgctgaaaatgagagagtgcatttcaatccacatcggccaggccgggattcaggttggaaacgcctgctgggagctttactgcctcgaacacggcattcagcctgatgggcagatgccaagtgacaaga

SEQ ID NO: 102610 - DNA, 281 bp, Glycine max
cttcactcaaaactcttctctttcattttcataattcccacacattatggctgaccttcactaccatccacaacaccaataccccctccgctaccctaacgatccacaccaacaaacccgttcctccacccaccaggtcgtcaaggccgccaccgccgtcacagcgggcggctccctctttatcctcgcctcgttgatcctcgccgccaccgtcattgccctcaccatcgtcaccccgctgttcgtcattctcagtccggctctcgtccccgccgtaatca

SEQ ID NO: 102611 - DNA, 172 bp, Glycine max
agtaattcaacctagtacgagaggaaccgttgattcgcacaattggtcatcgcgcttggttgaaaagccagtggcgcgaactaccgtgcgttggattatgactgaacgcctctaagtcagaatccgggctagaagcgacgcgtgcgctcgccgtccgtttgccgaccagcag

SEQ ID NO: 102612 - DNA, 269 bp, Glycine max
gttcaatatcctagtacaccgtattaaagaatttaagatatactatgatgagagcgcggttcccattactgttgctgggagttgttttcctggcatcagtttctgtctcattaggcattgcgtattgggtaaagcagaaccccagtcacaacaagtgcgtccgaagttgcaatagcgagaaagactcctacaggaaccaagcatgccacgctcgttgcaacctccttaaggtggaggaagaagaagaatgcgaagaaggtcaaattcca

SEQ ID NO: 102613 - DNA, 267 bp, Glycine max
ctataatggaaattaataaattagttatgccttgatcatggagaggaaaacatttgggtttttgttcttgctcctccttgtcttagcttctgatgtgacggtgaagagagcagaggcgaaagattgcttgacaaggaggcacgggttccagggtagatgcttattcgacaggcaatgtgcacatgtgtgcaggagcgatggtttcatcggtggtcagtgccgtcgccctcttcgcaaatgcttttgcagcaggccatgttgatcgaa

SEQ ID NO: 102614 - DNA, 267 bp, Glycine max
actctccattgtctttgaacactcatcaccatggccaagcttgttctttccctttgtttccttcttttcagtggctgcttcgctctgagagagcaggcacagcataatgagtgccagatccaaaagctgaatgccctcaaaccggataaccgtatagagtcggaaggtgggttcattgagacctggaaccctaacaacaagccattccagtgtgccggtgttgccctctctcgctgcacccttaaccgcaatgcccttcgtagacct

SEQ ID NO: 102615 - DNA, 266 bp, Glycine max
acccaacaagattgacatgattgctctttcatttgttcgtaaaggctcggatcttgttaatgtccgcaaggttctggggccacatgcaaagaatattcagttgatgtcaaaggttgagaatcaggagggagtcctgaattttgacgaaatcctgcgggagactgatgcattcatggtggcacgtggtgatcttggaatggagatcccagtagaaaagattttcctggcacagaagatgatgatatacaagtgtaatcttgttggga

SEQ ID NO: 102616 - DNA, 277 bp, Glycine max
agcggtttcctttgttggtgttgctgggaactgttttcctggcatcagtttgtgtctcattaaaggtgagagaggatgagaataaccctttctacttgagaagctctaacagcttccaaactctctttgagaaccaaaacggtcgcattcgtctcctccagagattcaacaaacgctcctcacaacttgagaaccttcgagactaccggattgtccagtttcagtcaaaacccaacacaatccttctcccccaccatgctgacgccgatttcctcct

SEQ ID NO: 102617 - DNA, 277 bp, Glycine max
cgttcagcaagaatattctagaggcctcatacgacaccaaattcgaggagataaacaaggttctgtttggtagagaggaggggcagcaacaaggggaggagaggctgcaagagagtgtgattgtggaaatctcaaagaaacaaattcgggaactgagcaaacatgccaaatctagttcaaggaaaaccatttcttctgaagataaacctttcaacttgagaagccgcgaccccatctattccaacaagcttggcgagttgtatgagattacgccaga

SEQ ID NO: 102618 - DNA, 274 bp, Glycine max
caacacaggcgcagagcgtgatccattgacgaagatggtgcagcgtctcacctaccgcaagaggcacagctatgccaccaaatccaaccaacacagggtcgtcaaaacccctggtgggaagctcgtttatcagaccaccaagaagagggccagcgggcccaagtgccccgtcactggcaagaggattcaggggattccacacttgaggcctgcagagtacaagagatcaaggttacccagaaaccgtaggactgtcaaccgtgcatatggcgga

SEQ ID NO: 102619 - DNA, 277 bp, Glycine max
gaagtttttaaattttgtgaggttcattatgaagaaaagggacaagcttagttgtcaagttggaatcaacccatactccatggaatggaccggtttggccaatagattactgagtaagggcaacgatattctgtgttgcgattatgctagttttgatggtttgattaccaagcaagttatgagcaagatggcagacatgataaacagtctttgtggtggtgatgaaaaattgatgcgtgaaaggacacacctgctgttggcttgttgttcaaggatg

SEQ ID NO: 102620 - DNA, 275 bp, Glycine max
gcgaacacagcacagcactgcactcttcgcaacacaacataaaaagacaacccagagagcgcgtcttaatatacgctcttctctgaaaacccccatttcttttcttctttcttcttctctttcgcttcttcgatcttcgatcttcgtcgctgaaaatgagagagtgcatttcaatccacatcggccaggccgggattcaggttagaaacgcctgctgggagctttactgcctcgaacacggcattcagcctgatgggcagatgcaagtgacaaga

SEQ ID NO: 102621 - DNA, 280 bp, Glycine max
cttcactcaaaactcttctctttcattttcataattcccacacattatggctgaccttcactaccaaccacaacaccaataccccctccgctaccctaacgatccacaccaacaaacccgttcctccacccaccaggtcgtcaaggccgccaccgccgtcacagcgggcggctccctctttctcctcgcctcgttgatcctcgccgccaccgtcattgccctcaccatcgtcaccccgctgttcgtcattttcagtccggttctcgtccccgccgtaatc

SEQ ID NO: 102622 - DNA, 190 bp, Glycine max
tcagtattcggctcgagagtaattcaacctagtacgagaggacccgttgattcgcacaattggtcatcgcgcttggttgaaaagccagtggcgcgaagctaccgtgcgttggattatgactgaacgcctctaagtcagaatccgggctagaagcgacgcgtgcgcccgccgtccgtttgccgaccagcag

SEQ ID NO: 102623 - DNA, 287 bp, Glycine max
tcttcggctcgagactgaagctcaacaatcctacttgcaaggattcagcaggaacattttagaggcctcctacgataccaaattcgaggagataaacaaggttctgtttagtagagaggaagggcagcagcaaggggagcagaggctgcaagagagcgtgattgtggaaatctcgaaggaacagattcgggcactgagcaaacgtgccaaatctagttcaaggaaaaccatttcttctgaagataaaccttttaacttgagaagccgcgaccccatctactccaaca

SEQ ID NO: 102624 - DNA, 269 bp, Glycine max
ctagttcaatatcctagtataccttaataaataatttaagatactatgatgagagcacggttcccattactgttgctgggacttgtgttcctggcttcagtttctgtctcatttggcattgcttactgggaaaaagagaaccccaaacacaacaagtgtctccagagttgcaatagcgagagagactcgtataggaatcaagcatgccacgctcgttgcaacctccttaatgtggagacagtagaatgtgaagaaggtgatattccacg

SEQ ID NO: 102625 - DNA, 268 bp, Glycine max
ctgaccaagccatggcgatgagaaccaaactttctttagctatctctttcttttttcttttagccttattttcaaacctagcctttggcaaatgtaaagaaaccgacgtagaagaagaagaccctgagctcgtaacatgcaaacaccaatgccaacagccacagcaatacactgagggtgacaagcgggtatgcttgcaaagatgtgacaggtatcatcgtatgaagcaagagcgagagaaacaaatccaagaggaaactcgtgagaa

SEQ ID NO: 102626 - DNA, 266 bp, Glycine max
cagcacctttaaacgccgaaggttcatccaatctccgaaggccttcagcggattgcaaccatgtcgaagagacaggttagagatccaaaggaggaaaacgtgactctaggcccagctgttagagatggtgaacatgttttcggagtagctcgcatctttgcctccttcaatgacaccttcattcatgtcactgatctgtctgggaaggaaacacttgtccgcatcactggcgggatgaaggttaaagcttacagagatggatcatc

SEQ ID NO: 102627 - DNA, 264 bp, Glycine max
cttggaggcattgacaagcgtgttattgagaggtttgagaaggacactgctgagatgaacaagaggtctttcaagtatgcctgggtgctggacaaacttaaggctgagcgtgaaagaggaatcaccattgatattgctttgtggaagtttgaaacaacaaagtattattgcacagttatagatagtaatggacatagggatttcattaagaatatgattactgggacatcccaagctgactgtgctgttcttatcattgattcg

SEQ ID NO: 102628 - DNA, 265 bp, Glycine max
cttggaggcattgacaagcgtgttattgagaggtttgagaaggaagctgctgagatgaacaagaggtctttcaagtatgcctgggtgctggacaaacttaaggctgagcgtgaaagaggaatcaccattgatattgctttgtggaagtttgaaacaacaaagtattattgcacagttattgatgcgcctggacatagggatttcattaagaatatgattactgggacatcccaagctgactgtgctgatcttatcattgattcga

SEQ ID NO: 102629 - DNA, 272 bp, Glycine max
ctcgagccgttttgccctttcttcaagccaacctcttcacaactcttctttgttcctttctacctctcactaccaccatgatcacagtaagcgtaagatggcaaaaggagattttcaaagatgtagaacttgacactacccagtctgcttatgtttttaaatgccaattgtatgatttgactggtgtgcctcctgaaagacaaaaaattatggtcaagggtggtcttttgaaggatgatgctgattggtcaacagtaggggtgaaagagggt

SEQ ID NO: 102630 - DNA, 270 bp, Glycine max
attctctccatttgtccttgaatataatactcagcatggctaagcttgttctttccctttgttttctgcttttcagtggctgctgcttcgctttcagtttcagagagcagccacagcaaaacgagtgccagatccaacgcctcaatgccctcaaaccggataaccgtatagagtcagaaggtggcttcattgagacatggaaccctaacaacaagccattccagtgtgccggtgttgccctctctcgctgcaccctcaaccgcaacgccc

SEQ ID NO: 102631 - DNA, 273 bp, Glycine max
cccgggttgtcctagcacatttgaagagcctcaacaacctcaacaaagaggacaaagcagcagaccacaagaccgtcaccagaagatctataacttcagagagggtgatttgatcgcagtgcctactggtgttgcatggtggatgtacaacaatgaagacactcctgttgttgccgtttctattattgacaccaacagcttggagaaccagctcgaccagatgcctaggagattctatcttgctgggaaccaagagcaagagtttctaaaata

SEQ ID NO: 102632 - DNA, 273 bp, Glycine max
ctcgcaccgaattcggctcgaggggaaaaagggtggcaagaagaaggcagctgatccctttagcaagaaggattggtatgacattaaggccccttctctttttcaagtgaaaaatgttggcaaaaccctcgtctctcgtacgcagggtaccaagattgcttctgaaggacttaaacatagagtgtttgaggtctccttggctgatcttcaaggggatgaggatcatgcattcaagaagattaggttgagagctgaagatgtgcaagggaagaa

SEQ ID NO: 102633 - DNA, 272 bp, Glycine max
ctcgttgcaacctccttaaggtggagaaagaagaatgtgaagaaggtgaaattccacgaccacgaccacgaccacaacacccggagagggaacctcagcaacccggtgagaaggaggaagacgaagatgagcaaccacgtccaatcccattcccacgcccacaacctcgtcaagaagaagagcacgagcagagagaggaacaggaatggcctcgcaaggaggaataacgcggagacacaggcagtgaacaggaagatgaggatgatgatgag

SEQ ID NO: 102634 - DNA, 275 bp, Glycine max
aggacctattgtgttttaaatccacaaaatccttttgtgttaaataggtggatggggaaactgacttttccccagggcacttcccgaagtgttaaaagaatgcctctttctatagggggaggagctggtgcaaagaatgctattctcatgaatatgccaaatgctgttctttcagtgtggagatattttgttggagatctcgtctttgaagtttctaagatgacttctccctacattaaatgtacagtctctttcttcatagcatttggaaattt

SEQ ID NO: 102635 - DNA, 170 bp, Glycine max
gaaattttgataaaccgcgatcacaggttgccgcaccttaaaaccggaaacaaaagcaatcgttacttgatttcaagaatctctcaatttcttcctacttctttgtgtacgatttcttaagggaaagaaaatcactctctgtgctggccacagacttcgtgaatcatttt

SEQ ID NO: 102636 - DNA, 263 bp, Glycine max
gttcgtagtatttttgttgcgcctttcagaggcggaaggcccattcgggtggttacatttccgaataccattgtgcagattgaaccagacatgaattcaaggttctcagcttttgagtaccactaccaatggtgattttgttcaagggaaagatctcgcaatggttaaagttaatgtagcatgtgctgctgttggcttgacatcaagttacactccaactccattgttggaatctggtttgcaaaaagacagagggttaattg

SEQ ID NO: 102637 - DNA, 229 bp, Glycine max
tatccttggtagtcaaaggatattgataatcaaggatattgataatcaacttcagctggttgagacactctgaaccagctgaagttgattatcaatatccaaggtagtcaaagggaggaggatattgaattcattgataacccaaaggcaaagaagtatatcaaatcacttccttattctcctggaacccccctttcgcaactttatcctaatgcgcatacattggcaa

SEQ ID NO: 102638 - DNA, 261 bp, Glycine max
cgcatctgatggtttatgggagcacttgagtaatgagaaagccgtggatattgtaaacagcaatccacatgcgggtagtgccaagagacttatcaaggctgctctacacgaagcagcaagagaacgagaaatgcgatattcagacctccgtaagattgacaagaaggttcgacgccattttcatgatgatatatccgttattgttttattcttaaatcacgaccttatttccagaggcacagtgctagacccggcactttc

SEQ ID NO: 102639 - DNA, 264 bp, Glycine max
ctcgttgcaacctccttaaggtggagaaagaagaatgtgaagaaggtgaaattccacgaccacgaccacgtacacaacacccggagagggaacctcagcaacccggtgagaaggaggaagacgaagatgagcaaccacgtccaatcccattcccacgcccacaacctcgtcaagaagaagagcacgagcagagagaggaacaggaatggcctcgcaaggaggaaaaacgcggagaaaagggtagtgaagaggaagatgaggatg

SEQ ID NO: 102640 - DNA, 263 bp, Glycine max
cgacggcagatacaaattctggactaaacacgagataaatcttgctttgacagaagaggaaaagatggaagtgattagaagtagaggcattcctgctgatgttcttgcaaagcgagctcatgaatttgaaaaacatgttgctcatgaaagcctcaaggatcaaattcctgctgatgacaagttgtattctactaaggttaataagtttgcaaaaattatgaaccttagacaaagtgttgttggtgatcttaaacttcttactg

SEQ ID NO: 102641 - DNA, 269 bp, Glycine max
taaaattcttccaccaagttatgggtttccttgtgttgcttcttttctccctcttaggtctctcttctagttccagcatatcaactcatcgttccatattggaccttgacctaaccaagtttaccacacagaaacaggtgtcttcactgttccaactatggaagagtgagcatggacgtgtctaccataaccacgaagaagaggcaaagagacttgagattttcaagaataacttgaactatatcagggacatgaatgcaaacagaaaa

SEQ ID NO: 102642 - DNA, 272 bp, Glycine max
attaagaaaagccatttccatagcagcctaagaaaatgaagagcactagcttgttcgctatctttctactttgcgccttcacctcatacctaccttccgccaccgcccaggacgtgctcgacgtggatggcgatccgattcggaacggtttcatatactacgttttgccggcaataagaggaaacggtggcggaatagaacgagccgcactcgggaaagacacttgccctatcactgtagtgcaatctcccaatccaaactctaaggggtta

SEQ ID NO: 102643 - DNA, 273 bp, Glycine max
ccaccatgctgacgctgattacctcatcgttatccttaacgggactgccattcttaccttggtgaacaacgacgaccgagactcttacaaccttcaatctggcgatgccctaagagtccctgcaggaaccacatactatgtggttaaccctgacaacgacgagaatctcagaatgataacactcgccatacccgttaacaaacccggtagatttgagagtttcttcctatctagcactcaagctcaacagtcctacttgcaagggttcagcaa

SEQ ID NO: 102644 - DNA, 260 bp, Glycine max
gaagagatatgcatcaagaaagaagcgtttgagggagaagagaagttttgtgcaaaatccttgggaacagtaattggttttgccatttcaaagctgggaaagaacattcaagtactttcaagttcctttgtcaataagcaagagcaatacactgtggaaggagtgcagaatcttggagacaaagcagtgatgtgtcatgggctaaatttcagaactgcagtattttactgccataaagtccgtgaaacaacagctttcat

SEQ ID NO: 102645 - DNA, 159 bp, Glycine max
atcgaccagatgcctaggagattctatcttgctgggaaccaagagcaagagtttctaaaatatcagcaagagcaaggaggtcatcaaagccagaaaggaaagcatcagcaagaagaagaaaacgaaggaggcagcatattgagtggcttcaccctggaa

SEQ ID NO: 102646 - DNA, 230 bp, Glycine max
aggacctattgtgttttaaatccacaaaatccttttgtgttaaataggtggatggggaaactgacttttccccagggcacttcccgaagtgttaaaagaatgcctctttctatagggggaggagctggtgcaaagaatgctattctcatgaatatgccaaatgctgttctttcaatgtggagatattttgttggagatctcgtctttgaagtttctaagatgacttctcc

SEQ ID NO: 102647 - DNA, 245 bp, Glycine max
acgcgttcggctcgagttcgtaactttcggttcctcccattttccggttcaataaattaaattaaaaaaaccgaaccggcggatctcggtggtttcatggaggctcatggcggagggctccgtcgcatccttgtgctcgccttctgcgtcgccggaatctggtccgcgtacatctaccaaggcgttcttcaggaaaatgtgtcgacgaagcgattcaacggtgaaaggttcgagcaccttgcgtt

SEQ ID NO: 102648 - DNA, 214 bp, Glycine max
tgcagaccgagctagctagctagcaagcaagcacagagatggaggcaaagcgaggccatgccctcatgtgcttggcacgtgtttcactcttcctctgcgctctaaccctatccgctgctcacggaagcaccacggttcaagacatcgcgagaaagttgaaactcggggacaacgagcttctgcgcacggagaagaagttcaaggttttcatgga

SEQ ID NO: 102649 - DNA, 218 bp, Glycine max
acaataattccttcacttgcagaacttagttctctgttgcatcatcatcatcttcattagtgttagccctaaacttcaccttcaaccatgaccacagtgccaccacacagtgtccaagtgcacacaacaacacaccgctacgaagccggcgtcgtcccgccggctcgttttgaggcgccgcgttacgaagccggcatcaaggcgccctcttccattta

SEQ ID NO: 102650 - DNA, 227 bp, Glycine max
tctcgaccgaattcggctcgaggtcttccatagccccccaaaaatgaagagcaccatctactttgctctctttctcttttagtgccttcaccacctcatacctaccttcagccatcgctgatttcgtgctcgataatgaaggtaaccctcttgaaaatggtggcacatattatatcttgtcagacataacagcatttggtggaataagagcagccccaacgggaaat

SEQ ID NO: 102651 - DNA, 225 bp, Glycine max
aaacaattcaattcaatctgcctcgatcatggagaggaaaacatttgggtttttgttcttgctcctccttgtcttagcttctgatgtgacggtgaagagagcagaggcgaaagattgcttgacaaggaggcacgggttccagggtagatgcttattcgacaggcaatgtgcacatgtgtgcaggagcgatggtttcatcggtggtcagtgccgaggccctcttcg

SEQ ID NO: 102652 - DNA, 225 bp, Glycine max
atcgagccgcaattcccattcccacgcccacctcatcagaaggaagagcgaaagcaagaggaagatgaggatgaggagcagcagcgagagagcgaagaaagtgaagattctgagttacgaagacataagaataagaacccttttctcttcggctctaacaggttcgaaactctcttcaaaaaccaatatggtcgcattcgcgtcctccagaggttcaaccaacgc

SEQ ID NO: 102653 - DNA, 222 bp, Glycine max
cagaaggcttacttgaagactattacaccaaagtttcagacccttattgacctttctgttatagaaatcttgtcaaggcatgcatctgatgaggtgtaccttggggagagggacaatccaaattggacatctgatacaagagcattagaggcttttaaaaggtttggaaataaactggcacaaattgagaataaactctcagagagaaacaacgatgagaaa

SEQ ID NO: 102654 - DNA, 221 bp, Glycine max
gtccaattttgtctgggcttagagtactataccctgtaaaacggacatactggtttgatatttataagaatatcgacaaagttggtgcggtcaaatgtcctgttttggttatacatgggactgcagatgaagttgtggatgtgtcccatgggaagcagctctgggagctttgcaaggtaaagtacgaacccttgtgggtaagttgtggtggacattgtaat

SEQ ID NO: 102655 - DNA, 224 bp, Glycine max
gccatttccatagcagcctaagaaaatgaagagcactagcttgttcgctatctttctactttgcgccttcacctcatacctaccttccgccaccgcccaggacgtgctcgacgtggatggcgatccgattcggaacggtttcatatactacgttttgccggcaataagaggaaacggtggcggaatagaacgagccgcactcgggaaagacacttgccctatca

SEQ ID NO: 102656 - DNA, 223 bp, Glycine max
gttcgtgccgaagcaaccaaacatgatcctccaaggagacgctattgtgacctcctcgggaaagttacaactcaataaggttgacgaaaacggcaccccaaaaccctcgtctcttggtcgcgccctctactccacccccatccacatttgggacaaagaaaccggtagcgttgccagcttcgccgcttccttcaacttcaccttctatgcccctgacacaaaa

SEQ ID NO: 102657 - DNA, 98 bp, Glycine max
catgagcttgccaaagagttgcaaggtcagccagattcgattgtcggaaactacagtgatggaaacattgttgcctctttgttggcacataaattagg

SEQ ID NO: 102658 - DNA, 224 bp, Glycine max
gacaaagcgtggggaagctgctcttgctcgtttgaaggtttatgaaggaatccctcctccatatgacaagaccaagagaatggttgttcctgatgcactcaaggtgttgaggcttcagaagggacacaagtattgtgtgctgggcaggttgtcatctgaagttggatggagctactatgataccattagggagctggagaagaagagaaaggagaaggcagcgg

SEQ ID NO: 102659 - DNA, 137 bp, Glycine max
gtttctgtctcatttggcattgcttactgggaaaaagagaaccccaaacacaacaagtgtctccagagttgcaatagcgagagagactcgtacaggaaccaagcatgccacgctcgttgcaacctccttaaggtgga

SEQ ID NO: 102660 - DNA, 224 bp, Glycine max
ctcgagccgctaactattacttcatcatgtcgtcgagcacagttggtcaagtcatcagatgcaaagctgcggtttcatgggaggtagggaagccacttgtgattgaagatgtagaggtggcaccaccacaagctggtgaagtgcgtttgaagatcctctacacctctctttgccacactgatgtttacttctgggaagccaagggccagactccattgtttcct

SEQ ID NO: 102661 - DNA, 224 bp, Glycine max
tcttgaaccggaagctgggcactgccccacctgacaaactcttccggtcggatcgaccggccgaagccgaccttgggtccaaaaagaggggcagtgccccgcttccgattcacggaataagtaaaataacgttaaaagtagtggtatttcactttcgctgtttccagctcccacttatcctacacctctcaagtcatttcacaaagtcggactagagtcaagct

SEQ ID NO: 102662 - DNA, 220 bp, Glycine max
gaggggaaaggttccatgtgaacggcacttgcacatgggttagtcgatcctaagggacgggggaagcccgtctgatagcgctctgtgcgcgtactccgaaagggaatcgggttaaaattcctgaaccgggacgtggcggctgacggcaacgttagggagtccggagacgtcggcgggggccccggaaagagttatcttttctgtttaacagcctgcccac

SEQ ID NO: 102663 - DNA, 223 bp, Glycine max
ctcgagccgtggaatttctgaagcgtaccggatttcattgtgatatcatttgtgtcactggatggactgccaccccaatgcaggatgttcaggttacaattgattggtttatttcctctcaggaatgtgttcccaggacctattgtgttttaaatccacaaaatccttttgtgttaaataggtggatgggaaaactgactttccctcagggcacttcccgaag

SEQ ID NO: 102664 - DNA, 222 bp, Glycine max
cccaaaaatgaagagcaccatcttctttgctctctttctcttttgtgccttcaccacctcatacctaccttcagccatcgctgatttcgtgctcgataatgaaggtaaccctcttgaaaatggtggcacatattatatcttgtcagacataacagcatttggtggaataagagcagccccaacgggaaatgaaagatgccctctcactgtggtgcaatctcg

SEQ ID NO: 102665 - DNA, 179 bp, Glycine max
ttctttccctttgtttccttcttttcagtggctggttcgctctgagagagcaggcacagcaaaatgagtgccagatccaaaagctgaatgccctcaaaccggataaccgtatagactcggaaggtgggttcattgagacctggaaccctaacaacaagccatttcagtgtgccggtgtt

SEQ ID NO: 102666 - DNA, 218 bp, Glycine max
taaacactcatcagtcatcaccatggccaagctagttttttccctttgttttctgcttttcagtggctgctagttcgctttcagttccagagagcagcctcagcctaacgagtgccagatccaaaaactcaatgccctcaaaccggataaccgtatagagtcagaaggagggctcattgagacatggaaccctaacaacaagccattccagtgtgccg

SEQ ID NO: 102667 - DNA, 217 bp, Glycine max
gaatgacctagtggacttagctcaggtggcgcttgagcggggcttcccagcagtgattagtcctttaggtagaaggaggcttccttttccaagtcaaagttttgatgctatacattgtgggggttgcagcataccttggcattccaatggtggtaagcttctattagagatgaatcggattctacgacctggtggatactttattatgtcaactaaa

SEQ ID NO: 102668 - DNA, 211 bp, Glycine max
ggctcgagggagcttgcattccctgggtctgcacaagctgttgagaagctattaaagaaccaacgagaatcctactttgtggatgctcagcctaagaagaaagaggaggggaataagggaagaaagggtcctttgtcttcaattttgagggctttttactgaataagtatgtactaaaatgtatgctgtaatagctcatagtgagcgagga

SEQ ID NO: 102669 - DNA, 219 bp, Glycine max
gcaatggctacttcaaagttgaaaacccagaatgtggttgtatctctctccctaaccttaaccttggtactggtgctactgaccagcaaggcaaactcagcggaaactgtttctttcagctggaacaagttcgtgccgaagcaaccaaacatgatcctccaaggagacgctattgtgacctcctcgggaaagttacaactcaataaggttgacgaaaac

SEQ ID NO: 102670 - DNA, 219 bp, Glycine max
tggttaaagttaatgtagcatgtgctgctgttggcttgacatcaagttacactccaactccattgttggaatctggtctgcaaaaagacagagggttaattgtggagtattttggaaggatgtcttacgttgctcataacgttaatcagccccaagagaaagatttgttggagggaaatttttcctttgatattaaatctcgctctagattggaaaaag

SEQ ID NO: 102671 - DNA, 222 bp, Glycine max
gtcaattttctattgaccttctcggtggaggaattttagtggacaaaactggagattggatcacacttatacaaaatactccaattagtaacttgttgagagttgctgcttggaagaaaggttgtttaatggtcaagattgtgatgtctgggaatgcagcagtcaaaaggagtgattgggcctcattggtacaagtgtttttaacaaacagcaacagtacag

SEQ ID NO: 102672 - DNA, 219 bp, Glycine max
gttttcttcatatcttccttgtcactgcccgtgtgtcgccgccatggccaccgtcaccacccaagcctccgccgcaattttccggccatgtacctcgaaatcgaggtttttgaccggctcttccggtaaacttaaccgggaagtgactatgcggccaatggggtgccctccttctgcctctttcaaggttgaagccaagaagggagagtggttacctgg

SEQ ID NO: 102673 - DNA, 219 bp, Glycine max
aaatgaccaagttcacaatcctcctcatctctcttctcttctgcatcgcccacacttgcagcgcctccaaatggcagcaccagcaagatagctgccgcaagcagctccagggggtgaacctcacgccctgcgagaagcacatcatggagaagatccaaggccgcggcgatgacgatgatgatgatgacgacgacaatcacattctcaggaccatgcggg

SEQ ID NO: 102674 - DNA, 215 bp, Glycine max
attggtccttaaacactcatcagtcatcaccatggccaagctagttttttcccttagtgttctgcttctcagtggctgctgcttcgctttcagttccagagagcagcctcagcaaaacgagtgccagatccaaaaactcaatgccctcaaaccggataaccgtatagagtcagaaggagggctcattgagacatggaaccctaacaacaagccat

SEQ ID NO: 102675 - DNA, 215 bp, Glycine max
gttgtggtcaacgctacctcaaatctgaatttctttgctattggtattaatgccgagaacaaccagaggaacttcctcgcaggttcgcaagacaatgtgataagccagatacctagtcaagtgcaggagcttgcattccctgggtctgcacaagctgttgagaagctattaaagaaccaaagagaatcctactttgtggatgctcagcctaagaa

SEQ ID NO: 102676 - DNA, 217 bp, Glycine max
ggagcagcagcgagagagcgaagaaagtgaagattctgagttacgaagacataagaataagaacccttttctcttcggctctaacaggttcgaaactctcttcaaaaaccaatatggtcgcattcgcgtcctccagaggttcaaccaacgctccccacaacttcagaatctccgagactaccgcattttggagttcaactccaaacccaacaccctc

SEQ ID NO: 102677 - DNA, 86 bp, Glycine max
ctcgagccgtttatatcaagaattttatgcaaactgagtttttcgcttgtgagtttgactcttgaagacattccaaaccatggaag

SEQ ID NO: 102678 - DNA, 217 bp, Glycine max
cttgctggttgccacactacaccgatatatccaccaaacccgttagcattgttgtatgcgaataaatggcaactaagaggagcgtgggaacattgaaggagggtgatttgaaggggaagagggtattcgtgagggtcgatctgaacgtgcctttggatgacaaccttaacatcaccgatgacactagagtccgtgctgctgttcccaccatcaagta

SEQ ID NO: 102679 - DNA, 216 bp, Glycine max
ctaatgaagaaaaaagaaacaaattgagcaatgaatttgtaaatagggcaaaagtaatggataaggaattaatttctctggatatattagaaaaccgaattcgattgtctaatgatgaaactaaaacaaaatatttaactaaaatatatgatcctttcctgaacggacgctttcgtggacaaatcgaaaatgttttttcaacctcaatccaatatg

SEQ ID NO: 102680 - DNA, 217 bp, Glycine max
ggacgctgtccagcgccgtctcatgttcgaagacgaatgcattttggtggatgagaatgaccgtgtggttggtcatgattcaaaatacaattgtcacttgatggaaaagattgaagctgagaatttgctgcatagagctttcagtgtattcctgttcaactcaaagtatgagttgcttcttcagcaacgatctgcaacaaaggtaactttccctctt

SEQ ID NO: 102681 - DNA, 217 bp, Glycine max
ctcggataaggaggaacatcttttcaatggcgtcccaaattacccgtgagtggtctggaatcaatacattcgcacctgctacccagactaagttgcttgaactcttgggaaaacttaaacaagagaatgtgaactccttaactatacttgtgatgggaaaaggtggtgttggaaaatcttcaactgtgaactccatcattggggatagagtggtttc

SEQ ID NO: 102682 - DNA, 206 bp, Glycine max
atgccctcaaaccggataaccgtatagagtcagaaggagggctcattgagacatggaaccctaacaacaagccattccagtgtgccggtgttgccctctctcgctgcaccctcaaccgcaacgcccttcgtagaccttcctacaccaacggtccccaggaaatctacatccaacaaggtaagggtatttttggcatgatatacccg

SEQ ID NO: 102683 - DNA, 215 bp, Glycine max
tttcaacttcgcggtgtgagtgagacggagagtgctaagcaatcgtcttctcttctcggagcttggctttgcttatcgattctctctcctctcgtttcatcaattccaaggtttgtaaaagatggcagatgccgaggatattcaaccccttgtttgcgacaatggaactggaatggtcaaggcaggatttgctggtgacgatgctcctagggctg

SEQ ID NO: 102684 - DNA, 214 bp, Glycine max
ctcactcacaaacacacactgaactaaaaaacatcaaaagagacatggctgagcaaaccttcatcatgatcaagcctgatggcgtccaaagaggccttattggcgagatcattagcagatttgagaagaaaggtttctacttgaaaggtttgaaacttgttactgtggaccgtccttttgctgagaagcactatgctgatttgtctgccaagcc

SEQ ID NO: 102685 - DNA, 214 bp, Glycine max
ctagttcaatatcctagtataccttaataaataatttaagatactatgatgagagcacggttcccattactgttgctgggacttgttttcctggcttcagtttctgtctcatttggcattgcttactgggaaaaagagaaccccaaacacaacaagtgtctccagagttgcaatagcgagagagactcgtacaggaaccaagcatgccacgctc

SEQ ID NO: 102686 - DNA, 207 bp, Glycine max
ctagtacaccgtattaaagaatttaagatatactatgatgagagcgcggttcccattactgttgctgggagttgttttcctggcatcagtttctgtctcatttggcattgcgtattgggaaaagcagaaccccagtcacaacaagtgcctccgaagttgcaatagcgagaaagactcctacaggaaccaagcatgccacgctcgttg

SEQ ID NO: 102687 - DNA, 215 bp, Glycine max
gtgaaacactagctagggtattgggagctctcgttgtttcggagttagggaccttacgcagccatggccactgctacgaatgccgccgccgccccaccacgccagctctcccagaaggaagctgacatccagatgatgttggccgccgacgtccacctcggcaccaagaactgcgacttccaaatggaacgttacatcttcaagcgccgcaacga

SEQ ID NO: 102688 - DNA, 216 bp, Glycine max
tgccctaagagtccctgcaggaaccacatactatgtggttaaccctgacaacgacgagaatctcagaatgataacactcgccatacccgttaacaaacccggtagatttgagagtttcttcctatctagcactcaagctcaacagtcctacttgcaagggttcagcaagaatattctagaggcctcatacgacaccaaattcgaggagataaacaa

SEQ ID NO: 102689 - DNA, 214 bp, Glycine max
atcatacatagtagtgttggtgggttgcaaagatgcttgggggtcttctccataggggtcataagataaaagggacagtggtgttgatgcgcaagaatgtgttggacgtgaatagcgtaaccagcgttgggggaattattggtcaaggtctcgacttagttggctcaacactcgatactcttactgccttcttgggccgatccgtgtctctcca

SEQ ID NO: 102690 - DNA, 214 bp, Glycine max
tgttgctgctcatcctccgtaaccttcgagctctgcaccgaagaacgaagccatggggaagacacatggaatgggatctgctcgcaagctcaagtcccacacgcagaggcaaatgtgggctgacaagtcatacaagaaatcacatcttggaaatgaatggaagaaaccttttgctggttcatcccatgccaagggaattgtccttgaaaagata

SEQ ID NO: 102691 - DNA, 216 bp, Glycine max
attgtctttgaacactcatcaccatggccaagcttgttctttccctttgtttccttcttttcagtggctgcttcgctctgagagagcaggcacagcaaaatgagtgccagatccaaaagctgaatgccctcaaaccggataaccgtatagagtcggaaggtgggttcattgagacctggaaccctaacaacaagccattccagtgtgccggtgttg

SEQ ID NO: 102692 - DNA, 213 bp, Glycine max
ttgctctgcttcaacattgcggaacagaagaagcgccgcagctatggtgaagtactccagagaacccgacaatcccaccaagtcctgcaaggccataggcgctgacctcagagttcattttaagaacactagggagactgcctttgccatcaggaagttgccccttgttaaagctaaacgatacttagaggatgttttggcccacaaacaggc

SEQ ID NO: 102693 - DNA, 214 bp, Glycine max
tgcaaataactgtatctaatgagcatctcattaaaaatgctattgcaatagctatatctaatgagcatctcattagatatagctatgaaaaattactgcgccaagctaaagctccaagtatgtttttacaatccttcaaaaattttgtttcattgtgtgtgtatggtgatgataacttaattagtgttcatgaatatgtcaagccttactttag

SEQ ID NO: 102694 - DNA, 215 bp, Glycine max
tgcagaatgggcagaagataacattccctggcgaactcgatgaagcggtatgttgatatgagaatcagtattgtaatttgcattgtgcttcatggattgcagaaatttataatgacccatgagttgttggtattttgcagccggacacaattactggggatatcgtctttgtccttcagcagaaggaacatcccaaattcataagaaaggctgaa

SEQ ID NO: 102695 - DNA, 212 bp, Glycine max
ggggcaaactcattgttgaacgcattgccagaggaagtgattcagcacacttttaacctaaagagccagcaggccaggcaggtgaagaacaacaaccctttcagcttcctggttccacctcaggagtctcagaggagagctgtggcttagagagccctttttgcatgtgctaccacacttttgtccttttgggctctagctagtgctggtag

SEQ ID NO: 102696 - DNA, 189 bp, Glycine max
tgaaattttgataaaccgcgatcacaggttgccgcaccttaaaaccggaaacaaaagcaatcgttacttgatttcaagaatctctaaatttcttcctacttctttgtgtacgatttcttaagggaaagaaaatcactctctgtgctggtcacagacttcgtgaatcattttcttttccacacaacatac

SEQ ID NO: 102697 - DNA, 214 bp, Glycine max
caccaacggtccccaggaaatctacatacaacaaggtaatggtatttttggcatgatattcccgggttgtcctagcacttatcaagagccgcaagaatctcagcaacgaggacgaagccagaggccccaagaccgtcaccaaaaggtacatcgcttcagagagggtgatttgatcgcagtgcctactggtgttgcatggtggatgtacaacaat

SEQ ID NO: 102698 - DNA, 213 bp, Glycine max
gctgtgggaagttgaggggaagtgggttgttaaaggagcagttgatgtagacattggtgcaaagccttctgctgagggtggaggagaagatgagggagttgatgatgcagctgttaaggttgttgacattgttgacacattcagacttcaggagcaacccgcattcgataagaagcagtttgttaccttcatgaagaggtttatcaagaattt

SEQ ID NO: 102699 - DNA, 214 bp, Glycine max
tgatgccctgagagtcccctcaggaaccacatactatgtggtcaaccctgacaacaacgaaaatctcagattaataacactcgccatacccgttaacaagcctggtagatttgagagtttcttcctatctagcactgaagctcaacaatcctacttgcaaggattcagcaggaacattttagaggcctcctacgataccaaattcgaggagata

SEQ ID NO: 102700 - DNA, 213 bp, Glycine max
caatatcctagtataccttaataaataatttaagatactatgatgagagcacggttcccattactgttgctgggacttgttttcctggcttcagtttctgtctcatttggcattgcttactgggaaaaagagaaccccaaacacaacaagtgtctccagagttgcaatagcgagagagactcgtacaggaaccaagcatgccacgctcgttgc

SEQ ID NO: 102701 - DNA, 238 bp, Glycine max
cataaaattcttccaccaagttatgggttaccttgtgttgcttcttttctccctcttaggtctctcttctagttccagcatatcaactcatcgttccatattggaccttgacctaaccaagtttaccacacagaaacaggtgtcttcactgttccaactatggaagagtgagcatggacgtgtctaccataaccacgaagaagaggcaaagagacttgagattttcaagaataacttg

SEQ ID NO: 102702 - DNA, 235 bp, Glycine max
cagccacggtcgccatcggcctggccgtggccgggttcctgacgtcgggggccttcgggctcacggcgctgtcttccttctcctggatccagaactacatccgggagacccagccagcctcggagaacctcgccgccgccgcgaagcatcacctcgccgaggcggcggagtacgtggggcagaagacgaaggaagtggggcagaagaccaaggaggttgggcaggatattcaaac

SEQ ID NO: 102703 - DNA, 198 bp, Glycine max
cgttcttcttcgtcgttatcttcttcttttgttgtttgtgtgtttgttttttctctcacctgaaaatgtcttgctgcggtggtaactgtggttgcggaagcgcctgcaagtgcggcaacggctgcggaggctgcaagatgtacccagacttgagctacaccgagtcaaccaccaccgagaccttggtcatgggagtgg

SEQ ID NO: 102704 - DNA, 233 bp, Glycine max
cagccacggtcgccatcggcctggccgtggccgggttcctgacgtcgggggccttcgggctcacggcgctgtcttccttctcctggatccacaactacatccgggagacccagccagcctcggagaacctcgccgccgccgcgaagcatcacctcgccgaggcggcggagtacgtggggcagaagacgaaggaagtggggcagaagaccaaggaggttgggcaggatattcag

SEQ ID NO: 102705 - DNA, 226 bp, Glycine max
gtccttaaacactcatcagtcatcaccatggccaagctagttttttccctttgttttctgcttttcagtggctgctgcttcgcttcagttccagagagcagcctcagcaaaacgagtgccagatccaaaaactcaatgccctcaaaccggataaccgtatagagtcagtaggagggctcattgagacatggcaccctaacaacaagccattccggtgtgccggtgt

SEQ ID NO: 102706 - DNA, 234 bp, Glycine max
aacaacagcagcagcagaagagtcatggtggacgcaagcaggggcaacaccagcagcaggaggaagaaggtggcagtgtgctcagtggcttcagcaaacatttcttagcacaatccttcaacaccaacgaggacaaagctgagaaacttcggtctccagatgacgaaaggaagcagatcgtgacagtggagggaggcctcagcgttatcagccccaagtggcaagaacaagaag

SEQ ID NO: 102707 - DNA, 241 bp, Glycine max
ctccagaaaaaatggcggtgcctcttctctcgaagaagatcgtgaagaagaggctgaagaagttcaagaggcctcaaagtgacaggaagatttctgtgaagacaaactggcgcagaccaaagggtatcgattcccgtgttaggagaaagttcaagggatgcactttgatgccgaacattggttatgcttcagacaagaagacccgccactatctcccgaatggtttcaagaaatttgttgt

SEQ ID NO: 102708 - DNA, 89 bp, Glycine max
tctccattggtccttaaacactcatcagtcatgaccatggccaagctagttttttccctttgttttctgcttttcagtggctgctgctt

SEQ ID NO: 102709 - DNA, 142 bp, Glycine max
ctcgagccgattcggctacactcttgtcgagtgcatgctttgctattacctccagcaagctcaacgagtgccaactcaacaacctcaacgcgttggaacccgaccaccgcgttgagtccgaaggtggtcttattgaaacatg

SEQ ID NO: 102710 - DNA, 96 bp, Glycine max
atttaccaccctccgacccagcctatgttaatatctgagtggcgttgtacctttgaatcgccttaataaaatgtcagtcttcaagttttgtcttaa

SEQ ID NO: 102711 - DNA, 232 bp, Glycine max
ctgaaaaggaagatcaagaaaaacccaaaaagattgataccagattgagacaaagaatagatcctcaatacaatgaggttcaggctcagatggaaacaaatttgtttaaattgtctcttgatgatgttgaaactcccaaaggttccatgttggatcttaaaatttctcaatctaaaattgcacttcccaaaaacacagttggaggaaccattctgcgtagtgatctattggc

SEQ ID NO: 102712 - DNA, 112 bp, Glycine max
attctagacaacaactactacagaaacatattagacagcaagggtctcttgatagtggatcaccaactagccaatgacaagaggaccaagcgttatgtgaagaaaatggcca

SEQ ID NO: 102713 - DNA, 232 bp, Glycine max
ctagttcaatatcctagtataccttaataaataatttaagatactatgatgagagcacggttcccattactgttgctgggacttgttttcctggcttcagtttctgtctcatttggcattgcttactgggaaaaagagaaccccaaacacaacaagtgtctccagagttgcaatagcgagagagactcgtacaggaaccaagcatgccacgctcgttgcaacctccttaagg

SEQ ID NO: 102714 - DNA, 230 bp, Glycine max
gattgaacaagtttgctgacatcactcctcaagagttcagcaaaaagtacttgcaagctcccaaggtatagtcgcagcaaatcaaaatggccaacaagaaaatgaagaaggaacaatattcttgtgaccatccacctgcatcatgggattggaggaaaaaaggtgtcatcacccaagtaaagtaccaagggggctgtggaagcggttgggcgttttctgccacgggagcc

SEQ ID NO: 102715 - DNA, 233 bp, Glycine max
gatcatacatagtagtgttggtgggttgcaaagatgcttgggggtcttctccataggggtcataagataaaagggacagtggtgttgatgcgcaagaatgtgttggacgtgaatagcgtaaccagcgttgggggaattattggtcaaggtctcgacttagttggctcaacactcgatactcttactgccttcttgggccgatccgtgtctctccagcttattagtgctaccaa

SEQ ID NO: 102716 - DNA, 233 bp, Glycine max
gttcaatatcctagtataccttaataaataatttaagatactatgatgagagcacggttcccattactgttgctgggacttgttttcctggcttcagtttctgtctcatttggcattgcttactgggaaaaagagaaccccaaacacaacaagtgtctccagagttgcaatagcgagagagactcgtacaggaaccaagcatgccacgctcgttgcaacctccttaaggtgga

SEQ ID NO: 102717 - DNA, 238 bp, Glycine max
gcgagcgaagacagaggataacttccttcttgggaagtttgagctttctggtttcactccatcgccaaggggagttccacagatcaatgttgggtttgatgttgatgttgatggcaatgtggaagtcactgctagagataggagcacggggctgaagaagaagatcacgatcagcaacaagcatgggaggttgagtcctgaagagatgaggagaatggtgagagatgcagtgaggtat

SEQ ID NO: 102718 - DNA, 240 bp, Glycine max
agttacaattcctgattataagcctgctccccgggtgggttatttttcatcaagagggccttcattgattacaagcaatgttctcaagcctgatattgcagccccgggagttaacattctcgctgcatggtttggaaatgacacatcagaggttccaaaaggaagaaagccctcactatatcgcatactctcaggaacttccatggctactccacatgtttcagggcttgcatgcagtga

SEQ ID NO: 102719 - DNA, 222 bp, Glycine max
ggaatttctgaagcgtaccggatttcattgtgatatcatttgtgtcactggatggactgccaccccaatgcaggatgttcaggttacaattgattggtttatttcctctcaggaatgtgttcccaggacctattgtgttttaaatccacaaaatccttttgtgttaaataggtggatggggaaattgactttcccccagggcatttcccgatatgtaaaaag

SEQ ID NO: 102720 - DNA, 79 bp, Glycine max
caacggtccccaggaaatctacatccaacaaggtaagggtatttttggcatgatatacccgggttgtcctagcacattt

SEQ ID NO: 102721 - DNA, 232 bp, Glycine max
ctagaggcctcatacgacaccaaattcgaggagataaacaaggatctgtttggtagagaggaggggcagcaacaaggggaggagaggctgcaagagagtgtgattgtggaaatctcaaagaaacaaattcgggaactgagcaaacatgccaaatctagttcaaggaaaaccatttcttctgaagataaacctttcaacttgagaagccgcgaccccatctattccaacaagc

SEQ ID NO: 102722 - DNA, 225 bp, Glycine max
actctccattgtctttgaacactcatcaccatggccaagcttgttctttccctttgtttccttcttttcagttgctgcttcgctctgagagagcaggcacagcaaaatgagtgccagatccaaaagctgaatgccctcaacccggataaccgtatagagtcggaaggtgggttcattgagacctggaaccctaacaacaagccattccagtgtgccggtgttgcc

SEQ ID NO: 102723 - DNA, 233 bp, Glycine max
ctcgagccgctccatggtgtatgctcttctggctgacaagaacagaaaatttatctatgttgagatggcctttttcaagcgatggtggagagatcaaagtgaagctgttcaggatgtagttaagaaactcgttagttcgggtcaactagagttcataaatggtgccatggctatgcatgatgaggcagtaacacattacatagacatgattgatcagactgcacttggacatc

SEQ ID NO: 102724 - DNA, 238 bp, Glycine max
taaaattcttccaccaagttatgggtttccttgtgttgcttcttttctccctcttaggtctctcttctagttccagcatatcaactcatcgttccatattggaccttgacctaaccaagtttaccacacagaaacaggtgtcttcactgttccaactatggaagagtgagcatggacgtgtctaccataaccacgaagaagaggcaaagagacttgagattttcaagaataacttgaa

SEQ ID NO: 102725 - DNA, 237 bp, Glycine max
tgccgagtcatcctgtgctgctcttgttgttgcttccatctcttcttttggggtgaatcatgagttgactgctatgttataccctctcattatcagttctgtgggtatccttgtttgtttgctcacaaccttatttgcaactgacttctttgagatcaaggctgtaaaggagattgagcctgcattgaagaaacaactcatcatttccactgccctgatgactattgggattgcaat

SEQ ID NO: 102726 - DNA, 242 bp, Glycine max
atacccccaactaacaataattccttcacttgcagaacttagttctctgttgcatcatcatcatcttcattagtgttagccctaaacttcaccttcaaccatgaccacagtgccaccacacagtgtccaagtgcacacaacaacacaccgctacgaagccggcgtcgtcccgccggctcgttttgaggcgccgcgttacgaagccggcatcaaggcgccctcttccatttaccattccgaga

SEQ ID NO: 102727 - DNA, 235 bp, Glycine max
ctagtataccttaataaataatttaagatactatgatgagagcacggttcccattactgttgctgggacttgttttcctggcttcagtttctgtctcatttggcattgcttacttggaaaaagagaaccccaaacacaacaagtgtctccagagttgcaatagcgagagagactcgtacaggaaccaagcatgccacgctcgttgcaacctccttaaggtggagaaagaagaatg

SEQ ID NO: 102728 - DNA, 141 bp, Glycine max
gttcaatatcctagtacaccgtattaaagaatttaagatatactatgatgagagcgcggttcccattactgtagctgggagttgtcttcctggcatcagtttctgtctcatttggcattgcgtattgggaaaagcagaccc

SEQ ID NO: 102729 - DNA, 232 bp, Glycine max
gttgtggtcaacgctacctcaaatctgaatttctttgctattggtattaatgccgagaacaaccagaggaacttcctcgcaggttcgcaagacaatgtgataagccagatacctagtcaagtgcaggagcttgcattccctgggtctgcacaagctgttgagaagctattaaagaaccaaagagaatcctactttgtggatcctcagcctaagaagagggggggggggaata

SEQ ID NO: 102730 - DNA, 229 bp, Glycine max
gggagaagtaatcgagcttcagcaatggtgtacgtcaaggctcagaaatcaaaagcctacttcaagagatatcaagtcaagttcaagagaagaagagagggaaaaaccgattaccgtgccaggattcggttgattaatcaggacaagaacaaatataacactccgaaataccgatttgtggttcgctttagcaacaaggacattgttgcacaaataatatctgctagca

SEQ ID NO: 102731 - DNA, 176 bp, Glycine max
caagattagtccactacccgtgcttaaggaaatcttccgaactgatggtgaacaggcccttaagtttcctcctcctaaagtaattcaagtgagtaagtctgcatggatgactgatgaagaatttgcaagagaaatgcttgctggtgtaaatccaaacttgattcgttgtcttaagg

SEQ ID NO: 102732 - DNA, 230 bp, Glycine max
agagaagatcctgaactccaagcctgctggaaagaactcgtagaggtgggtcatggagacaagaaaaatgagccatggtggcctaagatgcaaactcgtgaagagctagttgaagcttgcgctatcatcatatggactgcttcagcacttcatgcagctgttaattttggacagtatccctatggaggtttaatcttaaaccgtccaactcttagtaggcgattcatgcc

SEQ ID NO: 102733 - DNA, 226 bp, Glycine max
ttgagaagctattaaagaaccaaagagaatcctactttgtggatgctcagcctaagaagaaagaggaggggaataagggaagaaagggtcctttgtcttcaattttgagggctttttactgaataagtatgtactaaaatgtatgctgtaatagctcatagtgagcgaggaaagtatcgggctatgtaactatgactagagcttcaactatgaataaataagtcga

SEQ ID NO: 102734 - DNA, 238 bp, Glycine max
aattcaatatcctagtataccttaataaataatttaagatactatgatgagagcacggttcccattactgttgctgggacttgttttcctggcttcagtttctgtctcatttggcattgcttactgggaaaaagagaaccccaaacacaacaagtgtctccagagttgcaatagcgagagagactcgtataggaaccaagtatgccacgctcgttgcaacctccttaaggtgaagaaa

SEQ ID NO: 102735 - DNA, 237 bp, Glycine max
aagaaatgaagagtactatcttctttgctctctttctagtttgtgccttcaccatctcatacctgccttcagccaccgctcagttcgtgctcgacactgatgatgatcctcttcaaaacggtggcacatactatatgttgccagttatgagaggaaagggcggtggaatagaagtagattcaactggaaaagaaatatgccctctcactgttgtgcaatcacccaatgagctcgata

SEQ ID NO: 102736 - DNA, 239 bp, Glycine max
gttgagccagttgtgcaagctcaaagtgctgaagtttactttgacttcttccctgtggaggttgatagtcaagagggagttgctcacattggtgaattgaaatctggtgtctatgttccactgcctacaaaaactaatttggtggaaactcccaaggaatggcaactggatctaccttgtgataaaattcctagtgtcttgactacaactgatgagagattggtaggcacagaacatga

SEQ ID NO: 102737 - DNA, 233 bp, Glycine max
atgaagacaagggacaagcttagttgtcaagttggaatcaacccatactccatggaatggactggtttggccaatagattactgagtaagggcaacgatattctgtgttgcgattatgctagttttgatggtttgattaccaagcaagttatgagcaaaatggcagaaatgataaacagtctttgtggtggtgatgcaaaattgatgcgtgaaaggacacacctgctgttggc

SEQ ID NO: 102738 - DNA, 178 bp, Glycine max
gcgtgaacaagaccaggaccaggacgaggacgaagatgaagatgaagatcaacctcgcaagagccgcgaatggagatcgaaaaagacacaacccagaagatctagacaagaagaaccacgtgaaagaggatgcgagacaagaaacggggttgaggaaaatatctgcaccttgaagctt

SEQ ID NO: 102739 - DNA, 224 bp, Glycine max
ccaaacccaacacccttcttctcccccaccatgctgacgctgattacctcatcgttatccttaacgggactgccattcttaccttggtgaacaacgacgaccgagactcttacaaccttcaatctggcgatgccctaagagtccctgcaggaaccacatactatgtggttaaccctgacaacgacgagaatctcagaatgataacactcgccatacccgttaac

SEQ ID NO: 102740 - DNA, 227 bp, Glycine max
caacggtccccaggaaatctacatccaacaaggtaagggtatttttggcatgatatacccgggttgtcctagcacatttgaagagcctcaacaacctcaacaaagaggacaaagcagcagaccacaagaccgtcaccagaagatctataacttcagagagggtgatttgatcgcagtgcctactggtgttgcatggtggatgtacaacattgaagaccctcctgttg

SEQ ID NO: 102741 - DNA, 223 bp, Glycine max
gaaggccaagaaggaaagaggttgcacggcgaaagagcgcatcagcaaaatgcctccgtgcgccgccggcaaacgcagctccatatatcgcggcgtcacgaggcataggtggactggtcgttatgaagcgcatctttgggataagagtacgtggaaccaaaatcagaataagaagggaaagcaagtttatttgggggcgtatgatgacgaggaagcggcggcc

SEQ ID NO: 102742 - DNA, 226 bp, Glycine max
ggtttgattaccaagcaagttatgagcaagatggcagaaatgataaacagtctttgtggtggtgatgaaaaattgatgcgtgaaaggaagcacctgctgttggcttgttgttcaaggatggcaatttgtaagaaagatgtttggagagttgaatgtggaatccccttctggatttccgctcacagttatttacaatagcatttttaatgagatgctcattagatat

SEQ ID NO: 102743 - DNA, 232 bp, Glycine max
cgaacaacaagaaccacgtggaagaggatgtcagactagaaatggggttgaggaaaatatttgcaccatgaagcttcacgagaacattgctcgcccttcacgtgctgacttctacaacccaaaagctggtcgcattagcaccctcaacagtctcaccctcccagccctccgccaattcggactcagtgcccaatatgttgtcctctacaggaatggaatttactctccacat

SEQ ID NO: 102744 - DNA, 141 bp, Glycine max
aaccttcaaatatgatataattggtgctggttcacattcttcaggagattttcctgaaaaggaagatcaagaaaaacccaaaaagattgataccagattgagacaaagaatagatcctcaatacaatgaggttcaggctca

SEQ ID NO: 102745 - DNA, 237 bp, Glycine max
gtcttccatagccccccaaaaatgaagagcaccatcttctttgctctctttctcttttgtgccttcaccacctcatacctaccttcagccatcgctgatttcgtgctcgataatgaaggtaaccctcttgaaaatggtggcacatattatatcttgtcagacataacagcatttggtggaataagagcagccccaacgggaaatgaaagatgccctctcactgtggtgcaatctcgc

SEQ ID NO: 102746 - DNA, 241 bp, Glycine max
gcaatgcccactggcttcactctcatctccgcggcttcacttttccttttgcttcttgattgttgctctgggagttttgttggggtctgctatggaagaagtgctgatgacctccctacaccggacaaggtggcacagttggttcaacttcataaaatcaaatatgtcaggatttatgattctaatttacaggttctgaaggcctttgcaaacactggaattgagcttatgattggggttc

SEQ ID NO: 102747 - DNA, 232 bp, Glycine max
ggtccttaaacactcatcagtcatcaccatggccaagctagttttttccctttgttttctgcttttcagtggctgctgcttcgctttcagttccagagagcagcctcagtaaaacgagtgccagatccaaaaactcaatgccctcaaaccggataaccgtatagagtcagaaggagggctcattgagacatggaaccctaacaacaagccattccagtgtgccggtgttgcc

SEQ ID NO: 102748 - DNA, 134 bp, Glycine max
cgctgcttcactattctccctatggagtttaatcttgtggtccgtcaaaagtttttaaattttgtgaggttcattatgaagaaaagggacaagcttagttgtcaagttggaatcaacccatactccatggaatg

SEQ ID NO: 102749 - DNA, 227 bp, Glycine max
catctttctccgccaccctagtccaagactcgttaagattagccactgatgttatccccaactactccttcggctgcgtcaacgccatcaccggcgcctctgtcccggcccaagggcttttgggcctgggccgtggcccgctgtccttgctctcccaatccgggtcaaattactcgggcatcttctcttactgtctccccagcttcaagtcctactacttctctggg

SEQ ID NO: 102750 - DNA, 207 bp, Glycine max
ctggggatggtgaagagatgacattgattccgggaaccagtgttgaagaggcttacaataagctaatagttgaacttgagaaaagtgttcctacattggttggcattgaatgtcccaaggatgagaaacttcctcgtcgcaaaatttttgacaaacctaagacgcgctgcttcactattctccctatggagtttaatctggtggttc

SEQ ID NO: 102751 - DNA, 230 bp, Glycine max
attccaacgttggctttctctcgcgttttccaattccccccaaatctcacgcctagggtttctatcgcaaaccctccctacctccaaccaggtcgcgtgcaaagggatttcgaagcttcggaagaaaaaaatgaaacctgttttctgtggaaacctggatttcgacgcgcgtcaatctgacgtggagaggctcttcagaagatacggcaaagttgatagagttgacatga

SEQ ID NO: 102752 - DNA, 235 bp, Glycine max
gccaaggaaagcgtgaacaagaccaggaccaggacgaggacgaagatgaagatgaagatcaacctcgcaagagccgcgaatggagatcgaaaaagacacaacccagaagacctagacaagaagaaccacgtgaaagaggatgcgagacaagaaacggggttgaggaaaatatctgcaccttgaagcttcacgagaacattgctcgcccttcacgcgctgacttctacaaccctaa

SEQ ID NO: 102753 - DNA, 237 bp, Glycine max
atttgaaattttaataaaccgcgatcacaggttgccgcaccttaaaaccggaaacaaaagcaatcgttacttgatttcaagaatttctcaatttcttcctacttctttgtgtacgatttcttaagggaaagaaaatcactctctgtgctggtcacagacttcgtgaatcattttcttttccactcctagtttatgttctgaacactctcctatttgatataggacttcgtgtcagat

SEQ ID NO: 102754 - DNA, 262 bp, Glycine max
tacgaactcggaatcggctcgactgagcgttttgttggagatctcgtctttgaagtttctaagatgacttctccctacattaaatgtacagtctctttcttcatagcatttggaaatttggctgatgacaccatcaattttgaggcttttccccacaagctggtgcagtttggagagattcaggaaaaagttgtgttgaaattttcacaagaggaatttcttacagcttggtcaactcaggtgcgtcccgcaacgactctgt

SEQ ID NO: 102755 - DNA, 246 bp, Glycine max
aacctacctctttttcttctctctcaacaacttcaccttcttcctcctcgatcatgtctcacttcaagggcaagtaccatgatgagcttatcgccaatgctgcgtacattggcactcctggaaagggtattcttgctgctgatgagtcaacagggacaattggcaagcgtttggccagcatcagtgtagagaacattgaatccaacaggcgaactcttagggagctgcttttcaatgctcctggtg

SEQ ID NO: 102756 - DNA, 269 bp, Glycine max
gttcaatatcctagtataccttaataaatatttaagatactatgatgagagcacggttcccattactgttgctggtacttgttttcctggcttcagtttctgtctcatttggcattgcttactgggaaaaagagaaccccaaacacaacaagtgtctccagagttgcaatagcgagagagactcgtacaggaaccaagcatgccacgctcgttgcaacctccttaaggtggagaaagaagaatgtgaagaaggtgaaattccacgaccc

SEQ ID NO: 102757 - DNA, 267 bp, Glycine max
cgttcttcttcgtcgttatcttcttctttgttgtttgtgtgtttgttttttctctcacctgaaaatgtcttgctgcggtggtaactgtggttgcggaagcgcctgcaagtgcggcaacggctgcggaggctgcaagatgtacccagacttgagctacaccgagtcaaccaccaccgagaccttggtcatgggagtggcacctgttaaggctcaattcgagagtgctgaaatgggtgttcccgctgagaacgatggctgcaaagtgga

SEQ ID NO: 102758 - DNA, 269 bp, Glycine max
ccatgatactacaagccactaggcatgagtctagcaaaggaaacaataatgggaggtggaggccgtgtggccaaagttgaaattcagcagaagaagcctctctcaagggttccaaacacaaagccaccattcactgttggccaactcaagaaagccattccaccgcactgctttcagcgttccctcctcacttcattgtcctatgttgtttatgacctttcattggctttcattttctacattgccaccacctacttacacctctccct

SEQ ID NO: 102759 - DNA, 267 bp, Glycine max
cattctctccattgtctttgaacactctcaccatggccaagcttgttctttccctttgtttccttcttttcagtggctgcttcgctctgagagagcaggcacagcaaaatgagtgccagatctaaaagctgaatgccctcaaaccggataaccgtatagagtcggaaggtgggttcattgagacctggaaccctaacaacaagccattccagtgtgccggtgttgccctctctcgctgcacccttaaccgcaatgcccttcgagacc

SEQ ID NO: 102760 - DNA, 133 bp, Glycine max
cgaaaatctcagattaataacactcgcatatccgttaacaagcctggtagatttgagagtttcttcctatctaggattgttgatcttcagtgctagataggaagaaactctcaaatctaccaggcttgttaac

SEQ ID NO: 102761 - DNA, 256 bp, Glycine max
ctcgaattcccattcttccttccttcttctgcttatatcgatctccactgaaaccaaaccatgtatctcaggccaaatgccagaaccgagattcgccgcaaccgttacaaggtcgccgtcgacgccgacgagggccgccggagaagagaggacaacatggtcgagatccgcaagagcaagcgcgaagagagtttgctcaagaagcgtcgtgaaggcctccaagctcagcaacagtttcccgctcctcttcagaact

SEQ ID NO: 102762 - DNA, 261 bp, Glycine max
cgatgccctaagagtccctgcaggaacacatactatgtggttaaccctgacaacgacgagaatctcagaatgataacactcgccatacccgttaacaaacccggtagatttgagagttacttcctatctagcactcaagctcaacagtcctacttgcaagggttcagcaagaatattctagaggcctcatacgacaccaaattcgaggagataaacaaggttctgtttggtagagaggaggggcagcaacaaggggaggga

SEQ ID NO: 102763 - DNA, 115 bp, Glycine max
cggctcgagtggggaagcccttcactcgctctctttcttccctttgcttgctactcttgtcgagtgcatgctttgcctattagccccagcaagttcaacgagtgccaactcaaca

SEQ ID NO: 102764 - DNA, 267 bp, Glycine max
cggctcgagctctccattggtccttaacactcatcagtcatcaccatggccaagctagttctttccctttgttttctgcttttcagtggctgctgcttcgctttcagttccagagagcagcctcagcaaaacgagtgccagatccaaaaactcaatgccctcaaaccggataaccgtatagagtcagaaggagggctcattgagacatggaaccctaacaacaagccattccagtgtgccggtgttgccctctctcgctgcccctca

SEQ ID NO: 102765 - DNA, 155 bp, Glycine max
cccagatatagagtacccagagacatgcaacaacaacactagcagaaaagtcatggtggacgcaagcaggggcaacaccagcaggaggaagaggaagaaggtggcagcgtgctcagtggctccagcaaacacttcttggcacaatccttccacac

SEQ ID NO: 102766 - DNA, 257 bp, Glycine max
gacgaatccactggacacaaggtgtgaaaaaagaagccaaagtggaaatccacgacaatatttccgaaacgaaaaacgtaactgttgcggatgcttcggaagttgaagattctcctaagttcggcgtgacgtcagtttgcggcaggagaagagacatggaagattccgtttcggtgcggccttccttcacccaaggcttccactactttggcgttttcgacggtcacggttgctctcatgtcgcgactatgtgcaag

SEQ ID NO: 102767 - DNA, 197 bp, Glycine max
acgaacagagagaggaacaggaatggcctcgcaaggaggaaaaacgcggagaaaagggaagtgaagaggaagatgaggatgaggatgaggaacaagatgaacgtcaattcccattcccacgcccacctcatcagaaggaagagcgaaagcaagaggaagatgaggatgaggagcagcagcgagagagcgaagaaagt

SEQ ID NO: 102768 - DNA, 270 bp, Glycine max
gcagattttcgtgaagactcttacaggtaagactattaccctcgaggtggagagctctgacaccattgacaatgtgaaggccaagattcaggacaaggaaggcatcccaccggaccagcagaggctgatttttgctggcaagcagctcgaggatggaaggaccctcgctgactacaacatccagaaggaatcaacccttcaccttgtcctccgtctccgtggggggttttaagctcgttgtgtaatgttggatgtgttcccaaaaatttg

SEQ ID NO: 102769 - DNA, 263 bp, Glycine max
cgcgtatctttctctgttctattctacgatggagttttggggtgccgaggttaaggttggtgagtctgttaaggtagatccagccgaattcgaggcatgcatacacctttctcaggctgctcttggtgaggcaaagatagacaaatcaaatgaaccagttgttctctacttgaaagttggtcaacagaaatttgtcttgggaaccctttccagggagaaaattcctcaaatacctctggaattggttttggacaaggagttga

SEQ ID NO: 102770 - DNA, 265 bp, Glycine max
ccctgctgcataggaagaaacccagcctctcaccctccctgcgacacgatgcagatcttcgtgaaaaccctaacgggtaagacgatcacccttgaggtggagtcttctgacaccatcgacaacgtgaaggccaagatccaggacaaggaaggcatccctccggaccagcagcgcctcatcttcgccggaaagcagctggaggacggccgcaccctcgccgactacaacatccagaaggagtccaccctccacctcgtcctcgtct

SEQ ID NO: 102771 - DNA, 176 bp, Glycine max
caacaacttcaacgcgttggaaccgaccaccgcgttgagtccgaaggtggtttgattcaaacatggaactctcaacaccctgagctgaaatgcgccggtgtcactgtttccaaactcaccctcaaccgcaatggcctccacttgccatcgtactcacctgatccccggatgatcat

SEQ ID NO: 102772 - DNA, 264 bp, Glycine max
acgtgaacaagaccaggaccagacgaggacgaagatgaagatgaagatcaacctcgcaagagccgcgaatggagatcgaaaaagacacaacccagaagacctagacacgaagaaccacgtgaaagaggatgcgagacaagaaacggggttgaggaaaatatctgcaccttgaagcttcacgagaacattgctcgcccttcacgcgctgactactacaaccctaaagctggtcgcattagtaccctcaacagcctcacctcccag

SEQ ID NO: 102773 - DNA, 229 bp, Glycine max
cttaataaataatttaagatatatgttgagagcacggttcccattactgttgctggtagctgttttccttggttcagtttctgtctcatttggcattgcttactgggaaaaagagaaccccaaacacaacaagtgtctccagagttgcaatagcgagagagactcgtacaggaaccaagcatgccacgctcgttgcaagctccttaaggtggagaaagaagaatgtgaa

SEQ ID NO: 102774 - DNA, 190 bp, Glycine max
gaattcgactcgagcttccattgatatcaaatcgcgtctagattggaaaaagtttcctctacaaaagcacaatttgttagtggacaaaccttcaaatatgatataattggtgctggttcacattcttcaggagattttcctgaaaaggaagatcaagaaaaacccaaaaagattgataccagattgagac

SEQ ID NO: 102775 - DNA, 266 bp, Glycine max
ctcctcaaaacttcgtaaccagaaagcaggtgggagaaaggaagctgagaaagaaatgcaggttattgtggacatgcgggagttcatgagcagccttccaaatgttcttcatcaaaagggaatgaacatcattccagtgaccctagaagttggtgactatattctatcaccattaatttgtgtggaaagaaaaagtattcaagatctctttatgagcttcacatcaggtcgtctataccaccaggtggagacaatggtacatatta

SEQ ID NO: 102776 - DNA, 261 bp, Glycine max
cttcagaatctccgagactacgcattttggagttcaactccaaacccaacacccttcttctcccccaccatgctgacgctgattacctcatcgttatccttaacgggactgccattcttaccttggcgaacaacgacgaccgagactcttacaaccttcaatctggcgatgccctaagagtccctgcaggaaccacatactatgtggttaaccctgacaacgacgagaatctcagaatgataacactcgccataccgttaa

SEQ ID NO: 102777 - DNA, 262 bp, Glycine max
aagaaatgaagagtactatctctttgctctctttctagtttgtgccttcaccatctcatacctgccttcatccaccgctcagttcgtgctcgacactgatgatgatcctcttcaaaacggtggcacatactatatgttgccagttatgagaggaaagggcggtggaatagaagtagattcaactggaaaagaaatatgccctctcactgttgtgcaatcacccaatgagctcgataaggggattggactagtctttcatctc

SEQ ID NO: 102778 - DNA, 182 bp, Glycine max
cttgaaattttcacaagaggatttcttacagcttggtgaactcaggtgcgtcgcgcaacgactctgttggctgatgggtacccatatttgtatgctatggtgcatgatagttcagtgtctacaatacgaggtgattttgtcattggtgttaagttgtcaaccataaacaatatgtgtgcata

SEQ ID NO: 102779 - DNA, 263 bp, Glycine max
agttcaatatggggaagccctcactctctctctttcttccctttgcttgctactcttgtcgagtgcatgctttgctattagctccagcaagctcaacgagtgccaactcaacaacctcaacgcgttggaacccgaccaccgcgttgagtccgaaggtggtttgattcaaacatggaactctcaacaccctgagctgaaatgcgccggtgtcactgttgccaaactcaccctcaaccgcaatggcctccacttgccacttactc

SEQ ID NO: 102780 - DNA, 259 bp, Glycine max
ctcgagccgttcaggaaaaattgtattgaaatcttcactagaggaatttcttacagctacgtcaactcaggtgcgtcctacaacaactctgttggctgatgggtgtccatatgtgtatgctatggtgcatgatagttcagtgtctacaataccaggtgattgcgtcattggtgttaagttgacaaccataaacaatatgtgtgcatatgggctttatcctggtatttcaggttctcgtcttttgggcaccattcccagt

SEQ ID NO: 102781 - DNA, 262 bp, Glycine max
aaataattaattaaattcccgtggaatcttgttgaagccatgtctacagctggtcaggtcatcaagtgcagagctgcggtggcatgggaagcagggaagccactatcgatagaaaccatagaagtggcaccaccccagaaaggtgaagtgcgtttgaagactctcttcaactccctttgccgtacagatgtttactggtgggatgctaagggccagactccgctgtttcctcgtatcttaggccacgaagcttcgggattgt

SEQ ID NO: 102782 - DNA, 261 bp, Glycine max
ctttgcagacatatcttggatcccatttccatcaggtcagtgcctatgtacttttttcagaaaggttggtggtgactggtgattgttgaagagaataatggcaacttcaactatggatattcttcatttccaccacactcctttttattgtgaggagaatgtatacttgctttgcaaaaagttgtgcaatgatggaatagcaaatgctgatggatctgatctttttgttgctttcatttccaacgataagaaacaatccca

SEQ ID NO: 102783 - DNA, 258 bp, Glycine max
caaggtaatggtatttttggcatgatattcccgggttgtcctagcacttatcaagagctacaagaatctcagcaacgaggacgaagccagaggccccaagaccgtcaccaaaaggtacatcgcttcagagagggtgatttgatcgcagtgcctactggtgttgcatggtggatgtacaacaatgaagacactcctgttgttgccgtttctattattgacaccaacagcttggagaaccagctcgaccagatgccagga

SEQ ID NO: 102784 - DNA, 256 bp, Glycine max
ttccatagccccccaaaaatgaagagcaccatcttctttgctctctttctcttttgtgccttcaccacctcatacctaccttcagccatcgctgatttcgtgctcgataatgaaggtaaccctcttgaaaatggtggcacatattatatcttgtcagacataacagcatttggtggaataagagcagccccaacgggaaatgaaagatgccctctcactgtggtgcaatctcgcaatgagctcgacaaagggatgg

SEQ ID NO: 102785 - DNA, 263 bp, Glycine max
gttttagttactgatcctaggaactagagaaaattcgtcaaagagaggccgatatgactaaggaacgcattgaaaaactgctgaaggctggagctaatgttattctgacaactaaaggaattgatgacatggctcttaagtactttgttgaggctggggcaattgctgtaagacgtgtgcggaaagaggacatgcgccatgttgccaaggctactggtgcaacattggtctcaacatttgctgatatggaaggggagaaacat

SEQ ID NO: 102786 - DNA, 266 bp, Glycine max
acaccaacgaggacatagctgagaaacttcagtctccagacgacgaaaggaagcagatcgtgacagtggaaggaggtctcagcgttatcagccccaagtggcaagaacaacaagatgaagatgaagatgaagacgaagatgatgaagatgaacaaattccctctcaccctcctcgccgaccaagccatggaaagcgtgaacaagacgaggacgaggacgaagatgaagataaacctcgtcctagtcgaccaagccaaggaagcgtg

SEQ ID NO: 102787 - DNA, 260 bp, Glycine max
ctgtggaggttgatagtcagagggagttgctcacattggtgaattgaaatctggtgtctatgttccactgcctacaaaaactaatttgatggaaactcccaaggaatggcaactggatctaccttgtgacaaaattcctagtgtcttgactacaactgatgagagattggtaggcacagaacatgagggatatgatccttttcttggtggaattcaaaaatatgccactcccatgatgcccctagatgaagaaatctttc

SEQ ID NO: 102788 - DNA, 263 bp, Glycine max
aacaaattgctgaatcatcgtgatcaaatactagatgaagccaacaaagctttcctgggctgtaaagtcaaattagcaatcaaagtatctggaattcactggtggtacaaagttgaaaatcatgctgcagagcttactgctggatattacaaccttaatgatagagacggataccgccccattgcaaggatgctgtctcgccatcatgccattttgaactttacatgtcttgagatgagggactcagagcaaccctagatgcc

SEQ ID NO: 102789 - DNA, 262 bp, Glycine max
ctttgcagacatatcttggatcccatttccatcaggtcagtgcctatgtacttttttcagaaaggttggtggtgactggtgattgttgaagagaataatggcaacttcaactatggatattcttcatttccaccacactcctttttattgtgaggagaatgtatacttgctttgcaaaaagttgtgcaatgatggcatagcaaatgctgatggatctgatctttttgttgctttcatttccaacgaaaagaaacaatcccac

SEQ ID NO: 102790 - DNA, 259 bp, Glycine max
aagcaattggatttgcattccgggatgtcctgagacgtttgagaagccacaacagcaatcaagcagaagaggctcaaggtcgcagcagcaactacaagacagtcaccagaagattcgtcacttcaatgaaggagacgtactagtgattcctcctggtgttccttactggacctataacactggcgatgaaccagttgttgccatcagtcttcttgacacctccaacttcaacaatcagcttgatcaaaaccccaagtat

SEQ ID NO: 102791 - DNA, 260 bp, Glycine max
cattggtccttaaacaccatcagtcatcaccttggccatgctagttttttccctttgttttctgcttttcagtggctgctgcttcgctttcagttccagagagcagcctcactccaacgagtgccagatccaaaaactcaatgccctcaaaccggataatcgtatagagtcagaaggagggctcattgagacatggaaccctaacaacaagccattccagtgtgccggtgttgccctctctcgctgcaccctcaccgcaa

SEQ ID NO: 102792 - DNA, 257 bp, Glycine max
tgttggaatctggtttcaaaaagacagagggttaattcagcgagtattttggaaggatgtcttacgttgctcataacgttaatcagccccaagagaaagatttgttagagggaaatttttcctttgatattaaatctcgctctagattggaaaaagtttcctctacaaaagcacaatttgttagtggaaaaaccttcaaatatgatataattggtgctggttcacattcttcaggagattttcctgaaaaggagatc

SEQ ID NO: 102793 - DNA, 258 bp, Glycine max
agagaaccagctcgacagatgcctaggagattctatcttgctgggaaccaagagcaagagtttctaaaatatcagcaagagcaaggaggtcatcaaagccagaaaggaaagcatcagcaagaagaagaaaacgaaggaggcagcatattgagtggcttcaccctggaattcttggaacatgcattcagcgtggacaagcagatagcgaaaaacctacaaggagagaacgaaggggaagacaagggagccatgtgacag

SEQ ID NO: 102794 - DNA, 253 bp, Glycine max
ggagattcaggtaaaattgtattgaaattttcacaagaggaatttcttacagcttggtcaactcaggtgcgtcctacaacaactctgttggctgatgggtgtccatatttgtatgctatggtgcatgatagttcagtgtctacaataccaggtgattttgtcattggtgttaagttgacaaccataaacaatatgtgtgcatatgggctcaatcctggtatttcaggttctcgtcttttgggtaccatcctca

SEQ ID NO: 102795 - DNA, 252 bp, Glycine max
ctgttttggagagatatgccgcaccgtgatgagcaaatcacccaacaagcacaaccgtctgtacatggaagcaagaccattggaggaaggtcttgctgaggccattgatgatggcaagattggaccaagggatgaccccaaggttcgttccaagatcttgtctgaagagtctcggttgggacaaggatcttgccaagaaaatctggtgctttggccctgaagaccttcgacccaacatggtggttgatatgt

SEQ ID NO: 102796 - DNA, 260 bp, Glycine max
ataaaattcttccaccaagttatgggcttccttgtgttgcttctattctccctcttaggtctctcttctagttccagcatatcaactcatcgttccatattggaccttgacctaaccaagtttaccacacagaaacaggtgtcttcactgttccaactatggaagagtgagcatggacgtgtctaccataaccacgaagaagaggcaaagagacttgagattttcaagaataacttgaactatatcagggacagaatgca

SEQ ID NO: 102797 - DNA, 259 bp, Glycine max
accccccaaaaatgcagagcaccatcttctttgctctctttctcttttgtgccttcaccacctcatacctaccttcagccatcgctgatttcgtgctcgataatgaaggtaaccctcttgaaaatggtggcacatattatatcttgtcagacataacagcatttggtggaataagagcagccccaacgggaaatgaaagatgccctctcactgtggtgcaatctcgcaatgagctcgacaaagggattggaaaatcatc

SEQ ID NO: 102798 - DNA, 259 bp, Glycine max
acacgcttcagaagacatggcctcattgggtgggttacaaaatgtgagcggcatcaattttcttatcaaagagggtccaaaagtcaatgcaaagttcgagctgaagccgccaccatatccactgaatggtttggagccggtgatgagccagcagacacttgagtttcactgggggaagcaccacaagacttatgtggaaaatctgaaaaaacaagttgttgggacagagcttgatgggaagtcactagaagaattattg

SEQ ID NO: 102799 - DNA, 255 bp, Glycine max
ctcgagccgtttcgccagaacatggtcagagcggcggacatcaggcgctggaccccacctccgtccacggcgtcacgcagttctccgatctcaccgaggacgagtttgagaagctctacactggcgtcaatggcggcttcccgtcatcgaataatgccgccggcggtattgcgccgccgttggaggtggacgggctgccggagaattttgattggagagagaaaggagctgtcaccgaagttaagttacaggtag

SEQ ID NO: 102800 - DNA, 255 bp, Glycine max
aaatttggctgatgcaccatcaattttgaggcttttcctcacaagctggtgcattttggagagattcaggaaaaagttgtattgaaattttcacaagaggaatttcttacagcttggtcaactcaggtgcgtcctacaacaactctgttggctgatgggtgtccatatttgtatgctatggtgcatgatagttcagtgtctacaataccaggtgattttgtcattggtgttaagttgacaaccataaaaatatgt

SEQ ID NO: 102801 - DNA, 260 bp, Glycine max
ctcttgttctcaagggattcgattttctctgcactcacttctaggatttcctccgcgctatcagcaatcatggccgacgaaacaccaaatgagatgaaggaggaggttccagaaattgttccttttgatcctaccaagaagaagaagaagaagaagattacaattgtagatcctgctgatgaccctgtggagaaattggctgagaagacagaaaacctctcagtttctgagggggttgagactgcatttgctgtttgaaa

SEQ ID NO: 102802 - DNA, 259 bp, Glycine max
attcaatatcctagtaaccttaataaataatttaagatactatgatgagagcacggttcccattactgttgctgggacttgttttcctggcttcagtttctgtctcatttggcattgcttactgggaaaaagagaaccccaaacacaacaagtgtctccagagttgcaatagcgagagagactcgtacaggaaccaagcatgccacgctcgttgcaacctccttaaggtggagaaagaagaatgtgaagaagggaaatt

SEQ ID NO: 102803 - DNA, 292 bp, Glycine max
gtcagcatgcacgcttcggctcgagctctagtatttttcaagtaacttaaggtttcaaacctaggaagttggaagtcatggcagcaacattgatggcagcaacaagttctggcactcttaaagcaactcctttcctaggccaaggcaagggtgccaatgccaatgctcttagggatgttgtttccatgggaactgggaagtacaccatgggcaatgatttgtggtatggaccagacagagtgaaatacttgggacccttttcagctcagacccgtcatacttgaaaggagaa

SEQ ID NO: 102804 - DNA, 284 bp, Glycine max
cattggtccttaaacactcatcagtcatcaccatggccaagctagttttttccctttgttttctgcttttcagtggctgctgcttcgctttcagttccagagagcagcctcaggcaaacgagtgccagatccagaaactcaatgccctcaaaccggataaccgtatagagtcagaaggagggctcattgagacatggaaccctaacaacaagccattccagtgtgccggtgttgccctctctcgctgcaccctcaaccgcaacgcccttcgtagaccttcctac

SEQ ID NO: 102805 - DNA, 284 bp, Glycine max
gtttccttgtgttgcttcttttctccctcttaggtctctcttctagttccagcatatcaactcatcgttccatattggaccttgacctaaccaagtttaccacacagaaacaggtgtcttcactgttccaactatggaagagtgagcatggacgtgtctaccataaccacgaagaagaggcaaagagacttgctcttttcaagaataacttgaactatatcagggacatgaatgcaaacagaaaatcaccccattctcatcgtttaggattgaacaagtttgct

SEQ ID NO: 102806 - DNA, 286 bp, Glycine max
caaccttgtcatcacatataacatgcacagatgttgctggaacctttggttacttggctcctgaatacttcatgtacggcaaagtaaatgataagattgatgtctatgcattcggtgtcgtgctccttgagcttctttcagggagaaagcccataagccgtgattatccaaaaggccaagagagtcttgttatgtgggcaagtccgattctaaatagtggaaaggtgttgcaattgttagatcctagtttaggtgataattatgatcatgaggagatggaaaagat

SEQ ID NO: 102807 - DNA, 137 bp, Glycine max
tctctccattggtccttaaacactcatcagtcatcaccatggccaagctagttttttccctttgtgttctgcttttcagtggctgctgcttcgctttcagttccagagagcagcctcagcaaaacgagtgccagatc

SEQ ID NO: 102808 - DNA, 206 bp, Glycine max
tcaatatcctagtacaccgtattaaagaatttaagatatactatgatgagagcgcggttcccattactgttgctgggagttgttttcctggcatcagtttctgtctcatttggcattgcgtattgggaaaagcagaaccccagtcacaacaagtgcctccgaagttgcaatagcgagaaagactcctacaggaaccaagcatgcca

SEQ ID NO: 102809 - DNA, 84 bp, Glycine max
taatagctcatagtgagcgaggaaagtatcgggctatttaactatgacttgagctccatctatgaataaataaatcagcatatg

SEQ ID NO: 102810 - DNA, 280 bp, Glycine max
tctctccattgtctttgaacactcatcaccatggccaagcttgttctttccctttgtttccttcttttcagtggctgcttcgctctgagagagcaggcacagcaaaatgagtgccagatccaaaagctgaatgccctcaaaccggataaccgtatagagtcggaaggtgggttcattgagacctggaaccctaacaacaagccattccagtgtgccggtgttgccctctctcgctgcacccttaaccgcaatgcccttcgtagaccttcctacaccaacg

SEQ ID NO: 102811 - DNA, 138 bp, Glycine max
atgcttttggttgatacttatcataccaatcctcaaaatgcagttcgtagtatttttgttgcgcctttcagaggcggaaggcccattcgggtggttacatttccaaataccatcgtaccccttgaaccagacatgaat

SEQ ID NO: 102812 - DNA, 273 bp, Glycine max
gttcctcactgaccaagccatggcgatgagaaccaaactttctttagctatctttttcttttttcttttagccttattttcaaacctagcctttggcaaatgtaaagaaaccgaggtagaagaagaagaccctgagctcgtaacatgcaaacaccaatgccaacagccacagcaatacactgagggtgacaagcgggtatgcttgcaaagatgtgacaggtatcatcgtatgaagcaagagcgagagaaacaaatccaagaggaaactcgtga

SEQ ID NO: 102813 - DNA, 265 bp, Glycine max
gtttttgtggcacaaactaaacagaaatgaggctggtttaatggttcctgcagttgcttctggtttgatttgtggagatggattatggattctcccttcatctattcttgctttgttcaaaattcgtcccccaatctgcatgagcttcctgtcagccagtgccagttagaagttcacaataacattcaaatatatgcagtcaacaacttagtacctacggtccattatgggcataatgtcgtaggatgcttgcttattagcaatt

SEQ ID NO: 102814 - DNA, 281 bp, Glycine max
gagatggaaggcatagtacacaggacagttgaagtgaatggcataaaaatgcatgttgctgagaaaggtgaaggtcccgtggtcttgttcctccacggcttcccggagctctggtactcctggcgccaccagattctggctctcagcaacctcggctaccgcgccgtggctccagatctccgcggctacggagacaccgaggcaccagcttcaatcagcagctacaccatcctccacttagtttctgacatcgtcgcgctcattcatcacttgctgtggat

SEQ ID NO: 102815 - DNA, 285 bp, Glycine max
ctctctgtgtgtgtgcgcatcaaacgcaaccagaagcagccatggccactgcaagaactgtgaaggacgtttctcctcatgagttcgtcaaagcttactcttctcacctcaagcgatctggcaagatggagctgccagagtggactgatattgtgaaaactgcaagatttaaggagttggctccttatgatcctgactggtactatgtcagagctgcttccatggcaagaaagatctacttgagaggaggacttggtgttggtgcctttcagaggatttatggtg

SEQ ID NO: 102816 - DNA, 283 bp, Glycine max
ctctccattgtctttgaacactcatcaccatggccaagcttgttctttccctttgtttccttcttttcagtggctgcttcgctctgagagagcaggcacagcaaaatgagtgccagatccaaaagctgaatgccctcaaaccggataaccgtatagagtcggaaggtgggttcattgagacctggaaccctaacaacaagccattccagtgtgccggtgttgccctctctcgctgcacccttaaccgcaatgcccttcgtagaccttcctacaccaacggtcc

SEQ ID NO: 102817 - DNA, 279 bp, Glycine max
cttaattattaacacttccttagttcaatatggggaagcccttcactctctctctttcttccctttgcttgctactcttgtcgagtgcatgctttgctattagctccagcaagctcaacgagtgccaactcaacaacctcaacgcgttggaacccgaccaccgcgttgagtccgaaggtggtttgattcaaacatggaactctcaacaccctgagctgaaatgcgccggtgtcactgtttccaaactcaccctcaaccgcaatggcctccacttgccat

SEQ ID NO: 102818 - DNA, 284 bp, Glycine max
aaaattcttccaccaagttatgggtttccttgtgttgcttcttttctccctcttaggtctctcttctagttccagcatatcaactcatcgttccatattggaccttgacctaaccaagtttaccacacagaaacaggtgtcttcactgttccaactatggaagagtgagcatggacgtgtctaccataaccacgaagaagaggcaaagagacttgagattttcaagaataacttgaactatatcagggacatgaatgcaaacagaaaatcaccccattctcatc

SEQ ID NO: 102819 - DNA, 280 bp, Glycine max
gatctccatatctgttcccaaaagcttgtttgtaagaatggcttccggtgaacagaaattccctcctcaacaacaacaaacgcagcctgggaaggagcatgctatgactccagtaccccaattcactagccctgactacaagccttcaaataaacttcaagggaagattgcattagtcactgggggtgattctgggattggacgagcggtgtgtaacttgtttgccttagaaggtgctaccgtggccttcacgtatgtgaaggggcatgaggacaaggac

SEQ ID NO: 102820 - DNA, 112 bp, Glycine max
taatagctcatagtgagcgaggaacgtatcgggctatttaactatgacttgagctccatctatgaataaatagatcagcatatgacagacaaagagaaaacacacaaaaacg

SEQ ID NO: 102821 - DNA, 247 bp, Glycine max
tttcaacttcgcggtgtgagtgagacggagagtgctaagcaatcgtcttctcttctcggagcttggctttgcttatcgattctctctcctctcgtttctctaattccaaggtttgtaaaagatggcagatgccgaggatattcaaccccttgtttgcgacaatggaactggaatggtcaaggcaggatttgctggtgacgatgctcctagggctgtctttcccagtattgttgggcgacctcgacat

SEQ ID NO: 102822 - DNA, 280 bp, Glycine max
gcaattttcaaggctccaaaagccatacgaggaggaattcctatatgttttccacagttcggaaactgtggatcgctggagctgcatggttttgcgagaaatagaatgtgggcaattgatgataatcctcctcctctgcctgcaaatgattctagtgggaaatccttcattgacctggtactaaaatcatctgaagaagatatgaagggctggccacatagttttgaattccgtcttcgggtgtctcttacaacagatggagacctgactttgatatcta

SEQ ID NO: 102823 - DNA, 279 bp, Glycine max
ggcacccaagctcactgcattcttgggttacaaggctggtatgactcacattgttagagaggtcgagaagccaggatcaaagcttcacaagaaggaaacatgtgagcctgttacaattattgagacccctccaatggttattgttggtgttgtgggttatgtgaaaactccccgtggtctccgaacattgaacactgtatgggctcagcacttgagtgaggaactgaaacgtaggttttataagaactggtgcaagtccaagaagaaggccttcaccaa

SEQ ID NO: 102824 - DNA, 259 bp, Glycine max
ctttttctctctctcacttgcatacgttcctttcactgtactttttgacacacacgtaacacattcatcagaggaagagagaatgagttcatcctcaggtcagagcagtggctatgatctctctttcaagatcttgttgatcggagattccggtgtgggaaatagtagcctactagtcagctttatttcaagttctgttgaagatctttcccccaccattggtgttgattttaagatcaaaacgctcacagtgggtggc

SEQ ID NO: 102825 - DNA, 279 bp, Glycine max
cattatgtttcgtgtaataatctggaaatgcaagaagcttatcttgtcaatctcgtaaatgtgttacgagaattgtatttgcacagtccagaggaagctcgccaattgagaaggaaagctctctctcgtattgaatggctgcaaaaagctgatgtgcctaccatagcacagattgaagagttccattcgatgcagaggatgatgaatgctcctgattcaaatgataatattgatctactgttgagcattgatttgttgggtttacaaggagcaggtaaa

SEQ ID NO: 102826 - DNA, 280 bp, Glycine max
gcagcagcagcaaggaggttcccaaagccagaaaggaaagcaacaagaagaagaaaacgaaggaagcaacatattgagtggcttcgcccctgaattcttgaaagaagcgttcggcgtgaacatgcagatagtgagaaacctacaaggtgagaacgaagaggaggatagtggagccattgtgacagtgaaaggaggtctaagagtcacagctccagccatgaggaagccacagcaagaagaagatgatgatgatgaggaagagcagccacagtgcgtggag

SEQ ID NO: 102827 - DNA, 277 bp, Glycine max
gagaaccccaaacacaacaagtgtctccagagctgcaatagcgagagagactcgtacaggaaccaagcatgccacgctcgttgcaacctccttaaggtggagaaagaagaatgtgaagaaggtgaaattccacgaccacgaccactcgcacaacacccggagagggaacctcagcaacccggtgagaaggaggaagacgaagatgagcaaccacgtccaatcccattcccacgcccacaactacgtcaagaagaagagcacgagcagagagacgaac

SEQ ID NO: 102828 - DNA, 279 bp, Glycine max
attccaatatattccattctctctgtgtatttccctacctctcccttcaagatgcagatcttcgtcaagaccctcaccggcaagaccatcacccttgaggtggaaagctctgactccatcgacaacgtcaaggccaagatccaggacaaggaaggaatccccccggaccagcaacgtctcattttcgccggaaagcaacttgaggacggccgtacccttgctgactacaacattcagaaggagagtactcttcacctcgtcctccgtctccgtggtggc

SEQ ID NO: 102829 - DNA, 285 bp, Glycine max
gtcatggcagcttgcagcacattccagctgaatgctgcgctccaaaccccaaaaggaaagttagaaaagctttttgatcaacagaacgagggaagtattttcgcaataagcagagaacaggtgcgtccgttggccctaaccaggaaaagctcttggtggccattcggtggcgaatccaagcctcaattcaatattttcagcaagcgtcccactatctccaacggatatggtcgtttaactgaagttggtcctgacgatgatgaaaagagttggcttcaaagactc

SEQ ID NO: 102830 - DNA, 168 bp, Glycine max
aattcttgcactttctaggcaaaagttgacccaacttccaggaacttctattgagggagttgaaaagggtggctacaccatttcagacaactcatcaggtaacaagcctgatgttattttgattggaactggttctgagttggaaattgctgctgctgctgctgagga

SEQ ID NO: 102831 - DNA, 279 bp, Glycine max
gatgtgtttagggcaattccctcagaggttcttgcccattcttacaaccttcgacagagtcaagtgtctgagcttaagtatgaaggaaattggggtcctttggtcaaccctgagtctcaacaaggctcaccccgtgttaaagtcgcataaatgacaagcatgatggtgtgaggatgaggccatcttatgaaataataacaaataaataaattttgtatgataataaaaagtatggcccatgtaccatcccagcgagcctatgtttatatctgagtggcg

SEQ ID NO: 102832 - DNA, 110 bp, Glycine max
ctagatctataacgcgagcggccgtgctgagagcacggttcccatcactgttgctgggacttgtgttcctggcttcagtttctgtctcatttggcattgcttactgggaa

SEQ ID NO: 102833 - DNA, 279 bp, Glycine max
cgagggtttgggtttctcttcctcccttggagaaaaagaagagccaccgctgcgacgccgttcgtgcatttttgaggtgccgctgtcatgtttgggcgtggtggaccaaggaggagtgataactccaaatattatgatattctcgggatttccaaaaatgccagtgaagatgaaatcaagaaggcctatagaaaggcggctatgaagaaccatccagataagggaggagatcctgaaaagtttaaggagttaggtcaagcatatgaagttttaagtgat

SEQ ID NO: 102834 - DNA, 279 bp, Glycine max
gtcttccatagccccccaaaaatgaagagcaccatcttctttgctctctttctcttttgtgccttcaccacctcatacctaccttcagccatcgctgatttcgtgctcgataatgaaggtaaccctcttgaaaatggtggcacatattatatcttgtcagacataacagcatttggtggaataagagcagccccaacgggaaatgaaagatgccctctcactgtggtgcaatctcgcaatgagctcgacaaagggattggaacaatcatctcgtcccca

SEQ ID NO: 102835 - DNA, 267 bp, Glycine max
atcctagtacaccgtattaaagaatttaagatatactatgatgagagcgcggttcccattactgttgctgggagttgttttcctggcatcagtttctgtctcatttggcattgcgtattgggataagcagaaccccagtcacaacaagtgcctccgaagttgcaatagcgagaaagactcctacaggaaccaagcatgccacgctcgatgcaacctccttaaggtggaggaagaagaagaatgcgaagaaggtcaaattccacgacc

SEQ ID NO: 102836 - DNA, 276 bp, Glycine max
ctagttcaatatcctagtataccttaataaataatttaagatactatgatgagagcacggttcccattactgttgctgggacttgttttcctggcttcagtttctgtctcatttggcattgcttactgggaaaaagagaaccccaaacacaacaagtgtctccagagttgcaatagcgagagagactcgtacaggaaccaagcatgccacgctcgttgcaacctccttaaggtggagaaagaagaatgtgaagaaggtgaaattccacgaccacga

SEQ ID NO: 102837 - DNA, 131 bp, Glycine max
ggtccttaaacactcatcagtcatcaccatggccaagctagttttttccctttgttttctgcttttcagtggctgctgcttcgctttcagttccagagagcagcctcaggtaaacgagtgccagatccaaa

SEQ ID NO: 102838 - DNA, 278 bp, Glycine max
aaatgatactacaagccactaggcatgggtctagcaaaggaaacaataatgggaggtggaggccgtgtggccaaagttgaaattcagcagaagaagcctctctcaagggttccaaacacaaagccaccattcactgttggccaactcaagaaagccattccaccgcactgctttcagcgttccctcctcacttcattgtcctatgttgtttatgacctttcattggctttcattttctacattgccaccacctacttccacctcctccctcacccctt

SEQ ID NO: 102839 - DNA, 278 bp, Glycine max
aaaatttctaccgcattacattaggtggcatctgtataccttgttgatctacattctcccatcttttctcactgctgaaattaaatataagcggaatttgagtaatattcacatttccggcttattttacgacggcagatacaaattctggactaaacacgagataaatcttgctttgacagaagaggaaaagatggaagtgattagaagtagaggcattcctgctgatgttcttgcaaagcgagctcatgaatttgacaaacatgttgctcatgaaa

SEQ ID NO: 102840 - DNA, 274 bp, Glycine max
cgaggaagccaaagcaaaagcagaagaaatggcattgacgagaccttatgcaccatgagacttcgccacaacattggccagacttcatcacctgacatctacaaccctcaagccggtagcgtcacaaccgccaccagccttgacttcccagccctctcgtggctcagactcagtgctgagtttggatctctccgcaagaatgcaatgttcgtgccacactacaacctgaacgcgaacagcataatatacgcattgaatggacgggcattgatac

SEQ ID NO: 102841 - DNA, 188 bp, Glycine max
gttcaatatcctagtataccttaataaataatttaagatactatgatgagagcacggttcccattactgttgctgggacttgttttcctggcttcagtttctgtctcatttggcattgcttactgggaaaaagagaaccccaaacacaacaagtgtctccagagttgcaatagcgagagagactcgta

SEQ ID NO: 102842 - DNA, 283 bp, Glycine max
  unsure (1)..(283): unsure at all n locations
cacttcccgaagtgttaagagaatgcctctttctatagggggaggagctggtgcaaagaatgctattctcatgaatatgccaaatgctgttctttcaatgtggagatattttgttggagatctcgtctttgaagtttctaagatgacttctccctacattaaatgtacagtctctttcttcatagcatttggaaatttggctgatgacaccatcaattttgaggcttttccccacaagctggtgcagtnttggagagattcaggaaaaagttgtgttgaaatt

SEQ ID NO: 102843 - DNA, 279 bp, Glycine max
cacagaggaattaacatatatatagcaagcatggcagtcacactctacgaccttagctcttcctctgggttgaagaaacttgatgagtaccttctcccacgcagttacatcaccgggtaccaagctacaaaggatgatcttactgtttatgcagctttgccaactgctccatcagatgaatatggaaatgtttccaggtggtacaagcacattgatgctttgttgagaatctctggtgttactggcgagggatctggtgttattgttgagggatctcta

SEQ ID NO: 102844 - DNA, 141 bp, Glycine max
gtgcaccgtattaaagaatttaagatatactatgatgagagcgcggttcccattactgttgctgggagttgttttcctggcatcagcttctgtctcatttggccttgcgtattgggaaaagcagaaccccagtcacaacaa

SEQ ID NO: 102845 - DNA, 277 bp, Glycine max
cattctctccattgtctttgaacactcatcaccatggccaagcttgttctttccctttgtttccttcttttcagtggctgcttcgctctgagagagcaggcacagcaaaatgagtgccagatccaaaagctgaatgccctcaaaccggataaccgtatagagtcggaaggtgggttcattgagacctggaaccctaacaacaagccattccagtgtgccggtgttgccctctctcgctgcacccttaaccgcaatgcccttcgtagaccttcctaca

SEQ ID NO: 102846 - DNA, 275 bp, Glycine max
cttcgtctcaaatctcttcgttccttcgattcgttccatttcttccaaaatggccaaagacccagttcgcgttctcgtcactggagctgcagggcaaattgggtatgctcttgtccctatgattgctaggggagtgatgttgggtcctgaccagcccgtgatcctccacatgcttgacattcctccggcagcagagtcattgaatggggttaaaatggaattggtggatgctgcattccctcttcttaaaggtgttgttgccacaactgatgtgg

SEQ ID NO: 102847 - DNA, 275 bp, Glycine max
gatgtgtttagggcaattccctcagaggttcttgcccattcttacaaccttcgacagagtcaagtgtctgagcttaagtatgaaggaaattggggtcctttggtcaaccctgagtctcaacaaggctcaccccgtgttaaagtcgcataaatgacaagcatgatggtgtgaggatgaggccatcttatgaaataataacaaataaataaattttgtatgataataaaaagtatggcccatgtaccatcccagcgagcctatgtttatatctgagt

SEQ ID NO: 102848 - DNA, 271 bp, Glycine max
cactcatcagtcatcaccatggccaagctagttttttccctttgttttctgcttttcagtggctgctgcttcgctttcagttccagagagcagcctcagcaaaacgagtgccagatccaaaaactcaatgccctcaaaccggataaccgtatagagtcagaaggagggctcattgagacatggaaccctaacaacaagccattccagtgtgccggtgttgccctctctcgctgcaccctcaaccgcagagcctttcgtagaccttcctaca

SEQ ID NO: 102849 - DNA, 272 bp, Glycine max
gttcaatatcctagtataccttaataaataatttaagatactatgatgagagcacggttcccattactgttgctgggacttgttttcctggcttcagtttctgtctcatttggcattgcttactgggaaaaagagaaccccaaacacaacaagtgtctccagagttgcaatagcgagagagactcgtacaggaaccaagcatgccacgctcgttgcaacctccttaaggtggagaaagaagaatgtgaagaaggtgaaattccacgaccacg

SEQ ID NO: 102850 - DNA, 272 bp, Glycine max
gttgtattgaaattttcacaagaggaatttcttacagcttggtcaactcaggtgcgtcctgcaacaaccctgttggctgatgggtgtccatatttgtatgctatggtgcatgacagttcagtgtctacaataccaggtgattttgttattggtgttaagttgacaaccataaacaatatgtgtgcatatgggctcaatcctggtatttcaggttctcgtcttttgggcaccattcctcagtctatttcacagcaaactgtttggaatcaaat

SEQ ID NO: 102851 - DNA, 276 bp, Glycine max
ttggtattcctgagaatacaggtatagcattggcctgtgctatgaatagttcttttagggggcgcgccagttctgatatttacaccatctgctctcaagactgtgaattatggaatcctgcttgcacaaaagcaatgactatgtcatttaatccaaacccgtgttctgatgcatggagtttggaatttctgaagcgtaccggatttcattgtgatatcatttgtgtcactggatggactgccaccccaatgcaggatgttcaggttacaattgatt

SEQ ID NO: 102852 - DNA, 267 bp, Glycine max
gcttttccccacaagctggtgcactttggagagattcaggaaaaagttgtattgaaattttcacaagaggaatttcttacagcttggtcaactcaggtgcgtcctacaacaactctgttggctgatgggtgtccatatttgtatgctatggtgcatgatagttcagtgtctacaataccaggtgattttgtcatatggtgttaagttgacaaccataaacaatatgtgtgcatatgggctcaatcctggtatttcaggttctcgtct

SEQ ID NO: 102853 - DNA, 270 bp, Glycine max
tgaccaagttcacaatcctcctcatctctcttctcttctgcatcgcccacacttgcagcgcctccaaatggcagcaccagcaagatagctgccgcaagcagctccagggggtgaacctcacgccctgcgagaagcacatcatggagaagatccaaggccgcggcgatgacgatgatgatgatgacgacgacaatcacattctcaggaccatgcggggaagaatcaactacataaggaggaacgaaagaaaagacgaagacgaagaagaag

SEQ ID NO: 102854 - DNA, 273 bp, Glycine max
tatgagactgcgcaaagagttaaacaaactttacaacgttacaaagaacttcaagacattatagctatccttggcttggacgaattatccgaagaagatcgcttaaccgtagcaagagcacgaaaaattgagcgtttcttatcacaaccttttttcgtagcagaagtttttaccggttcgccggggaaatatgttagtctagcagaaacaattagagggtttaaattgattctttctggagaattagatggtcttcctgaacaagcttttatt

SEQ ID NO: 102855 - DNA, 267 bp, Glycine max
ctagtacaccgtattaaagaatttaagatatactatgatgagagcgcggttcccattactgttgctgggagttgttttcctggcatcagtttctgtctcatttggcattgcgtattgggaaaagcagaaccccagtcacaacaagtgcctccgaagttgcaatagcgagaaagactcctacaggaaccaagcatgccacgctcgttgcaacctccttaaggtggaggaagaagaagaatgcgaagaaggtcaaattccacgaccacg

SEQ ID NO: 102856 - DNA, 273 bp, Glycine max
gcagcagcagcaaggaggttcccaaagccagaaaggaaagcaacaagaagaagaaaacgaaggaagcaacatattgagtggcttcgcccctgaattcttgaaagaagcgttcggcgtgaacatgcagatagtgagaaacctacaaggtgagaacgaagaggaggatagtggagccattgtgacagtgaaaggaggtctaagagtcacagctccagccatgaggaagccacagcaagaagaagatgatgatgatgaggaagagcagccacagtg

SEQ ID NO: 102857 - DNA, 268 bp, Glycine max
cccaaacagtctacagtttttgatattctcttgggaatctctcaagattttgaaattgctggtaatactcttatgccagctttttctgttccacaggctactgccagatcttctgaaaatgcggaatcctctgcatgatctggaattcgtgttttctttcgcttgttcgtttgtttaattcaataaaggaaattaggcatgaccctcttgttgagtatgctctgcctatctgaaaatttccacacctcttttaattgtcgtaatgatg

SEQ ID NO: 102858 - DNA, 126 bp, Glycine max
tgatgatattaggaaaaagcactatagaggagttaggcagagaccatggggcaaatgggcagcagaaataagagaccctaagaaagcagctagagtgtggcttggcacctttgacacggcagaggc

SEQ ID NO: 102859 - DNA, 273 bp, Glycine max
ttctcgagccgaatcggctcgagcttccatagccccccaaaaatgaagcgcaccatcttctttgatctctttctcttttgtgccaccaccacctcatacctaccttcagccatcgctgatttcgtgctcgataatgaaggtaaccctcttgaaaatggtggcacatattatatcttgtcagacataacagcatttggtggaataagagcagccccaacgggaaatgaaagatgccctctcactgtggtgcaatctcgcaatgagctcgacaaa

SEQ ID NO: 102860 - DNA, 92 bp, Glycine max
ctgttttggagagatcatgccgcaccgtgatgagcaaatcacccaacaagcacaaccgtctgtacatggaagcaagaccattggaggaaggt

SEQ ID NO: 102861 - DNA, 272 bp, Glycine max
gacgaatccactggacacaaggtggtgaaaaaagaagccaaagtggaaatccacgacaatatttccgaaacgaaaaacgtaactgttgcggatgcttcggaagttgaagattctcctaagttcggcgtgacgtcagtttgcggcaggagaagagacatggaagattccgtttcggtgcggccttccttcacccaaggcttccactactttggcgttttcgacggtcacggttgctctcatgtcgcgactatgtgcaaggagcggttacacga

SEQ ID NO: 102862 - DNA, 274 bp, Glycine max
ctcgagccgcaaagttgaacaaaactcattttccaactacatttcttccaccaactcataaaattctcatatctgttcccaaaagcttgtttgtgagaatggcttcgggtgaaaagaaattcccacctcaacaacaacaaacacagcctgggaaggagcatgctatgaatccagtaccccaattcactagccctgactacaagccttcaaataaacttcaaggaaagatagcattagtgactgggggtgactctgggattggacgagcggtgtg

SEQ ID NO: 102863 - DNA, 273 bp, Glycine max
caatggtgaaggctgtggccgttcttggcagcagtgagggtgtcactggaactattcacttcgttcaggagggaagtggtctaaccagcgtaactggatctcttgctggtcttaagcctggtctccatggtttccatgtccatgccttgggggacactaccaatggttgcctctcaactggatcacatttcacatcctaataacaatgagcatggtgcccctgaggatgagaatcgtcatgctggtgatcttgggaatgttaatgtcggtgat

SEQ ID NO: 102864 - DNA, 259 bp, Glycine max
aacagtacttgcaaggaacagaatgaaaagtattaatggtgctgcagttgtcatacaatcatttattcgtggttggttagtcagaagatgctcaggagatataggactatcaaaacctcggggcattaagactaatgagtcagatgaggttctggtgaagtcatctttcctggctgaattacagcgccgggtacttaaggcagaagcttccctgagagagaaagaagaggaaaatgacattcttcaccaacgccttcaa

SEQ ID NO: 102865 - DNA, 255 bp, Glycine max
caattttctattgaccttctcggtggaggaattttagtggacaaaactggagattggatcacacttatacaaaattctccaattagtaacttgttgagagttgctgcttggaagaaaggctgtttaatggttaagattgtgatgtctgggaatgcagcagtcaaaaggagtgattgggcctcattggtccaagtgtttttaacaaacagcaacagtacagagcattttgatgcatgtaagtggacaaaatcggaa

SEQ ID NO: 102866 - DNA, 197 bp, Glycine max
atcaagttatgatgatgatgagtattcaaaaccatgctgtgatctctgcatgtgcacacgctcaatgcctcctcaatgcagctgtgaagatattaggctgaattcatgccactcagattgtaagagctgtatgtgcacacgctaccagccaggacagtgtcgttgtcttgacaccaacgacttctgctacaaacctt

SEQ ID NO: 102867 - DNA, 255 bp, Glycine max
gttcaatatcctagtataccttaataaataatttaagatactatgatgagagcacggttcccattactgttgctgggacttgttttcctggcttcagtttctgtctcatttggcattgcttactgggaaaaagagaaccccaaacacaacaagtgtctccagagttgcaatagcgagagagactcgtacaggaaccaagcatgccacgctcgttgcaacctccttaaggtggagaaagaagaatgtgaagaaggt

SEQ ID NO: 102868 - DNA, 255 bp, Glycine max
cttaaacttcttactgatgggaagttgtatgagggtaagcatattcctgtatctaatattagtgcaggggaaaatcatgtagttcaaatacccttaatggcacaggaggaaattctgtcttctagtgcaagtgatttcagaactgcaatggtgagtaaaaatagcaaacctcaagctactgcaatgcatgtgggagctatagaaattatcattgatagtttcgcaagtcctgattgcaacatagctggtgctatt

SEQ ID NO: 102869 - DNA, 255 bp, Glycine max
atatcctagtataccttaataaataatttaagatactatgatgagagcacggttcccattactgttgctgggacttgttttcctggcttcagtttctgtctcatttggcattgcttactgggaaaaagagaaccccaaacacaacaagtgtctccagagttgcaatagcgagagagactcgtacaggaaccaagcatgccacgctcgttgcaacctccttaaggtggagaaagaagaatgtgaagaaggtgaaat

SEQ ID NO: 102870 - DNA, 256 bp, Glycine max
cagcttcatccctaacgcgtgcatagcagagtcagagacagagacgcagccatggggcggagacctgcgaggtgttataggcaaattaagaacaagccataccccaagtcacgtttctgccgtggtgttcctgatcccaagatcaggatttatgatgttggtatgaagaagaagggtgttgatgagtttcctttctgtgtccatctggttagttgggagaaggaaaatgtttcaagtgaggccctggaagctgctc

SEQ ID NO: 102871 - DNA, 255 bp, Glycine max
acccaccaccaatctcaccaccgtacccgccgccgcacggtggcagtccttttcctcaaaggacttgcccaattgatgccctaaaattggggctttgcttggatgtgcttggagggttggtgcatgtgggaatagggaacccagttgagaacgtgtgctgtcccgttatacaggggttgcttgatcttgaagctgcaatttgtctttgcactgttattagggctaagcttcttaacctcaatatctttcttcctc

SEQ ID NO: 102872 - DNA, 258 bp, Glycine max
ccaaattaaagacgtttccggatgaaattctcgagttagacagatctgttcgcactcttgacttgacgcataatcgaatagttgacattcctgtggaaattagcaagttaattaatgtacagcgcctgatattagcggagaacctcattgagagactgccagtaaatttggggaaactccaatctctgaaactgatgaacctggatggaaatcgaattacttccttgcctgatgaattgggccagttagtaaggcttg

SEQ ID NO: 102873 - DNA, 257 bp, Glycine max
ctttgtggaagtttgaaaccaccaagtactactgcacagtcatcgatgcccccggacatcgtgactttatcaagaacatgattactggtacctcccaggctgattgtgctgtccttatcattgactccaccactggtggttttgaagctggtatttctaaggatggacagactcgtgagcatgctcttcttgctttcacccttggtgtgaagcagatgatctgctgctgtaacaagatggatgccactaccccgaag

SEQ ID NO: 102874 - DNA, 257 bp, Glycine max
aacacaacaaaaaaagacaacccagagagcgcgtcttaataaacgctcttctctgaaaacccccatttcttttcttctttcttcttctctttcgcttcttcgatcttcgatcttcgtcgctgaaaatgagagagtgcatttcaatccacatcggccaggccgggattcaggttggaaacgcctgctgggagctttactgcctcgaacacggcattcagcctgatgggcagatgccaagtgacaagaccgttggtgga

SEQ ID NO: 102875 - DNA, 258 bp, Glycine max
ccttaataaataatttaagatactatgatgagagcacggttcccattactgttgctgggacttgttttcctggcttcagtttctgtctcatttggcattgcttactgggaaaaagagaaccccaaacacaacaagtgtctccagagttgcaatagcgagagagactcgtacaggaaccaagcatgccacgctcgttgcaacctccttaaggtggagaaagaagaatgtgaagaaggtgaaattccacgaccacgacca

SEQ ID NO: 102876 - DNA, 254 bp, Glycine max
gtacaattgtaaggatgaacatttggcatctatcagccttagtggagacctaatgcttcataaccttgcttctgggcaaaaggctgcggagctcaaagatcccaatcaacagatgttgagagttcttgattattctcgagttagtcgtcaccttcttgtgactgctggtgatgatgggactgtacatttgtgggatacaactggtcgcagccctaaggtttcatggataaagccgcattccgcaccaactgctg

SEQ ID NO: 102877 - DNA, 256 bp, Glycine max
gattaacaagggtactgttgaaatcattacccctgtggagctcattaagaagggagacaaggttggatcttctgaagctgcattgcttgccaagctagggataaggcccttctcgtatgggcttgtggttctttctgtttatgataatggttcagtgttcagtcctgaggttcttgatcttactgaggatgaccttattgagaagtttgctgctggtgtctcaatggttacttcactttcattagctatctcatac

SEQ ID NO: 102878 - DNA, 254 bp, Glycine max
ccaaattaaagacgtttccggatgaaattctcgagttagacagatatgttcgcactcttgacttgacgcataatcgaatagttgacattcctgtggaaattagcaagttaattaatgtacagcgcctgatattagcggagaacctcattgagagactgccagtaaatttggggaaactccaatctctgaaactgatgaacctggatggaaatcgaattacttccttgcctgatgaattgggccagttagtaagg

SEQ ID NO: 102879 - DNA, 250 bp, Glycine max
ctttgtggaagtttgaaaccaccaagtacttctgcacagtcatcgatgcccccggacatcgtgactttatcaagaacatgattactggtacctcccaggctgattgtgctgtccttatcattgactccaccactggtggttttcaagctggtatttctaaggatggacagactcgtgagcatgctcctcttgctttcacccttggtgtgaagcagatgatctgctgctgtaacaagatggatgccactac

SEQ ID NO: 102880 - DNA, 254 bp, Glycine max
aacacaacaaaaaaagacaacccagagagcgcgtcttaataaacgctcttctctgaaaacccccatttcttttcttctttcttcttctctttcgcttcttcgatcttcgatcttcgtcgctgaaaatgagagagtgcatttcaatccacatcggccaggccgggattcaggttggaaacgcctgctgggagctttactgcctcgaacacggcattcagcctgatgggcagatgccaagtgacaagaccgttggt

SEQ ID NO: 102881 - DNA, 254 bp, Glycine max
ccttaataaataatttaagatactatgatgagagcacggttcccattactgttgctgggacttgttttcctggcttcagtttctgtctcatttggcattgcttactgggaaaaagagaaccccaaacacaacaagtgtctccagagttgcaatagcgagagagactcgtacaggaaccaagcatgccacgctcgttgcaacctccttaaggtggagaaagaagaatgtgaagaaggtgaaattccacgaccacg

SEQ ID NO: 102882 - DNA, 251 bp, Glycine max
gtacaattgtaaggatgaacatttggcatctatcagccttagtggagacctaatgcttcataaccttgcttctgggcaaaaggctgcggagtcaaagatcccaatcaacagatgttgagagttcttgattattctcgagttagtcgtcaccttcttgtgactgctggtgatgatgggactgtacatttgtgggatacaactggtcgcagccctaaggtttcatggataaagccgcattccgcaccaactgc

SEQ ID NO: 102883 - DNA, 255 bp, Glycine max
gattaacaagggtactgttgaaatcattacccctgtggagctcattaagaagggagacaaggttggatcttctgaagctgcattgcttgccaagctagggataaggcccttctcgtatgggcttgtggttctttctgtttatgataatggttcagtgttcagtcctgaggttcttgatcttactgaggatgaccttattgagaagtttgctgctggtgtctcaatggttacttcactttcattagctatctcata

SEQ ID NO: 102884 - DNA, 256 bp, Glycine max
caaagctagggcaaatcctgaaaacccttctattgaacttgggccagaatttaagaaggttagcaacttcttgggccgcttcaagtcaattcccagtattgttgagcttgacagtctaaaagtggctggcaatgtatggtttggagatggtgttatcctcaagggaaaaatcagtatcgtggccaatcctggtgttaagctggaagttcccgatggtgctgtcatttcggataaggaaattaatggcccagaggac

SEQ ID NO: 102885 - DNA, 254 bp, Glycine max
cgctgggaaacctgctgtgcttacacgtgttgtggatagcatgactgacaacttgagaccaactcgtgctgaagccacagatgttgccaatgctgttttagatggaagtgatgccatacttctgggtgctgagactttacgtgggttgtaccctattgagactatttctactgttggcagaatttgttctgaggctgagaaagttttcaatcaagacctttattttaagaggacagtcaagtatgttggagaac

SEQ ID NO: 102886 - DNA, 258 bp, Glycine max
catttggagaaggaaggaccatgagtcagcaaggtccacgcaaggcacatcccatcgaaaagacattgccttgcacccttgaggaactctataagggcactacgaaaaaaatgaagatctctagggaaattgctgatgcaagcgggaaaactttgccggtggaagaaatcttgaccattgacattaaacccgggtggaaaaaggggacaaagatcacattccctgaaaaaggaaatgagcagccaaatgttattgctt

SEQ ID NO: 102887 - DNA, 254 bp, Glycine max
cagaaagacggtttttttagtatagttaacagcatggagagggaggaagatgttaaggttggagcacagaaattctcggagaggcaagcactgggtacaggagctaagagtgacaaggactacaaggaggcaccaccagcacccttgtttgagccaggggagttaaagtcatggtctttttacagagctgggatcgcagagtttgtggccacattcttgttcctctacatcactgtctcgactgtcatgggtgt

SEQ ID NO: 102888 - DNA, 255 bp, Glycine max
cgccggaaggccagcagcaaggggagcagaggctgcaagagagcgtgattgtggaaatctcgaaggaacagattcgggcactgagcaaacgtgccaaatctagttcaaggaaaaccatttcttctgaagataaaccttttaacttgagaagccgcgaccccatctactccaacaagcttggcaagttctttgagatcaccccagagaaaaacccccagcttcgggacttggatatcttcctcagtattgtggata

SEQ ID NO: 102889 - DNA, 254 bp, Glycine max
cagtctctccattgtctttgaacactcatcaccatggccaagcttgttctttccctttgtatccttcttttcagtggctgcttcgctctgagagagcaggcacagcaaaatgagtgccagatccaaaagctgaatgccctcaaaccggataaccgtatagaggcggaaggtgggttcattgagacctggaaccctaacaacaagccattccagtgtgccggtgtagacctctctcgctgcacccttaaccgcaa

SEQ ID NO: 102890 - DNA, 252 bp, Glycine max
gtccccaggaaatctacatcgaacaaggtaagggtatttttggcatgatatacccgggttgtcctagcacatgtgaagagcctcaacaacctcaacaaagaggacgaagcagcagaccacaagaccgtcaccagaagatctgtaacttcagagagggtgatttgatcgcagtgcctactggtgttgcatggtggatgtacaacaatgaagacactcctgttgttgccgtttctattgattgacaccaacagc

SEQ ID NO: 102891 - DNA, 254 bp, Glycine max
tgcatggttgatgtacaacaatgaagacactcctgttgttgccgtttctattattgacaccaacagcttggtgaaccagctcgaccagatgcctaggagattctatcttgttgggatccaagagcaagagtttctaaaatatcagcagcagcagcaaggaggttcccaaagccagaaaggatagcaacaagaagaagaaaacggaggaagcaacatattgagtggcttcgcccctgaattcttgaaagaagcgt

SEQ ID NO: 102892 - DNA, 251 bp, Glycine max
gttcaatatcctagtataccttaataaataatttaagatactatgatgagagcacggttcccattactgttgctgggacttgttttcctggcttcagtttctgtctcatttggcattgcttactgggaaaaagagaaccccaaacacaacaagtgtcttcagagttgcaatagcgagagagactcgtacaggaaccaagcatgccacgctcgttgcaacctccttaaggtggagaaagaagaatgtgaaga

SEQ ID NO: 102893 - DNA, 254 bp, Glycine max
gcagattgtgattttctcaagagaaactttaggcagatgtctaatgttttgtgggtggctcctgaggacaaggcgagtttatggtcacaacttcattatgtttcgtgtaataatctggaaatgcaagaagcttatcttgtcaatctcgtaaatgtgttacgagaattgtatttgcacagtccagaggaagctcgccaattgagaaggaaagctctctctcgtattgaatggctgcaaaaagctgatgtgcctac

SEQ ID NO: 102894 - DNA, 251 bp, Glycine max
aacagtacttgcaaggaacagaatgaaaagtattaatggtgctgcagttgtcatacaatcatttattcgtggttggttagtcagaagatgctcaggagatataggactatcaaaacctcggggcattaagactaatgagtcagatgaggttctggtgaagtcatctttcctggctgaattacagcgccgggtacttaaggcagaagcttccctgagagagaaagaagaggaaaatgacattcttcaccaac

SEQ ID NO: 102895 - DNA, 253 bp, Glycine max
gttctacaaggctggattgtcagcacattacttgctggtgccactgttggttcatttactggtggatcattggctgaccaatttggaagaactaggacttttcaattagcctcaatccctctagcaattggagcatttcttggtgctacagcacagagtgttcagccaatgatcattggtcgcttacttgctggtataggcattggtgttacatctgctatagtaccactatacatatctgagatttcaccaa

SEQ ID NO: 102896 - DNA, 256 bp, Glycine max
gctgtctgctgttagatctgtacccgcctagccattgatttggaaaagtccaacttcaaggatgacgtaagcttcagagtgatgctctaagagaagctatctcaggaatcatggctgattccaaggaaaagaacaggaaatttgtggagaccattgaactccaaattgggttgaaaaattatgatccccagaaggacaagcgtttcagtggctctgttaagttgcctcatattcctcgccccaagatgaagatttg

SEQ ID NO: 102897 - DNA, 254 bp, Glycine max
tctcgagccgattcggctcgaggaacttttcttcatgtggcaaatgtatcagagatcaaaccatcagccagaaaagaagacagacatcctcaaacagatagcggagacagtgaagcataggaaacacatagatggtagcgtggaattgattggagttttattgtatggaccaggaaaaggttcttctgttctacaatccatgagggctcctggtcttgcccttgttgatgactggacatgcctaaaatcaatgg

SEQ ID NO: 102898 - DNA, 251 bp, Glycine max
caaacagacaatcaccccattctcatcgtttaggattgaacaagtttgctgacatcactcctcaagagttcagcaaaaagtacttgcaagctcccaaggatgtgtcgcagcaaatcaaaatggccaacaagaaaatgaagaaggaacaatattcttgtgaccatccacctgcatcatgggattggaggaaaaaaggtgtcatcacccaagtaaagtaccaagggggctgtggaagcggttgggcgttttct

SEQ ID NO: 102899 - DNA, 250 bp, Glycine max
cgaggcttagttgagcctataaataaccccacacacttgtccggcctcctaagactcgctacatcttctttccaaatcccaactactactcacactcactgcagatctcaatccatggctaccattgttagcatcaaggcccgccagatctttgacagtcgtggcaatccaaccgtcgaggtggatttgacatgctccgatggtacttttgctagagctgctgttccaagtggtgcatccactgggattt

SEQ ID NO: 102900 - DNA, 250 bp, Glycine max
gctccatagctgcagcattagggtttttcatctgcttcaatggggaagggaacagggagttttggtaagagaaggaacaagactcacactctctgtgtgaggtgtggccgccgcagcttccatctccagaagagtcgttgcgccgcttgtgctttccccgccgcacgcactaggaaatataactggagcgtcaaggcaatccgcagaaagaccaccggaactggcaggatgaggtacttgcgtaacgtgc

SEQ ID NO: 102901 - DNA, 264 bp, Glycine max
  unsure (1)..(264): unsure at all n locations
cttccgctcgccacncaccaccactctcaccaccgtccccgccgccgcacggcggcagtccttttcctcacaggacttgcccaattcacgccctaccattcgcgctttgcttggctgtgcttggcgggttggtgcatgtcggaatagggaacccagttgacaacgtgtgctgtcccgttatacaggggttgcttgatcttgaagctgcaatttgtctactgcactgttattagggctaagcttcttaacctcaatatctttctt

SEQ ID NO: 102902 - DNA, 248 bp, Glycine max
gtacaattgtaaggatgaacatttggcatctatcagccttagtggagacctaatgcttcataaccttgcttctgggcaaaaggctgcggagtcaaagatcccaatcaacagatgttgagagttcttgattattctcgagttagtcgtcaccttcttgtgactgctggtgatgatgggactgtacatttgtgggatacaactggtcgcagccctaaggtttcatggataaagccgcattccgcaccaac

SEQ ID NO: 102903 - DNA, 252 bp, Glycine max
cgggaggagctggtgcaaagaatgctattctcatgaatatgccaaatgctgttctttcaatgtggagatattttgttggagatctcgtctttgaagtttctaagatgacttctccctacattaaatgtacagtctctttcttcatagcatttggaaatttggctgatgacaccatcaattttgaggcttttccccacaagctggtgcaatttggagagattcaggaaaaagttgtattgaaattttcacaag

SEQ ID NO: 102904 - DNA, 252 bp, Glycine max
cggcagcaccagcaagatagctgccgcaagcagctccagggggtgaacctcacgccctgcgagaagcacatcatggagaagatccaaggccgcggcgatgacgatgatgatgatgacgacgacaatcacattctcaggaccatgcggggaagaatcaactacataaggaggaacgaaggaaaagacgaagacgaagaagaagaaggacacatgcagaagtgctgcacagaaatgagcgagctgagaagcccc

SEQ ID NO: 102905 - DNA, 252 bp, Glycine max
ctcaatttttgacaaacctaagacgcgctgcttcactattctccctatggagtttaatcttgtggttcgtcagaagtttttaaattatgtgaggttcattatgaagagaagggacaagcttagttgtcaagttggaatcaacccatactccatggaatggactggtttggccaatagattactgagtaagggcaacgatattctgtgttgcgattatgctagttgtgatggtttgattaccaagcaagttat

SEQ ID NO: 102906 - DNA, 253 bp, Glycine max
aaaattcttccaccaagttatgggttcccttgtgttgcttcttttctccctcttaggtctctcttctagttccagcatatcaactcatcgttccatattggaccttgacctaaccaagtttaccacacagaaacaggtgtcttcactgttccaactatggaagagtgagcatggacgtgtctaccataaccacgaagaagaggcaaagagacttgagattttcaagaataacttgaactatatcagggacatg

SEQ ID NO: 102907 - DNA, 134 bp, Glycine max
  unsure (1)..(134): unsure at all n locations
ctttgttcactctagggctcttgcggctagggttttagcgcacntctgctagatttaaggaagatgggtaaggaaaaggttcacatcagtattgtggtcattggccatgtcgactctgggaaatccactaccac

SEQ ID NO: 102908 - DNA, 250 bp, Glycine max
gcaacgattaacaatggcttcaaccgacaagtcaccggacccaacgccggcgaagggtccggatccaactccggggaagccgatgagtgttggtcagcacgtgatcgacaagagtgcaatgatggtgcagtcgctggaccccattaagcagatgagtcagcacgtgtgctccttcgctatctacagccatgacatgtctcgccagatagagacacatcactactgctccagactccaccagaacttcata

SEQ ID NO: 102909 - DNA, 255 bp, Glycine max
attctctccattggtccttaaacactcatcagtcatcaccatggccaagctagttttttccctttgttttctgcttttcagtggctgctgcttcgctttcagttccagagagcagcctcagtgaaacgagtgccagatccaaaaactcaatgccctcaaaccggataaccgtatagagtcagaaggagggctcattgagacatggaaccctaacaacaagtcattccagtgtgccggtgttgccctctctcgctg

SEQ ID NO: 102910 - DNA, 171 bp, Glycine max
aaaccgcgatcacaggttgccgcatcttaaaaccggaaacaaaagcaatcgttacttgatttcaagaatctctcaatttcttcctacttctttgtgtacgatttcttaagggaaagaatatcactctctgtgctggccacagacttcgtgaatcattttcttttccacaca

SEQ ID NO: 102911 - DNA, 248 bp, Glycine max
gttcaatatcctagtataccttaataaataatttaagatactatgatgagagcacggttcccattactgttgctgggacttgttttcctggcttcagtttctgtctcatttggcattgcttactgggaaaaagagaaccccaaacacaacaagtgtctccagagttgcaatagcgagagagactcgtacaggaaccaagcatgccacgctcgttgcaacctccttaaggtggagaaagaagaatgtga

SEQ ID NO: 102912 - DNA, 247 bp, Glycine max
caaacagaaaatcaccccattctcatcgtttaggattgaacaagtttgctgacatcactcctcaagagttcagcaaaaagtacttgcaagctcccaaggatgtgtcgcagcaaatcaaaatggccaacaagaaaatgaagaaggaacaatattcttgtgaccatccacctgcatcatgggattggaggaaaaaaggtgtcatcacccaagtaaagtaccaagggggctgtggaagcggttgggcgtt

SEQ ID NO: 102913 - DNA, 249 bp, Glycine max
ctcgagccgtttgtccttgaatataatactcagcatggctaagcttgttctttccctttgttttctgcttttcagtggctgctgcttcgctttcagtttcagagagcagccacagcaaaacgagtgccagatccaacgcctcaatgccctcaaaccggataaccgtatagagtcagaaggtggcttcattgagacatggaaccctaacaacaagccattccagtgtgccggtgttgacctctctcgctg

SEQ ID NO: 102914 - DNA, 251 bp, Glycine max
caattccttcacttgcagcactgttgcatcatcatcttcattgcaaaaccctaaacttcaccttcaaccatgaccacacaagtaccaccacacagtgtccaagtccacacaacaacacacccctacgaagctggcgtcgtcccccccggagcccgtttcgaaccgccgcgttatgaagccggcgtcaaagcgccctccatttaccattccgagagaggtccaacgacttcccaggtcctcgccgtcctcgc

SEQ ID NO: 102915 - DNA, 249 bp, Glycine max
ctcgagccgctcgagccgcccttcttcactctctctctttcttccctttgcttgctactcttgtcgagacgcatgctttgctattacctccagcaagttcaacgagtgccaactcaacaacctcaacgcgttggaacccgaccaccgcgttgagtccgaaggtggtcttattgaaacatggaactctcaacaccctgagctgcaatgcgccggtgtcactgtttccaaacgcaccctcaaccgcaacgg

SEQ ID NO: 102916 - DNA, 249 bp, Glycine max
ccaatttgctgcagaagaaatctcttctatggtgctcatcaagatgcgtgagattgctgaggcttaccttggctccacggtgaagaatgctgttgtcactgtccctgcttacttcaatgattctcagcgtcaagctaccaaggatgctggagtcattgctggtcttaatgtgatgcgaattatcaatgagcctactgcagctgccattgcttatggtcttgataagaaggccacaagtgttggtgagaa

SEQ ID NO: 102917 - DNA, 253 bp, Glycine max
cagaaggaggaacacgaatggcatcgcaaggaggaaaaacacggaggaaagggaagtgaagaggaacaagatgaacgtgaacacccacgcccacaccaacctcatcaaaaggaagaggaaaagcacgaatggcaacacaagcaggaaaagcaccaaggaaaggaaagtgaagaagaagaagaagaccaagacgaggatgaggagcaagacaaagagagccaagaaagtgaaggttctgagtctcaaagagaac

SEQ ID NO: 102918 - DNA, 248 bp, Glycine max
cgctctctaataacatttctaatctcattctccttctgttcaaacactctctctcatggcatcagataagaagattaggatcggcatcaacgggtttggaaggattggccgtttggtggccagggttgcccttcaaaggaatgatgttgaacttgttgctgtcaacgatcctttcatcaccactgattacatgacatacatgttcaagtacgacaccgttcatggccagtggaagcattttgatgtga

SEQ ID NO: 102919 - DNA, 248 bp, Glycine max
tatgagactgcgcaaagagttaaacaaactttacaacgttacaaagaacttcaagacattatagctatccttggcttggacgaattatccgaagaagatcgcttaaccgtagcaagagcacgaaaaattgagcgtttcttatcacaaccttttttcgtagcagaagtttttaccggttcgccggggaaatatgttagtctagcagaaacaattagagggtttaaattgattctttctggagaattaga

SEQ ID NO: 102920 - DNA, 246 bp, Glycine max
gcagattgtgattttctcaagagaaactttaggcagatgtctaatgttttgtgggtggctcctgaggacaaggcgagtttatggtcacaacttcattatgtttcgtgtaataatctggaaatgcaagaagcttaccttgtcaatctcgtaaatgtgttacgagaattgtatttgcacagtccagaggaagctcgccaattgagaaggaaagctctctctcgtattgaatggctgcaaaaagctgat

SEQ ID NO: 102921 - DNA, 243 bp, Glycine max
cgctgatttcgtgctcgataatgaaggtaaccctcttgaaaatggtggcacatattatatcttgtcagacataacagcatttggtggaataagagcagccccaacgggaaatgaaagatgccctctcactgtggtgcaatctcgcaatgagctcgacaaagggattggaacaatcatctcgtccccatatcgaatccgttttatcgccgaagccatcctttgagccttaagttcgattcattt

SEQ ID NO: 102922 - DNA, 246 bp, Glycine max
gaaaaaggtaagaggagattcgtatctggggatggtgaagagatgacattaattccgggaaccagtgttgaggaggcttacaataagctaatagttgaactcgagaaaagtgttcctacattggttggcattgaatgtcccaaggatgagaaacttcctcgtcgcaaaatttttgacaaacctaagacgcgctgcttcactattctccctatggagtttaatcttgtggtccgtcagaagttttta

SEQ ID NO: 102923 - DNA, 234 bp, Glycine max
ggctcgaggcaaacattgaacttgttggcaccaaagaacaacaacacgagcagcaacaggaagagcacacctttggaagtgcggaaatatagagccgaattgtctgaacaagatatatttgtaatcccagcaggttatccagttgtggtcaacgctacctcaaatctgaatttctttgctattggtattaatgccgagaacaaccagaggaacttcctcgcaggttcgcaagac

SEQ ID NO: 102924 - DNA, 245 bp, Glycine max
caaagatcatacatagtagtgttggtgggttgcaaagatgcttgggggtcttctccataggggtcataagataaaagggacagtggtgttgatgcgcaagaatgtgttggacgtgaatagcgtaaccagcgttgggggaattattggtcaaggtctcgacttagttggctcaacactcgatactcttactgccttcttgggccgatccgtgtctctccagcttattagtgctaccaaagctgatg

SEQ ID NO: 102925 - DNA, 247 bp, Glycine max
gccactcgaacaagtgcggccattcccaacgcttctcttcctttctaaggggagtctgaatcccgtgagttttcaatatgacgtcgttcttgaagcctgagaatgctctgaaaagggcggaagaattaatcaatgttgggcagaagcaggatgctttgcagactctccatgatctcatcacctcaaagcgatacagagcgtggcagaagacacttgaaaggattatgttcaagtatgtggagctttg

SEQ ID NO: 102926 - DNA, 248 bp, Glycine max
ctgggaaccaagagcaagagtttctaaaatatcagcagcagcagcaaggaggttcccaaagccagaaaggaaagcaacaagaagaagaaaacgaaggaagcaacatattgagtggcttcgcccctgaattcttgaaagaagcgttcggcgtgaacatgcagatagtgagaaacctacaaggtgagaacgaagaggaggatagtggagccattgtgacagtgaaaggaggtctaagagtcacagctcca

SEQ ID NO: 102927 - DNA, 106 bp, Glycine max
ctcgagccgattcggctcgagtgaagatgaagatgaagacgaagctgatgaagatgaacacattccctctcaccctcctagccgaccaagccatggaaagcgtgaa

SEQ ID NO: 102928 - DNA, 247 bp, Glycine max
aaaagtcttccatagccccccaaaaatgaagagcaccatcttctttgctctctttctcttttgtgccttcaccacctcatacctaccttcagccatcgctgatttcgtgctcgataatgaaggtaaccctcttgaaaatggtggcacatattatatcttgtcagacataacagcatttggtggaataagagcagccccaacgggaaatgaaagatgccctctcactgtggtgcaatctcgcaatgag

SEQ ID NO: 102929 - DNA, 249 bp, Glycine max
ggcctccacttgccatcttactcaccttatccccaaatgatcattgtcgttcaagggaagggagcaattggatttgcatttccgggatgtcctgagacgtttgagaagccacaacagcaatcaagcagaagaggctcaaggtcgcagcagcaactacaagacagtcaccagaagattcgtcacttcaatgaaggagacgtactagtgattcctcctggtgttccttactggacctataacactggcgat

SEQ ID NO: 102930 - DNA, 247 bp, Glycine max
attggtccttaaacactcatcagtcatcaccatggccaagctagttttttccctttgttttctgcttttcagtggctgctgcttcgctttcagttccagagagcagcctcagtaaaacgagtgccagatccaaaaactcaatgccctcaaaccggataaccgtatagagtcagaaggagggctcattgagacatggaaccctaacaacaagccattccagtgtgccggtgttgccctctctcgctgc

SEQ ID NO: 102931 - DNA, 246 bp, Glycine max
ggtccttaaacactcatcagtcatcaccatggccaagctagttttttccctttgttttctgcttttcagtggctgctgcttcgctttcagttccagagagcagcctcagcaaaacgagtgccagatccaaaaactcaatgccctcaaaccggataaccgtatagagtcagaaggagggctcattgagacatggaaccctaacaacaagccattccagtgtgccggtgttgccctctctcgttgcac

SEQ ID NO: 102932 - DNA, 248 bp, Glycine max
agcacccagagaccatgcaacaacagcagcagcagaagagtcatggtggacgcaagcaggggcaacaccagcagcaggaggaagaaggtggcagtgtgctcagtggcttcagcaaacatttcttagcacaatccttcaacaccaacgaggacaacgctgagaaacttcggtctccagatgacgaaaggaagcagatcgtgacagtggagggaggcctcagcgttatcagccccaagtggcaagaacaa

SEQ ID NO: 102933 - DNA, 252 bp, Glycine max
tttctcaagagaaactttaagcagatgtctaatgttttatgggtggctcctgaggacaaggcgagtttatggtcacaacttcattatgtttcgtgcaataatctggaaatgcaagaagcttatcttgtcaatctcgtaaatgtgttacgagaattgtatttgcacagtccagaggaagctcgccaattgagaaggaaagctctctctcgtattgaatggctgcaaaaagctgatgtgcctaccatagcacag

SEQ ID NO: 102934 - DNA, 281 bp, Glycine max
ggctcgaggttcaatatcctagtataccttaataaataatttaagatactatgatgagagcacggttcccattactgttgctgggacttgttttcctggcttcagtttctgtctcatttggcattgcttactgggaaaaagagaaccccaaacacaacaagtgtctccagagttgcaatagcgagagagactcgtacaggaaccaagcatgccacgctcgttgcaacctccttaaggtggagaaagaagaatgtgaagaaggtgaaattccacgaccacga

SEQ ID NO: 102935 - DNA, 159 bp, Glycine max
ctcgagaaattttaataaaccgcgatcacaggttgccgcaccttaaaaccggaaacaaaagcaatcgttacttgatttcaagaatttctcaatttcttcctacttctttgtgtacgatttcttaagggaaagaaaatcaatctctgtgctggtcacaga

SEQ ID NO: 102936 - DNA, 279 bp, Glycine max
ctcgaggtataccttaataaataatttaagatactatgatgagagcacggttcccattactgttgctgggacttgttttcctggcttcagtttctgtctcatttggcattgcttactgggaaaaagagaaccccaaacacaacaagtgtctccagagttgcaatagcgagagagactcgtacaggaaccaagcatgccacgctcgttgcaacctccttaaggtggagaaagaagaatgtgaagaaggtgaaattccacgaccacgaccacgcccacaac

SEQ ID NO: 102937 - DNA, 279 bp, Glycine max
ggctcgaggttattatcaaataattaattaaattcctcgtggaatcttgttgaagccatgtctacagctggtcaggtcatcaagtgcagagctgcggtggcatgggaagcagggaagccactatcgatagaaaccatagaagtggcaccaccccagaaaggtgaagtgcgtttgaagatcctcttcaactccctttgccgtacagatgtttactggtgggatgctaagggccagactccgctgtttcctcgtatcttaggccacgaagcttcggggatt

SEQ ID NO: 102938 - DNA, 279 bp, Glycine max
tcggctcgagcgaaagtgttgaactatctctagctagcttttcacaaatttcgttgcacttgcaactgaggcaggaaagaggggcacgagaggaggaagaggaaagagaagaaaaaccaagaaaagtggagaaagggataggtgttgtacagaaatagaaattaaaattgagtgaaaattaaagagaagaaggagtgatagggagatatgggtaggggaagagtggagttgaagaggatagagaacaagataaacaggcaagttacgtttgcaaagagg

SEQ ID NO: 102939 - DNA, 277 bp, Glycine max
ggctcgagcagagctcctgttcaccttgtgtggtcactggtgagaagatttgatcaacctcagaaatataaaccatttgttagcaggtgtatcatgcaaggggatcttggcatcggaagtgttcgagaagtgaatgttaaatctggccttcctgccacaacaagtactgagaggttggaaccactggatgatgaggaacacattctcggcatcaggattgttggaggtgaccataggctgaggaactattcttccataatcaccgtccatccagagg

SEQ ID NO: 102940 - DNA, 250 bp, Glycine max
tcaattccaagctttattcctcatgtctttcagaggcctcagccggccaaatgcctcatcaggcatgggtgttgctgatcacagcaagaacaccttcatggaattgaagcagaagaaggttcaccgttatctgatctttaaggttgatgagaagaaaagggaagttgtggttgagaagactggtgacccggctgagagctatgaggatttcgctgcatctttgcctgagaatgattgcagatatgctgtc

SEQ ID NO: 102941 - DNA, 280 bp, Glycine max
cggctcgagtcaatatcctagtataccttaataaataatttaagatactatgatgagagcacggttcccattactgttgctgggacttgttttcctggcttcagtttctgtctcatttggcattgcttactgggaaaaagagaaccccaaacacaacaagtgtctccagagttgcaatagcgagagagactcgtacaggaaccaagcatgccacgctcgttgcaacctccttaaggtggagacagaagaatgtgaagaaggtgaaattccacgaccacga

SEQ ID NO: 102942 - DNA, 259 bp, Glycine max
cggctcgaaccttaataaataatttaagatgatatgatgagagcacggttcccattactgttgctggagactgagtttcctggcttcagtttctgtctcatttggcattgcttactgggaaaaagagaatcccaaacacaacaagtgtctccagagttgcaatagcgagagagactcgtacaggaaccaagcatgccacgctcgttgcaacctccttaaggtggagaaagaagaatgtgaagaaggtgaaattccagga

SEQ ID NO: 102943 - DNA, 232 bp, Glycine max
gaaaattacaagatcatcatcacaataacaatatgagttcaggaattagagcatggagtgtggcaactagcgttggagttgtggaggccttaaaagaccaaggtatatgtaggtggaatcatgctttaagatcagctcaacaccatctcaaaaaccatgttggttcattctctcaggctaacaagctttcttcttctgctatgagctccacaacactaaaacatgggaagac

SEQ ID NO: 102944 - DNA, 272 bp, Glycine max
tcggctcgagtgcgtttttctcttcttcttcttcttcgcataatagcagagacagatggtgaagcactacagacccccggggaagaaaaaggagggaaatgctgccaaatttgtcattaggtcacaagcaatcaagcagcttcaaatcagtctaccccttttcaggaaactatgtattttgaaaggtgtaactccaagggagcctaagaaaaagttcaagggaactcatcagacttattaccatgtcaaggatgtttccttccttcatcacg

SEQ ID NO: 102945 - DNA, 278 bp, Glycine max
tcggctcgagcgtattaaagaatttaagatatactatgatgagagcgcggttcccattactgttgctgggagttgttttcctggcatcagtttctgtctcatttggcattgcgtattgggaaaagcagaaccccagtcacaacaagtgcctccgaagttgcaatagcgagaaagactcctacaggaaccaagcatgccacgctcgttgcaacctccttaaggtggaggaagaagaagaatgcgaagaaggtcaaattccacgaccacgaccacaacac

SEQ ID NO: 102946 - DNA, 160 bp, Glycine max
attcggctcgagtgaaattttgataaaccgcgatcacaggttgccgcaccttaaaaccggaaacaaaagcaatcgttacttgatttcaagaatctctcaatttcttcctacttctttgtgtacgatttcttaagggaaagaaaatcactctctgtgctgg

SEQ ID NO: 102947 - DNA, 281 bp, Glycine max
attcggctcgagcttccatagccccccaaaaatgaagagcaccatcttctttgctctctttctcttttgtgccttcaccacctcatacctaccttcagccatcgctgatttcgtgctcgataatgaaggtaaccctcttgaaaatggtggcacatattatatcttgtcagacataacagcatttggtggaataagagcagccccaacgggaaatgaaagatgccctctcactgtggtgcaatctcgcaatgagctcgacaaagggattggaacaatcatct

SEQ ID NO: 102948 - DNA, 278 bp, Glycine max
attcggctcgagaagagctcctgttcaccttgtgtggtcactggtgagaagatttgatcaacctcagaaatataaaccatttgttagcaggtgtatcatgcaaggggatcttggcaacggaagtgttcgagaagtgaatgttaaatctggccttcctgccacaacaagtactgagaggttggaacaactggatgatgaggaacacataccaagcatcaggattgttggaggtgaccataggctgaggaactattcttccataatcaccgtccatccag

SEQ ID NO: 102949 - DNA, 254 bp, Glycine max
tgttgcttcttttctccctcttaggtctctcttctagttccagcatatcaactcatcgttccatattggaccttgacctaaccaagtttaccacacagaaacaggtgtcttcactgttccaactatggaagagtgagcatggacgtgtctaccataaccacgaagaagaggcaaagagacttgagattttcaagaataacttgaactatatcagggacatgaatgcaaacagaaaatcaccccattctcatcgt

SEQ ID NO: 102950 - DNA, 282 bp, Glycine max
attcggctcgagcagatgtcacgggggagatctgattacggaaggtggtttaaagcgctgtctggtgggttttcgcaatggtctcagcgttaggcgtgtgtggccctgctctttactggcgattcaagaacgccatcactctccgcaacaacaacaacacactctcttgcccttcctgcctctgtgactgccctccccctctctcgctcttccaacttgctcctgggctggcgaatctctctgtctcagattgtggaagtaatgacccggatctaaaggagg

SEQ ID NO: 102951 - DNA, 257 bp, Glycine max
attctcaatctaaaatttcacttcccaagaacacagtacgtagaaccatgtctgcgtagtgtatctacttggcacatttattgacagatggcaattttagagcaaatgttgacttgcagcgcactcatcgtattataggaatgattaatatggtggccacagttggtattcctgtgaatacaggtatagcattggcctgtgctatgaatagttcttttagggggcgcgccagatctgatatatacaccatctgctct

SEQ ID NO: 102952 - DNA, 199 bp, Glycine max
aaatccatggcctaatgttgatgctcacagtggagtgctactgagatattatgggctaactgaggaaactattatactgttctctttagtgtatcaaggagctttggagttggccctcagttgatatgggacagggctcttggaatgccactcgaaaggccgaaaagtgtaacactggagaagctcgagcaattggtcg

SEQ ID NO: 102953 - DNA, 284 bp, Glycine max
ttcggctcgagcctcctcgaaaatgctggcacgcctcgccgcgactcgcttcaacgagatccgtcagattttccgtcagccttctagggctttctcgaccgctctgaactaccaccttgacacaccggacaacaaccctaaacttccatgggaattcaccgaggccaatcaagcaaaggttaaggagattttgtctcactatccatccaactataagcaatctgctacaattcctcttttggatcttgcccagcagcagcatggtggctggctccctgtttctg

SEQ ID NO: 102954 - DNA, 268 bp, Glycine max
ctatcctagtataccttaataaataatttaagatactatgatgagagcacggttcccattactgttgctgggacttgttttcctggcttcagtttctgtctcatttggcattgcttactgggaaaaagagaaccccaaactcaacaagtgtctccagagttgcaatagcgagagagactcgtacaggaaccaagcatgccacgctcgttgcaacctccttaaggtggagaaagaagaatgtgaagaaggtgaaattccacgaccacga

SEQ ID NO: 102955 - DNA, 267 bp, Glycine max
gcagcatctcatccccttctcagagaggatgattaccctcaaagacgtggtgctttcaccaattacaatgtttgggttacaccttacaataagactgagaagtgggctggtggactttttgttgatcaaagtcatggagatgatactttggctgtttggactaagcagtaagcatgcatatcttaaccttggaaccaaatatgtttcactttaattctgtgtatccaattgataactaacccattgtttttttttttgccaaataaa

SEQ ID NO: 102956 - DNA, 264 bp, Glycine max
cggtgatgcagcagttggttagtagacttgatgtggcaatgttcaatgctattcttcgtgaatccgctgaagagatgcccatggatcctatatctgaccccattagtgattctaaggttcttcctattccagctggaaaatcaggctttggggctggtgcacaactgaagaatgctattggtgactggtcaagatggctttcagatttatttagcattgatgatagtgactcacgtgaagttatcaatgaaaacaatgaaccca

SEQ ID NO: 102957 - DNA, 263 bp, Glycine max
acagcatcctgattgataatgtggagaagcaaactggtagtctctactctgattgggatcttctccctccaaagacaatcaaagatcccgaggctaaaaaaccagaagattgggatgacaaagaatttattcctgatcccgaggataagaaaccagaggggtatgatgacatcccaaaagagctcccagatcctgaagccaagaagcctgaagattgggatgatgaggaagatggtgagtggacaccccctaccattgccaac

SEQ ID NO: 102958 - DNA, 263 bp, Glycine max
gcgcccaatgaagggaatgcttaccggtcctgttaccattctcaactggtcctttgttagaaatgaccaacctagatctgagaccacctaccagattgctttgtctatcaaggacgaagtggaagaccttgaaaaggctggcatcactgttatccaaattgatgaagctgctttgagagagggtcttccactgaggaaatcagagcaagctcactacttggactgggctgtccatgccttcagaatcaccaatgttggtgtcc

SEQ ID NO: 102959 - DNA, 266 bp, Glycine max
cgcagatgaaggtgttgaaagttctatttggctgctagcaaaggcttatgtagttgtgaatgactcgtgctatcatcaacttgtcagccattggttaaacactcatgcagttgttgagccattcatcatagcaacaaacaggcatctcagtgttgttcaccctatttataaactccttcaccctcactatcgtgacaccatgaacataaatggccttgctcggttatcactggtcaacgacggtggcgttatagaacaaacatttt

SEQ ID NO: 102960 - DNA, 255 bp, Glycine max
tcggctcgagttccatagtcccccaaaaatgaccagcaccatcttctttcgctctctttctctttagtagcctcaccacctcatacctacgttcagccatcgctgatttcgtgctcgataatgaaggtaaccctcttgaaaatggtggcacatattatatcttgtcagacataacagcatttggtggaataagagcagccccaacgggaaatgaaagatgccctctcactgtggtgcaatctcgcaatgagctcg

SEQ ID NO: 102961 - DNA, 266 bp, Glycine max
cacgttcgcgtcctccagaggttcaacaaacgctcccaacagcctcagaatctccgagactaccgcattttggagttcaactccaaacccaacacccttcttctcccccaccatgctgacgctgattacctcatcgttatccttaacgggactgccattcttaccttggtgaacaacgacgaccgagactcttacaaccttcaatctggcgatgccctaagagtccctgcaggaaccacatactatgtggttaaccctgacaacga

SEQ ID NO: 102962 - DNA, 256 bp, Glycine max
caatggccacagtgggcacaccattgaattttgattctagtaaacagagtttttgtcaattttctattgaccttctcggtggaggaattttagtggacaaaactggagattggatcacacttatacaaaattctccaattagtaacttgttgagagttgctgcttggaagaaaggctgtttaatggttacgattgtgatgtctgggaatgcagcagtcaaaaggagtgattgggcctcattggtacaagtgttttt

SEQ ID NO: 102963 - DNA, 269 bp, Glycine max
ctacccccaactaacaataattccttcacttgcagaacttagttctctgttgcatcatcatcatcttcattagtgttagccctaaacttcaccttcaaccctgaccacagtgccaccacacagtgtccaagtgcacacaacaacacaccgctacgacgccggcgtcgtcccgccggctcgttttgaggcgccgcgttacgaagccggcatcaaggcgccctcttccatttaccattccgagagaggtccgacgacctctcaggttctcg

SEQ ID NO: 102964 - DNA, 263 bp, Glycine max
ctcatcaccatggccaagcttgttctttccctttgtttccttcttttcagtggctgcttcgctctgagagagcaggcacagcaaaatgagtgccagatccaaaagctgaatgccctcaaaccggataaccgtatagagtcggaaggtgggttcattgagacctggaaccctaacaacaagccattccagtgtgccggtgttgccctctctcgctgcacccttaaccgcaatgcccttcgtagaccttcctacaccaacggtcc

SEQ ID NO: 102965 - DNA, 264 bp, Glycine max
aggcaatactccaagttatttagatacgagttctcagatgacaatgattctcagggttctgcaccttgttctcccgttcaaggatctatcgaggatagtgttcctggtagtcattgtcaagcctttgacagacaactttcaaaattcagttgctttaatttcaaaccaaatattagtaggacatctgggcagatgcctcttccacctgaagagttaaggtgtccaatatctctgcaactcatgtatgatcctgttatcattgct

SEQ ID NO: 102966 - DNA, 265 bp, Glycine max
aattctggtgaatgcgtagagaaggagaataaagagattagcgtgaaaaatgatgggtatgttcagcagctaccatagtgtcgccgccggaggagatcgttgccgccggcagccgtacgaccgatcaccgaagatgacggcggcggcgctacggaaatggatcgaggcgtaggacccctccgccgtgtcgctgcaggtcgaagaggatctccagctcgcttataaacaccagaaggcgtcgccggttcagcacagatcctttgct

SEQ ID NO: 102967 - DNA, 264 bp, Glycine max
caaaattcttccaccaagttatgggtacacttgtgttgcttcttttctccctcttaggtctctcttctagttccagcatatcaactcatcgttccatattggaccttgacctaaccaagtttaccacacagaaacaggtggcttcactgttccaactatggaagagtgagcatggacgtgtctaccataaccacgaagaagaggcaaagagacttgagattttcaagaataacttgaactatatcagggacatgaatgcaaaca

SEQ ID NO: 102968 - DNA, 187 bp, Glycine max
tgaaattttgataaaccgcgatcacaggttgccgcaccttaaaaccggaaacaaaagcaatcgttacttgatttcaagaatctctcaatttcttcctacttctttgtgtacgatttcttaagggaaagaaaatcactctctgtgctggccacagacttcgtgaatcattttcttttccacacaacat

SEQ ID NO: 102969 - DNA, 251 bp, Glycine max
ccgatgtcacgggggagatctgattcgggagagttgttgaggggctgtctggtggttttcgcagtggtctcagcgttgggcgtgtgtggccctgctctttactggcgattcaagaacgccatcactctccgcaacaacaacaacaaactctcttgccctacctgcctctgtgactgccctccccctctctcgctcttccaacttgctcctgggctggcgaatctctctgtctcagattgtggaagtaatga

SEQ ID NO: 102970 - DNA, 260 bp, Glycine max
  unsure (1)..(260): unsure at all n locations
canctgacagcctccaaatccaatggcttcagagaagaaactttcgaacccaatgagggagataaaagtgcagaagctcgtcctcaatatctctgttggcgagagtggagatcgtctcaccagagccgccaaggtgttggaacaacttagtggccaaaccccagtgttttccaaagcacggtacactgttcgttcctttgggattagaagctatgagaagattgcatgctatgtcactgtcagaggtgacaaggcaatgc

SEQ ID NO: 102971 - DNA, 266 bp, Glycine max
acagattgataccagattaataccaaaagaatagatcctcaatacaatgaggttcaggctcagatggaaacaaaattgtttaaattgtctcttgatgatgttgaaactcctaaaggttctatgttggatcttaaaatttctcaatctaaaattgcacttcccaagaacacagttggaggaaccattctgcgtagtgatctattggcaaattttttgacagagggcaattttagagcaagtgttgatttgcagcgcactcatcgtat

SEQ ID NO: 102972 - DNA, 269 bp, Glycine max
ctcgagctcgagcgtttgtccttgaatataatactcagcatggctaagcgtggtctttccctttgatttctgcttttcagtggctgctgcttcgctttcagtttcagagagcagccacagcaaaacgagtgagagatccaacgcctcaatgccctcaaaccggataaccgtatagagtcagaaggtggcttcattgagacatggaaccctaacaacaagccattccagtgtgccggtgttgccctctctcgctgctacctcaaccgcaa

SEQ ID NO: 102973 - DNA, 279 bp, Glycine max
attcggctcgagaccattcttccaccaagttatcggtccccttgtgctgcttcttttctccctcttaggtctctcttctagttccagcatatcaactcatcgttccatattggaccttgacctaaccaagtttaccacacagaaacaggtgtcttcactgttccaactatggaagagtgagcatggacgtgtctaccataaccacgaagaagaggcacagagacttgagattttcaagaataacttgaactatatcagggacatgaatgccaacagaaa

SEQ ID NO: 102974 - DNA, 270 bp, Glycine max
cactaattccttcacttgcagaacttagttctctgttgcatcatcatcatcttcattacaatgttagccctaaacttcaccttcaaccatgaccacagtgccactacacagtgtccacgtgcacacaacaacacaccgctacgatgccggcgtcgtcccgccggctcgttttgaggcgccgcgttacgaagccggcatctaggcgccctcttccatttaccattccgagagaggtccgacgacctctcaggttctcgcagttgtcgccgg

SEQ ID NO: 102975 - DNA, 283 bp, Glycine max
cggtcttcggctcgagctaaaattcttccaccaagttatcgatacacagtgttgcttcttttctccctcttaggtctctcttctagttccagcatatcaactcatcgttccatattggaccttgacctaaccaagtttaccacacagaaacaggtgccttcactgttccaactatggaagagtgagcatggacgtgtctaccataaccacgaagaagaggcaaagagacttgagattttcaagaataacttgaactatatcagggacatgaatgcaaacagaa

SEQ ID NO: 102976 - DNA, 265 bp, Glycine max
gcgcccaatgaagggaatgcttaccggtcctgttaccattctcaactggtcctttgttagaaatgaccaacctagatctgagaccacctaccagattggtttgtctatcaaggacgaagtggaagaccttgaaaaggctggcatcactgttatccaaattgatgaagctgctttgagagagggtcttccactgaggaaatcagagcaagctcactacttggactgggctgtccatgccttcagaatcaccaatgttggtgtccag

SEQ ID NO: 102977 - DNA, 266 bp, Glycine max
caaaagggaagtgaagaggaagatgaggatgaggatgaggaacaagatgaacgtcaattcccattcccacgcccacctcatcagaaggaagagcgaaagcaagaggaagatgaggatgaggagcagcagcgagagagcgaagaaagtgaagattctgagttacgaagacataagaataagaacccttttctcttcggctctaacaggttcgaaactctcttcaaaaaccaatatggtcgcattcgcgtcctccagaggttcaacca

SEQ ID NO: 102978 - DNA, 263 bp, Glycine max
cgaagctcaaggtctgctccggccccctcctagccacattccaagcattgtggtgattgaaggttttgaatttgaggaatatgaggaagctccagtgcttgggaagccaacaatttttaccagtgatagtgtgggtgaaaagatccagtgggctcaatgtgaagattgtttcaagtggcgcaaattgccagcaagtgcgcttcttccatcaaaatggacgtgttctgataattcgtgggatccagaaagatcttcttgttcag

SEQ ID NO: 102979 - DNA, 260 bp, Glycine max
ctgaagcaaagcaatggctacttcaaagttgaaaacccagaatgtggttgtatctctctccctaaccttaaccttggtactggtgctactgaccagcaaggcaaactcagcggaaactgtttctttcagctggaacaagttcgtgccgaagcaaccaaacatgatcctccaaggagacgctattgtgacctcctcgggaaagttacaactcaataaggttgacgaaaacggcaccccaaaaccctcgtctcttggtcgcg

SEQ ID NO: 102980 - DNA, 263 bp, Glycine max
caagttcacaatcctcctcatctctcttctcttctgcatcgcccacacttgcagcgcctccaaatggcagcaccagcaagatagctgccgcaagcagctccagggggtgaacctcacgccctgcgagaagcacatcatggagaagatccaaggccgcggcgatgacgatgatgatgatgacgacgacaatcacattctcaggaccatgcggggaagaatcaactacataaggaggaacgaaggaaaagacgaagacgaagaag

SEQ ID NO: 102981 - DNA, 262 bp, Glycine max
ctccagaaaaaatggcggtgcctcttctctcgaagaagatcgtgaagaagaggctgaagaagttcaagaggcctcaaagtgacaggaagatttctgtgaagacaaactggcgcagaccaaagggtatcgattaccgtgttaggagaaagttcaagggatgcactttgatgccgaacattggttatgcttcagacaagaagacccgccactatctcccgaatggtttcaagaaatttgttgttcacaatgtgaaggatttgga

SEQ ID NO: 102982 - DNA, 258 bp, Glycine max
gagccgggacagtatccctatggaggtttaatcttaaaccgtccaactcttagtaggacattcatgcctgagaaaggttctgctgagtatgaggagctgaggaagaatccccagaaggcttacttgaagactattacaccaaagtttcagacccttattgacctttctgttatagaaatcttgtcaaggcatgcatctgatgaggtgtaccttggggagagggacaatccaaattggacatctgatacaagagcatta

SEQ ID NO: 102983 - DNA, 260 bp, Glycine max
cacataaaaaaccatcacacaaaactctccagtaattctgaaaattttattttcttttggtgcaattaacacctctgtgattgatcaatggcgacaaaggaaggcaaagccataggcatcgatctcggcacgacctacagctgcgtgggcgtctggcaaaacgaccgcgtcgagatcatccccaacgaccaaggcaaccgaaccactccctcttatgtagccttcaccgacaccgagaggctcatcggagacgcggcgaa

SEQ ID NO: 102984 - DNA, 266 bp, Glycine max
ctcgagccgcggctcgagggaacattttagaggcctcctacgatagcccattcgaggagatacaacaaggttctgtttactagagaggaagggcagcagcaaggggagcagaggctgcaagagagcgtgattgtggaaatctcgaaggaacagattcgggcactgagcaaacgtgccaaatctagttcaaggaaaaccatttcttctgaagataaaccttttaacttgagaagccgcgaccccatctactccaacaagcttggcaa

SEQ ID NO: 102985 - DNA, 264 bp, Glycine max
gcaccatagcatacaaatatgggcacccatcagccaacagagtctacaataccaggtgattttgtcattggtgttaagttgacaaccataaacaatatgtgtgcatatgggctcaatcctggtatttcaggttctcgtcttttgggcaccattcctcagtccatttcacagcaaactgtttggaatcaaatggcaacagtgagaacaccattgaattttgattctagcaagcagagcttttgtcaattttctattgaccttctc

SEQ ID NO: 102986 - DNA, 252 bp, Glycine max
gtgcctcccattcttaccaagttaggcaaggttataaatccatggcctaatgttgatgctcacagtggagtgctactgaactattatgggctaactgaggtgaactattatactgacctctttggtatatcccagagctttggagtttgccctcagttgctatgggacaaggctctttgaatgccactcgaaaggccggaaagtgtaacactggagaagctcgagcaattggtcgcctaatcatcctgaaat

SEQ ID NO: 102987 - DNA, 266 bp, Glycine max
gttcaatatcctagtataccttaataaataatttaagatactatgatgagagcacggttcccattactgttgctgggacttgttttcctggcttcagtttctgtctcatttggcattgcttactgggaaaaagagaaccccaaacacaacaagtgtctccagagttgcaatagcgagagatactcgtacaggaaccaagcatgccacgctcgttgcaacctccttaaggtggagaaagaagaatgtgaagaaggtgaaattccacg

SEQ ID NO: 102988 - DNA, 260 bp, Glycine max
atgtttgcttcgttaattttctctggagacaacaggctcactgagaaaacaatttttacttgcagagatttggacatcttggttgtctattatacaatagcaactcaatttagaaaatttctaccgcattacattaggtggcatctgtataccttgttgatctacattctcccatcttttctcactgctgaaattacatattagcggaatttgagtaatattcatatttccggcttattttacgacggcagatacaaatt

SEQ ID NO: 102989 - DNA, 246 bp, Glycine max
aattctggtgaatgcgtagagaaggtgaatatagagattaacgtgaaaaatgatgggtatgttcaggagctaccatagtgtcgccgccggaggagatcgttgccaccggcggcgtacaccgtcgccgaagatgacggcggcggcgctacggaaatggatcgaggcgtagaacccctccgccgtgtcgctgcaggtcggagaggatctccagctcgcttatacacaccagaacgagtcgccggttca

SEQ ID NO: 102990 - DNA, 257 bp, Glycine max
gttcaatatcctagtataccttaataaataatttaagatactatgatgagagcacggttcccattactgttgctgggacttgttttcctggcttcagtttctgtctcatttggcattgcttactgggaaaaagagaaccccaaacacaacaagtgtctccagagttgcaatagcgagagagactcaaccaagaaccaagcatgccacgctcgttgcaacctccttaaggtggagaaagaagaatgtgaagaaggtga

SEQ ID NO: 102991 - DNA, 255 bp, Glycine max
agccgattcggctcgaggtgaagagcgaagagaatggctcccacgggtttaatctttacggctgtgttatgcttctcagcactgtcactgagtcgttgtcttgcggaggataatggacttgttatgaacttctacaaggaatcatgccctcaggctgaagacatcatcaaagaacaagtcaagcttctctacaagcgccaacaaaacactgcttactcctggctcagaaacatcttccatgactgtgctgttcag

SEQ ID NO: 102992 - DNA, 241 bp, Glycine max
atatcccacattcagcttggaagcttaattgctgggacagtgagaaaactttgccaaataattgttctgcagaattgctctcttgcaaattggatactgttactggccaatattatcctgagtgggctccaattaattgtcgagtacatcgacaaacaattcacatcactgaaggaaattatgtcagagagcaagatgtcagcattgaatatgatgcatgtacaattccaaatgattgtgg

SEQ ID NO: 102993 - DNA, 262 bp, Glycine max
acaaaattgctgaatcatggtgatcaaatactagatgaagccaacaaagctttcctgggctgtaaagtcaaattagcaatcaaagtatctggaattcactggtggtacaaagttgaaaatcatgctgcagagcttactgctggatattacaaccttaatgatagagacggataccgccccattgcaaggatgctgtctcgccatcatgccattttgaactttacatgtcttgagatgagggactcagagcaaccctcagatg

SEQ ID NO: 102994 - DNA, 272 bp, Glycine max
tcaatatcctagtacaccgtattaaagaatttaagatatactatgatgagagcgcggttcccattactgttgctgggagttgttttcctggcatcagtttctgtctcatttggcattgcgtattgggaaaagcagaaccccagtcacaacaagtgcctccgaagttgcaatagcgagtaagactcctacaggaaccaagcatgccacgctcgttgcaacctccttaaggtggaggaagaagaagaatgcgaagaaggtcaaatttcacgacc

SEQ ID NO: 102995 - DNA, 191 bp, Glycine max
ctcggtatgcggctcgatgttcaatatcctagtacaccgtattaaagaattttcgatatactatgatgagagcgcggttcccattactgttgctgggagttgttttcctggcatcagtttctgtctcatttggcattgcgtattgggaaaagcagaaccccagtcacaacaagtgcctccgaagttgcaat

SEQ ID NO: 102996 - DNA, 255 bp, Glycine max
acagaaggaggaacacgaatggcatcgcaaggaggaaaaacacggaggaaagggaagtgaagaggaacaagatgaacgtgaacacccacgcccacaccaacctcatcaaaaggaagaggaaaagcacgaatggcaacacaagcaggaaaagcaccaaggaaaggaccagtgaagaagaagaagacagaccaagacgaggatgaggagcacgacaaagagagccaagaaagtgaaggttctgagtcctcaagagaa

SEQ ID NO: 102997 - DNA, 257 bp, Glycine max
caagaaagccatttaatgttccagatagcatacttagagtgtgttgattttgatgctttagaaggtgctttaaatatgaagtttaaagacaggggactgctggtagaatccataactcatgcctccaggccatcttcaggagtatcctgttatcagcggttggcgtttgttggtgatgctgtcttggatcatcttattaccaggcacttgtttttcacttacacaaatctgccaccgggacgtctgactgaccttcg

SEQ ID NO: 102998 - DNA, 256 bp, Glycine max
ctagagctaatacgtgcaacaaaccccgacttctggaagggatgcatttattagataaaaggtcaacacaggctctgcctgttgctttgatgattcatgataactcgtcggatcgcacggcctttgtgccggcgacgcatcattcaaatttctgccctatcaactttcgatggtaggatagtggcctgccatggtggtgacgggtgacggcgaattagggttcgattccggagagggagcctgagaaacggctacc

SEQ ID NO: 102999 - DNA, 256 bp, Glycine max
ctgtctctctgtgacaaacacaaacacaatcaatggcgaacgtcacagcggcacccccgcggtcgcaccgaagcccgcgtgggtcctcccgtaccgaaccgagaatctgcgcgaggtctacactctgtcccgaaaactacgtcagggtcaattcggaaccacgttcctctgcacgcacaagggcccggggcgcacctacgcctgcaagtcaatcccgaagcggaagctgctctgcaatgaggactacgacgacgtg

SEQ ID NO: 103000 - DNA, 260 bp, Glycine max
atccactctctcacacactctcttattgtctctccatcatggctcacattctcccttgcctcctcctcaccctcctcgccgccaccgcctccgcccacaatttcaccgacattctcgccgccaaccccgactacagcgacttcaacggcttcctctcccaaaccggcctcgccggcgaaatcaacacccgccagaccatcaccgtcctcgtcctcaacaacgccgccctctccgccgtggccgcaaaacaccccctctcc

SEQ ID NO: 103001 - DNA, 269 bp, Glycine max
gaaaagctttctagctggtcataatatcaccattactgatggtattgacaaaactagtgcaactttgcaatttagaaagttagcagattgtgattttctcaagagaaactttaagcagatgtctaatgttttatgggtggctcctgaggacaaggcgagtttatggtcacaactcgttatgtttcgtgcaataatctggaaatgcaagaagcttatcttgtcaatctcgtaaatgtgttacgagaattgtatttgcacagtccagagaa

SEQ ID NO: 103002 - DNA, 204 bp, Glycine max
aaaagaggttgtgcctcccattcttacgcaattaggcaaggttaaaaatccatggcctaatgttgatgctcacagtggagtgctactgaactattatggtctaactgaggaaaactattatactgttctcttcggtgtatcaaggagctttggagttggccctcagttgatatgggacagggctcttggaatgccactcgaaag

SEQ ID NO: 103003 - DNA, 238 bp, Glycine max
tggaagacgaactccttaacctcctcaccaaaaaacccgtgccagtttgctacgatggcttcgaaccctccggacgaatgcacattgctcagggtgttatgaagacaatcaatgtgaacaagctaacttctgccggttgcatcgtcaaaatatggattgctgattggtttgccaagctcaacaacaagatgggcggagatttgcagcaaattgagaccgtgggccgttacttgatcga

SEQ ID NO: 103004 - DNA, 146 bp, Glycine max
gtataccttaataaataatttaagatactatgatgagagcacggttcccattactgttgctgggacttgttttcctggcttcagtttctgtctcatttggcattgcttactgggaaaaagagaaccccaaacacaacaagtgtctc

SEQ ID NO: 103005 - DNA, 256 bp, Glycine max
cagcgatcgaagtttcacatcagccttatccagtttagggtttcggttccttaccctacctttgacgtatcgaaaccttaaatttgggattaggtctgagcaatctggttggtagaacctttggtcttagagcgtcatgttgtatgtctggattagacgatcaaattcctactgccttcgatccttttgctgttgcaaatgctgatgactcgggtgctgggtcaaaggagtatgtgcatattcgcgttcagcagcg

SEQ ID NO: 103006 - DNA, 255 bp, Glycine max
attctactcactcacacacagacacactctctgtccgtgggtccgtttcgtgaacccttccttgcatttctctcgggtgttctatttctgggtctctatgaggcagcagcagaacagactcagactcacaagagtacttacattgtacacgtggcgaaatctgagatgcccgagagcttcgagcaccacgctgtatggtatgagtcgtccctgaagaccgtgtctgactcggcggagatgatttacacctacgac

SEQ ID NO: 103007 - DNA, 252 bp, Glycine max
aaactttaagcagatgtctaatgttttatgggtggctcctgaggacaaggcgagtttatggtcacaacttcattatgtttcgtgcaataatctggaaatgcaagaagcttatcttgtcaatctcgtaaatgtgttacgagaattgtatttgcacagtccagaggaagctcgccaattgagaaggaaagctctctctcgtagtgaatggctgcaacagatgatagtgcctcaccatagcacagatggaagagt

SEQ ID NO: 103008 - DNA, 99 bp, Glycine max
taaaattcttccaccaagttatgggttgccttgtgttgcttcttttctccctcttaggtctctcttctagttccagcatatcaactcatcgttccatat

SEQ ID NO: 103009 - DNA, 104 bp, Glycine max
gatctatgggcaaattttttgacagagggcaattttagagcaagtgttgatttgcagcgcacgcatcgcatttaaggtatgattacaatggtggccacagttgg

SEQ ID NO: 103010 - DNA, 172 bp, Glycine max
cggctcgagaagatttgaaattttgataaaccgcgatcacaggttgccgcaccttagaaccggaaatcaaagcaatcgttacttgatttcaagaatttctcaattgcttcctacttctttgtgtacgatttcttaagggatagaaaatcactctctgtgctggccacagatt

SEQ ID NO: 103011 - DNA, 250 bp, Glycine max
ctctttcgttctctctctttcactcgcgtcttcgagtttcacagcgaagtcgtaggagggtttcataagatggagaacatgcagagcttctggcaattgggcgctgaactccgtggacactcaaaagcatcggaggatcacaaatggttaatggttgcttcgaaattggcggaacagacaagattgaagggggagcgtgtgaacaaccttgatctttcaaagggccccattgaaacaaggtcaagggata

SEQ ID NO: 103012 - DNA, 252 bp, Glycine max
cgaacaacaagaaccacgtggaagaggatgtcagactagaaatggggttgaggaaaatatttgcaccatgaagcttcacgcgaacattgctcgcccttcacgtgctgacttctacaacccaaaagctggtcgcattagcaccctcaacagtctcaccctcccagccctccgccaattcggactcagtgcccaatatgttgtcctctacaggaatggaatttactctccacattggaacttgaacgcgaacag

SEQ ID NO: 103013 - DNA, 256 bp, Glycine max
aaagcgcaaaaattggagctgcttttgactgctggcattggttctgatcacgttgatctcaaagctgcagctgctgctggtttaactgtggcagaggtcacgggaagcaatgtcgtgtcggttgcggaggatgaactcctgagaatcctcattctaatgaggaatttcttgcctgggtaccatcaggctgttaagggtgaatggcatgttgctggcattgcacatagagcttatgatcttgaaggcaagacagtag

SEQ ID NO: 103014 - DNA, 94 bp, Glycine max
gttcaatatcctagtacaccgtatgcaagcatttaagagatactatgatgagagcgcggttcccattactgttgctcggagttgttttcctggc

SEQ ID NO: 103015 - DNA, 148 bp, Glycine max
cacaggttgccgcaccttagaaccggtgacaaaagcaatcgttacttgatttcaagaatctctcaatttctacctacttctttgtgtacgatttcttaagggcaagaaaatcactctctgtgctggccacagacttcgtgaatcattt

SEQ ID NO: 103016 - DNA, 255 bp, Glycine max
tgcaccatttgttaagtctgaacccattcccgagactaacgatgaacctgttaaagtggtagttggggccagtcttgaggacattgttttcaaatctgggaagaatgttctgctggagttttatgctccctggtatggtcattgcaaacagttggctccaatattagatgaagttgctatctcatatcaacatgaagctgatgttgttattgcaaaactggatgcaactgccaacgatatcccaagtgaaacctt

SEQ ID NO: 103017 - DNA, 100 bp, Glycine max
cttaattattaacacttccttagttcaatatggggaagccctacactctctctcgttcttccctttgcttgctactcgtgtcgagtgcatgctttgctat

SEQ ID NO: 103018 - DNA, 252 bp, Glycine max
gagcgaagagaatggctcccaagggtttaatcttgttggctgtgttatgcttctcagcactgtcactgagtcgttgtcttgcggaggataatggacttgttatgaacttctacaaggaatcatgccctcaggctgaagacatcatcaaagaacaagtcaagcttctctacaagcgccacaagaacactgctttctcctggctcagaaacatcttccatgactgtgctgttcagagttgtgatgcttcactgt

SEQ ID NO: 103019 - DNA, 245 bp, Glycine max
acctgccttcagccaccgctcagttcgtgctcgacactgatgatgatcctcttcaaaacggtggcacatactatatgttgccagttatgagaggaaagggcggtagaatagacgtagattcaactggaaaagaaatatgccctctcactgttgtgcaatcacccaatgagctcgataaggggattggactagtctttacatctccattacatgccctttttatcgccgaagctatcctttgagca

SEQ ID NO: 103020 - DNA, 224 bp, Glycine max
gtaagactggatagaataaatcttataattggttctggtgggaaaaaagtgaagagcattattgaggaatctggagtagacactattgatacagcagatgatggcactgtgaaaatatttgcaaaagagttacctagtttcgagaagtctaaagctattattaatagtttgacgatggttccaactatcggtgatatctataggcactgtgaaatcaatcaata

SEQ ID NO: 103021 - DNA, 155 bp, Glycine max
cataaataaagcttaaaaatgatctctcttataagggtagtgctacacattaaaaccttagaagagagatcatttttaaggttttaatgtgtagcactacccttataaattttttagttcccctgctcttgttcttatgaattcagatgcaataa

SEQ ID NO: 103022 - DNA, 234 bp, Glycine max
aagagctcctgttcaccttgtgtggtcactggtgagaagatttgatcaacctcagaaatataaaccatttgttagcaggtgtatcatgcaaggggatcttggcatcggaagtgttcgagaagtgaatgttaaatataggcttcctgccacaacaagtactgagaggttggaacaactggatgatgaggaacacattctcggcatcaggattgttggaggtgaccatagctgagg

SEQ ID NO: 103023 - DNA, 157 bp, Glycine max
acgatttgacattttaatacaccgcgatcacaggttgccgcaccttaaaaccggaaacaaaagcaatcgttacttgatttcaagaatttctcaatttcttcctacttctctgtgtactatttcttaaagcacagacaatcactctctgtgctggtca

SEQ ID NO: 103024 - DNA, 274 bp, Glycine max
attcggctcgagattcaaactagccgattgagatcttctcttagtgctcgtgacatgccaccagaagactttgatgggttgcaagattttgatggccagcaacaccttttgagtgacttgggctgtttctcgcagccccgtcctggcgccatttcagtgagtcgatctggtcggtctaagacactagccccatcaaatctggatgaactattctctgccgagatttcgtcatctccccggtattctgacccagcagtggcttctgtattttccc

SEQ ID NO: 103025 - DNA, 163 bp, Glycine max
acctgccttcagccaccgctcagttcgtgctcgacactgatgatgatcctcttcaaaacggtggcacatactatatgttgccagttatgagaggaaagggcggtggaatagaagtcgattcaactggaaaagaaatatgccctctcactgttgtgcaatcacc

SEQ ID NO: 103026 - DNA, 253 bp, Glycine max
ttcttcagttcggtggagggagggagccgtagcagcggaagctctagcttgggtagcgaatcacaatggcgagaggattaaagaagcatctgaagaggcttaatgccccaaagcattggatgcttgacaaactgggtggtgcatatgctcctaagccctcatctggaccacacaaatcgagggaatgcctgccactcatactcattttgcgaaaccggctgaagtatgctctaacataccgtgcagtcattgc

SEQ ID NO: 103027 - DNA, 250 bp, Glycine max
agctgccttcagccaccgctcagttcgtgctcgacactgatgatgatcctcttcaaaacggtggcacatactatatgttgccagttatgagaggaaagggcggtggaatagaagtagattcaactggaaaagaaatatgccctctcactattgtagaatcacccaatgagctcgataaggggattggactagtctttacatctccatgtaataccctttttatcgccgaagctatccgttgagcataagt

SEQ ID NO: 103028 - DNA, 247 bp, Glycine max
ggaagggagcaattggatttgcatttccgggatgtcctgagacgtttgagaagccacaacagcaatcaagcagaagaggctcaaggtcgcagcagcaactacaagacagtcaccagaagattcgtcacttcaatgaaggacgacgtactagatgattcctgcctcgtgattccttactgagacctataagtcactggcgcatgaaccagtgtattgccatccagtacttctatgacaccttccaact

SEQ ID NO: 103029 - DNA, 249 bp, Glycine max
aacctgacagcctccaaatccaatggcttcagagaagaaactttcgaacccaatgagggagataaaagtgcagaagctcgtcctcaatatctctgttggcgagagtggagatcgtctcaccagagccgccaaggtgttggaacaacgtagtggccaaaccccagtgttttccaaagcacggtacactgttcgttcctttgggattagaagaaatgagaagattgcatgctatgtcactgtcagaggtga

SEQ ID NO: 103030 - DNA, 247 bp, Glycine max
agcaagttcaacgagtgccaactcaacaacctcaacgcgttggaacccgaccaccgcgttgagtccgaaggtggtcttattgaaacatggaactctcaacaccctgagctgcaatgcgccggtgtcactgtttccaaacgcaccctcaaccgcaacggcctccacttgccatcttactcaccttatccccaaatgatcattgtcgttcaagggacaggagcaattggatttgcatttccgggatgtc

SEQ ID NO: 103031 - DNA, 251 bp, Glycine max
gagaaccccaaacacaacaagtgtctccagagttgcaatagcgagagagactcgtacaggaaccaagcatgccacgctcgttgcaacctccttaaggtggagaaagaagaatgtgaaccaggtgaaattccacgaccacgaccacgaccacaacacccggagagggaacctcagcaacccggtgagaaggaggaagacgaagatgagcaaccacgtccaatcccattcccacgcccacaacctcgtcaaga

SEQ ID NO: 103032 - DNA, 254 bp, Glycine max
cggctcgagttcttccaccaagttatgggtttccttgtgttgcttcttttctccctcttagggctctcttctagttccagcatatcaactcatcgttccatattggaccttgacctaaccaagtttaccacacagaaacaggtgtcttcactgttccaactatggaagagtgagcatggacgtgtctaccataaccacgaagaagaggcaaagagacttgagattttcaagaataacttgaactatatcaggga

SEQ ID NO: 103033 - DNA, 183 bp, Glycine max
aaactcgagtggacaccatggtatgcaaagatcagctaggttatatgattcattgatagtagatttaccaaaaggacaataagaaccgtttaattacgatggtgaattcaaccttcttcttagtgatttgtggcacaccagttcacatgaacaggaagttggcctctcttccaaacaatataa

SEQ ID NO: 103034 - DNA, 132 bp, Glycine max
ctcgagcgattcggctcagggcgaactggctcacagcgctaagaacggtcttgacatacgctgttaggcttttggagagcatcaaggcggagttccctattttgagctacgccgatttctaccagttggctg

SEQ ID NO: 103035 - DNA, 251 bp, Glycine max
ggtcatcaaagccagaaaggaaagcatcagcaagaagaagaaaacgaaggaggcagcatattgagtggcttcaccctggaattcttggaacatgcattcagcgtggacaagcagatagcgaaaaacctacaaggagagaacgaaggggaagacaagggagccattgtgacagtgacaggaggtctgagcgtgataaaaccacccacggacgagcagcaacaaagaccccaggaagaggaagaagaagaaga

SEQ ID NO: 103036 - DNA, 252 bp, Glycine max
agaaggacgatgaccgcgacgacgaagctgagtattctccctttttgggaattgaaaagggagctgttcttcaggaggccagggtttttaatgacccacaactagatgctaggagatgttcacaggttatcacaaaacttttatatctactgaatcagggagagacatttacaaagaccgaagccacagaagttttcttttctgtaactaagcttttccagtctcgggatcttgggttaaggagaatggtct

SEQ ID NO: 103037 - DNA, 251 bp, Glycine max
gtgaaacactagctagggtattgggagctctcgttgtttcggagttagggaccttacgcagccatggccactgctacgaatgccgccgccgccccaccacgccagctctcccagaaggaagctgacatccagatgatgttggccgccgacgtccacctcggcaccaagaactgcgacttccaaatggaacgttacatcttcaagcgccgcaacgacgggatttacattattaaccttgggaagacgtggga

SEQ ID NO: 103038 - DNA, 247 bp, Glycine max
cttaaaatttctcaatctaaaattgcacttcccaagaacacagatggaggaaccattctgcgtagtgatctattggcaaattttttgacagagggcaattttagagcaagtgttgatttgcagcgcactcatcgtattaaaggaatgattacaatggtggccacagttggtattcctgagaatacaggtatagcattggcctgtgctatgaatagttcttttagggggcgcgccagttctgatattt

SEQ ID NO: 103039 - DNA, 249 bp, Glycine max
ttctagttccagcatatcaactcatcgttccatattggaccttgacctaaccaagtttaccacacagaaacaggtgtcttcactgttccaactatggaagagtgagcatggacgtgtctaccataaccacgaagaagaggcaaagagacttgagattttcaagaataacttgaactatatcagggacatgaatgcaaacagaaaatcaccccattctcatcgtttaggattgaacaagtttgctgacat

SEQ ID NO: 103040 - DNA, 248 bp, Glycine max
gtgcatgatagttcagtgtctacaataccaggtgattttgtcattggtgttaagttgacaaccataaacaatatgtgtgcatatgggctcaatcctggtatttcaggttctcgtcttttgggtaccattcctcagtctatttcacagcaaactgtttggcctcaaatggcaacagtgagaacaccattgaattttgattctagcaagcagagcttttgtcaatttgctattgaccttctcggtggagg

SEQ ID NO: 103041 - DNA, 248 bp, Glycine max
gtttcgggggaagagatccagcagcaatggtgtacgtcaaggctcagaaatcaaaagcctacttcaagagatatcaagtcaagttcaagagaagaagagagggaaaaaccgattaccgtgccaggattcggttgattaatcaggacaagaacaaatataacactccgaaataccgacgcgtggttcgctttagcaacaaggacattgttgcacaaataatatctgctagcattgccggcgatttagtt

SEQ ID NO: 103042 - DNA, 250 bp, Glycine max
aggttctcgtcttttgggcaccattcctcagtccatttcacagcaaactgtttggaatcaaatggcaacagtgagaacaccattgaattttgattctagcaagcagagcttttgtcaattttctattgaccttctcggtggaggaattttagtggacaaaactggagattggatcacacttatacaaaattctccaattagtaacttgttgagatttgctgcttggaagaaaggttgtttaatggtcaag

SEQ ID NO: 103043 - DNA, 248 bp, Glycine max
cgcgggtaaacggcaggagtaactatgactctcttaaggtagccaaatgcctcgtcatctaattagtgacgcgcatgaatggattaacgagattcccactgtccctgtctactatccagcgaaaccacagccaagggaacgggctttgcggaatcagcggggaaagaagaccctgttgagcttgactctagtcccactttgtgaaatgacttgagaggtgtaggataagtgggaactagaaacagcga

SEQ ID NO: 103044 - DNA, 255 bp, Glycine max
caacaatgaagacactcctgttgttgccgtttctattattgacaccaacagcttggagaaccagctctgccagatgcctaggagattctatcttgctgggaaccaagagcaagagtttctaaaatatcagcagcagcagcaaggaggttcccaaagccagaaaggaaagcaacaagaagaagaaaacgaagggggcaacatattaagtggcttcgcccctgaattcttgaaagaagcgttcggcgtgaacatgca

SEQ ID NO: 103045 - DNA, 267 bp, Glycine max
cagagttgcaatagcgagagagactcgtacaggaaccaagcatgccacgctcgttgcaacctccttaaggtggagaaagaagaatgtgaagaaggtgaaattccacgaccacgaccacgacacacaacacccggagagggaacctcagcaacccggtgagaaggaggaagacgaagatgagcaaccacgtccaatcccattcccacgcccacaacctcgtcaagaagaagaccacgagcagagagaggaacaggaatggcctcgcaa

SEQ ID NO: 103046 - DNA, 271 bp, Glycine max
cagctcgaggagacataatacccagttttttgtggaatattttgcattggatcttgtaatgaatagtgatggcacttgccaaggagtgattgccttgaatatggacgatggaacactacatcgtttcaaagctgcttcaacaattttggccacagggggttatggtagagcatacttctctgcaacctcagcacatacttgcactggagatggcaatgccatggttgcacgtgctgggatccctcttgaggatttggagtttgtacaattt

SEQ ID NO: 103047 - DNA, 256 bp, Glycine max
aggtaaggtaggttaacactcttcttcatcgtcgtcgcaacgggacgtgtgatccgtgcgcacgtaagggagcaggctcggtcttcaagtcccacacgcaccaccgcaacggccctgcacgcttccggagcctggacttcggggagcgcaacggctacctcaagggcgtggtcaccgacgtcatccatgaccctggccgcggcgcgccgctcgccaaggtcgccttccgccaccctttcagatacaagaagcagaa

SEQ ID NO: 103048 - DNA, 257 bp, Glycine max
ctcgagcgtcctagtataccttaataaataatttaagatactatgatgagagcacggttcccattactgttgctgggacttgttttcctggcttcagtttctgtctcatttggcattgcttactgggaaaaagagaaccccaaacacaacaagtgtctccagagttgcaatagcgagagagactcgtacaggaaccaagcatgccacgctcgttgcaacctccttaaggtggagaaagaagaatgtgaagaaggtga

SEQ ID NO: 103049 - DNA, 238 bp, Glycine max
gtgaacaatattttccctcctctaaggtcccaatttttcttaaaccctaaaacactctcacttaagcagctgctgcagaagagaatcccgatttttccaaaatgtcgatgacctagagttccaagatgcttcagtacttcaactaccgtatgcgtgtcaccattcagagacggtcgtcaactcgtcggaaaattcatggccttcgaccgccacatgaacctcgtcctcggcgattgcg

SEQ ID NO: 103050 - DNA, 248 bp, Glycine max
aacagtacttgcaaggaacagaatgtcaagtattaatggtgctgcagttgtcatacaatcatttatacgtggttggttagtcagatgatgctcaggagatataggactatcataacctcggggcattaagactaatgagtcagatgaggttctggtgaagtcatctttcctggctgaattacagcgccgggtacttaaggcagaagcttccctgagagagatagatgaggtatatgacattcttcacc

SEQ ID NO: 103051 - DNA, 255 bp, Glycine max
gtcaacccttctcaagagagacagggtagatagaaaatcagaagaagtgacatttgtaagcactgacagcataaggatgagtggtagtgtcaagttcgaggtgtttgataaagatgttctgctgctttccggtgctttagaattgtgtaataccaatggtgttgttggggaatcaagttataatggacaaaggtggagtatgaactgcgagtcatatataattccaggcaccagcttctttaaggggaaacaatt

SEQ ID NO: 103052 - DNA, 258 bp, Glycine max
tagatcttaaaatttctcaatctaaaattgcacttcccaaaaacacagttggaggaaccattctgcgtagtgatctattggcaaattttttgacagagggcaattttagagcaagtgttgatttgcagcgcacgcatcgtattaaaggaatgattaaaatggtggccacagttggtattcctgagaatacaggtatagcattggcctgtgctatgaatagttcttttagggggcgtgccagttctgatatttacacca

SEQ ID NO: 103053 - DNA, 257 bp, Glycine max
gacggaagcatgggaatccccggtgcgttttacataaagaactacatgcaagttgagttcttcctcaagagtttgactcttgaagccatttcaaaccaaggaaccatccgctttgtttgcaactcatgggtttataacactaaactttacaaaagcgtgcgcattttctttgccaaccatatatatgtacctagtgagacaccagcaccacttgtggagtacagagaagaagaattgaagagtttaagaggaaatgg

SEQ ID NO: 103054 - DNA, 257 bp, Glycine max
caaaaaaaaagatcatacatagtagtgttggtgggttgcaaagatgcttgggggtcttctccataggggtcataagataaaagggacagtggtgttgatgcgcaagaatgtgttggacgtgaatagcgtaaccagcgttgggggaattattggtcaaggtctcgacttagttggctcaacactcgatactcttactgccttcttgggccgatccgtgtctctccagcttattagtgctaccaaagctgatgccaacg

SEQ ID NO: 103055 - DNA, 258 bp, Glycine max
aagaaagaaggtttttttagtatagttaacagcatggagagggaggaagatgttaaggttggagcacagaaattctcggagaggcaagcactgggtacaggagctaagagtgacaaggactacaaggaggcaccaccagcacccttgtttgagccaggggagttaaagtcatggtctttttacagagctgggatcgcagagtttgtggccacattcttgttcctctacatcactgtcttgactgtcatgggtgtcaac

SEQ ID NO: 103056 - DNA, 259 bp, Glycine max
ttcgtcacttcaatgaaggagacgtactagtgattcctcctggtgttccttactggacctataacactggcgatgaaccagttgttaccatcagtcttcttgacacctccaacttcaacaatcagcttgatcaaaaccccagagtattttaccttgctgggaacccagatatagagcacccagagaccatgcaacaacagcagcagcagaagagtcatggtggacgcaagcaggggcaacaccagcagcaggaggaaga

SEQ ID NO: 103057 - DNA, 262 bp, Glycine max
ggagagggaacctcagcaacccggtgagaaggaggaagacgaagatgagcaaccacgtccaatcccattcccacgcccacaacctcgtcaagaagaagagcacgagcagagagaggaacaggaatggcctcgcaaggaggaaaaacgcggagaaaagggaagtgaagaggaagatgaggatgaggatgaggaacaagatgaacgtcaattcccattcccacgcccacctcatcagaaggaagagcgaaagcaagaggaagat

SEQ ID NO: 103058 - DNA, 260 bp, Glycine max
  unsure (1)..(260): unsure at all n locations
tgaacgtcaattcccattcccacgcccacctcatcagaaggaagagcgaaagcaagaggaagatgaggatgaggagcagcagcgagagagcgaagaaagtgaagattctgagttacgaagacataagaataagaacccttttctcttcggctctaacaggttcgaaactctctgaaaaaaccaatatggtcgcattcgcgtcctccagaggttcaaccaacgctccccacaacttcagaatttncgagactaccgcattt

SEQ ID NO: 103059 - DNA, 257 bp, Glycine max
aaaccctaggtagagagctcttcctcactctcattcgcacaagccgcagcagcacgtcctctcgtcaccgtgcaggccctcgacagtgacatggccaccgacgcctccgccaccgtccctatccctgacgtcatgaagtcctccatccgcccggacatcgtcaacttcgtacactccaacatctccaagaacagccgacaaccctatgcagtcagccgccgcgctggccaccagacttccgccgagtcctggggaac

SEQ ID NO: 103060 - DNA, 253 bp, Glycine max
tggaccttgacctaaccaagtttaccacacagaaacaggtgtcttcactgttccaactatggaagagtgagcatggacgtgtctaccataaccacgaagaagaggcaaagagacttgagattttcaagaataacttgaactatatcagggacatgaatgcaaacagaaaatcaccccattctcatcgtttaggattgaacaagtttgctgacatcactcctcaagagttcagcaaaaagtacttgcaagctcc

SEQ ID NO: 103061 - DNA, 253 bp, Glycine max
acccaccaccaatctcaccaccgtacccgccgccgcacggtggcagtccttttcctcaaaggacttgcccaattgatgccctaaaattggggctttgcttggatgtgcttggagagttggtgcatgtgggaatagggaacccagttgagaacgtgtgcagtcccgttatacaggggttgcttgatcttgaagctgcaatttgtctttgcactgttattagggctaagcttcttaacctcaatatctttcttcc

SEQ ID NO: 103062 - DNA, 257 bp, Glycine max
ttatcgagccgattcggctcgagcttttctatttctctcctttctatcactctcttctgttcactgatctgcattgccgatcaaagtggtcttatttgaaaaacacttgggcgttggctcaaatgtttgcttcgttaattttctttggagacaacaggctcactgagaaaacaatttttacttgcagagatttggacatcttggttgtttattatacaatagcaactcaatttagaaaatttctaccgcattacatt

SEQ ID NO: 103063 - DNA, 254 bp, Glycine max
atcctagtacaccgtattaaagaatttaagatatactatgatgagagcgcggttcccattactgttgctgggagttgttttcctggcatcagtttctgtctcatttggcattgcgtattgggaaaagcagaaccccagtcacaacaagtgcctccgaagttgcaatagcgagaaagactcctacaggaaccaagcatgccacgctcgttgcaacctccttaaggtggaggaagaagaagaatgcgaagaaggtc

SEQ ID NO: 103064 - DNA, 254 bp, Glycine max
gagttcatgctgaagaaaaagacgtgggatcttggacgtgaggttgatcatattatgagacaaaaggaggctgcaatgcatgtaagaatgcttactcaggagatacgtaagtcactcgatagacatacgattctgtataccactttggtggagctgtctaaaacacttggcttgcaaaattgtgctgtgtggatgcctaatgttgataagactgagatgaacctcactcatgaattgaatgggaggaattttaa

SEQ ID NO: 103065 - DNA, 250 bp, Glycine max
tattaacacttccttagttcaatatggggaagcccttcactctctctctttcttccctttgcttgctactcttgtcgagtgcatgctttgctattagctccagcaagctcaacgagtgccaactcaacaacctcaacgcgttggaacccgaccaccgcgttgagtccgaaggtggtttgattcaaacatggaactctcaacaccctgagctgaaatgcgccggtgtcactgtttccaaactcaccctcaa

SEQ ID NO: 103066 - DNA, 255 bp, Glycine max
tgcatggtggatgtacaacaatgaagacactcctgttgttgccgtttctattattgacaccaacagcttggagaaccagctcgaccagatgcctaggagattctatcttgctgggaaccaagagcaagagtttctaaaatatcagcagcagcagcaaggaggttcccaaagccagaaaggaaagcaacaagaagaagaaaacgaaggaagcaacatattgagtggcttcgcccctgaattcttgaaagaagcgtt

SEQ ID NO: 103067 - DNA, 256 bp, Glycine max
tggctcctctgcgtgctcgttgaatccatcctaagtgacttgcttgctgaaggcgacacgaggtcggtagaaactaagaatgggggaagagaatgaagaaacaaaaacatttaaggatttgggcttatccgagtcattggtggaagcttgcgaaaaattgggttggaaaaattgaattaaagatacagacagaagcaattcctcttgcattggaaggaaaagatgtgataggacttgcccaaactggttccggtaa

SEQ ID NO: 103068 - DNA, 223 bp, Glycine max
gtgttgttatgaacttatgatgttggtttatgtggggaaataaatgatgtatgtacctcttcttgcctatgtagtaggtttgggtgttttgttgtctagctttgcttatttagtaattagtagaagggacgttcgttcgtgtctcataaaaaggggtactaccactctggcaatgtgatttgtatttgatgaattcaatgtgaaatgtgttttgcgttggtgt

SEQ ID NO: 103069 - DNA, 260 bp, Glycine max
cacataaaaaaccactctacaaaactctccagtacattctgaaaattttattttcttttggtgaaattaacagctctgtgattgatcaatggcgacaaaggaaggcaaagccataggcatcgatctcggcacgacctacagctgcgtgggcgtgtggcaaaacgaccgcgtcgagatcatccccaacgaccaaggcaaccgaaccactccctcttatgtagccttcaccgacaccgagaggctcatcggagacgcggcga

SEQ ID NO: 103070 - DNA, 230 bp, Glycine max
ctcgagccgtttgtggatgctcagcctcagcagaaagaggaggggaacaagggaagaaagggtcctttgtcttcaattttgagggctttttactgaataagtatgtagtactaaaatgtatgctgtaatagctcatagtgagcgaggaaagtatcgggctatttaactatgacttgagctccatctatgaataaataaatcagcatatgatgcttttgttttgtgtaact

SEQ ID NO: 103071 - DNA, 120 bp, Glycine max
agataacaaaggctttagcttgccttttgttcactgtaaaataataatgtaagtactctctataatgagtcacgaaacttttgcgggaataaaaggagaaattccaatgagttttctgtc

SEQ ID NO: 103072 - DNA, 253 bp, Glycine max
ctttgagatcaccccagagaaaaaccatttcttctgaagataaaccttttaacttgagaagccgcgaccccatctactccaacaagcttggcaagttctttgagatcaccccagagaaaaacccccagcttcgggacttggatatcttcctcagtattgtggatatgaacgagggagctcttcttctaccacacttcaattcaaaggcgatagtgatactggtaattaatgaaggagatgcaaacattgaact

SEQ ID NO: 103073 - DNA, 253 bp, Glycine max
gttcaatatcctagtataccttaataaataatttaagatactatgatgagagcacggttcccattactgttgctgggacttgttttcctggcttcagtttctgtctcatttggcattgcttactgggaaaaagagaaccccaaacacaacaagtgtctccagagttgcaatagcgagagagactcgtacaggaaccaagcatgccacgctcgttgcaacctccttaaggtggagaaagaagaatgtgaagaag

SEQ ID NO: 103074 - DNA, 254 bp, Glycine max
attctggtgaatgcgtagaaaaggaaaataaagaaattagcgtgaaaaatgttgggtgtgttcagcagctccatagtgtcgccgccggaggagctcgttgccgccggcagccgtacaccgtcgccgaagatgacggcggcggcgctgcggaagtggttcgaggagaagaacccctccgcagtgtcggtggaggtcggagagcatgtccagctcgcttatacccaccagaacgagtcgccgtttcagcccagatc

SEQ ID NO: 103075 - DNA, 253 bp, Glycine max
ccactaacaattccttcacttgcagcactgttgcatcatcatcttcattgcaaaaccctaaacttcaccttcaaccatgaccacacaagtaccaccacacagtgtccaagtccacacaacaacacacctctacgaagctggcgtcgtcccccccggagcccgtttcgaaccgccgcgttatgaagccggcgtcaaagcgccctccatttaccattccgagagaggtccaacgacttcccaggtcctcgccgtc

SEQ ID NO: 103076 - DNA, 251 bp, Glycine max
ggaataccaagattaccaccacaaagcaatgggcggtatactttctgcgcttcttggcggcgacgcggtcgcggcggcgtcttcgccggatagttctacttctagagtctcctccttccactcgtcgccgcgctagcagctctacttcaacgagatcaaagataccgataagctcgttgtgataggtttctcggcgtcgtggtgcggtacctgcaaattcatagagccagcgattcatgccatggccgaca

SEQ ID NO: 103077 - DNA, 250 bp, Glycine max
ctcgagccgctcgagccggttttacttgtcaaactctcagcgggatccatgttggcaccacatgtgaccccaatatcagatgagtataccatagtgctgagtggttatggtgaactgcatatagggtatccaaacggaagcaaagcaatgaaaactaaaatcaaacaaggggacgtgtttgttgtgccaagatacttccccttctgtcaagtagcatcaagggatggacccttagagttctttggcttct

SEQ ID NO: 103078 - DNA, 127 bp, Glycine max
caggttgccgcaccttaaaaccggaaacaaaagcaatcgttacttgatttcaagaatctctcaatttcttcctacttctttgtgtacgatttcttaagggaaagaaaatcactctctgtgctggtca

SEQ ID NO: 103079 - DNA, 249 bp, Glycine max
ctcgagcgcttaattattaacacttccttagttcaatatggggacgcccttcactctctctctttcttccctttgcttgctactcttgtcgagtgcatgctttgctattagctccagcaagctcaacgagtgccaactcaacaacctcaacgcgctggaacccgaccaccgcgttgagtccgaaggtggtttgattcacacatggaactctcaacaccctgagctgaaatgcgccggtgtcactgtttc

SEQ ID NO: 103080 - DNA, 175 bp, Glycine max
ccttaatgtataatttaagatactatgatgagagcacggttcccattactgttgctgggacttgttttcctggcttcagtttctgtctcatttggcattgcttactgggaaaaagagaaccccaaacacaacaagtgtactcagagttgcaatagcgagagagactcgtacagga

SEQ ID NO: 103081 - DNA, 247 bp, Glycine max
cggctcgagtctccattgtctttgaacactcatcaccatggccaagcttgttctttccctttgcttccttcttttcagtggctgcttcgctctgagagagcaggcacagcaaaatgagtgccagatccaaaagctgaatgccctcaaaccggataaccgtatagagtcggaaggtgggttcagtgagacctggaaccctaacaacaagccattccagtgtgccggtgttgccctctctcgctgcacc

SEQ ID NO: 103082 - DNA, 245 bp, Glycine max
ttgagctctgcgagatcttgagtcgccgatttgaaaagatgagtaagcttcagagtgatgctttgcgtgaagccatctcaggaatcatggccgattccaaggagaagaatcgcaaatttgtggagaccatcgaactccaaatcggtttgaagaactacgatccacagaaggacaagcgtttcagtggctccgtcaagttgccccacatccctcgccccaagatgaaaatttgcatgcttggtgat

SEQ ID NO: 103083 - DNA, 252 bp, Glycine max
atcatgcacaagagctcttcagattccacgttgggcccgggtggcctggacctctcccaggccttcttcaggcccataaacaacgccgcccctccctccccgaccaagcgccacaacaagatctccgtcatcggcgccggcaacgtgggaatggccatcgacgcagaccatcctcactcaggacctcaccgacgagctcgtcctcgtcgacaccaactccgacaagctccgcggcgagatgctcgacctcca

SEQ ID NO: 103084 - DNA, 226 bp, Glycine max
ctcgagccgtttgtggatgctcagcctcagcagaaagaggaggggaacaagggaagaaaaggtcctttgtcttcaattttgagggctttttactgaataagtatgtagtactaaaatgtatgctgtaatagctcatagtgagcgaggaaagtatcgggctatttaactatgacttgagctccatctatgaataaataaatcagcatatgatgcttttgttttgtgt

SEQ ID NO: 103085 - DNA, 147 bp, Glycine max
caggttgccgcaccttaaaaccggaaacaaaagcaatcgttacttgatttcaagaatctctcaatttcttcctacttctttgtgtacgatttcttaagggaaagaaaatcactctctgtgctggccacagacttcgtgaatcatttt

SEQ ID NO: 103086 - DNA, 255 bp, Glycine max
atatcctagtacaccgtattaaagaatttaagatatactatgatgagagcgcggttcccattactattgctgggagttgttttcctggcatcagtttctgtctcatttggcattgcgtattgggaaaagcagaaccccagtcacaacaagtgcctccgaagttgcaatagcgagaaagactcctacaggaaccaagcatgccacgctcgttgcaacctccttaaggtggaggaagaagaagaatgcgaagaaggt

SEQ ID NO: 103087 - DNA, 252 bp, Glycine max
tggattttgattctctttatctgtgattgttgactcgacagatgcagatcttcgtcaagaccctcaccggcaagaccatcacccttgaggtggaaagctctgacaccatcgacaacgtcaaggccaagatccaggacaaggaaggaatccccccggaccagcaacgtctcattttcgccggaaagcaacttgaggacggccgtacccttgctgactacaacattcagaaggagagtactcttcacctcgtcc

SEQ ID NO: 103088 - DNA, 250 bp, Glycine max
gagaacaccattgaattttgattctagcaagcagagtttttgtcaattttctattgaccttctcggtggaggaattttagtggacaaaactggagattggatcacacttatacaaaattctccaattagtaacttgttgagagttgctgcttggaagaaaggctgtttaatggttaagattgtgatgtctgggaatgcagcagtcaaaaggagtgattgggcctcattggtacaagtgtttttaacaaac

SEQ ID NO: 103089 - DNA, 249 bp, Glycine max
gtgaattatggaatcctgcttgcacaaaagcaatgactttgttatttaatccaaacccgtgttctgatgcatggagtttggaatttctgaagcgtaccggatttcattgtgatatcatttgtgtcactggatggactgccaccccaatgcaggatgttcaggttacaattgattggtttatttcctctcaggaatgtgttttcaggacctattgtgttttaaatccacaaaatccttttgtgttaaata

SEQ ID NO: 103090 - DNA, 247 bp, Glycine max
aaacaattcaattcaatctgcctcgatcatggagaggaaaacatttgggctttagttcttgctcctccttgtcttagcttctgatgtgacggtgaagagagcagaggcgaaagattgcttgacaaggaggcacgggttccagggtagatgcttattcgacaggcaatgtgcacatgtgtgcaggagcgatggtttcatcggtggtcagtgccgaggccctcttcgcaaatgcttttgcagcaggcca

SEQ ID NO: 103091 - DNA, 250 bp, Glycine max
atatcctagtacaccgtattaaagaatttaagatatactatgatgagagcgcggttcccattactgttgctgggagttgttttcctggcatcagtttctgtctcatttggcattgcgtattgggaaaagcagaaccccagtcacaacaagtgcctccgaagttgcaatagcgagaaagactcctacaggaaccaagcatgccacgctcgttgcaacctccttaaggtggaggaagaagaagaatgcgaag

SEQ ID NO: 103092 - DNA, 248 bp, Glycine max
cgaaggaacagattcgggcactgagcaaacgtgccaaatctagttcaaggaaaaccatttcttctgaagataaaccttttaacttgagaagccgcgaccccatctactccaacaagcttggcaagttctttgagatcaccccagagaaaaacccccagcttcgggacttggatatcttcctcagtattgtggatatgaacgagggagctcttcttctaccacacttcaattcaaaggcgatagtgata

SEQ ID NO: 103093 - DNA, 249 bp, Glycine max
ctttgagatcaccccagagaaaaaccatttcttctgaagataaaccttttaacttgagaagccgcgaccccatctactccaacaagcttggcaagttctttgagatcaccccagagaaaaacccccagcttcgggacttggatatcttcctcagtattgtggatatgaacgagggagctcttcttctaccacacttcaattcaaaggcgatagtgatactggtaattaatgaaggagatgcaaacattg

SEQ ID NO: 103094 - DNA, 251 bp, Glycine max
ctcgagccgcgcggccaaacagagcaaaaacccaacacaccacactcttgcaatcaatcaatggcggaaccttcctcctcgaagcccgccgtccctctcctgaaggacgagctggacatcgtgatcccgacgatccgcaacctcgacttcctcgagatgtggcggcccttcttcgagccctatcacctcatcatcgtgcaggacggagaccccaacaggaccatcaaagttcccgatgggttcgattacga

SEQ ID NO: 103095 - DNA, 249 bp, Glycine max
gctcaatcctggtatttcaggttctcgtcttttgggcaccattcctcagtctatttcacagcaaactgtttggaatcaaatggcaacagtgagaacaccattgaattttgattctagcaagcagagcttttgtcaattttctattgaccttctcggtggaggaattttagtggacaaaactggagattggatcacacttatacaaaattctccaattagtaacttgttgagagttgctgcttggaagaa

SEQ ID NO: 103096 - DNA, 250 bp, Glycine max
gtttccaaggctgaactgaaggagaagctgggaagaatgtatgacgtgaaagacaccaacactgtatttgtcttcaagttccgaactcattttggtggtggcaagtccactgggtttggtttgatctatgattcagttgagaatgctaagaagtatgagcctaaatacaggcttatcaggaatggacttgataccaaagtagagaaatcaaggaagcaaatgaaggagagaagaatagagctaagaagat

SEQ ID NO: 103097 - DNA, 126 bp, Glycine max
caccccactaacaattccttcacttgcagcactgttgcatcatcatcttcattgcaaaaccctaaacttcaccgtcaaccatgaccacacaagtaccaccacacagtgtccaagtccacacaacaa

SEQ ID NO: 103098 - DNA, 248 bp, Glycine max
gagttcatgctgaagaaaaagacgtgggatcttggacgtgaggttgatcatattatgagacaaaaggaggctgcaatgcatgtaagaatgcttactcaggagatacgtaagtcactcgatagacatacgattctgtataccactttggtggagctgtctaaaacacttggcttgcaaaattgtgctgtgtggatgcctaatgttgataagactgagatgaacctcactcatgaattgaatgggaggaa

SEQ ID NO: 103099 - DNA, 245 bp, Glycine max
acgatgatgaggtcaaagatagtgttgtttggagactccatcacggagcaatcgatccgagagaatggatggggtgttcctcttgccaatgcctattctcgcagggctgatgtacttgttcgtggttatggtggatacaacactaggtgggctatgttcttactgggccatctcttccctctggactcaactaaaccacctactgctaccacaattttctttggcgctaatgatgcagctttgtt

SEQ ID NO: 103100 - DNA, 247 bp, Glycine max
acgatgatgaggtcaaagatagtgttgtttggagactccatcacggagcaatcgatccgagagaatggatggggtgttcctcttgccaatgcctattctcgcagggctgatgtacttgttcgtggttatggtggatacaacactaggtgggctatgttcttactgggccatctcttccctctggactcaactaaaccacctactgctaccacaattttctttggcgctaatgatgcagctttgttag

SEQ ID NO: 103101 - DNA, 249 bp, Glycine max
ctgggaaccaagagcaagagtttctaaaatatcagcagcagcagcaaggtggttcccaaagccagaaaggaaagcatcaagaagaagaaaacgaaggaagcaacatatttagtggcttcgcccctgaattcttgaaagaagcgttcggcgtgaacatgcagatagtgagaaacctacaaggtgagaacgatgaggaggatagtggagccattgtgacagtgaaaggaggtctaagagtcacagctccag

SEQ ID NO: 103102 - DNA, 247 bp, Glycine max
gaatgttctgccctcatcaacaaacccaacacgccctttaacactcaatactatagatgagcatcttgacatgttgatggtctgccatcatctgaatagggaaattccagaagacttagcttttgcatgttcaaggataagagaaggaacgattgctgccgaagatattttgcatgatattggggcaattagcatcatatcttctgattctcaggctatgggtcgagttggagaggtgataagcaga

SEQ ID NO: 103103 - DNA, 243 bp, Glycine max
ttctctccattggtccttaaacactcatcagtcatcaccatggccaagctagttttttccctttgttttctgcttttcagtggctgctgcttcgctttcagttccagagatcagcctcagcaaaacgagtgccagatccaaaaactcaatgccctcaaaccggataaccgtatagagtcagaaggagggctcattgagacatggaaccctaacaacaagccattccagtgtgccggtgttgcc

SEQ ID NO: 103104 - DNA, 245 bp, Glycine max
ggaagatttacttgaaagctgccaagaattacttggaaaaaggttctgattatgctaagaacgaaatccagcgcctacagcgcatacttgacaagtccattagtcctgccaaggccgacgagttaactctaaagaaaaatatcttgtcgacatatgcggcttgactttttggtgcatcattaaccatctctcatggaagctcgtgatcaatcgcagctcctgatgattgtttgactttgatatcg

SEQ ID NO: 103105 - DNA, 247 bp, Glycine max
ccctcttcttgttatcttcagccccatccttgtccctgctgcgtttgtgctgttcctggttgcttctggctttttgttctctgggggctgtggtgtggctgccattgctgctttatcttggatttacaactacgtttctgggaaccagcctgcgggttctgacacccttgactatgcaaaagggtaccttactgataaggcaagggatgtgaaggagagggcaaaggattatggaagttatgctcag

SEQ ID NO: 103106 - DNA, 248 bp, Glycine max
gacaaatttgcttgctactgtcttgatcttcctaattgtgatatacttccaaggtttccgcgtggtcttgcctgtaagatcaaagaatgctcgtggacagcagggttcatatccaatcaaattgttttatacctccaacatgcccatcattcttcagtctgcccttgtttccaatctctacttcatctcccagctgctccaccgtaagtacagcggaaacttcttcgtagatctattgggaaaatgga

SEQ ID NO: 103107 - DNA, 250 bp, Glycine max
gttcaatatcctagtataccttaataaataatttaagatactatgatgagagcacggttcccattactgttgctgggacttgttttcctggcttcagtttctgtctcatttggcattgcttactgggaaaaagagaaccccaaacacaacaagtgtctccagagagacaatagcgagagagactcgtacaggaaccaagcatgccacgctcgttgcaacctccttaaggtggagaaagaagaatgtgaag

SEQ ID NO: 103108 - DNA, 128 bp, Glycine max
gttcaatatcctagtacaccgtattaaagaatttaagatatactatgatgagagcgcggttcccattactgttgctgggagttgttttcctggcatcagtttctgtctcatttggcattgcgtattgg

SEQ ID NO: 103109 - DNA, 285 bp, Glycine max
ctcgagccggttgaacaagggtttctctgtctgcttcttcactttctctcgtttcaatacgcaaccaaaacaaaaacatgggcagaaaattcttcgtcggtggcaactggaaatgcaatgggaccactgaggaggtaaagaagattgttactactttgaatgaggctaaagtccctggagaagatgtcgtagaagttgttgtgagccctccttttgtgttccttcctgttgtaaaaagtttgctgcgccctgatttccatgtttcggcacaaaactgttgggtcg

SEQ ID NO: 103110 - DNA, 285 bp, Glycine max
gcaggtcattaagaatgaagatcttgaagagctgcgagaactaggttctggtacctttgggactgtgtatcatggaaagtggagaggaacagatgttgctattaaaagaataaagaagagctgcttcactggtcgatcatctgagcaagagagactgactgtagagttctggcgggaagctgacattctttccaagcttcatcatccaaatgtggttgcattttatggtgtggtacagcatgggccaggaggaacaatggccactgtggcagaatatatggtgga

SEQ ID NO: 103111 - DNA, 287 bp, Glycine max
gtcagaagttgctcgtggacgtgctatcatcccttcgaacaagaaacacttggagttagagcccatgatagttggaagaaactttttggtaaaagtaaatgccaacattgggaattctgccgttgctagctctatagaagaggaagtttacaaggttcaatgggcaactatgtggggagcagatactgccatggatctctcgactggtcgccacatccatgaaactcgagagtggatcctacgcaactctgctgtaccaattgggactgtgcctatttatcaagcac

SEQ ID NO: 103112 - DNA, 284 bp, Glycine max
gctgctgttcttgcgcgtgaacaagcctcaggtaagccaaaaccatggttaagcataacaatgttatcccaaacggacacttccgtaagcactggcagaactatgtgaagacttggttcaatcagccagcacggaagacaaggagacgattggctcgtcagaagaaagctgtgaagatattccccagacctacggctggacctctcaggcccattgtacatggtcaaactttgaaatacaacatgaaagtgagaggtggaagggagttttctcttgaagaactc

SEQ ID NO: 103113 - DNA, 284 bp, Glycine max
agcaaattgcaatggctaagcatgatgttgagggtggttccttctctgcaaaggactaccatgatcctcctccagcaccgttgattgatgctgaggaactcacacagtggtccttctacagggctttgattgctgagttcattgccacaatgctcttcctttacatcacagtgctcactgtgattggttacaagagccagagtgatgtaaaggctgggggtgatgtgtgtggtggagttggcattcttggcattgcttgggcctttggtggcatgatcttcatt

SEQ ID NO: 103114 - DNA, 271 bp, Glycine max
atttagtacgtgtgcaacatatggggaacctgaaaagatgcctatactagaaacaacagaacagaaaccaattaatccatacggaaaagccaagaagatggcagaagatatcatccttgatttttccaaaaattctaagatggcagtaatgattctgagatacttcaatgtgattggatcagacccagagggcagattgggtgaggctccaagacctgaacttcgtgaacatggccgaatttctggtgcctgctttgatgcagctcgtggt

SEQ ID NO: 103115 - DNA, 280 bp, Glycine max
gttcctcactgaccaagccatggcgatgagaaccaaactttctttagctatctttttcttttttcttttagccttattttcaaacctagcctttggcaaatgtaaagaaaccgaggtagaagaagaagaccctgagctcgtaacatgcaaacaccaatgccaacagccacagcaatacactgagggtgacaagcgggtatgcttgcaaagatgtgacaggtatcatcgtatgaagcaagagcgagagaaacaaatccaagaggaaactcgtgagaagaaa

SEQ ID NO: 103116 - DNA, 98 bp, Glycine max
ttcaatatggggaagcccttcactctctctctttcttccctttgcttgctactcttgtcgagtgcatgctttgctattagctccagcaagctcaacga

SEQ ID NO: 103117 - DNA, 142 bp, Glycine max
cgccccccaaaaatgaagagcaccatcttctttgctctctttctcttttgtgccttcaccacctcatacctaccttcagccatcgctgatttcgtgctcgataatgaaggtaaccctcttgaaaatggtggcatattatatc

SEQ ID NO: 103118 - DNA, 286 bp, Glycine max
cgtaatcaaaaccatgcagatacgaacctgccactccatcaccacccaaacccttccacaacttccgtgttcttctagaaaagcccaccaccgccaccttcttccgccgttaaacgctgcggtttccgcggcgccgttcaaagcccggaaggcccactcaatgcctccagaaaagaaagaaattttcaagtccttggagggatgggcctcggagtgggtcctaccgctgctgaagcccgtggagcaatgctggcagccacaaaacttcctccctgacccctccctt

SEQ ID NO: 103119 - DNA, 281 bp, Glycine max
aggctcgagttttgttcaaggaaaagatctcgcaatggttaaagttaatgtagcatgtgctgctgttggcttgacatcaagttacactccaactcatatgttggaatctggtttgcaaaaagacagagggttaattgtggaatattttggaaggatgtcttacgttgctcataacgttaatcagccccaagagaaagatttgttggagggaaatttttccttcgatattaaatctcgctctagattggaaaaagtttcctctacaaaagcacaatttgtta

SEQ ID NO: 103120 - DNA, 282 bp, Glycine max
gtgaaagtgaaacagaaaaaatcacccttgaacctggggacatgatacacataccagctggcaccccactgtacatcgttaacagagatgagaatgataagctcttccttgccatgctccatatacctgtctctgtctctactcctggaaaatttgaggaatttttcgggcctggaggacgagacccttaatcggtcctctcagcattcagctggaatgtgctgcaagctgcgctccaaaccccaaaaggaaagttagaaaagctttttgatcaacagaacg

SEQ ID NO: 103121 - DNA, 280 bp, Glycine max
acttcttctcttgcggctagggttttagcgcacttcttctagatttaaggaagatgggtaaggaaaaggttcacatcagtattgtggtcattggccatgtcgactctgggaaatccactaccactggtcacctgatttacaagcttggaggcattgacaagcgtgttattgagaggtttgagaaggaagctgctgagatgaacaagaggtctttcaagtatgcctgggtgctggacaaacttaaggctgagcgtgaaagaggaatcaccattgatattgc

SEQ ID NO: 103122 - DNA, 284 bp, Glycine max
cttcttcgtctcaaatctcttcgttccttcgattcgttccatttcttccaaaatggccaaagacccagttcgcgttctcgtcactggagctgcagggcaaattgggtatgctcttgtccctatgattgctaggggagtgatgttgggtcctgaccagcccgtgatcctccacatgcttgacatttctccggcagcagagtcattgaatggggttaaaatggaattggtggatgctgcattccctcttcttaaaggtgttgttgccacaactgatgtggttgagg

SEQ ID NO: 103123 - DNA, 87 bp, Glycine max
gcaaagcaatggctacttcaaagttgaaaacccagaatgtggttgtatctctctccctaaccttaaccttggtactggtgctactga

SEQ ID NO: 103124 - DNA, 289 bp, Glycine max
acaataccaggtgattttgtcattggtgttaagttgacaaccataaacaatatgtgtgcatatgggcttaatcctggtatttcaggttctcgtcttttgggcaccattcctcagtccatttcacagcaaactgtttggaatcaaatggcaacagtgagaacaccattgaattttgattctagcacgcagagcttttgtcaattttctatcgaccttctcggtggaggaattttagtggacaaaactggagattggatcacacttatacaaaattctccaattagtaact

SEQ ID NO: 103125 - DNA, 131 bp, Glycine max
ctctgctcgtgcctctagggttatcatatctccatttccatttactctctctcagtttccaagaatcttaagctatgggaaagtcttacccaaccgtgagcgctgattaccagaaggctgtagagaaggcg

SEQ ID NO: 103126 - DNA, 130 bp, Glycine max
gaagagtactatcttctttgctctctttctagtttgtgccttcaccatctcatacctgccttcagccaccgctcagttcgtgctcgacactgatgatgatcctcttcaaaacggtggcacatactatatg

SEQ ID NO: 103127 - DNA, 278 bp, Glycine max
gtcacttggaaacctttccctacctgcgggagtgcaagtttccttaccaatactattgattcaccaggatcgtgatatttggggtgatgatgctacagagttcaacccagaaagatttgctgaaggagtagcaaaggcaacaaaaggccaagctgtgtttttcccatttggatagggtcctagagtgtgcttaggccaaaattttgctttattagacgcgaagatggtttagtcattactcttacaacgcttctcatttgagcgttctcctacctatg

SEQ ID NO: 103128 - DNA, 272 bp, Glycine max
atcgttatccttaacgggactgccattctttccttggtgaacaacgacgacagagactcctacagacttcaatctggtgatgccctgagagtcccctcaggaaccacatactatgtggtcaaccctgacaacaacgaaaatctcagattaataacactcgccatacccgttaacaagcctggtagatttgagagtttcttcctatctagcactgaagctcaacaatcctacttagctagattcagcaggaacattttagaggctccacgata

SEQ ID NO: 103129 - DNA, 267 bp, Glycine max
agtctgcaaaagatattgagaacctaataaagagccaaagtgagtcctactttgtggatgctcagcctcagcagaaagaggaggggaacaagggaagaaagggtcctttgtcttcaattttgagggctttttactgaataagtatgtagtactaaaatgtatgctgtaatagctcatagtgagcgaggaaagtatcgggctatttaactatgacttgagctccatctatgaataaataaatcagcatatgatgcttttgttttgtgt

SEQ ID NO: 103130 - DNA, 271 bp, Glycine max
gaccattcttctgcagtctttctgcaattgagtggctctgcctgcggatggagttactgtcaacctttgtatttgctttctgtatggtattacttgtgagttttcctcgtggaagtatcgaccccagcatggctggacttgctgtgacatatggcctgaatttaaatgcacgcctatcacggtggatactcagcttttgcaagcttgaaaataaaattatatctattgagagaatttatcagtacagccaaattcctagtgaagcacccac

SEQ ID NO: 103131 - DNA, 279 bp, Glycine max
attaagaaaagccatttccatagcagcctaagaaaatgaagagcactagcttgttcgctatctttctactttgcgccttcacctcatacctaatatccgccaccgcccaggacgtgctcgacgtggatggcgatccgattcggaacggtttcatatactacgttttgccggcaataagaggaaacggtggcggaatagaacgagccgcactcgggaaagacacttgccctatcactgtagtgcaatctcccaatccaaactctaaggggttagaaatta

SEQ ID NO: 103132 - DNA, 279 bp, Glycine max
cgtaatcaaaaccatgcagatacgaacctgccactccatcaccacccaaacccttccacaacttccgtgatacactagaaaagcccaccaccgccaccttcttccgccgttaaacgctgcggtttccgcggcgccgttcaaagcccggaaggcccactcaatgcctccagaaaagaaagaaattttcaagtccttggagggatgggcctcggagtgggtcctaccgctgctgaagcccgtggagcaatgctggcagccacaaaacttcctccctgaccc

SEQ ID NO: 103133 - DNA, 229 bp, Glycine max
taccttaataaataatttaagatactatgatgagagcacggttcccattactgttgctgggacttgttttcctggcttcagtttctgtctcatttggcattgcttactgggaaaaagagaaccccaaacacaacaagtgtctccagagttgcaatagcgagagagactcgtacaatagccaagcatgccacgctcgttgcaacctccttaaggtggagaaagaagaatg

SEQ ID NO: 103134 - DNA, 281 bp, Glycine max
tcttgggagaagaggtcgagtttcacagcagcaatggtgtacgtcaaggctcagaaatcaaaagcctacttcaagagatatcaagtcaagttcaagagaagaagagagggaaaaaccgattaccgtgccaggattcggttgattaatcaggacaagaacaaatataacactccgaaataccgatttgttgttcgctttagcaacaaggacattgttgcacaaataatatctgctagcattgctggcgatattgttcttgctgcagcatatgcacatgagct

SEQ ID NO: 103135 - DNA, 279 bp, Glycine max
atcataaaattcttccaccaagttatgggtttacttgtgttgcttcttttctccctcttaggtctctcttctagttccagcatatcaactcatcgttccatattggaccttgacctaaccaagtttaccacacagaaacaggtctattcactgttccaactatggaagagtgagcatggacgtgtctaccataaccacgaagaagaggcaaagagacttgagattttcaagaataacttgaactatatcagggacatgaatgcaaacagaaaatcaccc

SEQ ID NO: 103136 - DNA, 259 bp, Glycine max
ggagcagaaatggcattgatgagaccatttgcacaatgagacttcgccaaaacattggtcagaattcatcacctgacatctacaaccctcaagctggtagcatcacaaccgccaccagccttgacttcccagccctctggcttctcaaactcagtgcccagtatggatcactccgcaagaatgctatgttcgtgccacactacaccctgaacgcgaacagcataatatacgcattgaatgggcgggcattggtacaagt

SEQ ID NO: 103137 - DNA, 136 bp, Glycine max
ctttctctctcacgttttccgcttcagttttctcgggaaaatcatggtgaaaggtccaggcctctactctgacattggcaagagagctcgcgatcttctgttcaaggattatcagaatgaccacaagttcaccatc

SEQ ID NO: 103138 - DNA, 117 bp, Glycine max
gcaaagcaatggctacttcaaagttgaaaacccagaatgtggttgtatctctctccctaaccttaaccttggtactggtgctactgaccagcaaggcaaactcagcggaaactgttt

SEQ ID NO: 103139 - DNA, 117 bp, Glycine max
ccgtgataaagggtttggttttgtgaggtacagtactcatgctgaagcagctctggctattcagatggggaacgcccagtctcttctatgtggaaaaccaattaagtgctcttgggg

SEQ ID NO: 103140 - DNA, 116 bp, Glycine max
atcacaggttgccgcaccttaaaaccggaaacaaaagcaatcgttacttgatttcaagaatctctcaatttcttcctacttctttgtgtacgatttcttaagggaaagaaaatcac

SEQ ID NO: 103141 - DNA, 276 bp, Glycine max
atctagtacgtgtgcaacatatggggaacctgaaaagatgcctattatagaaacaacagaacagaaaccaattaatccatacggaaaagccaagaagatggcagaagatatcatccttgatttttccaaaaattctaagatggcagtaatgattctgagatacttcaatgtgattggatcagacccagagggcagattgggtgaggctccaagacctgaacttcgtgaacatggccgaatttctggtgcctgctttgatgcagctcgtggtattac

SEQ ID NO: 103142 - DNA, 276 bp, Glycine max
cttcaaagttgaaaacccagaatgtggttgtatctctctccctaaccttaaccttggtactggtgctactgaccagcaaggcaaactcagcggaaactgtttctttcagctggaacaagttcgtgccgaagcaaccaaacatgatcctccaaggagacgctattgtgacctcctcgggaaagttacaactcaataaggttgacgaaaacggcaccccaaaaccctcgtctcttggtcgcgccctctactccacccccatccacatttgggacaaag

SEQ ID NO: 103143 - DNA, 105 bp, Glycine max
gaagcagcagctacaggacagtcaccagaagattcgtcacttcaatgaaggagacgtactcgtgattcctcctggtgttccttactggacctataacactggcga

SEQ ID NO: 103144 - DNA, 275 bp, Glycine max
ccgtcttctctgctaccgatcccaagagagtagcaagagactcccatgttcccgtgttggcaccacttccaattgggtttgcggtgttcatggttcacttggccaacatccctatcaccggcactggcatcaacccagctagaagccttgggcctgctgtcatattcaacaacgagaaggcttgggatgaccagtggatcttctgggttggacccttcatcggtgctgctcttgctgcattctaccaccagtccgtgttgagggcccaagcagca

SEQ ID NO: 103145 - DNA, 280 bp, Glycine max
gtacaagacgaggacgaggacgaagatgaagataaacctcgtcctagtcgaccaagccaaggaaagcgtgaacaagaccaggaccaggacgaggacgaagatgaagatgaagatgctcctcgcaagagccgcgaatggagatcgaaaaagacacaacccagaagacctagacaagaagaaccacgtgaaagaggatgcgagacaagaaacggggttgaggaaaatatctgcaccttgaagcttcacgagaacattgctcgcccttcacgcgctgacttct

SEQ ID NO: 103146 - DNA, 271 bp, Glycine max
gcagaacaggcttacagccctgcatggttcaattgaaaagctgttatttgatcctgagcagactgatgaatacattggttcattgaaagacaagtcaaagcccataattttctccatggcaaggctagacagagtgaaaaacataactggattggtagaatgctttggtaagaacagcaaattgagggaactggtcaaccttgttgtagtagctggttatattgatgtaaagaagtcgagtgacagagcagaaatggcagaaattgagaag

SEQ ID NO: 103147 - DNA, 275 bp, Glycine max
accctactcattctccatacctcaacgaagatgttaaagagacggcaacactttgctgtccgccttgaccgagcagagcttcgtcttggccctcgattttgccctaaagtactctcagtcacaacagacaccgtcgtcgtcgtcgtcgtcatcaatggcaccgaagcagaccaaggctgagaagaagatcgcttacgatgcgaactgtgcgacctaatggaggagtacggccagatcctcgttgtgaactccgataacgtgggatcgaaccagct

SEQ ID NO: 103148 - DNA, 129 bp, Glycine max
cgcaggtacatgatcgacatggtcacccacgccgacaccgacgtcgtcatcgttggcgcgggctccgcgggtctctcgtgcgcctacgagctctccaaaaacccctccatcaacatcgccattgttgag

SEQ ID NO: 103149 - DNA, 135 bp, Glycine max
tgaagagcgaagagaatggctcccaagggtttaatctttttggctgtgttatgcttctcagcactgtcactgagtcgttgtcttgcggaggataatggacttgttatgaacttctacaaggaatcatgccctcag

SEQ ID NO: 103150 - DNA, 234 bp, Glycine max
atcctagtacaccgtattaaagaatttaagatatactatgatgagagcgcggttcccattactgttgctgggagttgttttcctggcatcagtttctgtctcatttggcattgcgtattgggaaaagcagaaccccagtcacaacaagtgcctccgaagttgcaatagcgagaaagactcctacaggaaccaagcatgctacgctcgttgcaacctccttaaggtggaggaaga

SEQ ID NO: 103151 - DNA, 278 bp, Glycine max
atccattggtccttaaacactcatcagtcatcaccatggccaagctagttttttccctttgttttctgcttttcagtggctgctgcttcgctttcagttccagagagcagcctcagcaaaacgagtgccagatccaaaaactcaatgccctcaaaccggataaccgtatagagtcagaaggagggctcattgagacatggaaccctaacaacaagccattccagtgtgccggtgttgccctctctcgctgcaccctcaaccgcaacgcccttcgtaga

SEQ ID NO: 103152 - DNA, 273 bp, Glycine max
atcgagccgaatcggctcgagccttagccgaggtcacgaggagcactagctagtttcacaagttccaaatggctaggggaatgaagaagcatctcaagaggctcaatgctcctaagcattggatgcttgacaaactgggtggtgcatttgcgcccaaaccctcatctggaccacacaaatctagggagtgccttcccctcatactcatcctacgaaaccggctaaagtatgctctgacttaccgtgaagtcatcgctattctgatgcagagac

SEQ ID NO: 103153 - DNA, 273 bp, Glycine max
aaaggatccttttctgatgtctggatgtaaagttgctgatggcagtggctctatgctggtcactggtgttggtgtcaatactgaatgggggcttctaatggctagcatctcagaagatactggtgaagaaacaccattgcaggttcgcttaaattgtgtagctactttcattggtattgtaggacttactgttgctgttattgtcctaattgtgctactggctagatatttctctgggcatactaaaaacccagatgggtcagttcaattcac

SEQ ID NO: 103154 - DNA, 156 bp, Glycine max
cacaggttgccgcaccttaaaaccggaaacaaaagcaatcgttacttgatttcaagaatttctcaatttcttcctacttctttgtgtacgatttcttaagggaaagaaaatcactctctgtgctggtcacagacttcgtgaatcattttcttatcc

SEQ ID NO: 103155 - DNA, 275 bp, Glycine max
accaaattcgaggagataaacaaggttctgtttggtagagaggaggggcagcaacaaggggaggagaggctgcaagagagtgtgattgtggaaatctcaaagaaacaaattcgggaactgagcaaacatgccaaatctagttcaaggaaaaccatttcttctgaagataaacctttcaacttgagaagccgcgaccccatctattccaacaagcttggcaagttgtttgagattaccccagagaaaaaccctcagcttcgggacttggatgtctt

SEQ ID NO: 103156 - DNA, 215 bp, Glycine max
accgattgctagaatggaatttcgatgctcagtcatctcttttaccattctcttctctcttgctcttgcaggagagagccatgtccatgcatcgctacctgaggaagattattgggaagctgtttggccaaacactcccattcccactgcactgcgagagcttctaaagcctctccctgcaggtgtagctatcgatgaactccctaagcaaattg

SEQ ID NO: 103157 - DNA, 279 bp, Glycine max
actcaatgccctcaaaccggataaccgtatagagtcagaaggagggctcattgagacatggaaccctaacaacaagccattccagtgtgccggtgttgccctctctcgctgcaccctcaaccgcaacgcccttcgtagaccttcctacaccaacggtccccaggaaatctacatccaacaaggtaagggtatttttggcatgatatacccgggttgtcctagcacatttgaagagcctcaacaacctcaacaaagaggacaaagcagcagaccacaaga

SEQ ID NO: 103158 - DNA, 102 bp, Glycine max
cttttaaaaggtttggaaatatgctggcacaaattgagaataaactctcagagagaaacaacgatgagaaactgagaaaccgttgtggaccagttcaaatgc

SEQ ID NO: 103159 - DNA, 124 bp, Glycine max
gctcaatcctggtatttcaggttctcgtcttttgggcaccattcctcagtctatttcacagcaaactgtttggaatcaaatggcaacagtgagaacaccattgaattttgattctagcaagcag

SEQ ID NO: 103160 - DNA, 155 bp, Glycine max
cgatgccggcgcaccttatgtacgatggggatgaccccaggctattcgagcactactccgctgtggcgcacgcataggcgtgtacaccgccaacgactacgcagacatcttggagtttctcgttgaacggtggattttggaaaactttaaggatt

SEQ ID NO: 103161 - DNA, 245 bp, Glycine max
ctcatcaccatggccaagcttgttctttccctttgtttccttcttttcagtggctgcttcgctctgagagagcaggcacagcaaaatgagtgccagatccaaaagctgaatgccctcaaaccggataaccgtatagagtcggaaggtgggttcattgagacctggaaccctaacaacaagccattccagtgtgccggtgttgccctctctcgctgcacccttaaccgcaatgcccttcgtagacc

SEQ ID NO: 103162 - DNA, 275 bp, Glycine max
cttaattattaacacttccttagttcaatatggggaagcccttcagtctctctctttcttccctttgcttgctactcttgtcgagtgcatgctttgctattagctccagcaagctcaacgagtgccaactcaacaacctcaacgcgttggaacccgaccaccgcgttgagtccgcaagtggtttgattcaaacatggaactctcaacaccctgagctgaaatgcgccggtgtcactgtttccaaactcatcctcaaccgcaatggcctccacttg

SEQ ID NO: 103163 - DNA, 243 bp, Glycine max
cacccagagatctatgagtactattcactacaactcacatgcaacgaagatagcactggtgatcgatggcagagggcatcttcaaatatcatgtccacacatgtcatcaaggtcgtcacactcgaagcatgataagagtagcccttcataccatagaatcagttccgatttgaagcctggaatggtgtttgttgtccctcccggtcatcccttcgtcaccatagcctccaataaagagaatct

SEQ ID NO: 103164 - DNA, 270 bp, Glycine max
tgagaatctgcagaagtccgtccataagtatttatcaatcagaggaatcaagcctagcacaaccaatttcttgcatgagtacatgatcaacaaggacagtaaagagtacttggtatggttgaacaagctcaagagcttcgtgcaagcatgagccttcacgtctcttttatgtgcttactgtcggcatttgaagataagcatgaatgttgctgagtttgtgtttaatcacatgctgtacattcgaaggtaaagataccaaggagattttac

SEQ ID NO: 103165 - DNA, 273 bp, Glycine max
aagacactcctgttgttgccgtttctattattgacaccaacagcttggagaaccagctcgaccagatgcctaggagattctatcttgctgggaaccaagagcaagagtttctaaaatatcagcaagagcaaggaggtcatcaaagccagaaaggaaagcatcagcaagaagaagaaaacgaaggaggcaacatattgagtggcttcaccctggaattcttggaacatgcattcagcgtggacaagcagatagcgaaaaacctacaaggagaga

SEQ ID NO: 103166 - DNA, 276 bp, Glycine max
aatgaatgctgctgagattaccgacaagttgggtctacactctctcagacagcgccactggtacattcagagcacctgtgcaacctctggggagggcctttacgaaggtctggactggctttccaacaacattgccaataaggcttaatgcctttgggagtcttgcggattggtaattctggatgcaggggtgaacattatctagcttttatttcttggtcctcttccaagacaactcgaatttgtgctcatgtaatgcggtttaggacatctcga

SEQ ID NO: 103167 - DNA, 246 bp, Glycine max
cttttaaaaggtttggaaataaactggcacaaattgagaataaactctcagagagaaacaacgatgagaaactgagaaaccgttgtggaccagttcaaatgccttatactctgcttttgccttctagtaaggaaggattaactttcagaggaattcccaacagtatctctatctgaagaggtttgtggttccttaagttttgtggctttgaataaaagatagaagagaaggaactgaatttcttca

SEQ ID NO: 103168 - DNA, 242 bp, Glycine max
cttaattattaacacttccttagttcaatatggggaagcccttcactctctctctttcttccctttgcttgctactcttgtcgagtgcatgctttgctattagctccagcaagctcaacgagtgccaactcaacaacctcaacgcgttggaacccgaccaccgcgttgagtccgaaggtggtttgattcaaacatggaactctcaacaccctgagctgaaatgcgttgtgtcactgtttcca

SEQ ID NO: 103169 - DNA, 239 bp, Glycine max
gtttgttgttcctcactgacctcaccatggcgaccagagccaagctttctttagctatcttccttttctttcttttagccttgatttcaaacctagccttgggcaaacttaaagaaaccgaggtcgaagaagatcccgactcgtaacatgcaaacaccagtgccaacagcaacggcaatacactgagagtgacaagcgaacatgcttgcaacaatgtgacagtatgaacaagagcgaga

SEQ ID NO: 103170 - DNA, 92 bp, Glycine max
aaacactcatcagtcatcaccatggccaagctagttttttccctttgttttctgcttttcagtggctgctgcttcgctttcagttccagaga

SEQ ID NO: 103171 - DNA, 147 bp, Glycine max
atcgagccgattcggctcgagagcgaaagcaagaggaagatgaagttgaggagcagcagagagagagcgaagaaagtgacgattctgagttacgaagacataagaataagaacccttttctcttcggctctaacaggttcgaactct

SEQ ID NO: 103172 - DNA, 246 bp, Glycine max
caagtttgctgacatcactcctcaagagttcagcaaaaagtacttgcaagctcccaaggatgtgtcgcagcaaatcaaaatggccaacaagaaaatgaagaaggaacaatattcttgtgaccatccacctgcatcatgggattcgaggaaaaaaggtgtcatcacccaagtaaagtaccaagggggctgtggaagcggttgggcgttttctgccacgggagccatagaagcagcacatgcaatagc

SEQ ID NO: 103173 - DNA, 246 bp, Glycine max
gcgaagacaatgaggaaccctcgtagtgctctctgcaaaactgctattatggctgctgctgatattttcaacgcctttggtgacaagttgcatgacccagtaatctccgatgcatttgatggcttgctgctacagctgctgctgtaaggcatcccaagacaaaaggtttgtgtgtgaagaagctgacagggcacttggcttaatggttggttccatgacccctcttccactgcttcagaaaatgag

SEQ ID NO: 103174 - DNA, 243 bp, Glycine max
agaagatgatgatgatgaggaagagcagccacagtgcgtggagacagacaaaggttgccaacgccaaagcaaaaggagcagaaatggcattgatgagaccatttgcacaatgagacttcgccaaaacattggtcagaattctcacctgacatctacaaccctcaagctggtagcatcacaaccgccaccagccttgacttcccagccctctggcttctcaaactcagtgccagtatggatcac

SEQ ID NO: 103175 - DNA, 240 bp, Glycine max
ataattcttccaccaagttatgggtttccttgtgttgcttcttttctccctcttaggtctctcttctagttccagcatatcaactcatcgttccatattggaccttgacctaaccaagtttaccacacagaaacaggtgtcttcactgttccaactatggaagagtgagcatggacgtgtctaccataaccacgaagaagaggcaaagagacttgagattttcaagaatacttgaactat

SEQ ID NO: 103176 - DNA, 241 bp, Glycine max
gcagaacaggcttacagccctgcatggttcaattgaaaagctgttatttgatcctgagcagactgatgaatacattggttcattgaaagacaagtcaaagcccataattttctccatggcaaggctagacagagtgaaaaacataactggattggtagaatgctttggtaagaacagcaaattgagggaactggtcaaccttgttgtagtagctggttatattgatgtaaaaagtcgagtg

SEQ ID NO: 103177 - DNA, 239 bp, Glycine max
ggtccttaaacactcatcagtcatcaccatggccaagctagttttttccctttgttttctgcttttcagtggctgctgcttcgctttcagttccagagagcagcctcagcaaaacgagtgccaggtccaaaaactcaatgccctcaaaccggataaccgtatagagtcagaaggagggctcattgagacatggaaccctaacaacaagccattccagtgtgccggtgttgccctctctc

SEQ ID NO: 103178 - DNA, 237 bp, Glycine max
cacttcccgaagtgttaagagaatgcctctttctatagggggaggagctggtgcaaagaatgctattctcatgaatatgccaaatgctgttctttcaatgtggagatattttgttggagatctcgtctttgaagtttctaagatgacttctccctacattaaatgtacagtctctttcttcatagcatttggaaatttggctgatgacaccatcaattttgaggctttccccacaag

SEQ ID NO: 103179 - DNA, 234 bp, Glycine max
cgcccctgaattcttgaaagaagcgttcggcgtgaacatgcagatagtgagaaacctacaaggtgagaacgaagaggaggatagtggagccattgtgacagtgaaaggaggtctaagagtcacagctccagccatgaggaagccacagcaagaagaagatgatgatgatgaggaagagcagccacagtgcgtggagacagacaaaggttgccaacgccaaagcaaaagagcaga

SEQ ID NO: 103180 - DNA, 238 bp, Glycine max
ggcagagacaccggagtcgcttgaggctgctgcgggtatggtggagaagctcttgcagcctgtggatgaggtattgaatgcgcataagaggcaacagcttagggagcttgctgcgttgaatgggacgatcagggatgaggagtattgcaggttgtgtggtgagcctggtcatcgccaatatgcgtgtcctactaggacatcaacgtttaagagtgaagttgtgtgtaagcattgtggg

SEQ ID NO: 103181 - DNA, 240 bp, Glycine max
tctccattgtctttgaacactcatcaccatggccaagcttgttctttccctttgtttccttcttttcagtggctgcttcgctctgagagagcaggcacagcaaaatgagtgccagatccaaaagctgaatgccctcaaacggataaccgtatagagtcggaaggtgggttcattgagacctggaaccctaacaacaagccattccagtgtgccggagttgccctctctcgctgcaccctt

SEQ ID NO: 103182 - DNA, 243 bp, Glycine max
ctgaaaaggaagatcaagaaaaacccaaaaagattgataccagattgagacaaagaatagatcctcaatacaatgaggttcaggctcagatggaaacaaatttgtttaaattgtctcttgatgatgttgaaactcccaaaggttccatgttggatcttaaaatttctcaatctaaaattgcacttcccaaaaacacagttggaggaaccattctgcgtagtgatctattggcaattttttgac

SEQ ID NO: 103183 - DNA, 241 bp, Glycine max
ataccttaataaataatttaagatactatgatgagagcacggttcccattactgttgctgagacttgttttcctggcttcagtttctgtctcatttggcattgcttactgggaaaagagaaccccaaacacaacaagtgccgcaagagttgcaatagcgagagagactcgtacaggaaccaagcatgccacgctcgttgcaacctccttaaggtggagaaagaagaatgtgaaaagggtga

SEQ ID NO: 103184 - DNA, 238 bp, Glycine max
atgtgatcaagcctgtgatcccagagaagtaccttgatgagaagaccattttccacttgaacccttcaggccgttttgtcattggtggccctcatggcgatgctggtctcaccggccgcaagatcattatcgatacttatggaggatggggtgctcatggtggtggtgctttctccgggaaagaccctaccaaggttgataggagtggtgcttacattgtgagacaggctgctaagag

SEQ ID NO: 103185 - DNA, 240 bp, Glycine max
catccttcgatcatacacttagttgcttccaattaagatggttctgctagagaagctctgggatgatgttgtggctggccctcaacctgagcgtggccttggcaagctcagaaaactcaccaccctcaaaactattgatgaaggagaaagtagcaagctgcagaagacgttgtcgatgccgtcgacaccaacaaccccgatgactccgacgactccaacgacaccgggatcggcccgtaa

SEQ ID NO: 103186 - DNA, 239 bp, Glycine max
gttcaatatcctagtataccttaataaataatttaagatactatgatgagagcacggttcccattactgttgctgggacttgttttcctggcttcagtttctgtctcatttggcattgcttactgggaaaaagagaacccaaacacaacaagtgtctccagagttgcaatagcgagagagactcgtacaggaaccaagcatgccacgctcgttgcaacctccttaaggggagaaagaag

SEQ ID NO: 103187 - DNA, 245 bp, Glycine max
tacgacaccaaattcgaggagataaacaaggttctgtttggtagagaggaggggcagcaacaaggggaggagaggctgcaagagagtgtgattgtggaaatctcaaagaaacaaattcgggaactgagcaaacatgccaaactagttcaaggaaaaccatttcttctgaagataaacctttcaacttgagaagccgcgaccccatctattccaacaagcttggcaagttgttgagattaccccag

SEQ ID NO: 103188 - DNA, 236 bp, Glycine max
ctctgtttatctccgcactccgtcttcaatcatcagcatcaccaccgctccaacacaggggaaaaacagggagatccttcacgttcaaggagggcaatgcgggaaccagatcggttcgaagatctgggaagtggttgcgacgagcacggcatagatccgacggggaagtacgtcggaaactcagatctacaactcgagcgcgtgaacgtgtactacaacgaagcttcctgcgggcg

SEQ ID NO: 103189 - DNA, 207 bp, Glycine max
aaatagcaagcctcaagctactgcaatgcatgtgggagctatagaaattatcattgatagtttcgcaagtcctgactgcaacatagttggtgcaatgcttttggttgatacctatcataccaatcctgaaaatgcagttcgtagtatttttgttgcgcctttcagaggcggaaggcccattcgggtggatacatttccgaataccat

SEQ ID NO: 103190 - DNA, 235 bp, Glycine max
tgaggccaggcaagccccactcaaccaccacaacactcctcgttcacgctacccctttcttatcttcttctacctttcaagttttaaaagtataaagatggcagagacattcctatttacctcagagtcggtgaagatggacaccctgacaagctctgcgaccaaatctccgatgctgtcctcgacgcttgcctcgagcaggacccagacagcaaagttgcttggaaacatgcac

SEQ ID NO: 103191 - DNA, 97 bp, Glycine max
tatgctatggtgcatgatagttcagtgtctacaataccaggtgattttgtcattggtgttaagttgacaaccataaacaatatgtgtgcatatgggc

SEQ ID NO: 103192 - DNA, 141 bp, Glycine max
cttagttcaatatggggaagcccttcactctctctctttcttcactttgcttgctactcttgtcgagtgcatgctttgctattagctccagcaagctcaacgagtgccaactcaacaacctcaacgcgttggaaccgacca

SEQ ID NO: 103193 - DNA, 233 bp, Glycine max
tcaatatcctagtacaccgtattaaagaatttaagatatactatgatgagagctcggttcccattactgttgctgggagttgttttcctggcatcagtttctgtctcatttggcattgcgtattgggaaaagcgaaccccagtcacaacaagtgcctccgaagttgcaatagcgagaaagactcctacaggaaccaagcatgccacgctcgttgcaactcctaaggtggagga

SEQ ID NO: 103194 - DNA, 236 bp, Glycine max
ggcacccagagaccatgcaacaacagcagcagcagaagagtcatggtggacgcaagcaggggcaacaccagcagcaggaggaagaaggtggcagtgtgctcagtggcttcagcaaacatttcttagcacaatcctcaacaccaacgaggacacagctgagaaacttcggtctccagatgacgaaaggaagcagatcgtgacagtggagggaggcctcagcgtatcagccccaagtg

SEQ ID NO: 103195 - DNA, 235 bp, Glycine max
tacgacaccaaattcgaggagataaacaaggttctgtttggtagagaggaggggcagcaacaaggggaggagaggctgcaagagagtgtgattgtggaaatctcaaagaaacaaattcgggaactgagcaaacatgccaaatctagttcaaggaaaaccatttcttctgaagataaacctttcaacttgagaagccgcgaccccatctattccaacaagcttggcaagttgtttg

SEQ ID NO: 103196 - DNA, 151 bp, Glycine max
gtaatcacgcgtgaaacgaacgattcgggtgccggcgataagctcaaagatcgcagatatcccaccggacgagtattcgtggagaaaatacggtcaaaaaccgatcaagggctcaccttaccctcggtattattctattccttcttctatc

SEQ ID NO: 103197 - DNA, 236 bp, Glycine max
ttaacactcatcagtcatcaccatggccaagctagttttttccctttgttttctgcttttcagtggctgctgcttcgctttcagttccagagagcagcctcagcaaaacgagtgccagatccaaaaactcaatgccctcaaaccggataaccgtatagagtcagaaggagggctcattgagacatggaaccctaacaacaagccattccagtgtgccggtgttgcctctctcgctg

SEQ ID NO: 103198 - DNA, 95 bp, Glycine max
ctccattgtctttgaacactcatcaccatggccaagcttgttctgtccctttgtttccttcttttcagtggctgcttcgctctgagagagcaggc

SEQ ID NO: 103199 - DNA, 233 bp, Glycine max
ccgagcccatcagggtcttgctcgtgtgtgctatatcaaggcccttaaaatccaacacacccgagcccatcagggtcttgctcgtgttcattttctaaaaaatgataaggctgccgcttacaaggaaatgaccaccttattgggaaggcaagaaacaatgcatcagcatatgagaagaggtctgagtatggtgatcgtgaaatcacaaaggcagatctggagtggtgactaga

SEQ ID NO: 103200 - DNA, 234 bp, Glycine max
cttcttcttttgcggctagggttttagcgcacttcttctagatttaaggaagatgggtaaggaaaaggttcacatcagtattgtggttattggccatgttgactctgggaagtccactaccactggccacctgtctacaagtctggaggcattgacaagcgtgttattgagagatttgagtaagaagctgctgagatgaacaagaggtctttctaatatgctgggtgcttgata

SEQ ID NO: 103201 - DNA, 231 bp, Glycine max
gtggaattttagtggacaatcctggagattggatcacacttatacaaaattctccaattagtaacttgttgagagttgctgcttggaagaaaggctgtttaatggttaagattgtgatgtctgggaatgcagcgtcaaaaggagtgattgggcctcattggtacaagtgtttttaacaaacagcaacagtacagagcattttgatgcatgtaagtggacaatcggaaccac

SEQ ID NO: 103202 - DNA, 231 bp, Glycine max
gctgttgttgttgctgcaccaccgaacaacttcccctgtaaatcgcgtttcgtttgtgcaaggttttaaaagatggctgatgctgaggacattcaacctcttgttgttgataatggaactggaatggtcaaggtggttttgcaggtgatgatgctcctagggccgtgttccccagcattattgggagaccacgccatactggtgtaatggttgggatgggtcaaaggatgc

SEQ ID NO: 103203 - DNA, 236 bp, Glycine max
ataaaattcttccaccaagttatgggtatacttgtgttgcttcttttctccctcttaggtctctcttctagttccagcatatcaactcatcgttccatattggaccttgacctaaccaagtttaccacacagaaacaggtgtcttcactgttccaactatggaagagtgagcatggacgtgtctaccataaccacgaagaagaggcaaagagacttgagattttcagaataacttg

SEQ ID NO: 103204 - DNA, 240 bp, Glycine max
gtttggagagttgaatgtggaatcccttctggatttccgctcacagttatttgcaatagcatttttaatgagatgctcattagatatagctatgaaaaattactgcgccaggctagagctccaagcatgtttttacatccttcaaaaattttgtttctttgtgtgtgtatggtgatgataacttaattagtgttcatgaatatgtcaagccttactttagtggttctaaattgaaaagct

SEQ ID NO: 103205 - DNA, 232 bp, Glycine max
cacgagtacaagcgagagcttgatattattataaatgctagctgcacaactaactgccttgccccacttgccaaggttatcaatgacaggtttggcattgttgagggtttgatgaccactgttcattccataccgctacccagtagactgttgatggaccatcagccaaggactggagaggtggaagagctgcttcatttaacatcattcctagcagcactggagctgccaa

SEQ ID NO: 103206 - DNA, 229 bp, Glycine max
atcaatatggggaagcccttcactctctctctttcttccctttgcttgctactcttgtcgagtgcatgctttgctattagctccagcaagctcaacgagtgccaactcaacaacctcaacgcgttggaaccgaccaccgcgttgagtccgaaggtggtttgattcaaacatggaactctcaacaacctgagctgaaatgcgccggtgtcactgtttccaactcaccctc

SEQ ID NO: 103207 - DNA, 234 bp, Glycine max
aacttattaacactttccttagttcaatatggggaagcccttcttcactctctctctttcttccctttgcttgctactcttgtcgagtgcatgctttgctattacctccagcaagttcaacgagtgccaactcaacaacctcaacgcgttggaacccgaccaccgcgttgagtccgaaggtggtcttattgaaacatggaactctcaacaccctgagctgcaatgcgccggtgt

SEQ ID NO: 103208 - DNA, 228 bp, Glycine max
tgtcgagccgattcggctcgagtttgtttctggggatggtgaagagttgacattgattccgggaaccagtgttgaagaggcgtacaacaagctaatagttgaacttgagaaaagtgttcctacattggttggcattgaatgtcccaaggatgagaaacttcctcgtcgcaaaatttttgacaaacctaagacgcgctgcttcactattctccctatggagttaatctt

SEQ ID NO: 103209 - DNA, 157 bp, Glycine max
agccgcagcacgaggagcagcctcaggaggagaaggatgtctcacaggaagttcgagcacccaaggcacggttcactgggatttcttcccaggaagcgtgctgctcgtcacaggggaaaagtgaaggcattcccaaggatgacccatccaaggcacc

SEQ ID NO: 103210 - DNA, 156 bp, Glycine max
attgtctttgaacactcatcaccatggccaagcttgttctttccctttgtttccttcttttcagtggctgcttcgctctgagagagcaggcacagcaaaatgagtgccagatccagaagctgaatgccctcaaccggataaccgtatagagtcgga

SEQ ID NO: 103211 - DNA, 235 bp, Glycine max
aacctacctctttttcttctctctcaacaacttcagcttcttcctcctcgatcatgtctcacttcaagggcaagtaccatgatgagcttatcgccaatgctgcgtacattggcactcctggaaagggtattcttgctgctgatgagtcaacagggacaattggcaagcgtttggccagcatcagtgtagagaacattgaatccaacaggcgagctcttagggactgcttttcact

SEQ ID NO: 103212 - DNA, 233 bp, Glycine max
atggtatttcaggttctcgtcttttgggcaccattcctcagtccatttcacagcaaactgtttggaatcaaatggcaacagtgagaacaccattgaattttgattctagcaagcagagcttttgtcaattttctattgaccttctcggtggaggaattttagtggacaaaactggagattggatcacacttatacaaaattctccaattagtaacttgttgaagttgctgctt

SEQ ID NO: 103213 - DNA, 231 bp, Glycine max
attaagaaaagccatttccatagcagcctaagaaaatgaagagcactagcttgttcgctatctttctactttgcgccttcacctcatacctaccttccgccaccgcccaggacgtgctcgacgtggatggcgtccgattcggaacggtttcatatactacgttttgccggcaataagaggaaacggtggcggaatagaacgagccgcactcgggaaaaacattgccctatc

SEQ ID NO: 103214 - DNA, 232 bp, Glycine max
ataaaattcttccaccaagttatgggtacacttgtgttgcttcttttctccctcttaggtctctcttctagttccagcatatcaactcatcgttccatattggaccttgacctaaccaagtttaccacacaaaacaggtgtccttcactgttccaactatggaagagtgagcatggacgtgtctaccataaccacgaagaagaggcaaagagacttgagatttcaagaataa

SEQ ID NO: 103215 - DNA, 231 bp, Glycine max
attaagaaaagccatttccatagcagcctaagaaaatgaagagcactagcttgttcgctatctttctactttgcgccttcacctcatacctaccttccgccaccgcccaggacgtgctcgacgtggatggcgtccgattcggaacggtttcatatactacgttttgccggcaataagaggaaacggtggcggaatagaacgagccgcactcgggaaagaccttgccctatc

SEQ ID NO: 103216 - DNA, 236 bp, Glycine max
cttccatagccccccaaaaatgaagagcaccatcttctttgctctactttctcttttgtgccttcaccacctcatacctaccttcagccatcgctgatttcgtgctcgataatgaaggtaaccctcttgaaaatggtggcacatattatatcttgtcagacataacagcatttggtggaataagagcagccccaacgggaaatgaaagatgccctctcactgggtgcaatctcgca

SEQ ID NO: 103217 - DNA, 229 bp, Glycine max
acgagaacaaaaaaaaaaacgtgattcgctcttctcttcgaataaaccacaaaaccaacaaacgagaagaggagtgagagaagatggggttgtcgttcacgaagctgttcagcaggttgtttgcgaagaggaaatgaggattctgatggtaggtctcgatgctgctggtaagacaaccatcttgtacaagctcaagcttggagaaatcgtcaccacctccccaccatcg

SEQ ID NO: 103218 - DNA, 231 bp, Glycine max
ccattgtctttgaacactcatcaccatggccaagcttgttctttccctttgtttcacttcttttcagtggctgcttcgctctgagagagcaggcacagcaaaatgagtgccagatccaaaagctgaatgccctcaaaccggataaccgtatagagtcggaaggtgggttcattgagacctggaaccctaacaacaagccattccagtgtgccggtgttgcctctctcgctg

SEQ ID NO: 103219 - DNA, 230 bp, Glycine max
ataaattcgaggagataaacaaggttctgtttagtagagaggaagggcagcagcaaggggagcagaggctgcaagagagcgtgattgtggaaatctcgaaggaacagattcgggcactgagcaaacgtgccaaatctagttcaaggaaaaccatttcttctgaagataaaccttttaacttgagaagccgcgaccccatctactccaacaagcttggcaattctttgaga

SEQ ID NO: 103220 - DNA, 229 bp, Glycine max
gttcacacttatacaaaattctccaattagtaacttgttgagagttgctgcttggaagaaaggctgtttaatggttaagattgtgatgtctgggaatgcagcagtcaaaaggagtgattgggcctcattggtacaagtgtttttaacaaacagcaacagtacagagcattttgatgcatgtaagtggacaaaatcggaaccacattcctgggaattgacttcccaataa

SEQ ID NO: 103221 - DNA, 229 bp, Glycine max
gtgcacatggggaaaagcaaagaaggttgttcaggcacagaatctctctggtttgaaattttgaagtcccagatagaaactggaactccttacatattttttaaggacacttgcaataggaaaagcaacaacagaatttgggcacaatcaagtcatgaaacttgtgcactgagataattgagtatacaagtccaacagaaacggctgtgtgcaacttgatcaattgctc

SEQ ID NO: 103222 - DNA, 134 bp, Glycine max
cagagttcattctgtcattgataagtttgcagagcgaggattacggtctcttgcagtagcttaccaggaagttcctgatggaaagaaagaaagccaaggtgggccttggcaatttattggactcttgcctctat

SEQ ID NO: 103223 - DNA, 233 bp, Glycine max
ccgagaacaaaaaaaaaaacgtgattcgctcttctcttcgaataaaccacaaaaccaacaaacgagaagaggagtgagagaagatggggttgtcgttcacgaagctgttcagcaggttgtttgcgaagaaggaaatgaggattctgatggtaggtctcgatgctgctggtaagacaaccatcttgtacaagctcaagcttggagaaatcgtcaccaccatccccaccatcgga

SEQ ID NO: 103224 - DNA, 230 bp, Glycine max
gtttgttgtgagctatatgctagtttatcgtgaggagaatatgaagttgtttgttttctttgttgctgcagtagatttggtagcatggccatgccatggcgcaggctaccaaaggttccctctccgaatgttaatggctatggtgagcgttcttcggaggtaaaatgcgcaagttttaggcttgctgtggaagcacacaacatccgagcctttaaaaaattcctgaagag

SEQ ID NO: 103225 - DNA, 231 bp, Glycine max
ctcgtcttttgggtaccattcctcagtctatttcacagcaaactgtttggaatcaaatggcaacagtgagaacaccattgaattttgattctagcaagcagagcttttgtcaattttctattgaccttctcggtggaggaattttagtggacaaaactggagattggatcacacttatacaaaattctccaattagtaacttgttgagagttgctgcttgaagaaaggctg

SEQ ID NO: 103226 - DNA, 216 bp, Glycine max
atatcctagtacaccgtattaaagaatttaagatatactatgatgagagcgcggttcccattactgttgctgggagttgttttcctggcatcagtttctgtctcatttggcattgcgtattgggaaaagagaaccccagtcacaacaagtgcctccgaagttgcaatagcgagaaagactcctacaggaaccaagcatgccacgctcgttgcaact

SEQ ID NO: 103227 - DNA, 230 bp, Glycine max
agttgcagaccgagctagctagctagcaagcaagcacagagatggaggcaaagcgaggccatgccctcatgtgcttggcacgtgtttcactcttcctctgcgctctaaccctatccgctgctcacggaagcaccacggttcaagacatcgcgagaaagttgaaactcggggacaacgagcttctgcgcacggagaagaagttcaaggttttcatggagaatacgggagga

SEQ ID NO: 103228 - DNA, 232 bp, Glycine max
tcctagtataccttaataaataatttaagatactatgatgagagcacggttcccattactgttgctgggacttgttttcctggcttcagtttctgtctcatttggcattgcttactgggaaaaagagaacccaaacacaacaagtgtctccagagttgcaatagcgagagagactcgtacaggaaccaagcatgccacgctcgttgcaacctccttaaggtggagaaagaag

SEQ ID NO: 103229 - DNA, 232 bp, Glycine max
atggattcttcaaatcaaatggcacgtatgtcactgagaaagggaagttcttcttgacctggtattctaacaaattgctgaatcatggtgatcaaatactagatgaagccaacaaagctttcctgggctgtaagtcaaattagcaatcaaagtatctggaattcactggtggtacaaagttgaaaatcatgctgcagagcttactgctggatattacaacctaatgatagag

SEQ ID NO: 103230 - DNA, 254 bp, Glycine max
cttaattattaacacttccttagttcaatatggggaagcccttcactctctctctttcttccctttgcttgctactcttgtcgagtgcatgctttgctattagctccagcaagctcaacgagtgccaactcaacaacctcaacgcgttggaacccgaccaccgcgttgagtccgaaggtggtttgattcaaacatggaactctcaacaccctgagctgaaatgcgccggtgtcactgtttccaaactcaccctc

SEQ ID NO: 103231 - DNA, 259 bp, Glycine max
catctttctccgccaccctagtccaagactcgttaagattagccactgatgttatccccaactactccttcggctgcgtcaacgccatcaccggcgcctctgtcccggcccaagggcttttgggcctgggccgtggcccgctgtccttgctctcccaatccgggtcaaattactcgggcatcttctcttactgtctccccagcttcaagtcctactacttctctgggtcgctcaagctcgggcccgtgggccagcccaa

SEQ ID NO: 103232 - DNA, 259 bp, Glycine max
gcaaggtttccgatcgagggtctatcattggtcttgaatgcattgccagaggaagtgattcagcacacttttaacctaaagagccagcaggccaggcaggtgaagaacaacaaccctttcagcttcctggttccacctcaggagtctcagaggagagctgtggcttagagagccctttttgcatgtgctaccacacttttgtccttttgggctctagctagtgctggtagcagtaaataagaatgaataaaagaaacaa

SEQ ID NO: 103233 - DNA, 257 bp, Glycine max
cgatgccggcgcaccttatgtacgatggggatgaccccaggctattcgagcactactccgctgtggcgcacgcataggcgtgtacaccgccaacgactacgcagacatcttggagtttctcgttgaacggtggagattggagaagcttgaaggattgatggctgaggggaagcgggcgcaggatttcgtgtgtgggttggcgccgaggattaggaggttgcaagagcgcgctgatgagcgagcgcgtaagatgaaga

SEQ ID NO: 103234 - DNA, 259 bp, Glycine max
aaaacaatcacgtttgacaacagctgtgattacttttcgactggtaaagtgaaagctatgacactgtctctttctgtgttggtagccattgaaatgttcaactctctcaatgccctgtctgaggatggaagccttttgacaatgcccccttgggtcaacccttggcttcttttggcaatgtcagtgtcatttggtctgcactttttgatcttgtacgtgccattcttagcacaagtatttggtattgtgcccctgagct

SEQ ID NO: 103235 - DNA, 258 bp, Glycine max
aattgtgatgtctgggaatgcagcagtcaaaaggagtgattgggcctcattggtacaagtgtttttaacaaacagcaacagtacagagcattttgatgcatgtaagtggacaaaatcagaaccacattcctgggaattaatcttcccaatagaggtatgtggtcctaataatggttttgaaatgtggagttctgagtgggcaaatcaaacttcatggcatttgagtttccttattgacaatcccaaacagtctacagt

SEQ ID NO: 103236 - DNA, 259 bp, Glycine max
agagggtcttctcagaagaaaatgggaagagggaagattgaaatcaaacggatcgagaacaccaccaataggcaagtcaccttctgcaagcgccgcaacggtttgctgaagaaagcttatgaattatcagttctgtgtgatgcggaagttgcccttgttgtcttctcaacccgtggccgtttgtatgagtatgccaacaacagtgttagggccaccattgaaaggtacaagaaggcaaatgctgctgcttcaaacgcag

SEQ ID NO: 103237 - DNA, 257 bp, Glycine max
ggtttagcgcacttcttctagatttaaggaagatgggtaaggaaaaggttcacatcagtattgtggtcattggccatgtcgactctgggaaatccactaccactggtcacctgatttacaagcttggaggcattgacaagcgtgttattgagaggtttgagaaggaagctgctgagatgaacaagaggtctttcaagtatgcctgggtgctggacaaacttaaggctgagcgtgaaagaggaatcaccattgatatt

SEQ ID NO: 103238 - DNA, 257 bp, Glycine max
aacttattaacactttccttagttcaatatggggaagcccttcttcactctctctctttcttccctttgcttgctgctcttgtcgagtgcatgctttgctattacctccagcaagttcaacgagtgccaactcaacaacctcaacgcgttggaacccgaccaccgcgttgagtccgaaggtggtcttattgaaacatggaactctcaacaccctgagctgcaatgcgccggtgtcactgtttccaaacgcaccctca

SEQ ID NO: 103239 - DNA, 263 bp, Glycine max
caagaaggatattagtggaaatgccagagcattgaggaggttgagaacagcatgtgagaaggccaagaggactctctcttccactgctcaaaccacctttgagattgattccttgtatgagggtattgacttctacacaaccatcacctctgcccgtttcgaagagcttaacatggacctattcaggaagtgcatggagcccgtggagaagtgtttgcgggatgctaagatggacaagagcaccgtccatgatgttgttcttg

SEQ ID NO: 103240 - DNA, 258 bp, Glycine max
gtggtcttgttcaacacaaagaaccacgcttctaggcttcttgtgagggcttcagacgagcctgcagcggcggcacccgcaaccaccacccctccagctgaagctgaagcaaagccaaaaccaccacctattggccccaagagaggtgctaaggtgaagattcttaggaaggaatcctactggtacaaaggcactggttcagtggttgctgttgatcaggaccccaacactcgctaccctgttgtggttcgattcaac

SEQ ID NO: 103241 - DNA, 243 bp, Glycine max
ggctcgagacaaattctggactacacacgatataaattttgctttaccagaagaggaaaagatggaactgattagaagtataggcattcctgctgatgttcttgcgaagcgagctcatgaatttgaaaaacatgttgctcatgaaagcctcaaggatcaaattcctgctgttgacaagttgtattctactaaggttaataagtttgcaaaaattatgaaccttagacaaagtgttgttggtga

SEQ ID NO: 103242 - DNA, 258 bp, Glycine max
aaccttcaaatatgatataattggtgctggttcacattcttcaggagattttcctgaaaaggaagatcaagaaaaacccaaaaagattgataccagattgagacaaagaatagatcctcaatacaatgaggttcaggctcagatggaaacaaatttgtttaaattgtctcttgatgatgttgaaactcctaaaggttctatgttggatcttaaaatttctcaatctaaaattgcacttcccaagaacacagttggagg

SEQ ID NO: 103243 - DNA, 258 bp, Glycine max
attgtctttgaacactcatcaccatggccaagcttgttctttccctttgtttccttcttttcagtggctgcttcgctctgagagagcaggcacagcaaaatgagtgccagatccaaaagctgaatgccctcaaaccggataaccgtatagagtcggaaggtgggttcattgagacctggaaccctaacaacaagccattccagtgtgccggtgttgccctctctcgctgcacccttaaccgcaatgcccttcgtagac

SEQ ID NO: 103244 - DNA, 256 bp, Glycine max
gtaatcgaaggaggatttgaaggaagtgacccacaaggtttactttgatgttgagattaatggaaaagaagcaggtcgtattgtgatgggtctttttggaaaggctgttccaaaaactgcagaaaactttcgagctctttgcactggggaaaagggaactggtaaaagtggcaagcctctccattacaaaggtagctcattccatagaattattcctagctttatgctccaaggaggtgattttacacatggcaat

SEQ ID NO: 103245 - DNA, 258 bp, Glycine max
gcgaagacaatgaggaaccctcgtagtgctctctgcaaaactgctattatggctgctgctgatattttcaacgcctttggtgacaagttgcatgacccagaaatctccgatgcatttgatggcttgctgctacagctgctgctgaaggcatcccaagacaaaaggtttgtgtgtgaagaagctgacagggcacttggcttaatggttggttccatgacccctcttccactgcttcagaaaatgagggtatatgggagt

SEQ ID NO: 103246 - DNA, 256 bp, Glycine max
gttcaatatcctagtataccttaataaataatttaagatactatgatgagagcacggttcccattactgttgctgggacttgttttcctggcttcagtttctgtctcatttggcattgcttactgggaaaaagagaaccccaaacacaacaagtgtcttcagagttgcaatagcgagagagactcgtacaggaaccaagcatgccacgctcgttgcaacctccttaaggtggagaaagaagaatgtgaagaaggtg

SEQ ID NO: 103247 - DNA, 259 bp, Glycine max
gcaggaatacctctatttcttgcaaatcgagctcatgaatttgaaaaacatgttgctcatgaaagcctcaaggatcaaattcctgctgttgacaagttgtattctactaaggttaataagtttgcaaaaattatgaaccttagacaaagtgttgttggtgatcttaaacttcttactgatgagtagttgtatgagggtaagcatattcctgtatctaatattagtgcaggggaaaatcatgtagttcaaatacccctaa

SEQ ID NO: 103248 - DNA, 257 bp, Glycine max
gcaagagatattaagcaaaggcttgcagacacagattcaagagctgagcctcagactatcaagattaaccaacctgaccaggcaaccagtggtggtcaacctgcgcaaaagtcggcttgctgtggttcatgaaaagaatcagtatctgtagaaagaggtgcacaggtttctgcaatagcactcatctgggtgctaatgttattctgatgacattataagtgggagcatgtatttgtccctctgtatctcccaactgc

SEQ ID NO: 103249 - DNA, 244 bp, Glycine max
  unsure (1)..(244): unsure at all n locations
tcgagngataagaagaagaagaagatgtcgtacctgttgcctcacttgcactctggatgggccgtcgatcaagcaatcctcgccgaagaggagcgtctcgtcgtcatccgtttcggccacgactgggacgaaacctgcatgcagatggacgaggtgttggcgtcagtggcggagacgataaagaactttgcggtgatatacctggtggacataacggaggtgccggatttcaacaccatgtacg

SEQ ID NO: 103250 - DNA, 251 bp, Glycine max
ctagtataccttaataaataatttaagatactatgatgagagcacggttcccattactgttgctgggacttgttttcctggcttcagtttctgtctcatttggcattgcttactgggaaaaagagaaccccaaacacaacaagtgtctccagagttgcaatagcgagagagactcgtacaggaaccaagcatgccacgctcgttgcaacctccttaaggtggagaaagaagaatgtgaagaaggtgaaatt

SEQ ID NO: 103251 - DNA, 254 bp, Glycine max
tacgacactaaattcgaggagataaacaaggttctgtttggtagagaggaggggcagcaacaaggggaggagaggctgcaagagagtgtgattgtggaaatctcaaagaaacaaattcgggaactgagcaaacatgccaaatctagttcaagcaaaaccatttcttctgaagataaacctttcaacttgagaagccgcgaccccatctattccaacaagcttggcaagttgtttgagattaccccagagaaaaa

SEQ ID NO: 103252 - DNA, 256 bp, Glycine max
gaaagatttgttggagggaaatttttccttcgatattaaatctcgctctagattggaaaaagtttcctctacaaaagcacaatttgttagtggaaaaaccttcaaatatgatataattggtgctggttcacattcttcagaagattttcctgaaaaggaagatcaagaaaaacccaaaaagattgatgccagattgagacaaagaatagatcctcaatacaatgaggttcaggctcagatggaaacaaatttgttt

SEQ ID NO: 103253 - DNA, 255 bp, Glycine max
ctcgagccgattgtctttgaacactcatcaccatggccaagcttgttctttccctttgttaccttcttttcagtggctgcttcgctctgagagagcaggcacagcaaaatgagtgccagatccaaaagctgaatgccctcaaaccggataaccgtatagagtcggaaggtgggttcattgagacctggaaccctaacaacaagccattccagtgtgccggtgttgacctctctcgctgcacccttaaccgcaatg

SEQ ID NO: 103254 - DNA, 254 bp, Glycine max
cttacatgatggatgaccctctaactgaaggaccaagtccaacttcaaagcttgtgggaagatctcagggaatatacgctttggcttcacaacatgagcctgggttgctcatggtgacaaattttctcttcactttgggcatttacaatggcagcaccctcagcattcttggcagaaaccctacatttataaaagttagtgaaatgccaattgttgggggtactgggatcttcaaatatgcaaggggttctgct

SEQ ID NO: 103255 - DNA, 110 bp, Glycine max
cacaggttgccgcaccttaaaaccggaaacaaaagcaatcgttacttgatttcaagaatttctcaatttcttcctacttctttgtgtacgatttcttaagggaaagaaaa

SEQ ID NO: 103256 - DNA, 254 bp, Glycine max
ctcgagccgagttgcaattccaggatgtcctgagacgtttgaggagccacaagaacaatcacacagaagaggctcaaggtcgcagaagcagcagctacaggacagtcaccagaagattcgtcacttcaatgaaggagacgtactcgtgattcctcctggtgttccttactggacctataacactggcgatgaaccagttgttgccatcagtcttcttgacacctctaacttcaataaccagcgtgatcaaaccc

SEQ ID NO: 103257 - DNA, 263 bp, Glycine max
tctatggcctttgaattgaagtgtggcagaaaaagagctgaattgtctgaacaagatatatttgtaatcccagcaggttatccagttgtggtcaacgctacctcagatctgaatttctttgcttttggtatcaatgccgagaacaaccagaggaacttccttgcaggttcgaaagacaatgtgataagccagatacctagtcaagtgcaggagcttgcgttccctgggtctgcaaaagatattgagaacctaataaagagcca

SEQ ID NO: 103258 - DNA, 257 bp, Glycine max
catctttctccgccaccctagtccaagactcgttaagattagccactgatgttatccccaactactccttcggctgcgtcaacgccatcaccggcgcctctgtcccggcccaagggcttttgggcctgggccgtggcccgctgtccttgctctcccaatccgggtcaaattactcgggcatcttctcttactgtctccccagcttcaagtcctactacttctctgggtcgctcaagctcgggcccgtgggccagccc

SEQ ID NO: 103259 - DNA, 254 bp, Glycine max
tcgaggaggaagaagaagaagaagatgtcgtacctgttgcctcacttgcactctggatgggccgtcgatcaagcaatcctcgccgaagaggagcgtctcgtcgtcatccgtttcggccacgactgggacgaaacctgcatgcagatggacgaggtgttggcgtcagtggcggagacgataaagaactttgcggtgatatacctggtggacataacggaggtgccggatttcaacaccatgtacgagctctacga

SEQ ID NO: 103260 - DNA, 253 bp, Glycine max
tgtctttgaacactcatcaccatggccaagcttgttctttccctttgtttccttcttttcagtggctgcttcgctctgagagagcaggcacagcaaaatgagtgccagatccaaaagctgaatgccctcaaaccggataaccgtatagagtcggaaggtgggttcattgagacctggaaccctaacaacaagccattccagtgtgccggtgttgccctctctcgctgcacccttaaccgcaatgcccttcgta

SEQ ID NO: 103261 - DNA, 254 bp, Glycine max
caatatcctagtacaccgtattaaagaatttaagatatactatgatgagagcgcggttcccattactgttgctgggagttgttttcctggcatcagtttctgtctcatttggcattgcgtattgggaaaagcagaaccccagtcacaacaagtgcctccgaagttgcaatagcgagaaagactcctacaggaaccaagcatgccacgctcgttgcaacctccttaaggtggaggaataagaagaatgcgaagaa

SEQ ID NO: 103262 - DNA, 241 bp, Glycine max
  unsure (1)..(241): unsure at all n locations
ctcangtgcgtccgcaacgactctgttggctgatgggtgccatatttgtatgctatggtgcatgatagttcagtgtctacaataccaggtgattttgtcattggtgttaagttgacaaccataaacaatatgtgtgcatatgggctcaatcctggtatttcaggttctcgtcttttgggcaccattcctcagtccatttcacagcaaactgtttggaatcaaatggcaacagtgagaacac

SEQ ID NO: 103263 - DNA, 255 bp, Glycine max
gcaatgcgtcggtgtcactgtttccaaacgcaccctcaatcatcacggcctccacttgccatcttactcaccttatccccaaatgatcattgtcgttcaagggaagggagcaattggatttgcatttccgggatgtcctgagacgtttgagaagccacaacagcaatcaagcagaagaggctcaaggtcgcaggagcaactacaagacagtcaccagaagattcgtcacttcaatgaaggagacgtactagtgat

SEQ ID NO: 103264 - DNA, 253 bp, Glycine max
attacatgagacagagaaagggttgacggacagagaacccaccttttgttgtattgcagatccatccgctctgccaccaggtgaatggaaggaagtggcggtggcggtgcttcaccgtctgcaccggtgaagcagtatttgcacgatttctcgaagctgtttcagtactatctggataaatccactccacattccacgtacagatggattgggactttcgtgatagcatccatctacgttttgcgcgttgttt

SEQ ID NO: 103265 - DNA, 258 bp, Glycine max
atcgagccgctcgagccgcattggtccttaaacactcatcagtcatcaccatggccaagctacgttttttcagctttgttttctgcttttcagtggctgctgcttcgctttcagttccagagagcagcctcagcaaaacgagtgccagatccaaaaactcaatgccctcaaaccggataaccgtatagagtcagaaggagggctcattgagacatggaaccctaacaacaagccattccagtgtgccggtgttgccct

SEQ ID NO: 103266 - DNA, 255 bp, Glycine max
ttctctccattggtccttaaacactcatcagtcatcaccatggccaagctagttttttccctttgtttcctgcttttcagtggctgctgcttcgctttcagttccagagagcagcctcagcaaaacgagtgccagatccaaaaactcaatgccctcaaaccggataaccgtatagagtcagaaggagggctcattgagacatggaaccctaacaaccagccattccagtgtgccggtgttgccctctctcgctgc

SEQ ID NO: 103267 - DNA, 262 bp, Glycine max
aggagctcttcttctaccacactttaattcaaaggcgatagtgatactggtaattaatgaaggagatgcaaacattgaacttgttggcctaaaagaacaacaacaggagcagcaacaggaagagcaacctttggaagtgcggaaatatagagccgaattgtctgaacaagatatatttgtaatcccagcaggttatccagttgtggtcaacgctacctcaaatctgaatttctttgctattggtattaatgccgagaacaac

SEQ ID NO: 103268 - DNA, 257 bp, Glycine max
attctctccattggtccttaaacactcatcagtcatcaccatggccaagctagttttttccctttgttttctgcttttcagtggctgctgcttcgctttcagttccagagagcagcctcagcaaaacgagtgccagatccaataactcaatgccctcaaaccggataaccgtatagagtcagaaggagggctcattgagacatggaaccctaacaacaagccattccagtgtgccggtgttgccctctctcgctgca

SEQ ID NO: 103269 - DNA, 251 bp, Glycine max
cgcaacacactttcactgagaaaggatctctatctaccaaggagcagaataaaacccttctctctggtaagtgaataagagaatggcttcagatcggaaacttcacactttcgaggaggtggcaaagcacgaccagaccaaggattgctggctcatcatttctggcaaggtgtatgatgtcacccctttcatggaggatcatcccggaggtgatgaggttttgttatctgcaacagggaaagatgcaacca

SEQ ID NO: 103270 - DNA, 250 bp, Glycine max
ctccattactgatggtattgacaaaactagtgcaactttgcaatttagaaagttagcagattgtgattttctcaagagatactttaagcagatgtctaatgttttatgggtggctcctgaggacaaggcgagtttatggtcacaacttcattatgtttcgtgcaataatctggaaatgcaagaagcttatcttgtcaatctcgtaaatgtgttacgagaattgtatttgcacagtccagaggaagctcgc

SEQ ID NO: 103271 - DNA, 252 bp, Glycine max
atcctagtacaccgtattaaagaatttaagatatactatgatgagagcgcggttcccattactgttgctgggagttgttttcctggcatcagtttctgtctcatttggcattgcgtattgggaaaagcagaaccccagtcacaacaagtgcctccgaagttgcaatagcgagaaagactcctacaggaaccaagcatgccacgctcgttgcaacctccttaaggtggaggaagaagaagaatgcgaagaagg

SEQ ID NO: 103272 - DNA, 253 bp, Glycine max
gtgaaccccaaacacaacaagtgtctccagagttgcaatagcgagagctcctcgtacaggaaccaagcatgccacgctcgttgcaacctccttaaggtggagaaagaagaatgtgaagaaggtgaaattccacgaccacgaccacgcccacaacacccggagagggaacctcagcaacccggtgagaaggaggaagacgaagatgagcaaccacgtccaatcccattcccacgcccacaacctcgtcaagaag

SEQ ID NO: 103273 - DNA, 251 bp, Glycine max
aatggcttcaaccgacaagtcaccggacccaacgccggcgaagggtccggatccaactccggggaagccgatgagtgttggtcagcacgtgatcgacaagagtgcaatgatggtgcagtcgctggaccccattaagcagatgagtcagcacgtgtgctccttcgctatctacagccatgacatgtctcgccagatagagacacatcactactgctccagactccaccagaacttcatacaatgtgctgtct

SEQ ID NO: 103274 - DNA, 253 bp, Glycine max
tcgaggaggaagaaagaagagaagatgtcgtacctgttgcctcacttgcactctggatgggccgtcgatcaagcaatcctcgccgaagaggagcgtctcgtcgtcatccgtttcggccacgactgggacgaaacctgcatgcagatggacgaggtgttggcgtcagtggcggagacgataaagaactttgcggtgatatacctggtggacataacggaggtgccggaattcaacaccatgtacgagctctacg

SEQ ID NO: 103275 - DNA, 255 bp, Glycine max
tgtttgttgttctcactgacttcaccatggcgaccagagccaagctttctttagctatcttccttttctttcttttagccttgatttcaaacctagccttgggcaaacttaaagaaaccgaggtcgaagaagatcccgagctcgtaacatgcaaacaccagtgccaacagcaacggcaatacactgagagtgacaagcgaacatgcttgcaacaatgtgacagtatgaagcaagagcgagagaaacaagtcgaag

SEQ ID NO: 103276 - DNA, 253 bp, Glycine max
tcctagtataccttaataaataatttaagatactatgatgagagcacggttcccattactgttgctgggacttgttttcctggcttcagtttctgtctcatttggcattgcttactgggaaaaagagaaccccaaacacaacaagtgtctccagagttgcaatagcgagagagactcgtacaggaactaagcatgccacgctcgttgcaacctccttaaggtggagaaagaagaatgtgaagaaggtgaaatt

SEQ ID NO: 103277 - DNA, 248 bp, Glycine max
gttctgttctacttgctctcaagtttcatcttgggctgtaggctgtagcataccatgaccaccaaggatccaaaatccgtgtacgactttgttgtcaaggatgctaagggagatgatgtagatctctccttttacaagggaaaagtccttctgattgtcaatgttgcttctcaatgcggcttgaccaactccaattatacggagctgaatcaattgtatgacaagtataaagaccaaggcctggagat

SEQ ID NO: 103278 - DNA, 247 bp, Glycine max
ctcgagccgattgtctttgaacactcatcaccatggccaagcttgttctttccctttgtttcacttcttttcagtggctgcttcgctctgagagagcaggcacagcaaaatgagtgccagatccaaaagctgaatgccctcaaaccggataaccgtatagagtcggaaggtgggttcattgagacctggaaccctaacaacaagccattccagtgtgccggtgttgccctctctcgctgcaccctta

SEQ ID NO: 103279 - DNA, 249 bp, Glycine max
gatcttaatgctaaaagaaaagcagttataaaaaaaattgaaaaaattaaaaaggggcttgtaatttcagagacaaatattcattcaaacaaaacaacttatgatagtaaaagggtagaattcgaaaaaaaaaaattgcagatattacaaagaagaagaaatgctcgattaactcgtaaatcacattcttttttaaaatttttcatgaaaaggatatacagagatatatttctatatatcagttgtatt

SEQ ID NO: 103280 - DNA, 251 bp, Glycine max
atagcaaacgctgccgaattcgttatcgctttgcactagcagctttgaaacccggttcatccgaagccctacaccgaaccatgtcgaggagaaaggttagagagccaaaggaggaaaatgtgactctgggtccagctgttagagatggtgaacacgtttttggcgttgctcgcatctttgcctccttcaacgacaccttcatccatgtcactgatttgtctggcagggaaacccttgtccgaatcactggt

SEQ ID NO: 103281 - DNA, 252 bp, Glycine max
ggagaaagaagaatgtgaagaaggtgaaattccacgaccacgacgagacacacaacacccggagagggaacctcagcaacccggtgagaaggaggtagacgaagatgagcaaccacgtccaatcccattcccacgcccacaacctcgtcaagaagaagagcacgagcagagagaggaacaggaatggcctcgcaaggaggaaaaacgcggagaaaagggaagtgaagaggaagatgaggatgaggatgagga

SEQ ID NO: 103282 - DNA, 250 bp, Glycine max
atatagcaagcctcaagctactgcaatgcatgtgggagctatagaaattatcattgatagtttcgcaagtcctgactgcaacatagttggtgcaatgcttttggttgatacctatcataccaatcctgaaaatgcagttcgtagtatttttgttgcgcctttcagaggcggaaggcccattcgggtggttacatttccgaataccatcgtgctcgttgaaccagacatgaattcaaggtttcagcttttg

SEQ ID NO: 103283 - DNA, 250 bp, Glycine max
  unsure (1)..(250): unsure at all n locations
atctaacaacaagccattccagtgtgccggtgttganctctctcgctgcacccttaaccgcaatgcccttcgtagaccttcctacaccaacggtccctaggaaatctacatacaacaaggtaatggtatttttggcatgatattcccgggttgtcctagcacttatcaagagccgcaagaatctcagcaacgaggacgaagccagaggccccaagaccgtcaccaaaaggtacatcgcttcagagagggt

SEQ ID NO: 103284 - DNA, 257 bp, Glycine max; identical to SEQ ID NO: 103248

SEQ ID NO: 103285 - DNA, 156 bp, Glycine max
ctttttcttgttctttaattttctgattttagcaaattaaaaaagtagtgttattggtaggttttggcaaagatgttttcagttccaggggtgtcgggaatactgaacagaggaggagggcataagataaaagggacagtggtgtgatgaggaaga

SEQ ID NO: 103286 - DNA, 154 bp, Glycine max
tgccaacgccaaagcaaaaggagcagaaatggcattgatgagaccatttgcacaatgagacttcgccaaaacattggtcagaattcatcacctgacatctacaaccctcaagctggtagcatcacaaccgccaccagccttgattcccagccct

SEQ ID NO: 103287 - DNA, 250 bp, Glycine max
tggtgaacaggcccttaagtttcctcctcctaaagtaattcaagtgagtaagtctgcatggatgactgatgaagaatttgcaagagaaatgcttgctggtgtaaatccaaacttgatccgttgtcttaaggatttccctcaacgagcaagctagatagccaagtcctatggtgatcatactagtcaaataacccaaagaacacttagagcccaacttaagaggggctcactgtagatgaggcatttcaaa

SEQ ID NO: 103288 - DNA, 217 bp, Glycine max
accagaccagcagaggctgatcttcgccgggaagcagctcgaggacggacgcacccttgctgactacaacatccagaaggagtcaactctccacttggtgttgcgtcttcgtggtggtatgcagattttcgtgaagactctaaggtaaactctataaccctcgaggtggagactctgacaccattgacaatgtgaaggccaagtttcaggacaagga

SEQ ID NO: 103289 - DNA, 116 bp, Glycine max
caaaagaggtgctgttagcaatattgcacctttggcaattggactcattgttggggcaaacatccttgttggtggaccatttgatggagcatgcatgaaccctgctctggcttttg

SEQ ID NO: 103290 - DNA, 255 bp, Glycine max
gtctttgaacactcatcaccatggccaagcttgttctttccctttgtttccttcttttcagtggctgcttcgctctgagagagcaggcacagcaaaatgagtgccagatccaaaagctgaatgccctcaaacgggataaccgtataagtcggaaggtgggttcattgagacctggaaccctaacaacaagccattccagtgtgccggtgttgccctctctcgctgcacccttaaccgcaatgcccttcgtagacc

SEQ ID NO: 103291 - DNA, 85 bp, Glycine max
gatcgcagtgcctactggtgttgcatggtggatgtacaacaatgaagacactcctgttgttgccgtttctattattgacaccaac

SEQ ID NO: 103292 - DNA, 132 bp, Glycine max
ggtaaacggcgggagtaactatgactctcttaaggtagccaaatgcctcgtcatctaattagtgacgcgcatgaatggattaacgagattcccactgtccctgtctactatccagcgaaaccacagcgaagg

SEQ ID NO: 103293 - DNA, 175 bp, Glycine max
tttcaaagttgaaaacccagaatgtggttgtatctctctccctaaccttaaccttggtactggtgctactgaccagcaaggcaaactcagcggaaactgtttctttcagctggaacaagttcgtgccgaagcaaccaaacatatcctccaaggagacgctattgtgacctcctcg

SEQ ID NO: 103294 - DNA, 251 bp, Glycine max
acgtttcaggctccccgtgtcggaggccccgccggagataaggacccttttcgaccgttactccgatcagaatggcgtcatgacagccactcacctccgaagtttcctggctgaggcgaagagggaagacaatgccactgagaggaagcacaaaccatcatcgatggccacaagcatctcagtatcttcaacgaagaagtctcaatctcgagagtttcttcaactatcttttagtcaccataataacccac

SEQ ID NO: 103295 - DNA, 143 bp, Glycine max
gttccagttatgtaaaagatatccttccttgagcggcttaagaagaaaaattttgaggttattttcttcacggatccagttgatgagtacttgatgcaatacctgatggattatgaagacaagaagttccaaaatgtgtccag

SEQ ID NO: 103296 - DNA, 253 bp, Glycine max
atcagaccagcagaggctgatcttcgccgggaagcagctcgaggacggacgcacccttgctgactacaacatccagaaggagtcaactctccacttagtgttgcgtcttcgtggtggtatgcagattttcgtgaagactctacgggtaagactattaccctcgaggtggagagctctgacaccattgacaatgtgaaggccaagattcaggacaaggaaggcatcccacgggaccagcagaggctgatttttg

SEQ ID NO: 103297 - DNA, 152 bp, Glycine max
attttgataaaccgcgatcacaggttgccgcaccttaaaaccggaaacaaaagcaatcgttacttgatttcaagaatctctcaatttcttcctacttctttgtgtactatttcttaagggaaagaaaatcactcttctgtgctgccacagac

SEQ ID NO: 103298 - DNA, 116 bp, Glycine max
taatggaagggcagcagcaaggggagcagaggctgcaagagagcgtgattgtggaaatctcgaaggaacagattcgggcactgagcaaacgtgccaaatctagttcaaggaaaacc

SEQ ID NO: 103299 - DNA, 260 bp, Glycine max
atcaaagtttcttcctttctctgctctttgccttctctgacacatttggtgccttgtagagcgtgttttggcaggaaggtggtatggcgaaggacgttgaggttgctaaacgtggctccttctctgggatagactaccaggacctccaccagcaccactcattgatgctgaggagctcacaaagtggtccttttacagggctctcagtgctgaattcattgcgactttgctcttcctctaacatactgtgctcacagtca

SEQ ID NO: 103300 - DNA, 264 bp, Glycine max
aacacaacaaaaaaagacaacccagagagcgcgtcttaataaacgctcttctctgaaaacccccatttcttttcttctttcttcttctctttcgcttcttcgatcttcgatcttcgtcgctgaaaatgagagagtgcatttcaatccaatcggccaggccgggattcaggttggaaacgcctgctgggagctttactgcctcgaacacggcattcagcctgatgggcagatgccaagtgacaagaccgttggtggaggtgatga

SEQ ID NO: 103301 - DNA, 144 bp, Glycine max
tgaacatcaacgcacttgccaggcaatctctaattaatgctaatggcataatagagacaacctttttgccctcaaagtattctgtggagatgtcttcggcggtttataagaattgggttttcactgatcaagcactacctgcag

SEQ ID NO: 103302 - DNA, 136 bp, Glycine max
agaagataaggattttgagaccagagtcgaaactgaaggtggcagaattcgggctctcaagaagtgcactgaaaaatccaagcttcttcagggcattgagaacttccgtttggcgatttcgaaagctatagccccc

SEQ ID NO: 103303 - DNA, 131 bp, Glycine max
attgtatttgtcgatgaagttgacagtctgcttggagctcgaggtggtgcttttgagcatgaggccactagaagaatgaggaacgagttcatggcagcttgggatggattgaggtcaaaagaaaaccaaag

SEQ ID NO: 103304 - DNA, 221 bp, Glycine max
atgtggtcgatttgaagacttctcttcccgagtgggtgaggatagggttctctgctgccacgggactcgacatacctggggaatcgcatgacgtgctttcttggtcttttgcttccaatttgccacacgctagcagtaaattgatcctttggccctacaaactttgtgtagcatgaggccatcaaaatgtgacagatccgagggaagaaagtgtaataaga

SEQ ID NO: 103305 - DNA, 183 bp, Glycine max
cagcaagaagatctggtcttacaatgatgtttatgtcgatggaaaacccacacagggtggctttgctgaaaccatgatcgttgagcaaaagtttgtggtgaagattccagagggtttggcgccagagcaagtggcaccatactgtgtgcgggtgtgacagtgtacagtccactggtacacttt

SEQ ID NO: 103306 - DNA, 182 bp, Glycine max
gcaaaggattctacccgccgctcgatgggaattgcgcttcaaggcgtctcgtagggctaatccgcctcacgagggtcaccaacggcacgtgcctttggtgggccgaggccccctactgctggtcggcaactcaaataatgtaaggtagaaaatggaaccatgcctcctctcttgcatgtgat

SEQ ID NO: 103307 - DNA, 256 bp, Glycine max
ataatgaagagtactatcttctttgctctccttctagtttgtgccttcaccatctcatacctgctttcagccaccgctcagttcgtgctcgacactgatgatgatcctcttcaaaacggtggcacatactatatgttgccagtatgagaggaaagggcggtggaatagaagtagattcaactggaaaagaaatatgccctctcactgttgtgcaatcacccaatgagctcgataaggggattggactagtctttac

SEQ ID NO: 103308 - DNA, 260 bp, Glycine max
aacatgattactggtacctcccaggctgattgtgctgtccttatcattgactccaccactggtggttttgaagctggtatttctaaggatggacagactcgtgagcatgctcttcttgctttcacccttggtgtgaagcagatgtctgctgctgtaacaagatggatgccactaccccgaagtactctaaggctaggtatgatgaaattgtgaaggaagtctcttcctacttgaagaaggttggttacaacccagacaag

SEQ ID NO: 103309 - DNA, 111 bp, Glycine max
gaaaagtgttcctacattggttggcattgaatgtcccaaggatgagaaacttcctcgtcgcaaaatttttgacaaacctaagacgcgctgcttcactattctccctatgga

SEQ ID NO: 103310 - DNA, 186 bp, Glycine max
  unsure (1)..(186): unsure at all n locations
cgaaaacggcacgccaaaacccacgtctcttggtcgcgcgctctactccacccccatccacatttgggacaaagaaaccggtagcgttgccagcttcgccgcttccttcaacttcaccttctatgcgcctgacacaanaggcttgcagatgggcttgccttctttctcgcacgaattgacactaag

SEQ ID NO: 103311 - DNA, 110 bp, Glycine max
gttcctcactgacctcaccatggcgaccagagccaagctttctttagctatcttccttttctttcttttagccttgatttcaaacctagccttgggcaaacttaaagaaa

SEQ ID NO: 103312 - DNA, 130 bp, Glycine max
tcaatatcctagtacaccgtattaaagaatttaagatatactatgatgagagcgcggttcccattactgttgctgggagttgttttcctggcatcagtttctgtctcatttggcattgcgtattgggaaa

SEQ ID NO: 103313 - DNA, 246 bp, Glycine max
aaatattctagaggcctcatacgacaccaaattcgaggagataaacaaggttctgtttggtagagaggaggggcagcaacaaggggaggagaggctgcaagagagtgtgattgtggaaatctcaaagaaacaaattcggaactgagcaaacatgccaaatctagttcaaggaaaaccatttcttctgaagataaacctttcaacttgagaagccgcgaccccatctattccaacaagcttggcaag

SEQ ID NO: 103314 - DNA, 135 bp, Glycine max
gtccagaagcagacccgggccgggcagaggacccggttcaaggccttcgtcgtcgtcggagacaacaacggccacgtcgggctgggcgtgaagtgcagcaaggaagtggcgacagctattcgtggcgcgattatt

SEQ ID NO: 103315 - DNA, 222 bp, Glycine max
accctactcattctccatacctcaacgaagaggttaaagagacggcaacactttgctgtccgccttgaccgagcagagcttcgtcttggccctcgattttgccctaaagtactctcagtcacaacagacaccgtcgtctcgtcgtcgtcatcaatggcaccgaagcagaccaaggctgagaagaagatcgcttacgatgcgaagtgtgcgacctaatggagg

SEQ ID NO: 103316 - DNA, 254 bp, Glycine max
atttttcttttttcttcttttcctttgggttttctattctcagtttgcggtgtttgatagaaataatggatcggaacgggccaaagatcaaaagtacaattcttcaccatctctatgagaagcagagacagagcccttacatgacaatctctgtcgccctgtttcagatttgcttccatttattgccaatgggatcagaggtgtcactaccaacccagcgatttttgaaagagctatttcatcctcaaatgcct

SEQ ID NO: 103317 - DNA, 260 bp, Glycine max
aaatgttctgccctcatcaacaaacccaacacgccctttaacactcaatactatagatgagcatcttgacatgttgatggtctgccatcatctgaatagggaaattccagaagacttagcttttgcatgttcaaggataagagaggaacgattgctgccgaagatattttgcatgatattggggcaattagcatcatatcttctgattctcaggctatgggtcgagttggagaggtgataagcagaacttggcaaactgc

SEQ ID NO: 103318 - DNA, 121 bp, Glycine max
agttgcacaagatatggttgaggaatggtttgattgtgttgatgaggaggattcctttgaggaagtttctttaagtgcagcactcaatggtgttgagggtttggactatatggaaagaatt

SEQ ID NO: 103319 - DNA, 137 bp, Glycine max
agttcagcaagaatattctagaggcctcatacgacaccaaattcgaggagataaacaaggttctgtttggtagagaggaggggcagcaacaaggggaggagaggctgcaagagagtgtgattgtggaaatctcaaga

SEQ ID NO: 103320 - DNA, 130 bp, Glycine max
actcaatgccctcaaaccggataaccgtatagagtcagaaggagggctcattgagacatggaaccctaacaacaagccattccagtgtgccggtgttgtcctctctcgctgcaccctaaaccgcaaggcc

SEQ ID NO: 103321 - DNA, 144 bp, Glycine max
agaagatgatgatgatgaggaagagcagccacagtgcgtggagacagacaaaggttgccaacgccaaagcaaaaggagcagaaatggcattgatgagaccatttgcacaatgagacttggccaaaacattggtcaaattcatca

SEQ ID NO: 103322 - DNA, 140 bp, Glycine max
tgaacgagggagctcttcttctaccacacttcaattcaaaggcgatagtgatactggtaattaatgaaggagatgcaaacattgaacttgttggcctaaaagaacaacaacaggagcagcaccaggaagagcaactttgg

SEQ ID NO: 103323 - DNA, 133 bp, Glycine max
tacaaattacactctttgcctcgcaccttcaacttaaccttttctactcataatcttaacaacttgctagaataagataaagaaagagaaaaagtgtgtgtgtgtgagagagagcaatggctggctcgtgggc

SEQ ID NO: 103324 - DNA, 167 bp, Glycine max
agttaatcagccccaagagaaagatttgttggagggaaatttttcctttgatattaaatctcgctctagattggaaaaagtttcctctacaaaagcacaatttgttagtggaaaaaccttcaaatatgatataatggtgctggttcacattcttcagaagattttcc

SEQ ID NO: 103325 - DNA, 211 bp, Glycine max
agctacttcaaagttgaaaacccagaatgtggttgtatctctctccctaaccttaaccttggtactggtgctactgaccagcaaggcaaactcagcggaaactgtttctttcagctggaacaagttcgtgccgaagaaccaaacatgatcctccaaggagacgctattgtgccctcctgggaaattttacacctcaataaggttgacgaaa

SEQ ID NO: 103326 - DNA, 251 bp, Glycine max
attcgaagaagcagtgagatctgttcagatggaagggttgctttggggtgcatccaaacttgtacctgttgggtacggtatcaagaaactgcaaattatgcttactattgtggatgacctagtttctgttgatactctattgaggaacatctcacagttgagcccatcaatgaatatgtccagagttgtgacattgtggccttcaataaaatataaactacaattgtgggacttggagatcatggcaacgg

SEQ ID NO: 103327 - DNA, 103 bp, Glycine max
ttgggaatgcagcagtcaaaaggagtgattgggcctcattggtacaagtgtttttaacaaacagcaacagtacagagcattttgatgcatgcaagtggacaaa

SEQ ID NO: 103328 - DNA, 165 bp, Glycine max
aacggcgctgccacccctgccggcctcatctccgcctccatcgcccatgcattcgccctcttcgtcgccgtctccgtcggcgccaacatctccggcggctacgtcaaccccgccgtcaccttcggcgccttcgcggcggcaacatcaccttcctccgcggcatcg

SEQ ID NO: 103329 - DNA, 140 bp, Glycine max
accccaagagaaagatttgttagagggaaatttttcctttgatattaaatctcgctctagattggaaaaagtttcctctacaaaagcacaatttgttagtggaaaaactctcaaatatgatataattggtgctgttcaca

SEQ ID NO: 103330 - DNA, 242 bp, Glycine max
acaattagtgtctccattgatgcaatggatggcactatcaatcgttcgaatgggttttagaacatggtgggattgccactgatgatgattatccttacagagctaaagagggtagatgcaaagccaataagaacaagacaaggttacaattgacggatatgaaactctaataatgtcagatgagagtacagaatcagagacagagcaagcgttcttaagcgccatccttgagcaaccaatta

SEQ ID NO: 103331 - DNA, 145 bp, Glycine max
ttgtctttgaacactcatcaccatggccaagcttgttctttccctttgtttccttcttttcagtggctgcttcgctctgagagagcaggcacagcaaaatgagtgccagatccaaaagctgaatgccctcaaccggataaccgta

SEQ ID NO: 103332 - DNA, 135 bp, Glycine max
gtttggagagttgaatgtggaatcccttctggatttccgctcacagttatttgcaatagcatttttaatgagatgctcattagatatagctatgaaaaattactgcgtcaggctaaagctccaagtatgttttac

SEQ ID NO: 103333 - DNA, 254 bp, Glycine max
aagaaagaaggtttttttagtatagttaacagcatggagagggaggaagatgttaaggttggagcacagaaattctcggagaggcaagcactgggtacaggagctaagagtgacaaggactacaaggaggcaccaccagacccttgtttgagccaggggagttaaagtcatggtctttttacagagctgggatcgcagagtttgtggccacattcttgttcctctacatcactgtcttgactgtcatgggtgtc

SEQ ID NO: 103334 - DNA, 262 bp, Glycine max
agtataccttaataaataatttaagatactatgatgagagcacggttcccattactgttgctgggacttgttttcctggcttcagtttctgtctcatttggcattgcttactgggaaaaagagaaccccaaacacaacaagtgtctccagagttgcaatagcgagagagactcgtacaggaaccaagcatgccacgctcgttgcaacctccttaaggtggagaaagaagaatgtgaagaaggtgaaattccacgaccacgac

SEQ ID NO: 103335 - DNA, 266 bp, Glycine max
agaagcaggtgagtgagtgagtgagcaagagtgaagagcgaagagaatggctcccaagggtttaatctttttggctgtgttatgcttctcagcactgtcactgagtcgttgtcttgcggaggataatggacttgttatgaacttctacaaggaatcatgccctcaggctgaagacatcatcaaagaacaagtcaagcttctctacaagcgccacaagaacactgctttctcctggctcagaaacatcttccatgactgtgctgttc

SEQ ID NO: 103336 - DNA, 267 bp, Glycine max
agtgctaacatccacagtgtgaaggaaccctttgaggtttctgtcacacccatcgttttcatgtgcgtcttccacaccgtacaccagcatgccacgtaagccgacctcgttgagcgcgctgatgctccgtccggcggtggcggcgtcctcgccggcgcagaattgcgcgtagaacgtctctttcgtggcagccatgaggagattcctcagcaccccgctctggaacacccgagacttcatcaccctcattcccaggtccaccacggg

SEQ ID NO: 103337 - DNA, 265 bp, Glycine max
gatggcattgaagatgtttccgctgctctgcgttctgtctctttttgctacctcgtctattatcaccatcactcattccaagactgttccacccattcttgatcttactaatttcaaccgaaccagtttcccgcaaggctttgttttcgggacagcgtcagctgcataccagtatgaaggtgctgcaatggaaggtggacaaggaccgagtatatgggatactttcactcataaatacccagaaacaataaaagaccacagtaat

SEQ ID NO: 103338 - DNA, 256 bp, Glycine max
gcacaggttgccgcaccttaaaaccggaaacaaaagcaatcgttacttgatttcaagaatttctcaatttcttcctacttctttgtgtacgatttcttaagggtaagaaaatcactctctgtgctggtcacagacttcgtgaatcattttcttgtccactcctagtttatctcctgaacactctcctatttgatataggacttcgtgtcagatttaaactttttctgtttctttctcagttctctgtttaatttca

SEQ ID NO: 103339 - DNA, 255 bp, Glycine max
caaaccgtgaagttcataactgctgcaactattggcatcacactcttactcctgtctggcttgaccctcacaggcactgtcataggtttgatcattgcaacccctcttcttgttatcttcagctccatccttgtccctgctgcgtttgtgctgttcctggttgcttctggctttttgttctctgcggggctgtggtgtggctgccattgctgctttatcttggatttacaactacgtttctgggaaccagcctgc

SEQ ID NO: 103340 - DNA, 267 bp, Glycine max
ttagttcaatatggggaagcccttcactctctctctttcttcactttgcttgctactcttgtcgagtgcatgctttgctattagctccagcaagctcaacgagtgccaactcaacaacctcaacgcgttggaacccgaccaccgcgttgagtccgaaggtggtttgattcaaacatggaactctcaacaccctgagctgaaatgcgccggtgtcactgtttccaaactcaccctcaagacgaatggcctccacttgccatcttactc

SEQ ID NO: 103341 - DNA, 256 bp, Glycine max
tcttgggagaagaggtcgagtttcacagcagcaatggtgtacgtcgaggctcagaaatcaaaagcctacttcaagagatatcaagtcaagttcaagagaagaagagagggaaaaaccgattaccgtgccaggattcggttgattaatcaggacaagaacaaatataacactccgaaataccgatttgttgttcgctttagcaacaaggacattgttgcacaaataatatctgctagcattgctggcgatattgttc

SEQ ID NO: 103342 - DNA, 235 bp, Glycine max
ctagtataccttaataaataatttaagatactatgatgaaagcacggttccattactgttgctgggacttgtttacctagcttcagtttctgtctcatttggcattgcttactgggaaaaagagtaccccatacacaacaagtgtctccagagttgcaatagcgagagagaaccgtacaggtaccaagcatgccacgctcgttgcaacctccttaaggtggagatagaagaatgt

SEQ ID NO: 103343 - DNA, 253 bp, Glycine max
atttgattggtggagatgacttcaagagtggtcagaccaaaatgaaatctgtgctggttgatttccttgtgggggctggtatcaagctcaacatctatagtcagttacaaccatctgggaaacaatgatggtatgaatctttcggctccacaaactttccgttccaaggaaatatccaagagcaacgttgttgatgatatggtcaacagcaatgccatcctctatgagcctggtgaacatccagaccatgttg

SEQ ID NO: 103344 - DNA, 258 bp, Glycine max
gaggaagataaacctcgtcctagtcgaccaagccaaggaaagcgtgaacgagaccaggaccaggacgaggacgaagatgaagatgaagatcaacctcgcaagagccgcgaatggagatcgaaaaagacacaacccagaagacctagacaagaagaaccacgtgaaagaggatgcgagacaagaaacggggttgaggaaaatatctgcaccttgaagcttcacgagaacattgctcgcccttcacgcgctgacttctac

SEQ ID NO: 103345 - DNA, 127 bp, Glycine max
taaacactcatcagtcatcaccatggccaagctagttttttccctttgttttctgcttttcagtggctgctgcttcgctttcagttccagagagcagcctcagcaaaacgagtgccagatccaaaaa

SEQ ID NO: 103346 - DNA, 237 bp, Glycine max
cgagatatcaacagcttccttagttcaatatggggaagcccttcttcactctctctcttacttccctttgcttgctactcttgtcgaatgcatgctttgctattacctaccagcaagttcaacgagtgccaactcatcaacctcaatgcgtcggaacccgatcaccgcgtcgagtccgaaggtggtcttattggtacatggaactctcagcacgctgagctgcaatgcgcctgtgtc

SEQ ID NO: 103347 - DNA, 267 bp, Glycine max
ctcgaggaaatcgctcgcgcgctgcagtggtcagagccaaagcagggaccgattactattccaccttgaacgttggccccaatgccacgctgcaagaaatcaaggcctcctatcgtaaactggcgcgaaagtaccatccagatatgaacaaaagccctggggctgaggataagttcaaggaaataagtgctgcatatgaggtctacaaggagataatggagggtcgactggtgctccaggggttgatccttttgatttattcgatac

SEQ ID NO: 103348 - DNA, 265 bp, Glycine max
cgagctcaggtgcgtcccgcaacgactctgttggctgatgggtgcccatatttgtatgctatggtgcatgatagttcagtgtctacaataccaggtgattttgtcattggtgttaagttgacaaccataaacaatatgtgtgcatatgggctcaatcctggtatttcaggttctcgtcttttgggcaccattcctcagtccatttcacagcaaactgtttggaatcaaatggcaacagtgagaacaccattgaattttgattcta

SEQ ID NO: 103349 - DNA, 271 bp, Glycine max
tcgaggcagttacagcactcaaaaacctagagcgaagagcgtgaaggcaccggccgccggccatgacattcaagcgcaggaacggaggtcgcaacaaacacggccgtggccatgtcaaattcatccgatgctccaactgcggcaaatgctgccccaaggacaaggccatcaagaggtttcttgtgaggaacattgttgaacaggctgcagtcagagatgtgcaggaagcccgtgtctatgaacaatacacgcttccgaaactatatgtgaa

SEQ ID NO: 103350 - DNA, 262 bp, Glycine max
tcggctcgagctctccattgtctttgaacactcatcaccatggccaagcttgttctttccctttgttaccttcttttcagtgtgtgcttcgctctgagagagcaggcacagcaaaatgagtgccagatccaaaagctgaatgccctcaaaccggataaccgtatagagtcggaaggtgggttcattgagacctggaaccctaacaacaagccattccagtgtgccggtggtgccctctctcgctgcacccttaaccgcaatg

SEQ ID NO: 103351 - DNA, 267 bp, Glycine max
ttcggctcgagctttctctctcacgttttccgcttcagttttctcgggaaaatcatagtgaaaggtccaggcctctactctgacattggcaagagagcttgcgatcttctgttcaaggattatcagaatgaccacaagttcaccatcaccacttacacttccaccggagtggaaatcacttcaactggagtcaggaaaggtgagatatatttggccgatgtcagcactaaggtgaagaacaagaacatcacaactgatgtcaaagtg

SEQ ID NO: 103352 - DNA, 270 bp, Glycine max
ttcggctcgagtgtcctagcacttatcaagagccgcaagaatctcagcaatgtggacgaagccagaggccccaagaccgtcaccataaggtacatcgcttcagagagggtgatttgatcgcagtgcctactggtgttgcatggtggatgtacaacaatgaagacactcctgctgttgccgtttctattattgacaccaacagcttggagaaccagctcgaccagatgcctaggagattctatcttgctgggaaccaagagcaagagtttc

SEQ ID NO: 103353 - DNA, 263 bp, Glycine max
ctcgataggctcgagcatatctcttggagcatttgcttgctatttatgctgccatgatcatgggtgtgcgtgtacttggttacctgttctggactatttctgataactgggagtgggctgatggatatggtcccaagtttggacttgttgcggttgaccgggcaaataatcttgcacggacccctcgcctctcttaccatctattttctaagattgtgaatacaggcaaagttacacatgaagatcgtgaaagagcatgggat

SEQ ID NO: 103354 - DNA, 269 bp, Glycine max
ggctcgagattctctccattggtccttaaacactcatcagtcatcaccatggccaagctagttttttccctttgttttctgcttttcagtggctgctgcttcgctttcagttccagagagcagcctcagcaaaacgagtgccagatccaaaaactcaatgccctcaaaccggataaccgtatagagtcagaatgagggctcattgagacatggaaccctaacaacaagccattccagtgtgccggtgttgccctctctcgctgcaccct

SEQ ID NO: 103355 - DNA, 270 bp, Glycine max
ggctcgagccctaacaacaagccattccagtgtgccggtgttgccctctctcgctgcacccttaaccgcaatgcccttcgtagaccttcctacaccaacggtcctctggaaatctacatacaacaaggtaatggtatttttggcatgatattcccgggttgtcctagcacttatcaagagccgcaagaatctcagcaacggaggacgaagccagaggccccaagaccgtcaccaaaaggtacatcgcttcagagagggtgatttgatcgc

SEQ ID NO: 103356 - DNA, 222 bp, Glycine max
gcgccggtgtcactgtatccaaactcaccctcaacagcaatggcctccacttgccatcttactcaccttatccccggatgatcatcatcgcccaagggaaaggagcacttggagttgcaattccaggatgtcctgagacattagaggagccacaagaacaatcaaacagaagagcctcaaggtcgcagaagcagcagctacaggacagtcaccagaagattc

SEQ ID NO: 103357 - DNA, 265 bp, Glycine max
tcaaacacaagcaaagctctttcgtcttcttcggtgaatgattgatccctcatcatcatcatcatgggggtgttacaggagaagctctcgtcgttctacaagagccgctggctggttttcgtggccgcaatgtggctgcagtcgtgggcgggcatcgggtacttgttcgggagcatttcgcccgtcataaagagctctctgggctacaaccagaagcagctcgccatgctcggcgtcgccaaggaccttggcgacgcgtcggctt

SEQ ID NO: 103358 - DNA, 258 bp, Glycine max
gatggaaattttccaacagattcttggttaccaatatttgttaattgtctttaccctgtgagtcaattgcccgcagaagctgtcattgttaatgttgtttgtgggagtgggcgtggtggtttgcctactactgcttggattagttctgcagttaacaatcgctcctcagatatcaataagaaaattcggacagcgcttgggaaaggtaagaaaattgtctttttgactagagttgatccttttcctgtggccttgtta

SEQ ID NO: 103359 - DNA, 261 bp, Glycine max
cggctcgaggcctctacaatgagcaacgacaaggacacattcaacgtcgcctgtctcacttctgctctcaacgaggactatagagcagactttgtcaatgctcttaagagcaagatacatagtttggctggacaacactcggatattctagagtctctgtcgcccaatgtccgaaagcgtgttgacgttctaagagagatatatggccaacatgatgcattagaggctaaattttttgaagagagagcatctctcgagcaa

SEQ ID NO: 103360 - DNA, 244 bp, Glycine max
aaattttcacaagaggaatttcttacagcttggtcaactcaggtgcgtcctacaacaactctgttggctgatgggtgtccatatttgtatgctatggtgcatgatagttcagtgtctacaataccaggtgattttgtcattggtgttaagttgacaaccataaacaatatgtgtgcatatgggctcaatcctggtatttcaggttctcgtcttttgggtaccattcctcagtctatttcacagc

SEQ ID NO: 103361 - DNA, 258 bp, Glycine max
tcggctcgagagggaacctcagcaacccggtgagaaggaggaagacgaagatgagcaaccacgtccaatcccattcccacgcccacaacctcgtcaagaagaagagcacgagcagagagaggaacaggaatggcctcgcaaggaggaaaaacgcggagaaaagggaagtgaagaggaagatgaggatgaggatgaggaacaagatgaacgtcaattcccattcccacgcccacctcatcagaaggaagagcgacagca

SEQ ID NO: 103362 - DNA, 268 bp, Glycine max
tcggctcgagagccccccaaaaatgaagagcaccatcttctttgctctctttctcttttgtgccttcaccacctcatacctaccttcagccatcgctgatttcgtgctcgataatgaaggtaaccctcttgaaaatggtggcacatattatatcttgtcagacataacagcatttggtggaataagagcagccctacagggaaatgaaagatgccctctcactgtggtgcaatctcgcaatgagctcgacaaagggattggaacaatc

SEQ ID NO: 103363 - DNA, 267 bp, Glycine max
tcggctcgagtagatcttaaaatttctcaatctaaaattgcacttcccaaaaacacagttggaggaaccattctgcgtagtgatctattggcaaattttttgacagagggcaattttagagcaagtgttgatttgcagcgcacgcatcgtattaaaggaatgattaaaatggtggccacagttggtattcctgagaatacaggtatagcattggcctgtgctatgaatagttcttttagggggcgtgccagttctgatatttacacc

SEQ ID NO: 103364 - DNA, 267 bp, Glycine max
tcggctcgaggttcaatatcctagtacaccgtattatagaatttaagatatactatgatgagtgcgcggttcccattagtgatgctgggagttgttttcctggcatcagtttctgtctcatttggcattgcgtattgggaaaagcagaaccccagtcacaacaagtgcctccgaagttgcaatagcgagaaagactcctacaggaaccaagcatgccacgctcgttgcaacctccttaaggtggaggaagaagaagaatgcgaagaa

SEQ ID NO: 103365 - DNA, 269 bp, Glycine max
cggctcgaggttttttctcagaaccttctgaggttaaagcaaaaaacaaagagagagagagagagaaaatgatgaagccatcgatgctcagatctctccactccgccgccacccgcggcgcctctcatctcttccgccgtgggtacgcctccgagccggtgccggagcgcaaggtagccgttctcggcgccgccggcgggatcgggcagcctctctcccttctcatgaagctcaatcccctcgtttcgagcctctccctttacgatatc

SEQ ID NO: 103366 - DNA, 271 bp, Glycine max
tcgagaaaattcttccaccaagttatgggtttccttgtgttgcttcttttctccctcttaggtctctcttctagttccagcatatcaactcatcgttccatattggaccttgacctaaccaagtttaccacacagaaacaggtgtcttcactgttccaactatggaagagtgagcatggacgtgtctaccataaccacgaagaagaggcaaagagacttgagattttcaagaataacttgaactatatcagggacatgaatgcaaacagaa

SEQ ID NO: 103367 - DNA, 266 bp, Glycine max
agtcgaggaggaagaagaagaagaagatgtcgtacctgttgcctcacttgcactctggatgggccgtcgatcaagcaatcctcgccgaagaggagcgtctcgtcgtcatccgtttcggccacgactgggacgaaacctgcatgcagatggacgaggtgttggcgtcagtggcggagacgataaagaactttgcggtgatatacctggtggacataacggaggtgccggatttcaacaccatgtacgagctctacgacccttccacg

SEQ ID NO: 103368 - DNA, 264 bp, Glycine max
gagattcccgggttgtcctagcacttatcaagagccgcaagaatctcagcaacgaggacgaagccagaggccccaagaccgtcaccaaaaggtacatcgcttcagagagggtgatttgatcgcagtgcctactggtgttgcatggtggatgtacaacaatgaagacactcctgttgttgccgtttctattattgacaccaacagcttggagaaccagctcgaccagatgcctaggagattctatcttgctgggaaccaagagca

SEQ ID NO: 103369 - DNA, 252 bp, Glycine max
gttcaatatcctagtataccttaataaataatttaagatactatgatgagagcacggttcccattactgttgctgggacttgttttcctggcttcagtttctgtctcatttggcattgcttactgggaaaaagagaaccccaaacacaacaagtgtctccagagttgcaatagcgagagagactcgtacaggaaccaagcatgccacgctcgttgcaacctccttaaggtggagaaagaagaatgtgaagaa

SEQ ID NO: 103370 - DNA, 255 bp, Glycine max
aaaaattcttccaccaagttatgggttaccttgtgttgcttcttttctccctcttaggtctctcttctagttccagcatatcaactcatcgttccatattggaccttgacctaaccaagtttaccacacagaaacaggtgtcttcactgttccaactatggaagagtgagcatggacgtgtctaccataaccacgaagaagaggcaaagagacttgagattttcaagaataacttgaactatatcagggacatga

SEQ ID NO: 103371 - DNA, 257 bp, Glycine max
attgtctttgaacactcatcaccatggccaagcttgttctttcccattgtatccttcttttcagtggctgcttcgctctgagagagcaggcacagcaaaatgagtgccagatccaaaagctgaatgccctcaaaccggataaccgtatagagtcggaaggtgggttcattgagacctggaaccctaacaacaagccattccagtgtgccggtgttgccctctctcgctgcacccttaaccgcaatgcccttcgtaga

SEQ ID NO: 103372 - DNA, 261 bp, Glycine max
attcggctcgaggtttgttgatcctcactgacctcaccaaggcgaccagagccaagctttctttagctatcttccttttctttcttttagccttgatttcaaacctagccttgggcaaacttaaagaaaccgaggtcgaagaagatcccgagctcgtaacatgcaaacaccagtgccaacagcaacggcactacactgagagtgacaagcgaacatgcttgcaacaatgtgacagtatgaagcaagagcgagagaaacaag

SEQ ID NO: 103373 - DNA, 269 bp, Glycine max
gctcgagcttcttcgtctcaaatctcttcgttccttcgattcgttccatttcttccaaaatggccaaagacccagttcgcgttctcgtcactggagctgcagggcaaattgggtatgctcttgtccctatgattgctaggggagtgatgttgggtcctgaccagcccgtgatcctccacatgcttgacattcctccggcagcagagtcattgaatggggttaaaatggaattggtggatgctgcattccctcttcttaaaggtgttgtt

SEQ ID NO: 103374 - DNA, 250 bp, Glycine max
agcgattcggctcagcgcacactctctgctcctagggtatctccttcgagtgagggtaatggctcccaaaccgcatagtacgggtctgtttgttggactgaacaagggtcacgtcgtcaccaagaaggaattgcccccacgcccctcagatcgtaaggggaaaacaagcaagagggtgcactttgtgaggaacctcataagagaggttgctggttttgcaccctatgaaaagcgtataactgagttgctg

SEQ ID NO: 103375 - DNA, 270 bp, Glycine max
ctcgagcataaaattcttccaccaagttatgggtttccttgtgttgcttcttttctccctcttaggtctctcttctagttccagcatatcaactcatcgttccatattggaccttgacctaaccaagtttaccacacagaaacaggtgtcttcactgttccaactatggaagagtgagcatggacgtgtctaccataaccacgaagaagaggcaaagagacttgagattttcaagaataacttgaactatatcagggacatgaatgcaaa

SEQ ID NO: 103376 - DNA, 246 bp, Glycine max
gggcaccattcctcagtccatttcacagcaaactgtttggaatcaaatggcaacagtgagaacaccattgaattttgattctagcaagcagagcttttgtcaattttctattgaccttctcggtggaggaattttagtggacaaaactggagattggatcacacttatacaaaattctccaattagtaacttgttgagagttgctgcttggaagaaaggttgtttaatggtcaagattgtgatgtc

SEQ ID NO: 103377 - DNA, 254 bp, Glycine max
gaaaatttgtttttttttccgcccatttggtgtgaatgtcgtatttttcgcttttaatgttggagggtattgttaaaattgttaattgatgcagttctgttgcatgtgacataggtagtggagagaggccttggaagaattcagatgctagacttgtgcttgaagatggttcaatttggattgcataatcgtttggtgcttcagggacccaagttggcgaggttgttttcaatacatcattgacagggtatcaa

SEQ ID NO: 103378 - DNA, 256 bp, Glycine max
agctgaagcaaagcaatggctacttcaaagttgaaaacccagaatgtggttgtatctctctccctaaccttaaccttggtactggtgctactgaccagcaaggcaaactcagcggaaactgtttctttcagctggaacaagttcgtgccgaagcaaccaaacatgatcctccaaggagacgctattgtgacctcctcgggaaagttacaactcaataaggttgacgaaaacggcaccccaaaaccctcgtctcttg

SEQ ID NO: 103379 - DNA, 247 bp, Glycine max
cattgtctttgaacactcatcaccatggccaagcttgttctttccctttgtctccatctcttcagtggctgcttcgctctgagagagcaggcacagcaaaatgagtgcgagatccaaaagctgaatgccctcaaaccggataaccgtatagagtcggaaggtgggttcattgagacctggatacctaacaacaagccattccagtgtgccggtgttgccctctctcgctgcacccttaaccgcaatg

SEQ ID NO: 103380 - DNA, 254 bp, Glycine max
gcaatagtgatggtggcagtgcagcttctggtggaggtgagtcccaaggcagaggctgtgacttgtacccctgtggagctgagtccttgtttgggggcaataacttcctctcaaccaccatcaacaatttgttgccagaaggtgagggaacaaaggcaatccctctgtggttacctcaaaaacccaagtctaaggccatatgccaattctcctggctccagaagggttgctagctcttgtggggttccctttcc

SEQ ID NO: 103381 - DNA, 138 bp, Glycine max
tcggctcgagctctatgtctcaaagatgattccagcatctgacaaggcgagatttatttgcttatggtcgtgtattctctggcagaatctcaactgagttgaaggtgaggattatgggaccaaattatgtccctgggg

SEQ ID NO: 103382 - DNA, 125 bp, Glycine max
  unsure (1)..(125): unsure at all n locations
ggctcgagaacgaggaaaatcattccaatacacatggcttcagnnaggcaagcgttaatgcttattctcttaacaacattcttctgcaccataaagccttaacaggccagtactactggtggcat

SEQ ID NO: 103383 - DNA, 267 bp, Glycine max
ggctcgaggagacataatacccagttttttgtggaatattttgcattggatcttgtaatgaatagtgatggcacttgccaaggagtgattgccttgaatatggaggatggaacactacatcgtttcaaagctgcttcaacaattttggccacatggggttatggtagagcatacttctctgcaacctcagcacatacttgcactggagatggcaatgccatggttgcacgtgctgggatccctcttgaggatttggagtttgtacaa

SEQ ID NO: 103384 - DNA, 274 bp, Glycine max
agaagtatgctttgattcgtgataacttctctacccttgaacaggtgactacagcactgaggatagaaggattagaatcatcaaatctcatccttggaattgattttacaaagagcgatgaatggactggcagaatctcattcaatacgagaagcctgcatgctattggaagtacacctaaccctcacgagaaggccatctctattaatggccagacattggctcactttgatgatgataacttgattccatgttttggatttggtgatgctac

SEQ ID NO: 103385 - DNA, 271 bp, Glycine max
cagaaaacctaatttctcaaatttgatttcgcaccaaattttcctcactaaaatgtctggtcgtggaaagggtggcaagggtttgggaaagggaggtgccaagaggcacagggaggtactgcgcgataacattcaaggaatcacgaaacctgcgattcgtaggttagcgagaagaggtggcgtgaaaaggatcagtggtttgatctacgaggaaaccagaggagttctgaagatattcttggagaacgtgattcgtgatgctgtgacctac

SEQ ID NO: 103386 - DNA, 271 bp, Glycine max
ctcacgcagtcgcagtgagtgaaaacgaaaaccctaattgcggtattcttagtgccttcgagagaaagaatcaatggcagataatcttgttctccgtggcaccatgcgcgcccacaccgacgttgtgacggcgattgccactcccatcgacaactccgacatgatcgtcaccgcctcacgcgacaaatccatcatcctctggcatcttaccaaggaggacaagacttacggtgtcccccgccgccgcctcaccggccattctcattttgtt

SEQ ID NO: 103387 - DNA, 268 bp, Glycine max
tgatttaccatttaccacaccaaaaccaatcggatcgtttcctctgcggagtcagaaatccatggatccctacaagaatcggccatcaagcgccttcaattctcccttctggactactaattccggtgctcccatctggaacaacaactcatcgctgactgttggatctagaggtacggtatggtattcaatattattttctctcttcatgatcacattttttcatccagatgactctaacccaagactttacttaacaaattaagtc

SEQ ID NO: 103388 - DNA, 267 bp, Glycine max
gttcaatatgctagtataccttaataaataatttaagatactatgatgagagcacggttcccattactgttgctgggacttgttttcctggcttcagtttctgtctcatttggcattgcttactgggaaaaagagaaccccaaacacaacaagtgtctccagagttgcaatagcgagagagactcgtacaggaaccaagcatgccacgctcgttgcaacctccttaaggtgaagaaagaagaatgtgaagaaggtgaaattccacga

SEQ ID NO: 103389 - DNA, 269 bp, Glycine max
gttcaatatcctagtataccttaataaataatttaagatactatgatgagagcacggttcccattactgttgctgggacttgttttcctggcttcagtttctgtctcatttggcattgctttctgggaaaaagagaaccccaaacacaacaagtgtcttcagagttgcaatagcgagagagactcgtacaggaaccaagcatgccacgctcgttgcaacctccttaaggtggagaaagaagaatgtgaagaaggtgaaattccacacaa

SEQ ID NO: 103390 - DNA, 264 bp, Glycine max
aagctctcaagagttttaagggagagcgcaatgggaatgagtatcctatcaatctcattgactcccctgggcacgttgacttctcatctgaggttactgctgcactccgtattactgatggagctctagttgtggtcgattgtgtggaaggagtttgtgtccaaactgaaactgtgctaagacaagcccttggagaaaggattaggcctgttctgactgtcaataagatggacaggtgcttccttgaactccaggttgatggag

SEQ ID NO: 103391 - DNA, 269 bp, Glycine max
ataaaattcttccaccaagttatgggtttccttgtgttgcttcttttctccctcttaggtctctcttctagttccagcatatcaactcatcgttccatattggaccttgacctaaccaagtttaccacacagaaacaggtgtcttcactgttccaactatggaagagtgagcatggacgtgtctaccataaccacgaagaagaggcaaagagacttgagattttcaagaataacttgaactatatcagggacatgaatgcaaacagaaa

SEQ ID NO: 103392 - DNA, 267 bp, Glycine max
tggccaccgtcacttctgcagccgttgctattccgccattcactggcctcaaggcaagcgcaggcaaagtgagtgccgcagttaaagtctcagctccccaagccacaaggttgggcatcaaggcttcgctgaaagacgttggagtcgctgttgtggccactgccgcgagtgcagtgctggctagcaacgccatggccattgaagtgttgctgggtggtgatgacgggtctctggctttcgttcccaacaatttctccgtggcctctg

SEQ ID NO: 103393 - DNA, 272 bp, Glycine max
agctgaagcaaagcaatggctacttcaaagttgaaaacccagaatgtggttgtatctctctccctaaccttaaccttggtactggtgctactgaccagcaaggcaaactcagcggaaactgtttctttcagctggaacaagttcgtgccgaagcaaccaaacatgatcctccaaggagacgctattgtgacctcctcgggaaagttacaactcaataaggttgacgaaaacggcaccccaaaaccctcgtctcttggtcgcgccctctactc

SEQ ID NO: 103394 - DNA, 267 bp, Glycine max
atctgctttgtgcagggacctgagattcggactggttttctgaaagatggaaaacctattcaacttaaagaagggcaagaagtcaccataactactgattatgacattaagggggatccggagatgatatccatgagttacaagaagctgcctgtccacttgaagcctggaaataccatactgtgctctgacgggacgattactctcactgtcttgtcttgtgaccctgatgctggtactgttagatgtcgttgtgaaaatctgcaa

SEQ ID NO: 103395 - DNA, 264 bp, Glycine max
agctcccactcactttctcgcataaacgtattgtttttctctctttccgcggcctagatctgatcagtctggaaaccctacctgctctcaccaacgacatcaccactctctccgatcaactacctctttcgtcgccctaagtcatggcaggaattgcacccgagggatcacagtttgatgctcgtcaatatgataccaagatgaatgagctgcttacgtccgatggtcaggatttcttcacatcctacgatgaggtttatgaca

SEQ ID NO: 103396 - DNA, 263 bp, Glycine max
ctcgagccgctgcgaggaagttcctctggttgttcgcaagacaatgtgataagccagataactagtcaagtgcaggagcttgcattccctgggtctgcacaagctgttgagaagctattaaagaaccaaagagaatcctactttgtggatgctcagcctaagaagaaagaggaggggaataagggaagaaagggtcctttgtcttcaattttgagggctttttactgaataagtatgtactaaaatgtatgctgtaatagctc

SEQ ID NO: 103397 - DNA, 266 bp, Glycine max
agctcccactcactttctcgcagaaacgtattgtttttctctctttccgcggcctagatctgagcagtttggaaaccctaactgctctcaccaacgacatcaccactctctccgatcaactacctctttcgtcgccctaagtcatggcaggaattgcacccgagggatcacagtttgatgctcgtcaatatgataccaagatgaatgagctgcttacgtccgatggtcaggatttcttcacatcctacgatgaggtttatgacagt

SEQ ID NO: 103398 - DNA, 268 bp, Glycine max
aagccattccagtgtgccggtgttgccctctctcgctgcaccctcaaccgcaacgaccttcgtagaccttcctacaccaacggtccccaggaaatctacatccaacaaggtaagggtatttttggcatgatatacccgggttgtcctagcacatttgaagagcctcaacaacctcaacaaagaggacaaagcagcagaccacaagaccgtcaccagaagatctataacttcagagagggtgatttgatcgcagtgcctactggtgttg

SEQ ID NO: 103399 - DNA, 260 bp, Glycine max
agggagctcttcttctaccacactttaattcaaaggcgatagtgatactggtaattaatgaaggagatgcaaacattgaacttgttggcctaaaagaacaacaacaggagcagcaacaggtagagcaacctttggaagtgcggaaatatagagccgaattgtctgaacaagatatatttgtaatcccagcaggttatccagttgtggtcaacgctacctcaaatctgaatttctttgctattggtattaatgccgagaac

SEQ ID NO: 103400 - DNA, 253 bp, Glycine max
tcctagtataccttaataaataatttaagatactatgatgagagcacggttcccattactgttgctgggacttgttttcctggcttcagtttctgtctcatttggcattgcttactgggaaaaagagaacgccaaacacaacaagtgtgctcagagttgcaatagtgtgagagagtcgtacaggaaccaagcatgcgacgctcgttgcaaccttcttaaggtggagaaagaagaatgtgaagatggtgaaatt

SEQ ID NO: 103401 - DNA, 266 bp, Glycine max
ctagtataccttaataaataatttaagatactatgatgagagcacggttcccattactgttgctgggacttgttttcctggcttcagtttctgtctcatttggcattgcttactgggaaaaagagaaccccaaacacaacaagtgtctccagagttgcaatagcgagagagactcgtacaggaatcaagcatgccacgctcgttgcaacctccttaaggtggagaaagaagaatgtgaagaaggtgaaattccacgaccacgacca

SEQ ID NO: 103402 - DNA, 261 bp, Glycine max
ctcgagcgctccattggtccttaaacactcatcagtcattaccatggccaagctagttatttccctttgttttctgcttttcagtggctgctgcttcgcttttagttccagagagcagcctcagtaaaacgagtgccagatccaaaaactcaatgccctcaaaccggataaccgtatagagtcagaaggagggctcattgagacatggaaccctaacaacaagccattccagtgtgccggtgttgccctctctcgctgcac

SEQ ID NO: 103403 - DNA, 268 bp, Glycine max
aacgaagaaaatcattccaatacacatggcttccgaaaggcaagcgttaatgcttattctcttaacaacattcttcttcaccataaagccttctcacgccagtactactggtggcataacaatctactggggccaaaacattgacgacggcaccttgacttccacatgcgacactggacacttcgcgattgtcaacctagctttcctcaatgcgtttggttgcggcataactccatcatggaacttcgctggccactgtggggactgg

SEQ ID NO: 103404 - DNA, 260 bp, Glycine max
atggaacctcagcaacccggtgagaaggaggaagacgaagatgagcaaccacgtccaatcccagtcccacgcccacaacctcgtcaagaagaagagcacgagcagagagaggaacaggaatggcctcgcaaggaggaaaaacgcggagaaaagggaagtgaagaggaagatgaggatgaggatgaggaacaagatgaacgtcaattcccattcccacgcccacctcatcagaaggaagagcgaaagcaagaggaagatga

SEQ ID NO: 103405 - DNA, 263 bp, Glycine max
gcaggtcattaagaatgaagatcttgaagagctgcgagaactaggttctggtacctttgggactgtgtatcatggaaagtggagatgaacagatgttgctattaaaagaataaagaagagctgcttcactggtcgatcatctgagcaagagagactgactgtagagttctgtctggaagctgacattctttccaagcttcatcatccatatgtggttgcattttatggtgtggtacagcatgggccaggaggaacaatggcca

SEQ ID NO: 103406 - DNA, 263 bp, Glycine max
atatcctagtacaccgtattaaagaatttaagatatactatgatgagagcgcggttcccattactgttgctgggagttgttttcctggcatcagtttctgtctcatttggcattgcgtattgggaaaagcagaaccccagtcacaacaagtccctccgaagttgcaatagcgagaaagactcctacaggaaccaagcatgccacgctcgttgcaacctccttaaggtggaggaagaagaagaatgcgaagaaggtcaaattcc

SEQ ID NO: 103407 - DNA, 260 bp, Glycine max
gtcattttacacatcctactattttccatgatactacggatttattagcaaagaggcggagaaatagattaattattccatttcaattccaatcgattcaagaacgagacaaagagctaatgttagcttccagtatctcgattgaaataccaatcaatggtatttttcgtagaaatagcattcttgcttatttcgatgatcctcaataccgaacacagagctcgggaattactaaatataggactataggtataaattcc

SEQ ID NO: 103408 - DNA, 265 bp, Glycine max
tggccaccgtcacttctgcagccgttgctattccctcattcactggcctcaaggcaagcgcaggcaaagtgagtgccgcagttaaagtctcagctccccaagccacaaggttgggcatcaaggcttcgctgaaagacgttggagtcgctgttgtggccactgccgcgagtgcagtgctggctagcaacgcctcggccattgaagtgttgctgggtggtgatgacgggtctctggctttcgttcccaacaatttctccgtggcctc

SEQ ID NO: 103409 - DNA, 268 bp, Glycine max
tgcaaattgcaatggctaagcatgatgttgagggtggttccttctctgcaaaggactaccatgatcctcctccagcaccgttgattgatgctgaggaactcacacagtggtccttctacagggctttgattgctgagttcattgccacaatgctcttcctttacatcacagtgctcactgtgattggttacaagagccagagtgatgtaaaggctgggggtgatgtgtgtggtggagttggcattcttggcattgcttgggcctttgg

SEQ ID NO: 103410 - DNA, 262 bp, Glycine max
gaagaggggaaaggttccatgtgaacggcacttgcacatgggttagtcgatcctaagggacgggggaagcccgtctgatagcgctctgtgcgcgtactccgaaagggaatcgggttcaaattcctgaaccgggacgtggcggctgacggcaacgttagggagtccggagacgtcggcgggggccccggaaagagttatcttttctgtttaacagcctgcccaccctggaaacggctcagccggatgtagggtccagcggctg

SEQ ID NO: 103411 - DNA, 264 bp, Glycine max
ctagtatttttcaagtaacttaaggtttcaaacctaggaagttggaagtcatggcagcaacattgatggcagcaacaagttctggcactcttaaagcaactcctttcctaggccaaggcaagggtgccaatgccaatgctcttagggatgttgtttccatgggaactgggaagtacaccatgggcaatgatttgtggtatggaccagacagagtgaaatacttgggcaccttttcagctcagaccccttcatacttgaaaggag

SEQ ID NO: 103412 - DNA, 256 bp, Glycine max
gaagatagacctcgtcctagtcgaccaagccaaggaaagcgtgaacaagaccaggaccaggacgaggacgaagatgaagatgaagatcaacctcgcaagagacgcgaatggagatccgaaaaagacacaacccagaagacctagacaagaagaaccacgtgaaagaggatgcgagccaagaaacggggttaaggaaaaaactgcactttgaaccttacgagaacattgctcgcccttaaggggttgacttttaaaa

SEQ ID NO: 103413 - DNA, 265 bp, Glycine max
ccaccattgatgcacagttacgttatgctgctggtgtcaaagacatgcttgataggcacttcaagggtgaagactttccagaacaaaactacattgtgaaggagggtcaacttgctagccaataccgatgaagtggtgtgtgtcaatgtggcctttgaatcttccaattttaaggccaatgaatatgagcaaataaagatctagaaggcactctaattatgtaatgcacttgctttgttgaatttgaactcgtttaattgatctc

SEQ ID NO: 103414 - DNA, 262 bp, Glycine max
ctacaacaacagcagaaaagtcatggtggacgcaagcaggggcaacaccagcaggaggaagaggcagaaggtggcagcgtgcttagtggcttcagcaaacacttcttggcacaatccttcaacaccaacgaggacaccgctgagaaacttcagtctccagacgacgaaaggaagcagatcgtgacagtggaaggaggtctcagcgttatcagccccaagtggcaagaacaacaagatgaagatgaagatgaagacgaagatg

SEQ ID NO: 103415 - DNA, 261 bp, Glycine max
attttgataaaccgcgatcacaggttgccgcaccttaaaaccggaaacaaaagcaatcgttacttgatttcaagaatctctcaatttcttcctacttctttgtgtacgatttcttaagggagagaaaatcactctctgtgctggccacagacttcgtgaatgattttcttttccattcttagtttattttctgaacactctcctatttgatataggacttcgtgtcagatttaaacttcttcagtctcattctcagtactc

SEQ ID NO: 103416 - DNA, 260 bp, Glycine max
ttcttccttttcatcaggtttattccttttcttttggttcaattttgctgaatggagagtgcaagaatcagcaaatggttaaatcttctagtttgtgtactgctattgcttaaggcagaaggatctcttgttccattgactttggtgaagaatgcagaatcaaaaggagctgtttgtttggatggaagccccccagcataccactttgacaacggatttgaagaagggattaagaactggattgttcacattgagggagg

SEQ ID NO: 103417 - DNA, 259 bp, Glycine max
cgagagaggtccaacgacttcccaggtcctcgccgtcctcgccggcctcccggtcggtggcatcctgctcctcctggcgggattgaccctggcaggaaccctcaccggactggcagttgccacgccgctcttcgtcctcttcagcccggtgctggttccagccacggtcgccatcggcctggccgttgccgggttccagacgtcgggggccttcgggctcacggcgctgtcttccttctcctggatcctgaactacatc

SEQ ID NO: 103418 - DNA, 187 bp, Glycine max
cgagagaggtccaacgacttcccaagtcctcggcggcctcgtcggcctcccggtcggtggcatcctggtcctcctggcgggattgaccctggcaggaaccctcaccggactggcagttgccacgccgctcttcgtcctcttcagcccggtgctggttccagccacggtcgccatcggcctggccgtg

SEQ ID NO: 103419 - DNA, 266 bp, Glycine max
tagtgaatgcacctattgcaagtctgaagagagcaacctgtgtgagcttctcaggatcaacactgacagaggagtgatgctcagtgatggcaaaacaaggttctccaaaaatggacaacctatttaccacttcgttggaacctccactttcagtgaatacactgttctccatgaaggatgtgtcgccaagatcaaccctgctgcccctcttgacaaagttgctgttgtcagttgtggattctgcacaggttttggggctactgtga

SEQ ID NO: 103420 - DNA, 263 bp, Glycine max
tgacaaagcaatggctacttcaaagttgaaaacccagaatgtggttgtatctctctccctaaccttaaccttggtactggtgctactgaccagcaaggcaaactcagcggaaactgtttctttcagctggaacaagttcgtgccgaagcaaccaaacatgatcctccaaggagacgctattgtgacctcctcgggaaagttacaactcaataaggttgacgaaaacggcaccccaaaaccctcgtctcttggtcgcgcctcta

SEQ ID NO: 103421 - DNA, 264 bp, Glycine max
caagtttgctgacatcactcctcaagagttcagcaaaaagtacttgcaagctcccaaggatgtgtcgcagcaaatcaaaatggccaacaagaaaatgaagaaggaacaatattcttgtgaccatccacctgcatcatgggattggaggaaaaaaggtgtcatcacccaagtaaagtaccaagggggctgtggaagcggttgggcgttttctgccacgggagccatagaagcagcacatgcaatagcaacaggagaccttgttag

SEQ ID NO: 103422 - DNA, 261 bp, Glycine max
gttatgaagagtactatcttctttgctctctttctagtttgtgccttcaacatctcatacctgcgctcagccaccgctcagttcgtgctcgacactgatgatgatcctcttcaaaacggtggcacatactatatgttgccagttatgagaggaaagggcggtggaatagaagtagattcaactggaaacgaaatatgccctctcactgttgtgcaatcacccaatgagctcgataaggggattggactagtctttacatct

SEQ ID NO: 103423 - DNA, 255 bp, Glycine max
attcgtggatttacaatgccaaactcttcaaaagtgaccgcattttctttgccaaccagacatatcttccaagtgagacaccagctccactagtcaaatatagagaagaagagttgcataatttaagaggagatggaactggagaacgcaaagagtgggaaaggatctatgattatgatgtctacaatgatttaggtgatccggataaaggtgaaaatcatgcccgtcctgttcttggaggaaatgacacctttc

SEQ ID NO: 103424 - DNA, 259 bp, Glycine max
gacaagacctactttccaccctgatgggctttttgaagagaacaagttatctgaaaagcctaaagcaaaagcacatacccccatcactcagctgtggcatacaaatggtagatgccctgaggacacaatacctgtcaggagaaccaaggaggaggatgttctgagagcaagttcagtgaaacgctatggtaggaagaagcacagagcaatccctaagcctaggtctgcagaacctgatctaattaaccaaagtggtcat

SEQ ID NO: 103425 - DNA, 257 bp, Glycine max
atttgagcatcatcatgtccaccgcagcgcagcccaaggccaagaaaacggcgtcgtccaagaagcccctctcccatcctaccttcgccgcgatgatagcggaggcgatagcgagtctgaaggagagaaccggttcgagccaatacgcgataaccaaattcatcgaaggcaagcacaaggagttgcctccaacctacaagaagcttgttctcgttcatctcaagaagtctgttgctgctggcaagctcgttaaggtc

SEQ ID NO: 103426 - DNA, 259 bp, Glycine max
atcaaacacaagcaaagctctttcgtcttcttcggtgaatgattgatccctcatcatcatcatcatgggggtgttacaggagaagctctcgtcgttctacaagagccgctggctggttttcgtggccgcaatgtggctgcagtcgtgggcgggcatcgggtacttgttcgggagcatttcgcccgtcataaagagctctctgggctacaaccagaagcagctcgccatgctcggagtcgccaaggaccttggcgacgcc

SEQ ID NO: 103427 - DNA, 259 bp, Glycine max
ctttgctctctgtgaggcttcaatttctaattagggtttcgcttagagtaaccaataaccatgggagtcttcacctttgtcgtccgcaaatccggcagcgaatggagcgccaagcaacattccggcgacatcgaggcctccgccgattccaccttcgatctccaacggaagctcgtgcaagccgctctcgccgttgattcctccggtggagttcagtcctctttctctcccgtgtctcctacctccgctgtgttccagg

SEQ ID NO: 103428 - DNA, 258 bp, Glycine max
caaaattccttcacttgcagaacttagttctctgttgcatcatcatcatcttcattagtgttagccctaaacttcaccttcaaccatgaccacagtgccaccacacagtgtccaagtgcacacaacaacacaccgctacgaagccggcgtcgtcccgccggctcgttttgaggcgccgcgttacgaagccggcatcaaggcgccctcttccatttaccattccgagagaggtccgacgacctctcaggttctcgcagt

SEQ ID NO: 103429 - DNA, 259 bp, Glycine max
ggatgtcttcctcagtgttgtggatatgaacgagggagctctttttctgccacacttcaattcaaaggccatagtggtactagtgattaatgaaggagaagcaaacattgaacttgttggcattaaagaacaacaacagaggcagcaacaggaagagcaacctttggaagtgcggaaatatagagctgaattgtctgaacaagatatatttgtaatcccagcaggttatccagttgtggtcaacgctacctcagatctg

SEQ ID NO: 103430 - DNA, 259 bp, Glycine max
agatgaaagagggaatttgagaaagcatatagtgcttcatattatccatgcatggacattttgtatgagtgctatgaggatattgctgctggaagtgagattcgcagtgttgtcttggctgggcggcgcttttatgagaaagagggtctgcctgcatttcccatgggtaaaattgatcagacccggatgtggaaggttggtgagcgtgtccgttctacaaggccagctggtgatctaggtccattatacccatttactg

SEQ ID NO: 103431 - DNA, 259 bp, Glycine max
tggttgatttgtgatatcactccagcttatatttttagtttctatacttggattttaattgaattatactgacagtgtaaagttttttctaactgtcatccaatcatggactgtcatataattgaaaattattgacttttgtaataattattttaagagtcatatgtaggataatttcttattagtcaacaatgtaaaaatctttacattattaaacacttagcatgataggattattaaacacttaaagcatgatagg

SEQ ID NO: 103432 - DNA, 247 bp, Glycine max
tcactttccttagttcaatatggggaagcccttcttcactctctctctttcttccctttgcttgctactcttgtcgagtgcatgctttgctattacctccagcaagttcaacgagtgccaactcaacaacctcaacgcgttggaacccgaccaccgcgttgagtccgaaggtggtcttattgaaacattgaactctcaacaccctgagctgcaatgcgccggtgtcactgtttccaaacgcaccctc

SEQ ID NO: 103433 - DNA, 255 bp, Glycine max
gatgagagcacggttcccattactgttgctgggacttgttttcctggcttcagtttctgtctcatttggcattgcttactgggaaaaagagaaccccaaacacaacaagtgtctccagagttgcaatagcgagagagactcgtacaggaaccaagcatgccacgctcgttgcaacctcctttaggtggagaaagaagaatgtgaagaaggtgaaattccacgaccacgaccactctcacaacacccggagaggga

SEQ ID NO: 103434 - DNA, 253 bp, Glycine max
ggaacaatggcgggtagggtttcgacgtgcttcttcttcgtgtttgctctttctctccttcttccttttcagatctccgctgaggaatcatcggagaaagagttcgtactcacattggatcactctaactttcacgacactgtcagcaagcacgatttcatcgtcgtcgagttctacgctccatggtgtggccactgtaagaagcttgctcccgagtatgagaaagctgcttctatcttgagtagtcatgatc

SEQ ID NO: 103435 - DNA, 255 bp, Glycine max
gcttactgggaaaaagagaaccccaaacacaacaagtgtctccagagttgcaatagcgagagagactcgtacaggaaccaagcatgccacgctcgttgcaacctccttaaggtggagaaagaagaatgtgaagaaggtgaaattccacgaccacgacgacacacacaacacccggagagggaacctcagcaacccggtgagaaggaggaagacgaagatgagcaaccacgtccaatcccattcccacgcccacaa

SEQ ID NO: 103436 - DNA, 261 bp, Glycine max
ccgtcttctctgctaccgatcccaagagagtagcaagagactcccatgttcccgtgttggcaccacttccaattgggtttgcggtgttcatggttcacttggccaccatccctatcaccggcactggcatcaacccagctagaagccttgggcctgctgtcatattcaacaacgagaaggcttgggatgaccagtggatcttctgggttggacccttcatcggtgctgctcttgctgcattctaccaccagtccgtgttga

SEQ ID NO: 103437 - DNA, 255 bp, Glycine max
tcaataaccagcttgatcaaacccctagggtattttaccttgctgggaacccagatatagagtacccagagaccatgcaacaacaacaacagcagaaaagtcatggtggacgcaagcaggggcaacaccagcaggaggaagaggaagaaggtggcagcgtgctcagtggcttcagcaaacacttcttggcacaatccttcaacaccaacgaggacatagctgagaaacttcagtctccagacgacgaaaggaagc

SEQ ID NO: 103438 - DNA, 247 bp, Glycine max
ccttcctacaccaacggtcactctgaaatctacatccaacaaggtaagggtatttttggcatgaaactctcgggttgacctagcacatttgaagagcctcaacaacctcaacaaagaggacaaagcagcagaccacaagaccgtcaccagaagatctataacttcagagagggtgatttgatcgcagtgcctactggtgttgcatggtggatgtacaacaatgaagacactcctgttgttgccgttt

SEQ ID NO: 103439 - DNA, 251 bp, Glycine max
gttcctcactgaccaagccgtggcgatgagaaccaaactttctttagctatctttttcttttttcatttagccttattttcaaacctagcctttggcaaatgtaaagaaaccgaggtagaagaagaagaccctgagctcgtaacatgcaaacaccaatgccaacagccacagcaatacactgagggtgacaagcgggtatgcttgcaaagatgtgacaggtatcatcgtatgaagcaagagcgagagaaac

SEQ ID NO: 103440 - DNA, 249 bp, Glycine max
gcgaccagagccaagctttctttagctatcttccttttctttctattagccttgatttcaaacctagccttgggcaaacttaaagaaaccgaggtcgaagaagatcccgagctcgtaacatgcaaacaccagtgccaacagcaacggcaatacactgagagtgccaagcgaacatgcttgcaacaatgtgacagtatgaagcaagagcgagagaaacaagtcgaagaggaaactcgcgagaaggaagaa

SEQ ID NO: 103441 - DNA, 260 bp, Glycine max
gaatgctattctcatgaatatgccaaatgctgttctttcaatgtggagatattttgttggagatctcgtctttgaagtttctaagatgacttctccctacattaaatgtacagtctctttcttcatagcatttggaatttggctgatgacaccatcaattttgaggcttttccccacaagctggtgcagtttggagagattcaggaaaaagttgtattgaaattttcacaagaggaatttcttacagcttggtcaactca

SEQ ID NO: 103442 - DNA, 262 bp, Glycine max
atccagttgtggtcaacgctacctcagatctgaatttctttgcttttggtatcaatgccgagaacaaccagaggaacttccttgcaggttcgaaagacaatgtgataagccagatacctagtcaagtgcaggagcttgcgttccctgggtctgcaaaagatattgagaacctaataaagagccaaagtgagtcctactttgtggatgctcagcctcagcagaaagaggaggggaacaagggaagaaagggtcctttgtcttc

SEQ ID NO: 103443 - DNA, 245 bp, Glycine max
atcatgcacaagagctcttcagattccacgctaggcccgacctccctggacctctcccaggccttcttcaggcccataaacaacgccgcccctcgctccccgaccaagcgccacaacaagatctccgtcatcggcgccggcaacgtgggactggccatcgcgcagaccatcctcactcaggacctcatcgacgagctcgtcctcgtcgacaccaactccgacatgctgcgcggcgagatgctcga

SEQ ID NO: 103444 - DNA, 258 bp, Glycine max
agaactagttcaatatcctagtataccttaataaataatttaagatactatgatgagagcacggttcccattactgttgctggtacttgttttcctggcttcagtttctgtctcatttggcattgtctactgggaaaaagagaaccccaaacacaacaagtgtcttcagagttgcaatagcctgagagactcgtacaggaaccaagcatgccacgctcgttgcaacctccttaaggtggtgtaagaagaatgtgaaga

SEQ ID NO: 103445 - DNA, 276 bp, Glycine max
tcgaggtaactagtgaaggagatgcaaacattgaacttgttggcctaaaagaacaacaacaggagcagcaacaggaagagcaacctttggaagtgcggaaatatagagccgaattgtctgaacaagatatatttgtaatcccagcaggtatccagttgtggtcaacgctacctcaaatctgaatttctttgctattggtattaatgccgagaacaaccagaggaacttcctcgcaggttcgcaagacaatgtgataagccagatacctagtcaagt

SEQ ID NO: 103446 - DNA, 262 bp, Glycine max
ctcatggccactgctcacaaggtcctcgttcccatcgccgacggcaccgagcccatggaggccgtcatcatcatcgacgtcctccgccgctccggcgccgatgtcaccgtcgcttcgtcctccgccaacctcgccgtcaagctctccacggcgtcaagatcatcgccgacgcctccgtctccgacgtcaccgcgaccgcctttgacctcgtcgctctgcccggaggtttacagggtgatgagaatctgagagactgtaaagt

SEQ ID NO: 103447 - DNA, 248 bp, Glycine max
tctcgagcgattcggctcgagcttgagaggaacaggaaggacatggactccaagttcaagttgattcttgttgagagatgtatccaccgacttgctcgctattacaagaagactaagaagctcccaccagtctggagtacgaatcaacaactgctagcactctggttgcttagagaatgtatcaactttcatgggttttgcttccttgcagtcaccgttgagccagcaatttgccatatcattttgat

SEQ ID NO: 103448 - DNA, 256 bp, Glycine max
ggaagaggaagaagaagaagaggatgagaagccacagtgcaagggtaaagacaaacactgccaacgcccccgaggaagccaaagcaaaagcagaagaaatggcattgacgagaccatatgcaccatgagacttcgcacaacattggccagacttcatcacctgacatctacaaccctcaagccggtagcgtcacaaccgccaccagccttgacttcccagccctctcgtggctcagactcagtgctgagtttggat

SEQ ID NO: 103449 - DNA, 262 bp, Glycine max
atctgagggttttcctcatgtgctttcacgcaaaaatggcgaaaaaggcaaaaggagattcatctctggggatggtgaagagatgacattgattccaggaaccagtgttgaagaggcttacaacaagctaatagttgacttgagataagtgtacctacattggttggcattgaatgtcccaaggatgagaaacttcctcgtcgcaaaatttttggcaaacctaagacgcgctgcttcactattctcgctatggagtttaatc

SEQ ID NO: 103450 - DNA, 209 bp, Glycine max
tgctgacgaagatgatgaagatgtacaaattccctctcaccctcctcgtcgaccaagccattgtcagcgcgatcgatacgacgacgaggatgaagatgcacataaacctcgtcgtagttgaccaagccttggtaagcgtgaacgagtccaggaccaggacgaggacgctgatgaagatgaagatcaacctcgcaagatccgcgaatgga

SEQ ID NO: 103451 - DNA, 259 bp, Glycine max
gaggagctgaggaagaatccccagaaggcttacttgaagactattacaccaaagtttcagacccttattgacctttctgctatagaaatcttgtcaaggcatgcatctgatgaggtgtaccttggggagagggacaaccaaattggacatctgatacaagagcattagaggcttttaaaaggtttggaaataaactggcacaaattgagaataaactctcagagagaaacaacgatgagaaactgagaaaccgttgtgg

SEQ ID NO: 103452 - DNA, 264 bp, Glycine max
actcaatgccctcaaaccggttaaccgtatagagtcagaaggagggctcattgagacatggaaccctaacaacaagccattccagtgtgccggtgttgccctctctcgctgcaccctcaaccgcaacgcccttacgtagccttcctacaccaacggtccccaggaaatctacatccaacaaggtaagggtatttttggcatgatatacccgggttgtcctagcacatttgaagagcctcaacaacctcaacaaagaggacaaag

SEQ ID NO: 103453 - DNA, 267 bp, Glycine max
ttaaaatggtgaaaaaggcaaaaggagatttgtttctggggatggtgaagagatgacattgattccgggaaccagtgttgaagaggcttacaacaagctaatagttgaacttgagaaaagtgttcctacattggttggatctaatgtcccaaggatgagaaacttcctcgtcgcaaaatttttgacaaacctaagacgcgctgcttcactattctccctatggagtttaatcttgtggttcgtcagaagtttttaaattttgtgagg

SEQ ID NO: 103454 - DNA, 263 bp, Glycine max
gttcaatatcctagtataccttaataaataatttaagatactatgatgagagcacggttcttgttactgttgctggaacttgttttcctggcttcagtttctgtctcatttggcattgcttactgggaaaaagagaacccaaacacaacaagtgtactcagagttgcaatagcgagagagactcgtacaggaaccaagcatgccacgctcgttgcaacctccttaaggtggagaaagaagaatgtgaagaaggtgaaattcca

SEQ ID NO: 103455 - DNA, 262 bp, Glycine max
actttagtggttctaaattgaaaagctttctagctggtcataatatcaccattactgatggtattgacaaaactagtgcaactttgcaatttagaaagttagcagattgtgattttctcaagagaaactttaagcagtgtctaatgttttgtgggtggctcctgaggacaaggcgagtttatggtcacaacttcattatgtttcgtgtaataatctggaaatgcaagaagcttatcttgtcaatctcgtaaatgtgttacga

SEQ ID NO: 103456 - DNA, 257 bp, Glycine max
ggataagcacgaatggcaacacaagcaggaaaagcaccaaggaaaggtaagtgaagaagatgaagaagaccaagacgaggatgtggagcatgacaaagagagctaagcaagtgcaggttctgagtctcaaagagaacacgatgacgtaagcataagaacccttgtcacttcaaatctgctaggttccaaactctcttcacagaccaatatggccacgttcgcgtcctccagaggttcaacaaacgctcgcaacagct

SEQ ID NO: 103457 - DNA, 259 bp, Glycine max
ttcggagatgcgcacgtggcaggtcacatgactggaccgagtgtccgtacgcccaccccggggagaaggctcgccgccgtgatccccggaagtaccattactccggcacggcgtgccccgatttccgcaaggggagttgcaagaagggtgacgcgtgcgagtacgcgcatggggttttcgagtgctggctccaccccgcacgttaccgtactcagccctgcaaggacggcaccagttgtcgccggcgcgtgtgtttctt

SEQ ID NO: 103458 - DNA, 257 bp, Glycine max
caccaacggtccccaggaaatctacatacaacaaggtaatggtatttttggcatgatattcccgggttgtgctagcacttatcaagagccgcaagaatctcagcaacgaggacgaagccagaggccccaagaccgcaccaaaaggtacatcgcttcagagagggtgatctgatcgcagtgcatactggtgttgcatggcggatgtacaacaatgaagacactcctgtcgttgccgattctataagcgacaccaacag

SEQ ID NO: 103459 - DNA, 256 bp, Glycine max
tgcagatgaaggtgttgaaagttctatttggctgctagcaaaggcttatgtagttgtgaatgactcgtgctatcatcaacttgtcagccattggttaaacactcatgcagttgttgagccattcatcatagcaacaacaggcatctcagtgttgttcaccctatttataaactccttcaccctcactatcgtgacaccatgaacataaatggccttgctcggttatcactggtcaacgacggtggcgctatagaac

SEQ ID NO: 103460 - DNA, 211 bp, Glycine max
cactcatcagtcatcaccatggccaagctagttttttccctttgttttctgcttttcagaggctgctgcttcgctttcagttccagagagcagcctcagaaaaacgagtgccagatccaaaaactcaatgccctcaaccggataaccgtatagagtcagaaggagggctcattgagacatgagaaccctaacaacaagccattccagtgtg

SEQ ID NO: 103461 - DNA, 246 bp, Glycine max
tgatgagttttgagcatccaatgaacaagttgaaggcaatgccaagggtggacagtgaaggggccatgtgtggggccaacttcaaagttgataagttcgccagagtcaacagcattcctcgagtgggaagtcaaccaattggatggaatgggaccaacattagcttagaaataaaaccttaggataatgtaaaataaaaaagtgccatctatgtatgttcctttcctaacttaccattctgaattt

SEQ ID NO: 103462 - DNA, 258 bp, Glycine max
tgcagatgaaggtgttgaaagttctatttggctgctagcaaaggcttatgtagttgtgaatgactcgtgctatcatcaacttgtcagccattggttaaacactcatgcagttgttgagccattcatcatagcacaaacaggcatctcagtgttgttcaccctatttataaactccttcactctcactatcgtgacaccatgaacatttatggccttgctcggttatcactggtcaacgacggtggcgttatagaacaa

SEQ ID NO: 103463 - DNA, 255 bp, Glycine max
ctagtataccttaataaataatttaagatactatgatgagagcacggttcccattactgttgctgctacttgtattcctggcttcagtttctgtctcatttggccttgcttactgggaaaaagagaaccccaacacaacaagtgtctccagagttgcaatagcgagagagactcgtacaggaaccaagcatgccacgctcgttgcaacctccttaaggtggagatagaagaatgtgaagaaggtgaaattccacg

SEQ ID NO: 103464 - DNA, 257 bp, Glycine max
ttgagaagctattaaagaaccaaagagaatcctactttgtggatgctcagcctaagaagaaagaggaggggaataagggaagaaagggtcctttgtcttcaattttgagggctttttactgaataagtatgtactaaaatgtatgctgtaatagctcatagtgagcgaggaaagtatcgggctatgtaactatgactagagcttcaactatgaataaataaatcgacagcatatgatgcttttgttttgtgtccttc

SEQ ID NO: 103465 - DNA, 257 bp, Glycine max
agaaaatgaagaaggaacaatattcttgtgaccatccacctgcatcatgggattggaggaaaaaaggtgtcatcacccaagtaaagtaccaagggggctgtggaagcggttgggcgttttctgccacgggagcatagaagcagcacatgcaatagcaacaggagaccttgttagcctttctgaacaagaactcgtagactgtgtggaagaaagcgaaggttgttacaatggatggcactatcaatcgttcgaatggg

SEQ ID NO: 103466 - DNA, 259 bp, Glycine max
gcaagagtttctaaaatatcagcagcagcagcaaggaggttcccaaagccagaaaggaaagcaacaagaagaagaaaacgaaggaagcaacatattgagtggcttcgcccctgaattcttgaaagaagcgttcggcgtgaacatgcagatagtgagaaacctacaaggtgagaacgaagaggaggatagtggagccattgtgacagtgaaaggaggtctaagagtcacagctccagccatgaggaagccacagcaagaa

SEQ ID NO: 103467 - DNA, 256 bp, Glycine max
gtcatcacccaagtaaagtaccaagggggctgtggaagcggttgggcgttttctgccacgggagccatagaagcagcacatgcaatagcaacaggagaccttgttagcctttctgaacaagaactcgtagactgtgtggaagaaagcgaaggttgttacaatggatggcactatcaatcgttcgaatgggttttagaacatggtgggattgccactgatgatgattatccttacagagctaaagagggtagatgca

SEQ ID NO: 103468 - DNA, 254 bp, Glycine max
ctcagcaaaacgagtgccagatccaaaaactcaatgccctcaaaccggataaccgtatagagtcagaaggagggctcattgagacatggaaccctaacaacaagccatttcagtgtgccggtgttgccctctctcgctgcaccctcaaccgcaacgcccttcgtagaccttcctacacgaacggtacctaggaaatctagatccaacaaggtaagggtatttttggcacgatatacccgggctgtcctagcaca

SEQ ID NO: 103469 - DNA, 253 bp, Glycine max
tgcagatgaaggtgttgaaagttctatttggctgctagcaaaggcttatgtagttgtgaatgactcgtgctatcatcaacttgtcagccattggttaaacactcatgcagttgttgagccattcatcatagcacaaacaggcatctcagtgttgttcaccctatttataaactccttcaccctcactatcgtgacaccatgaacataaatggccttgctcggttatcactggtcaacgacggtggcgttatag

SEQ ID NO: 103470 - DNA, 258 bp, Glycine max
ttaaataagaaatgaagagtactatcttctttgctctctttctagtttgtgccttcaccatctcatacctgccttcagccaccgctcagttcgtgctcgacactgatgatgatcctcttcaaaacggtggcacatatatatgttgccagttatgagaggaaagggcggtggaatagaagtagattcaactggaaaagaaatatgccctctcactgttgtgcaatcacccaatgagctcgataaggggattggactagt

SEQ ID NO: 103471 - DNA, 251 bp, Glycine max
gaaatttttccttcgatattaaatctcgctctagattggaaaaagtttcctctacaaaagcaccctctgttagtggaaaaaccttcaaatatgatataattggtgctggttcacattcttcagaagatttcctgaaaaggaagatcaagaaaaacccaaaaagattgatgccagattgagacaaagaatagatcctcaatacaatgaggttcatgctcagatggaaacaaatttgtttaaattgtctcttg

SEQ ID NO: 103472 - DNA, 254 bp, Glycine max
cattgtctttgaacactcatcaccatggccaagcttgttctttccctttgtttccttcttttcagtggctgcttcgctctgagagagcaggcacagcaaaatgagtgccagatccaaaagctgaatgccccaaaccggataaccgtatagagtcggaaggtgggttcattgagacctggaaccctaacaacaagccattccagtgtgccggtgttgccctctctcgctgcacccttaaccgcaatgcccttcgt

SEQ ID NO: 103473 - DNA, 252 bp, Glycine max
gcgaagagaatggctcccaagggtttaatctttttggctgtgttatgcttctcagcactgtcactgagtcgttgtcttgcggaggataatggacttgttatgaacttctacaaggaatcatgccctcaggtgaagacatcatcaaagaacaagtcaagcttctctacaagcgccacaagaacactgctttctcctggctcagaaacatcttccatgactgtgctgttcagagttgtgatgcttcactgttgc

SEQ ID NO: 103474 - DNA, 255 bp, Glycine max
agcattttcagaggaacaatggcgggtagggtttcgacgtgcttcttcttcgtgtttgctctttctctccttcttccttttcagatctccgctgaggaatcatcggagaaagagttcgtactcacattggacactctaactttcacgacactgtcagcaagcacgatttcatcgtcgtcgagttctacgctccatggtgtggccactgtaagaagcttgctcccgagtatgagaaagctgcttctatcttgagta

SEQ ID NO: 103475 - DNA, 259 bp, Glycine max
aggaactgccagatgacgcaggcaagtacaatgatgtcccagaatctactggattcttcaaatcaaatggcacgtatgtcactgagaaagggaagttcttcttgacctggtattctaacaaattgctgaatcatggtgatcaaatactagatgaagccaacaaagctttcctgggctgtaaagtcaaattagcaatcaaagtatctggaattcactggtggtacaaagttgaaaatcatgctgcagagcttactgctgg

SEQ ID NO: 103476 - DNA, 163 bp, Glycine max
atggagacatggaccagaataccagggacattattatgcgtgaattccgttctgggtcatcccgtgttttgataactactgatcttttggcccgtggtattgatgtccagcaagtgtctttagttataaatatgatctcccaacgcagcctgagaactatctc

SEQ ID NO: 103477 - DNA, 223 bp, Glycine max
gcacagagaaagaggaagagatggaggcagaggcagaaggtgaagaaggtgcgaagtagagcatttacaaggcggcgagaagcataaagcgaagagagacctgtttgtacaacgcactgagatccatctacaagactccatcttcgtctccgagatctctcttctatggcctcagctcagtctactcgccaacctccgctttggcctctggtactcccgcccc

SEQ ID NO: 103478 - DNA, 256 bp, Glycine max
agaagacgcactccttaacctcctcaccaataaacccgtaccaatgtgctacgatagcttcgaaccctccggacgaactcacattgctcagggtgttatgcagacaatcaatgtgaacaagctaacttctgccggttgcatcgtcaaaatatggattgctgcttgggttgccaagctcaacaacaagatgggaggagatttgaagaaaattgagaccgtgggccgttacttgatcgagatttggaaggctgttggg

SEQ ID NO: 103479 - DNA, 246 bp, Glycine max
taaaattcttccaccaagttatgggtctccctctgttgcttctcttctccctcttaggtctgtcttctagttccagcgtatcaactcatcgttccatattggaccttgacctaaccaagtttgccagacagaaacaggagtctgcaatggtccaactatggcagagtgagcatggacgtgtctaccataacctcgaagtagaggctatgagacttgagattttcaagaataacttgaactatatca

SEQ ID NO: 103480 - DNA, 247 bp, Glycine max
  unsure (1)..(247): unsure at all n locations
gtcacagaccatacatagtagtgctggtgggttgcaaagatgctatctggncntctccataggggtcataagataaaagggacagtggtgttgatgcgcaagaatgtgttggacgtatttcgcgaaccagcgttgggggaattattggtcaaggtctcgacttagttggctcaacactcgatactcttactgccttcttgggccgatccgtgtctctccagcttattagtgctaccaaagctgatgc

SEQ ID NO: 103481 - DNA, 249 bp, Glycine max
atggagacatggaccagaataccagggacattattatgcgtgaattccgttctgggtcatcccgtgttttgataactactgatcttttggcccgtggtattgatgtccagcaagtgtctttagttataattatgatctcccaacgcagcctgagaactatctccatcgtattggacgtagtggaaggtttggtaggaaaggtgttgccattaacttcgtcacaaaggatgatgaaaaaatgctgtttga

SEQ ID NO: 103482 - DNA, 255 bp, Glycine max
cgtttgtaacgcctttgtttgcgttttttgcacagaagaattaacatgtatatagcaagcatggcagtcacactctacgaccttagctctgcctctgggttgaagaagcttgatgagtaccttctcccacgcagctacatcactgggtaccaagctacaaaggatgatcttactgtttatgcagctttgccaactgctccatcagatgaatatggaaatgtttccaggtggtacaagcacattgatgctttgttg

SEQ ID NO: 103483 - DNA, 255 bp, Glycine max
ggcgcagagtagagcagcacagaagagggaaaacggcaccgccgccgtagaagaaaacaaccatggtgcacgtctccttttacaggaactatgggaagacattcaagaagccgcgtcgtccgtacgagaaggagcgtctcgacgcggagttgaagctggttggtgagtacgggcttcggtgcaagagagagctgtggagggtgcagtacgcgctcagccgcatccgcaacaacgcgcggaacctcctcaccctcg

SEQ ID NO: 103484 - DNA, 255 bp, Glycine max
aagaaagaaggtttttttagtatagttaacagcatggagagggaggaagatgttaaggttggagcacagaaattctcggagaggcaagcactgggtacaggagctaagagtgacaaggactacaaggaggcaccaccagcacccttgtttgagccaggggagttaaagtcatggtctttttacagagctgggatcgcagagtttgtggccacattcttgttcctctacatcactgtcttgactgtcatgggtgtc

SEQ ID NO: 103485 - DNA, 258 bp, Glycine max
attctgagttacgaagacataagaataagaacccttttctcttcggctctaacaggttcgaaactctcttcaaaaaccaatatggtcgcattcgcgtcctccagagcaaccaacgctccccacaacttcctcattccgagactaccgcattttggagttcaactccaaacccaacaccctccttctccccaaccatgctgacgctgattacctcatcgttatccttaacgggactgccattctttccttggtgaacaa

SEQ ID NO: 103486 - DNA, 139 bp, Glycine max
ccatggccaagctagttttttccctttgttttctgcttttcagtggctgctgcttcgctttcagttccagagagcagcctcagcaaaacgagtgccagatccaaaaactcaatgccctcaaaccggataaccgtataga

SEQ ID NO: 103487 - DNA, 246 bp, Glycine max
aacgctccccacaacttcagaatctccgagactaccgcattttggagttcaactccaaacccaacaccctccttctccccaaccatgctgacgctgattacctcatcgttatccttaacgggactgccattctttccttggtgaacaacgacgacagagactcctacagacttcaatctggtgatgccctgagagtcccctcaggaaccacatactatgtggtcaacctgacaacaacgaaatctc

SEQ ID NO: 103488 - DNA, 245 bp, Glycine max
ctgggaatgcagcagtcaaaaggagtgattgggcctcattggtacaagtgtttttaacaaacagcaacagtacagagcattttgatgcatgcaagtggacaaaatcggaaccacattcctgggaattgatcttcccaatagaggtatgtggtcctaacaatggttttgaaatgtggagttctgagtgggcaaatcaaacttcatggcatttgagtttccttattgacaatcccaaacatctacag

SEQ ID NO: 103489 - DNA, 246 bp, Glycine max
tgcctcttgatgaggagattctttccaaagttgcacaagacatggttgaagaatggtttgattgtgttgatgaggaggatacatttgaagaagtttctttgagtgctgcactcaatggtgttgaaggtttagactacatggaacgcattcctcttgccacttcagagggttttccccatgttctgtccaggaaaaatggtgaaaaaggcaagagaagatttgttactggagatggtaagaaatgtc

SEQ ID NO: 103490 - DNA, 246 bp, Glycine max
caatctccgagactaccgcattttggagttcaactccaaacccaacacccttcttctcccccaccatgctgacgctgattacctcatcgttatccttaacgggactgccattcttacattggtgaacaacgacgaccgagactcttacaaccttcaatctggcgatgccctaagagtccctgcaggaaccacatactatgtggttaaccctgacaacgacgagaatctcagaatgatacactcgcc

SEQ ID NO: 103491 - DNA, 246 bp, Glycine max
tgtctctctttttcactcactctgcacccaccattactcagcactgccattcttcaatcacactaatggctgtcaccttctcagatcttcacaccgaagagggcatcaaatccctcgatcaattcctttctgggaaaacctatatctctggggatcaattgacaaaggatgatatcaaagtgtatgcagctgttgtggaaaagccaggagactcttttcctaatgctgctaagtggtacgatgccg

SEQ ID NO: 103492 - DNA, 247 bp, Glycine max
gtaggcttcgggcaattgtggatattatgccagtaatacccttactcttttttcttttagcttttgtttggcaagctgctgtaagttttcgatgatatctgtaatttgagtaatgtcttaaaaaaaaattaagaatttatcagaaaactaaaattcgaacattttaacaatttaaaagatcaaataagtcttacagtgtgaattatcgattccaatattgaaatttttggatatatacgaaaaaata

SEQ ID NO: 103493 - DNA, 244 bp, Glycine max
caatggagaagcctgtctggagagagataccagtggcatggaccccaccatctcgtctgggccacacattgtctgtttatggtggtaggaaaatactgatgtttgggggtctggccaagagtggccctttgcgttttcgttccagtgatgtattcacaatggatttaagtgaggaagaaccttgttggagatgtgtaacggggagcggcatgcttggtgctggaaatcctgggggcaagctcct

SEQ ID NO: 103494 - DNA, 148 bp, Glycine max
caaaagcacaatttgttagtggaaaaaccttcaaatatgatataattggtgctggttcacattcttcaggagattttcctgaaaaggaagatcaagaaaaacccaaaaagattgataccagattgagacaaagaatagatcctcaata

SEQ ID NO: 103495 - DNA, 243 bp, Glycine max
aatgaatgctgctgagattaccgacaagttgggtctacactctctcagacagcgccactggtacattcagagcacctgtgcaacctctggggagggcctttacgaaggtctggactggctttccaacaacattgccaataaggcttaatgcctttgggagtcttgcggattggtaattctggatgcaggggtgaacattatctagcttttatttcttggtcctcttccaagacactcgaattt

SEQ ID NO: 103496 - DNA, 245 bp, Glycine max
cacttattaacactttccttagttcaatatggggaagcccttcttcactctctctctttcttccctttgcttgctactcttgtcgagtgcatgctttgctattacctccagcaagttcaacgagtgccaactcaacaacctcaacgcgttggaacccgaccaccgcgttgagtccgaaggtggtcttattgaaacatggaactctcaacaccctgagctgcaatgcgccggtgtcactgtttcca

SEQ ID NO: 103497 - DNA, 224 bp, Glycine max
ctacggttttagaaaaattgatcctgacaagtgggagtttgcgaacgaagggtttttggcggggcagaggcaattgttgaagacgataaagaggaggaggcacgtgacagtgacacagacacagtcacacgagggaggaagtggggcttgtgttgaattgggggagtttgggttggaaggtgagatggagaggttgaggagagacaggacagtgttgatggctg

SEQ ID NO: 103498 - DNA, 135 bp, Glycine max
gttcaaggaaagggagcaattggatttgcatttccgggatgtcctgagacgtttgagaagccacaacagcaatcaagcagaagaggctcaaggtcgcagcagcaactacaagacagtcaccagaagattcgtcac

SEQ ID NO: 103499 - DNA, 247 bp, Glycine max
atgtcttctagtgcaagtgatttcagaactgcaatggtgagtaaaaatagcaagcctcaagctactgcaatgcatgtgggagctatagaaattatcattgatagtttcgcaagtcctgactgcaacatagttggtgcaatgcttttggttgatacttatcataccaatcctgaaaatgcagttcttagtatttttgttgcgcctttcagaggcggaagggccattcgggtggttacattccaaatac

SEQ ID NO: 103500 - DNA, 248 bp, Glycine max
tgaaaatttgtttttttttccgcccatttggtgtgaatgtcgtatttttcgcttttaatgttggagggtattgttaaaattgttaattgatgcagttctgttgcatgtgacataggtagtggagagaggccttggaagaattcagatgctagacttgtgcttgaagatggttcaatttggagagcaaaatcgtttggtgcttcagggacccaagttggcgaagttgttttcaatacatcatggacagg

SEQ ID NO: 103501 - DNA, 152 bp, Glycine max
gcaaggtttccgatcgagggtctatcattggtcttgaatgcattgccagaggaagtgattcagcacacttttaacctaaagagccagcaggccaggcaggtgaagaacaacaaccctttcagcttcctggttccacctcaggagtctcagag

SEQ ID NO: 103502 - DNA, 133 bp, Glycine max
agtacaccgtattaaagaatttaagatatactatgatgagagcgcggttcccattactgttgctgggagttgttttcctggcatcagcttctgtctcatttggcattgcgtattgggagaagcagaaccccag

SEQ ID NO: 103503 - DNA, 240 bp, Glycine max
ccgtcttctctgctaccgatcccaagagagtagcaagagactcccatgttcccgtgttggcaccacttccaattgggtttgcggtgttcatggttcacttggccaacatccctatcaccggcactggcatcaacccagctagaagccttgggcctgctgtcatattcaacaacgagaaggcttgggatgaccagtggatcttctgggttggacccttcatcggtgctgctcttgctgcat

SEQ ID NO: 103504 - DNA, 135 bp, Glycine max
ggagaaccagctcgaccagatgcctaggagattctatcttgctgggaaccaagagcaagagtttctaaaatatcagcaagagcaaggaggtcatcaaagccagaaaggaaagcatcagcaagaagaagaaaacga

SEQ ID NO: 103505 - DNA, 244 bp, Glycine max
cagaaatgcttgctggtgtaaatccaaacttgattcgttgtcttaaggatttccctccacgaagcaagctagatagccaagtctatggtgatcatactagtcaaataaccaaagaacacctagagcccaacttagaagggctcactgtagatgaggcaattcaaaacaagagattgttcctactagatcatcatgacccaatcatgccatatttgaggcgaataaatgcaacctccacaaaggc

SEQ ID NO: 103506 - DNA, 242 bp, Glycine max
cccagagaaaaacccccagcttcgggacttggatatcttcctcagtattgtggatatgaacgagggagctcttcttctaccacactacaattcaaaagcgatagtgatactggtaattaatgaaggagatgcaaacattgaacttgttggcctaaaagaacaacaacaggagcagcaacaggaagagcaacctttggaagtgcggaaatatagagccgaattgtctgaacagatatatttgt

SEQ ID NO: 103507 - DNA, 134 bp, Glycine max
gttcaatatcctagtacaccgtattaaagaatttaagatatactatgatgagagcgcggttcccattactgttgctgggagttgttttcctggcatcagtttctgtctcatttggcattgcgtattgggaaaag

SEQ ID NO: 103508 - DNA, 245 bp, Glycine max
cagaaaggaaaggttaactaagaagcaatacttcaatggccacccttgttgttcataaccaaacttcttctgctcaagatgctgaggctctccaacaggctttcaaaggatggggggctgatgacaaggccattatagcaatactgggtcacagaaatgttcatcagaggcaagaaatcagaaaagcttatgaggagatttaccaagaggatctcatcaaacgccttgagtccgagtctctggtg

SEQ ID NO: 103509 - DNA, 246 bp, Glycine max
catcaatctcgtttgttctcactaactattacttcatcatgtcgtcgagcatagttggtcaagtcatcaaatgcaaagctgcggtttcatgggaggcagggaagccacttgtgattgaagaagtagaggtggcaccaccacaagctggtgaagtgcgtttgaagatcctctacacctctctttgccacactgatgtttacttctgggaagccaagggccaaactccattgtttcccgtatatttgg

SEQ ID NO: 103510 - DNA, 130 bp, Glycine max
aagaatttgcaagagagatggttgcgggtgtaaatccatgcgtaattcgtggtactcaagagtttcctccaaaaagcaatctggatcctacaatctatggtgagcaaaccagtaagataacagcagatgc

SEQ ID NO: 103511 - DNA, 141 bp, Glycine max
agcaaaatgaccaagttcacaatcctcctcatctctcttctcttctgcatcgcccacacttgcagcgcctccaaatggcagcaccagcaagatagctgccgcaagcagctccagggggtgaacctcacgccctgcgagaag

SEQ ID NO: 103512 - DNA, 239 bp, Glycine max
caataattccttcacttgcagaacttagttctctgttgcatcatcatcatcttcattagtgttagccctaaacttcaccttcaaccatgaccacagtgccaccacacagtgtccaagtgcacacaacaacacaccgctacgaagccggcgtcgtcccgccggctcgttttgaggcgccgcgttacgaagccggcatcaaggcgccctcttccatttaccattccgagagaggtccgacg

SEQ ID NO: 103513 - DNA, 97 bp, Glycine max
gtcttgtcaagcttgttgattcaagagacattgtggagttgaagctgaagcagcatgacgttgaagtaacaatcaggaaaaaggaggctatgcctca

SEQ ID NO: 103514 - DNA, 237 bp, Glycine max
gggttgcaaagatgcttgggggtcttctccataggggtcataagataaaagggacagtggtgttgatgcgcaagaatgtgttggacgtgaatagcgtaaccagcgttgggggaattattggtcaaggtctcgacttagttggctcaacactcgatactcttactgccttcttgggccgatccgtatctctccagcttattagtgctaccaaagctgatgccaacggaaaaggaaact

SEQ ID NO: 103515 - DNA, 242 bp, Glycine max
agcgaaagactaatcgaaccgtctagtagctggttccctccgaagtttccctcaggatagctggagcccgcgggcgagttctatcgggtaaagccaatgattagaggcatcgggggcgcaacgccctcgacctattctcaaactttaaataggtaggacggtgcggctgctctgttgagccgcgccatggaatcgagagctccaagtgggccatttttggtaagcagaactggcgatgcggg

SEQ ID NO: 103516 - DNA, 177 bp, Glycine max
attcaatatcctagtataccttaataaataatttaagatactatgatgagagcacggttcccattactgttgctgggacttgttttcctggcttcagtttctgtctcatttggcattgcttactgggaaaaagagaaccccaaacacaacaagtgtctccagagttgcaatagcgag

SEQ ID NO: 103517 - DNA, 183 bp, Glycine max
attttgataaaccgcgatcacaggttgccgcaccttaaaaccggaaacaaaagcaatcgttacttgatttcaagaatctctcaatttcttcctacttctttgtgtacgatttcttaagggaaagaaaatcactctctgtgctggccacagacttcgtgaatcattttcttttccactcttagt

SEQ ID NO: 103518 - DNA, 182 bp, Glycine max
atatgatgatgaactagcggaaaggagattgaagacaggggacttgtacatgattcgatctggttcagcattctatttggtgaacataggagaaggtcagagacttcacgttatctgcagcattgacccctctacaagcttgggattagagaccttccagtccttctatattgggggaggag

SEQ ID NO: 103519 - DNA, 240 bp, Glycine max
gacaaatttgcttgctactgtcttgatcttcctaattgtgatatacttccaaggtttccgcgtggtcttgcctgtaagatcaaagaatgctcgtggacagcagggttcatatccaatcaaattgttttatacctccaacatgcccatcattcttcagtctgcccttgtttccaatctctacttcatctcccagctgctccaccgtaagtacagcggaaacttcttcgtagatctattggg

SEQ ID NO: 103520 - DNA, 239 bp, Glycine max
tggcagcaccagcaagatagctgccgcaagcagctccagggggtgaacctcacgccctgcgagaagcacatcatggagaagatccaaagccgcggcgatgacgatgatgatgatgacgacgacaatcacattctcaggaccatgcggggaagaatcaactacataaggaggaacgaaggaaaagacgaagacgaagaagaagaaggacacatgcagaagtgctgcacagaaatgagcga

SEQ ID NO: 103521 - DNA, 237 bp, Glycine max
ctcgagccggttgaacaagggtttctctgtctgcttcttcactttctctcgtttcaatcgaaaccaaaacaaaaacatgggcagaaaattcttcgtcggtggcaactggaaatgcaatgggaccactgaggaggtaaagaagattgttactactttgaatgaggctaaagtccctggagaagatgtcgtagaagttgttgtgagccctccttttgtgttccttcctcttgtaaaaag

SEQ ID NO: 103522 - DNA, 127 bp, Glycine max
cttaattattaacacttccttagttcaatatggggaagcccttcactctctctctttcttccctttgcttgctactcttgtcgagtgcatgctttgctattagctccagcaagctcaacgagtgcca

SEQ ID NO: 103523 - DNA, 236 bp, Glycine max
tttctctctctctctctctcacccagatcttgtagcaatggcgagcgctcccactccacgcgaagagttcgtgtacatggcgaactggcggagcaggccgagcgctacgaggagatggtggagttcatggagaaggtctccgcctccgccgagagcgaggagctgaccgtggaggagcgtaacctcctctccgtcgcctacaagaacgtgatcggcgctcgccgcgctcctggcgc

SEQ ID NO: 103524 - DNA, 129 bp, Glycine max
aagagactcgtacaggaaccaagtatgccacgctcgttgcaacctccttaaggtggagaaagaagaatgtgaagaaggtgaaattccacgaccacgaccacgaccacaacacccggagagggaacctca

SEQ ID NO: 103525 - DNA, 237 bp, Glycine max
agtgaatgcacctattgcaagtctgaagagagcaacctgtgtgagcttctcaggatcaacactgacagaggagtgatgctcagtgatggcaaaacaaggttctccaaaaatggacaacctatttaccacttcgttggaacctccactttcagtgaatacactgttctccatgaaggatgtgtcgccaagatcaaccctgctgcccctcttgacaaagttgctgttgtcatcgtggat

SEQ ID NO: 103526 - DNA, 244 bp, Glycine max
tcgctcgagatttgcattcttggcattgcatgggcctttggtggcatgatcttcatccttgtctactgcactgctgggatctcagggggtcacattaacccagcggtgacatttgggctgtttttggctcgcaaggtgtctttgatccgagccatcatgtacatggtggctcagtgcttaggtgctatctgtggatttggtttggttaaggctttccagaagtcttacttcaacagtatggtgg

SEQ ID NO: 103527 - DNA, 236 bp, Glycine max
caccatcaattttgaggcttttccccacaagctggtgcagtttggagagattcaggaaaaagttgtattgaaattttcacaagaggaatttcttacagcttggtcaactcaggtgcgtcctgcaacaactctgttggctgatgggtgtccatatttgtatgctatggtgcatgatagttcagtgtctacaataccaggtgattttgtcattggtgttaagttgacaaccataaaca

SEQ ID NO: 103528 - DNA, 220 bp, Glycine max
tagttcaatatcctagtataccttaataaataatttaagatactatgatgagagcacggttcccattactgttgctgggacttgttttcctggcttcagtttctgtctcatttggcattgcttactgggaaaaagagaaccccaaacacaacaagtgtctccagagttgcaatagcgagagagactcgtacaggaaccaagcatgccacgctcgttgcaa

SEQ ID NO: 103529 - DNA, 93 bp, Glycine max
cggaatttttgaagcgtaccggatttcattgtgatatcatttgtgtcactgggtggactgccaccccaatgcaggatgtacacgttacaattg

SEQ ID NO: 103530 - DNA, 233 bp, Glycine max
gtgactcgaggacaaggaaaggttagagttgtgaactgccaagggaatgcagtgttcgacggtgagcttaggaggggacaattgctggtggtaccacagaacttcgtggtggcggacaagccggagaacaaggattcgaatacatagtattcaagacacaccacaacgcagtcactagctacttgaaggatgtgtttagggcaattccctcagaggttcttgccattcttaca

SEQ ID NO: 103531 - DNA, 231 bp, Glycine max
aacctacctctttttcttctctctcaacaacttcaaattcttcctcctcgatcatgtcttacttcaagggcaagtaccatgatgagcttatcgccaatgctgcgtacattggcactcctggaaagggtattcttgctgctgatgagtcaacagggacaattggcaagcgtttggccagcatcagtgtagagaacattgaatccaacaggcgagctcttagggactgctttt

SEQ ID NO: 103532 - DNA, 233 bp, Glycine max
aagaatttaagatatactatgatgagagcgcggttcccattactgttgctgggagttgttttcctggcatcagtttctgtctcatttggcattgcgtattgggaaaagcagaaccccagtcacaacaagtgcctccgaagttgcaatagcgagaaagactcctacaggaaccaagcatgccacgctcgttgcaacctccttaaggtggaggaagaagaagaatgcgagaaggt

SEQ ID NO: 103533 - DNA, 236 bp, Glycine max
cacgagtacaagccagagcttgatattatttccaatgctagctgcacaaccaactgccttgccccacttgccaaggttatcaatgacaggtttggcattgttgagggtttgatgaccactgttcattccatcaccgctacccagaagactgttgatggaccatcagccaaggactggagaggtggaagagctgcttcatttaacatcattcctagcagcactggagctgccaaggc

SEQ ID NO: 103534 - DNA, 239 bp, Glycine max
gcaaaatccttcgcatcctcaaagctcacggacttgcgcctgaaattccagaggatctgtaccatttgattaagaaggcagtttcaattaggaagcatcttgagaggaacaggaaggacaaggactccaagttcaggttgattcttgttgagagcagaatccaccgacttgctcgctattacaagaagactaagaagctcccaccagtctgaaagtacgaatcaacaactgctagcact

SEQ ID NO: 103535 - DNA, 175 bp, Glycine max
caacttctcttggatcttcttgaggcccctgacccttgcacccttgagactttccttggaagaattcctatggtcttcaatgttgtcattctttctccccatggttactttgcccaagattatgtcttgggataccctgacactggtggccaggttgtttacatcttggatcaag

SEQ ID NO: 103536 - DNA, 262 bp, Glycine max
tgttggcctaaaagaacaacaacaggagcagcaacaggaagagcaacctttggaagtgcggaaatatagagccgaattgtctgaacaagatatatttgtaatcccagcaggttatccagttgtggtcaacgctacctcaaatctgaatttctttgctattggtattaatgccgagaacaaccagaggaacttcctcgcaggttcgcaagacaatgtgataagccagatacctagtcaagtgcaggagcttgcattccctggg

SEQ ID NO: 103537 - DNA, 222 bp, Glycine max
ttcggcacgaggacaaaactagcgcaactttgcaatttagaaagttagcagattgtgactttctcaaaggagactttaagcagatgtctaatgtcgtgtgggtggctcctgaggcaaaggcgagtttgtggtcacaaccttcattatgttccatgtaacaatctggaaatgcaagaagcttatcttgtcaatctcgtaaatgtgttacgagatttgtctgtg

SEQ ID NO: 103538 - DNA, 208 bp, Glycine max
gggaacaagagaaccccaaacacaacaagtgtctccagagttgtaatagcgagagagactcgtacaggaaccaagcatgacacgctcgttgcaacctccttgatgtggcgaaagatgactgttacgaaagtgttattccacgatcacgaccacgaccacaacatccggagagggaacctcagcaacccggtgtcaaggtggcagacgc

SEQ ID NO: 103539 - DNA, 160 bp, Glycine max
ctctccgttgtctttgaacactcatcaccatggccaagcttgttctttccctttgtttccttcttttcagtggctgcttcgctctgagatagcaggcacgtcaggatgagtgccatatccaaaagctgaatgccctcaaaccggataaccgtatagagtc

SEQ ID NO: 103540 - DNA, 226 bp, Glycine max
cttccatagccccccaaaaatgaagagcaccatcttctttgctctctttctcttttgtgccttcaccacctcatacctaccttcagccatcgctgatttcgtgctcgataatgaaggtaaccctcttgaaaatggtggcacatattatatcttgtcagacataacagcatttggtggaataagagcagccccaacgggaaatgaaagatgccctctcactgtggtg

SEQ ID NO: 103541 - DNA, 245 bp, Glycine max
agttgcatggttgtataatattcgtggaagtgatgtggcctactgtcctgttgttcatgcatttgctattgtgacatccaattctgctttcatttatgtggacaaacaaaaggtttctgttgaggtacaaactcatttagtggagaatggaattgaaattcaagagtatacagccgtaagctctgatgcgacattgcttgcaactgatgagctagatgctgtatctactgccaaggctgctttag

SEQ ID NO: 103542 - DNA, 251 bp, Glycine max
gaaaatgaagaaggaacaatattcttgtgaccatccacctgcatcatgggattggaggaaaaaaggtgtcatcacccaagtaaagtaccaagggggctgtggaaacggatgggcgttttctgccacgggagccatagaagcagcacatgcaatagcaacaggagaccttgttagcctttctgaacaagaactcgtagactgtgtggaagaaagcgaaggttgttacaatggatggcactatcaatcgttcg

SEQ ID NO: 103543 - DNA, 251 bp, Glycine max
aactcaacaacctcaacgcgttggaacccgaccaccgcgttgagtccgaaggtggtcttattgaaacatggaactctcaacaccctgagctgcaatgcgccggtgtcactgagtccaaacgcaccctcaaccgcaacggcctccacttgccatcttactcaccttatccccaaatgatcattgtcgttcaagggaagggagcaattggatttgcatttccgggatgtcctgagacgtttgagaagccacaa

SEQ ID NO: 103544 - DNA, 246 bp, Glycine max
ccttagttcaatatggggaagcccttcactctctctctttcttccctttgcttgctactcttgtcgagtgcatgctttgctattagctccagcaagctcaacgagtgccaactcaacaacctcaacgcgttggaacccgaccaccgcgttgagtccgaaggtggtttgattcaaacatggaactctcaacaccctgagctgaaatgcgccggtgtcactgtttcgaaatcaccctcaacgcaatgg

SEQ ID NO: 103545 - DNA, 255 bp, Glycine max
tctctccattggtccttaaacactcatcagtcatcaccatggccaagctagttttttccctttgtttactgcttttcagtggctgctgcttcgctttcagttccagagagcagcctcagcaaaacgagtgccagatccaaaaactcaatgccctcaaaccggataaccgtatagagtcagaaggagggctcattgagacatggaaccctaacaacaagccattccagtgtgccggtgttgccctctctcgctgca

SEQ ID NO: 103546 - DNA, 238 bp, Glycine max
ttctcttcacttttaagttaaatagtttttcattgtatcattcaatctactatggccgcttcatcaatggctctctcatcatcatacatttgaccggcaagctctcaggtttcgcgcctcgaaccttcagcttcgcgcttgaaagtttagcctcatgttaacagtctccaggactgataccacttggtgcccttggtacggcccaaacggtgtctggtacttgggctcacactctggt

SEQ ID NO: 103547 - DNA, 231 bp, Glycine max
cctgcatcatgggattggaggaataaaggtgtcatcacccaagtgaagtaccaagggggctgtggaaacggtagggcgttttctgccacgggagccatatacgcagcacatgcaatagcaacaggagaccttgttagcctttctgaacaagaactcgtagactgtgtctaagaaagcgaaggttgttaccatggatggcactagtcatcgttcgaatgggttttagaacat

SEQ ID NO: 103548 - DNA, 224 bp, Glycine max
ccagaaatagcttttgcgatcttcattgccatctttggattggtcttcttctcattacttattggaaacatgcagaaatatctgcaatctacaactgtaatagtggagtagatgagagtgaagagacaggacgcagaacagtggatgtcccaccgtatgctacctgagaacttgagggacataattagatagtacgaacagtaccaatggcaatcgtatagggg

SEQ ID NO: 103549 - DNA, 245 bp, Glycine max
gtgttaaataggtggatggggaaactgactttcccccagggcacttcccgaagtgttaaaagaatgcctctttctatagggggaggagctggtgcaaagaatgctattctcatgaatatgccaaatgctgttctttcaatgtggagatattttgttggagatctcgtctttgaagtttctaagatgacttctccatacattagatgtacagtctctttcttcatagcatttggaaatttggctga

SEQ ID NO: 103550 - DNA, 245 bp, Glycine max
gcctaaaagaacaacaacaggagcagcaacaggaagagcaacctttggaagtgcggaaatatagatccgaattgtctgaacaagatatatttgtaatcccagcaggttatccagttgtggtcaacgctacctcaaatctgaatttcttggcaattggtattaatgccgagaacaaccggaggaacttcctcgaaggttcgcaagacaatgtgttaggccagatacctagtcaagtgccggagctt

SEQ ID NO: 103551 - DNA, 252 bp, Glycine max
ataaaattcttccaccaagttatgggtttccttgtgttgcttcttttctccctcttaggtctctcttctagttccagcatatcaactcatcgttccatattggaccttgacctaaccaagtttaccacacagaaacaggtgtcttcactgttccaactatggaagagtgagcatggacgtgtctaccataaccacgaagaacatgcaaagagacttgagattttcaagaataacttgaactatatcagggac

SEQ ID NO: 103552 - DNA, 208 bp, Glycine max
tggtttgattgtgttgatgaggaggattcctttgaggaagtttctttaagtgcagcactcaatggtgttgagggtttagactatatggaaagaattcctcttgccacatctgagggttttcctcatgtgctttcacgcaaaaatggtgaaaaaggcaaaaggagatttgtttctggggatggtgaagagatgacattgattccgggaa

SEQ ID NO: 103553 - DNA, 244 bp, Glycine max
gcagactagtatccgatcctctgtcctctcgaagctttcatcgttcaacatattctcaccatctcagtcatgggcctgctatcttgttttaggtctaccgtcctgagaaaatgttccataggcagctctggcatgtcaagattcgtgtgtgcgaacaattttcagcgatacttgatttcgtctggaggcagtgaatcgtattatgggtattttaacaggagatcgtacacttcactttatatgg

SEQ ID NO: 103554 - DNA, 203 bp, Glycine max
cggctctcgcaaaaacacagttggaggaaccatcctgcgtagtgacctattggccaattcttcgacagagggcaattttagagccagtgatcaattgctgcgcactcatcgtattacacgaatgattgaaatggcatccacagtcggtatacctgataatacaggtgtagcattagcctgcgctataaatagttcttataggg

SEQ ID NO: 103555 - DNA, 243 bp, Glycine max
cacaaacccactaagatggcttcctttgtatccttcctagtgctgcttcttgcagcccttatcctcatgcctcaagggcttgctacttactacaaaccaattaagaagccaccagtgtacaagcctccagtgtacaagccaccagtgtacaaaccaccggtttataagccataaccaccggtttacaagccgaaaccaccggtttacaagccaccatataagagagcaccgtacaagaaacca

SEQ ID NO: 103556 - DNA, 204 bp, Glycine max
tgggggtcttctccatagggggcctaatataagagggacagtggtgtcgatgcgccagaatgtgttcgacgtgaatagcgtaaccagcgttgggggaattattggtcaaggtctcgacttagttggctcaacactcgatactcttaatgccttcttgggccgatccgtgtctctcgagcttataagtgccaccaaggctgatgc

SEQ ID NO: 103557 - DNA, 253 bp, Glycine max
acaaaagcacaattggttagtggaaaaaccttcaaatatgatataattggtgctggttcacattcttcagaagattttcgtgaaaaggaagatcaagaaaaacccaaaaagattggtgccagattgagacaaagaatagatcctcaatacaatgaggttcaggctcagatggaaacaaacttgtttaaattgtctcttgatgatgttgaaactcctaaaggttccatgttagatcttaaaatttctcagtcta

SEQ ID NO: 103558 - DNA, 248 bp, Glycine max
agaaagtcttccatagccccccaaaaatgaagagcaccatcttctttgctctctatctctattgtgccttcatcacctcatacctaccttcagccatcgctgatttcgtgctcgataatgaaggtaaccctcttgaaaatggaggcacatattatatcttgtcagacataacagcatttggtggaataagagcagccccaacgggaaatgaaagatgccctctcactgtggtgcaatctcgcaatgag

SEQ ID NO: 103559 - DNA, 248 bp, Glycine max
ggatttccctccacgaagcaagctagatagccaagtctatggtgatcatactagtcaaataaccaaagaacacctagagcccaacttagaagggctcactgtagatgaggcaattcaaaacaagagattgttcctactagatcatcatgacccaatcatgccatatttgaggcgaataaatgcaacctccacaaaggcttatgctaccagaacgatcgttttcctgaaaaatgacggaactttaaggc

SEQ ID NO: 103560 - DNA, 246 bp, Glycine max
ctcgagccgctcgtcgaccgcaaaagagaaaaaaacaaaaatgctgagaatcgctgctagcgcgaagacaattgttcgaacggggtcgttggaggcgccaccattggggattagggttctgcctcggctctaccacgagagggtggtggaccactacgataacccccgcaacgttggatccttcgacaagaacgaccccaccgtcggaacgggtcttgtcggagcacccgcgtgtggtgacgtcat

SEQ ID NO: 103561 - DNA, 244 bp, Glycine max
ggagcagttgatgtagacattggtgcaaacccttctgctgagggtggaggagaagatgagggagttgatgatgcagctgttaaggttgttgacgttgttgacacattcagacttcaggagcaacccgcattcgataagaagcagtttgttaccttcatgaagaggtttatcaaggatttgactcccaagctcgatgcagagcaacaggagttgtttaagaagcacatcgagggagcaactaaat

SEQ ID NO: 103562 - DNA, 239 bp, Glycine max
cagagttgtgatgcttcactgttgctggactccacaagaaggagcttgtctgagaaggaaacagatagaagctttgggttgagaaatttcaggtacattgagaccatcaaagaagctttggaaagagaatgccctggagttgtttcgtgtgctgatatcctcgttctctctgccagagatggcattgtttcgctaggaggtccccatatccctcttaagactgaaagaggggttggtaa

SEQ ID NO: 103563 - DNA, 230 bp, Glycine max
ggtttcattggatgtagagtaccagcacaatgtgttaatatcccactagcaagtgaatccaaaggatatcatagtaggatggtatacgaccggtcttggagtgactggtggtgttgcattgttccacgtgttatatactcgagacatggccaatcccgtacaggtgactgttgatacaggatttacaaatcgtgcgggtacgattaaagcatacgtgtctaacaatttgt

SEQ ID NO: 103564 - DNA, 242 bp, Glycine max
cagcttgcaagctcatggaggtgttgtccgaagcaatggggttagagaaagagggtttaagcaaagcatgtgttgacatggaccagaaggtggtggttaattactaccccaaatgccctcaacctgacctcactcttggcctgaagcgccacacggatccgggcactatcaccttgctgcttcaggaccaagtgggtggacttcaagccaccagggacaatggcaaaacatggatcaccgtt

SEQ ID NO: 103565 - DNA, 247 bp, Glycine max
gttatcattggaaagaccaccccaatatctcaggaggaggcacagggacaagctttacgttacacaaggcgtgatcacagcataagcttacgtcacagtgaaactggaattgttgatcaagttttgctgaccacaaatgctgatggattgagatttgtgaaagtaagagtgagatctgttcgtataccacagattggtgataaattcagtagtagacatggtcagaaggggacagttggtatgactt

SEQ ID NO: 103566 - DNA, 254 bp, Glycine max
cgtaattcggatctgagctctagctcgagacggtcgtaaatgtgttacgagaattgtatttgcacagtccagaggaagctcgcagagtgagaaggaaagctctctctcgtattgaatggctgcaaaaagctgatgtgcctaccatagcacagattgaagagttccattcgatgcagaggatgatgaatgctcctgattcaaatgataatattgatctactgttgagcattgatttgttgggtttacaaggagca

SEQ ID NO: 103567 - DNA, 253 bp, Glycine max
tgacatgttaaacgaatgtccggaaacacatctacaaaacctgcgtactggactctataaagaaacaatccaattaatcaaaacgcacaacgaagatcgtatgaatacgatttcgcacttctcgacaaatataatttgtttctttattctaagcggttattctattcttggtaatcaagaacttgttcttattaactctttggttcgagaatttatatataatttaagtgacacaataaaagctttttctatt

SEQ ID NO: 103568 - DNA, 245 bp, Glycine max
caacaatcctacttgcaagggttcagcaggaacattttagaggcctcctacgataccaaattcgaggagataaacaaggttctgtttagtagagaggaagggcagcagcaaggggagcagaggctgcaagagagcgtgattgtggaaatctcgaatgaacagattcgggcactgagcaaacgtgccagatctagttcaaggaaaaccgtttcttctgaagataaaccttttaacttgagaagccg

SEQ ID NO: 103569 - DNA, 240 bp, Glycine max
gttatgagcaagatggcagagatgataaacagtctttgtggtggtgatgacaaattgatgcgtgaaatgacgcacatgctgttggcgtgttgttcaaggatggcaatttgtaagaaagatgtttggagagttgaatgtggaaacgcttctggaattccgctacacagttatttgcaatagcatttttgatgggatcctcattagatatagctatgagcaattactgcgcgaggctaaagc

SEQ ID NO: 103570 - DNA, 229 bp, Glycine max
cttttctttttcttgttcgttaattttctgattttagcctattagcgtagtagtcgtattggtaggttttggcaaagatgttttcagttccaggggtgtcgagatcgctgaacataggcatatggcttacgctaaaagggacagtggtgttgatgaggaagaatgtgttggacttcaacagcgtggctgatcttactagaggaaatgttgggggactcatatgcaccgg

SEQ ID NO: 103571 - DNA, 243 bp, Glycine max
gaagatgatgatgatgaggaagagcagccacagtgcgtggagacagacaaaggttgccaacgccaaagcaaaaggagcagaaatggcattgatgagaccatttgcacaatgagacttcgccaaaacattggtcagaattcatcacctgacatctacaaccctcaagctggtagcatcgaaaccgccaccagccttgacttcccagccctctggcttctcaaactcagtgcccagtatggatca

SEQ ID NO: 103572 - DNA, 226 bp, Glycine max
agaagaagaaaacgaaggaagcaacatattgagtggcttcgcccctgaattcttgaaagaagcgttcggcgtgaacatgcagatagtgagaaacctacaaggtgataacgaagaggaggatagtggagccattgtgacagtgaaaggaggtctaagagtcacagctccagccatgaggaagccacagcaagaagaatatgatgatgatgaggaagagcagccacag

SEQ ID NO: 103573 - DNA, 243 bp, Glycine max
tgcctgacgtcacttataatgacattggaggatgtgatatacagaaacaggaaatccgtgatgctgtggaactaccccttacacatcatgaactatactaacaaattggtattgatcctccccgtagtgtcttactgtatggaccccctggcactggtaaaacaatgcttgccaaagctgttgcgactcataccactgctgctatcatcagggttgtgggatctgagtatgtgcagaagtatc

SEQ ID NO: 103574 - DNA, 183 bp, Glycine max
agttcaatatcctagtataccttaataaataatttaagatactatgatgagagcacggttcccattactgttgctgggacttgttttcctggcgtcagtttctgtctcatttggcattgcgtactgggaaaaagagaaccccaaacacaacaagtgtctccagagttgcaatatcgagagaga

SEQ ID NO: 103575 - DNA, 241 bp, Glycine max
cttttcttggtggaattcgaaaatatgctactcccatgatgcccctggatgaagaaattctttctaaggttgcacaagatatggttgaggaatggtttgattgtgttgatgaggaggattcctttgaggaagtttctttaagtgcagcactcaatggtgttgagggtttggactatatggaaagaattcctcttgccacatctgagggttttcctcatgtgctttcacgtaaaaatggtga

SEQ ID NO: 103576 - DNA, 235 bp, Glycine max
cttggagatctacaatgaggtggttaatgacttattaaatccagcaggacagaacctaagaatcagataggatgctcagggcacctatgttgagggaataaaggaagaggttgtactctcccctgctcatgcactatcccttattgcagctggagaagagcacaggcatgataggtccacaaacttcgacctactcagcagcaggagccatacaatatttatcctgactatagag

SEQ ID NO: 103577 - DNA, 267 bp, Glycine max
  unsure (1)..(267): unsure at all n locations
attggtccttaaacactcatcagtcatcaccatggccaagctagttttttccctttgttttctgcttttcagtggctgctgcttcgctttcagttccagagagcagcctcagcaaaacgagtgccagatccaaaaactcaatgccctcaaaccggataaccgtatagagtcagaaggagggctcattgagacatggaaccctaacaacaagccattccagtgtgccggtgttgccctctctcgctgcatctncaaccgcaacgccct

SEQ ID NO: 103578 - DNA, 262 bp, Glycine max
gtcagcattgaatatgatgcatgtacaattccaaatgattgtggttcattggttgtagccaaggttggaaatcacaaacaaattgttggtttccatgttgctggaagcaagggaagactgggatatgcttcactgataccatatgttgagccagttgtgcaagctcaaagtgctgaagtttactttgacttcttccctgtggaggttaatagtcaagagggagttgctcatattggtgaattgaaatctggtgtctatgttc

SEQ ID NO: 103579 - DNA, 268 bp, Glycine max
tacaggaggaaaaacacggaggaaagggaagtgaagaggaacaagatgaacgtgaacacccacgcccacaccaacctcatcaaaaggaagaggaaaagcacgaatggcaacacaagcaggaaaagcaccaaggaaaggaaagtgaagaagaagaagaagaccaagacgaggatgaggagcaagacaaagagagccaagaaagtgaaggttctgagtctcaaagagaaccacgaagacataagaataagaacccttttcacttcaactc

SEQ ID NO: 103580 - DNA, 241 bp, Glycine max
gtccacagcaagctgaggatgacaaatgtggggatctaccagaaggacctgctgttaaaattggtgagaactaagatgcaatggatggttggtttagacttgagagagattctgatgatgaattcaataactacaagcttgtgctctgaccacagcaagctgacgatgacaaatgtggggatattgggattagtattgatcatgatgatggaaacaggcgtttggttgtgtctaagaacaa

SEQ ID NO: 103581 - DNA, 261 bp, Glycine max
agttgctcatccaaaaccaggatgaaatgatcaagagtggtcggttgtctgaaccatacaaaggaattggcgattgtttcactcgaaccatgaaggatgaaggggtgattgctctttggagaggaaacactgctaatgttatcagatacttccctactcaggctctgaattttgcttttaaggattatttcaagaggcttttcaacttcaaaaaggataaagatggctactggaaatggtttgctgggaatttagcatctg

SEQ ID NO: 103582 - DNA, 262 bp, Glycine max
tctgttctaaaatcacaaaccctaaccaagaaagttttcaccgcatctccacctattctcaatctccacaaatcgaagaaaagagaatgagtagacgctcgagcagaactgtctacgttgggaatctacctggtgatatccgtgaaagagaagttgaagatttgtttctgaagtatggacacataacacacattgacctaaaggttcccccaagaccacctggttatgcatttgtagagtttgaagatgctcaagatgctga

SEQ ID NO: 103583 - DNA, 258 bp, Glycine max
ccaactaacaataattccttcacttgcagaacttagttctctgttgcatcatcatcatcttcattagtgttagccctaaacttcaccttcaaccatgaccacagtgccaccacacagtgtccaagtgcacacaacaacacaccgctacgaagccggcgtcgtcccgccggctcgttttgaggcgcgcgttacgaagccggcatcaaggcgccctcttccatttaccattccgagagaggtccgacgacctctcaggtt

SEQ ID NO: 103584 - DNA, 261 bp, Glycine max
caacaagccatacttacatttggctccctcacccaagcctcagctatccgagttgggtccttccagggagaggaaatctatgccccattcaagagcctgcttccaatggttaaccctgacgacattgtgtttgggggatgggatatcagcaacatgaacctggctgatgccatggccagggcaaaggtgtttgacatcgatttgcagaagcagttgaggccttacatggaatccatgcttccactccccggaatctatgac

SEQ ID NO: 103585 - DNA, 258 bp, Glycine max
ggctagccaatcaaacactaaatcagttcacgatttcacagttaaagatgccagtcgaaataatgttaatctcgccgattacaaaggaaaggtccttctcattgtcaatgttgcctcacaatgcggcttgactaattcaaactacacagagcttaaccaattgtatgagaaatacaaagggaaaggacttgaaattctggcattcccatgcaatcagtttggggctcaggagccaggaactaatgaagagattgtgga

SEQ ID NO: 103586 - DNA, 259 bp, Glycine max
gtttactttgacttcttccctgtggaggttgatagtcaagagggagttgctcacattggtgaattgaaatctggtgtctatgttccactgactacaaaaactaatttgatggaaactcccaaggaatggcaactggatctaccttgtgacaaaattcctagtgtcttgactacaactgatgagagattggtaggcacagaacatgagggatatgatccttttcttggtggaattcagaaatcatgccactcccatgatg

SEQ ID NO: 103587 - DNA, 253 bp, Glycine max
taacatgccgcaacttcctgttgccggttgattgtctcttttgaggggatggttctgttccggctagatctagtttccattactgttctataaaactggttctgtttgtttccgtttttatgtaacctgttgtttgtagggaagacaatatgaaactgctattattttaaagctctaaatgttcaatccaactaaatgcccaaaaaaaaaaaattgaacaaaaaaaatcaatgggtataacgtacagtgcaag

SEQ ID NO: 103588 - DNA, 260 bp, Glycine max
tggatgaccccaaggttcgttccaagatcttgtctgaagagttcggttgggacaaggatcttgccaagaaaatctggtgctttggccctgagacccttggacccaacatggtggttgatatgtgcaagggagtccagtatttgaatgaaatcaaggattctgtggttgctggattccagtgggcatcaaaagaaggtgctttggctgaagaaaacatgagagccatctgctttgaagtatgtgatgttgtgctgcacgct

SEQ ID NO: 103589 - DNA, 258 bp, Glycine max
gttttagcgcaggtcttctagatttaaggaagatgggtaaggaaaaggttcacatcagtattatggtcattggccatgtcgactctgggaaatccactaccactggtcacctgatttacaagcttggaggcattgacaagcgtgttattgagaggtttgagaaggaagctgctgagatgaacaagagctctttcaagtatgcctgggtgctggacaaacttaaggctgagcgtgaaagaggaatcaccattgatattg

SEQ ID NO: 103590 - DNA, 261 bp, Glycine max
caattacaaattacactctttgcctcgcaccttcaacttaaccttttctactcataatcttaataacttgctagaagaagatacagaaagagaaaaagtgtgtgtgtgtgagacagagcaatggctggctcgtgggcacgccgttctctgattgttctggctatcatttccttcggatgtttatttgcaatttccattgctaaggaggaagccacaaaattggggacggtcatcgggattgatcttggaacgacctattca

SEQ ID NO: 103591 - DNA, 259 bp, Glycine max
ggggatcgaagccggggagcggaggtgcggcgtcggcgcagaacgaagccatagaccggcgagagcgtctccggcgactggctctggagaccatagacttggcgaaggatccctatttcatgcgcaaccacctcggaagctacgaatgcaaactctgtctcactctccacaacaacgagggtaactacttggcccacactcagggcaagcgccaccaaaccaacttggccaaacgtgccgctcgcgaggccaaggacgc

SEQ ID NO: 103592 - DNA, 258 bp, Glycine max
ggaaatttttcctttgatattaaatctcgctctagattggaaaaagtttcctctacaaaagcacaatttgttagtggaaaaaccttcaaatatgatataattggtgctggttcacattcttcaggagattttcctgaaaaggaagatcaagaaaaacccaaaaagattgataccagattgagacaaagaatagatcctcaatacaatgaggttcaggctcagatggaaacaaatttgtttaaattgtctcttgatgat

SEQ ID NO: 103593 - DNA, 257 bp, Glycine max
cggctcgagaggaaaaccatttcttctgaagataaacctttcaacttgagaagccgcgaccccatctattccaacaagcttggcaagttgtttgagattaccccagagaaaaaccctcagcttcgggacttggatgtcttcctcagtgttgtggatatgaacgaggttgctcttcctgttgctgcctctgttgttgttctttaatgccaacaagttcaatgtttgcttctccttcattaatcactagtaccactatg

SEQ ID NO: 103594 - DNA, 252 bp, Glycine max
atcggccagcaccaacagcatcggcggcgacagtcactctccgacaacaacacttccgcggcgaaaaatgtctctggtggcgaacgatgatttccagcacattctgcgtgtgctgaacaccaacgtggatgggaagcagaagataatgttcgctatgacctccatcaagggtattggaaggagattcgccaacatcgcttgcaagaaggccgatgttgacatgaacaatagggctggtgagttgagtgctgc

SEQ ID NO: 103595 - DNA, 257 bp, Glycine max
attggtccttaaacactcatcagtcatcaccatggccaagctagttttttccctttgttttctgcttttcagtggctgctgcttcgctttcagttccagagagcagcctcagcaaaacgagtgccagatccaaaaactcaatgccctcaaaccggataaccgtatagagtcagaaggagggctcattgagacatggaaccctaacaacaagccattccagtgtgccggtgttgccctctctcgctgcaccctcaacc

SEQ ID NO: 103596 - DNA, 224 bp, Glycine max
gggaaaggttccatgtgaacggcacttgcacatgggttagtcgatcgtaagggacggtggaagcccgtctgatagcgctctgtgcgcgtactccgaaagggaatcgggttaaagattgctgaaccgggacgtggcggctgacggcaacgttagggagtccggagacgtcggcggaggacccggtaagagttatctctgctgtttaacaggctgcccaccctgga

SEQ ID NO: 103597 - DNA, 258 bp, Glycine max
ctggtccttaaacactcatcagtcatcaccatggccaagctagttttttccctttgttttctgcttttcagtggctgctgcttcgctttcagttccagagagcagcctcagcaaaacgagtgccagatccaaaaactcaatgccctcaaaccggataaccgtatagagtcagaaggagggctcattgagacatggaaccctaacaacaagccattccagtgtgccggtgttgccctctctcgctgcaccctcaaccgc

SEQ ID NO: 103598 - DNA, 256 bp, Glycine max
gcctaaaagaacaacaacaggagcagcaacaggaagagcaacctttggaagtgcggaaatatagagccgaattgtctgaacaagatatatttgtaatcccagcaggttatccagttgtggtcaacgctacctcaaatctgaatttctttgctattggtattaatgccgagaacaaccagaggtacttcctcgcaggttcgcaagacaatgtgataagccagatacctagtcaagtgcaggagcttgcattccctgg

SEQ ID NO: 103599 - DNA, 256 bp, Glycine max
agcgacggcgccctttttttttttttttcacaaagtgaatttcataagcatcccttgaaagtggttccaaaacttgctagagttctacaatttagaatttaaaaacttttgtcgttttgaataaggccaaaaaaccaataaaaaaaaaaaaaaaaaaaaaaaaataaaacacataaacttcaaaaaaaaatagaagattggtgaacaaaaaaaaaaaaacctcgaagaggggggccccctcatacgggaaattcac

SEQ ID NO: 103600 - DNA, 259 bp, Glycine max
gtttgttgttcctcactgacctcaccatggcgaccagagccaagctttctttagctatcttccttttctttcttttagccttgatttcaaacctagccttgggcaaacttaaagaaaccgaggtcgaagaagatcccgagctcgtaacatgcaaacaccagtgccaacagcaacggcaatacactgagagtgacaagcgaacatgcttgcaacaatgtgacagtatgaagcaagagcgagagaaacaagtcgaagacga

SEQ ID NO: 103601 - DNA, 260 bp, Glycine max
cactcgagccgattcggctcgagtacaaggaggccaaggcgcttggagtggataccgttccgagtcctcgttggccctgttacatacctgttgctctccaagcctgccaatggagttgagaaatccttaactctcctctctctccttgccaaggttcttgctgtctacaaggaagttattgctgaccttaaggcagctggtgcttcatggattcacattcatgagtctacgcttgtcttggaccttgagtctgcacaagt

SEQ ID NO: 103602 - DNA, 260 bp, Glycine max
aaaaagataagcaacaatcagagcgtgtcgaatcgcaaaatatcatatcaccatcaacagtgactacgtatcgctcctctccttcgtttcgtcttcgatcttcggcatcattctgcgtgtgttcacatcatggccatcgcttcagtggcatttaagtccatggaggaccaccgcaagcagattgagttcgaggaggcgcgtaaagcagggcttgcgccggctgaactcgatgaacattgagatggaatcaatcctcacat

SEQ ID NO: 103603 - DNA, 256 bp, Glycine max
gcaaacattgaacttgttggcattaaagaacaacaacagaagcagaaacaggaagaggaacctttggaagtgcaaaggtacagagctgaattgtctgaagacgatgtatttgtaattccagcagcttatccatttgtcgtcaacgctacctcaaacctcaatttccttgcttttggtatcaatgctgagaacaaccagaggaacttccttgcaggcgagaaagacaatgtggtaaggcagatagaaagacaagtgc

SEQ ID NO: 103604 - DNA, 254 bp, Glycine max
atcagcatatgagaagaggtctgagtatggtgatcgtgatctcacgaaggcagatttggagatggtgactagattggatccacttcgggtgtatccttatagatatcgcgcagagttttgatggacaatcataaggaagaggaagccattgcggaactctctagagcaattgcatttaaagctgatttgcacctcctgcatctacgtgcagcattccatgaacacaatggagatgtcttaggtgcgctaagaga

SEQ ID NO: 103605 - DNA, 255 bp, Glycine max
gtgggagctatagaaattatcattgatagtttcgcaagtcctgactgcaacatagttggtgcaatgcttttggttgatacttatcataccaatcctgaaaatgcagttcgtagtatttttgttgcgcctttcagaggcggaaggcccattcgggtggttacatttccaaataccatcgtgctctttgaaccagacatgaattcaaggtttcagcttttgagtaccactaccaatggtgattttgttcaaggaaaa

SEQ ID NO: 103606 - DNA, 253 bp, Glycine max
ttgtctttgaacactcatcaccatggccaagcttgttctttccctttgttgccttcttttcagtagctgcttcgctctgcgagagcaggcacagcacaatgagtgccagatccataagctgaatgccctcaaaccggataaccgtatagagtcggtacgtgggttcattgagacctggaagcctatcaacaagccattccagtgtgccggtgttgccctctctcgctgcacccttaaccgcaatgcccttcgt

SEQ ID NO: 103607 - DNA, 256 bp, Glycine max
caacaacaataacaatggctgcctcactacaagctgcagctaccttcatgcaacccaccaaggttggcatagcctctcgcaacctcaaatctacacaatgcatttctaaggcttttggcttggaacctgctgcagctaaactcacttgctcccttcagcctgatctcaaagaatttgctcaaaaatgtgtcgacgctaccaaaattgcaggattcgcccttgccacctctgctctcgttgtttctggagcaagtgc

SEQ ID NO: 103608 - DNA, 253 bp, Glycine max
gaggattccgaacgagcgaccttcttcgtttctcgcaaagtttaagtcatcatgggtcaggaaaagactcacatcaacattgtcgtcattggacatgtcgactctgggaagtcaactaccactggtcatttgatctacaagcttggaggtattgacaagcgtgtgattgagaggttcgagaaggaggctgctgagatgaacaacaggtcattcaagtatgcctgggtgcttgacaagctcaaggctgagcgcg

SEQ ID NO: 103609 - DNA, 258 bp, Glycine max
atggagagctgcaagagggacgggtgctgatcgtgccacaaaactttgtggtggctgcaagatcacagagtgacaacttcgagtatgtgtcattcaagaccaatgatacacccatgatcggcactcttgcaggggcaaactcattgttgaacgcattaccagaggaagtgattcagcacactttcaacctagaaagccagcaggccaggcagataaagaacaacaaccctttcaagttcctggttccacctcaggagt

SEQ ID NO: 103610 - DNA, 256 bp, Glycine max
gaccgagtgcctcccacgcccggtcgtactcataaccgcatcaggtctccaaggtgaacagcctctggtcgatggaacaatgtaggcaagggaagtcggcaaaatggatccgtaacctcgggaaaaggattggctctgagggctgggcacgggggtcccagtcccgaacccgtcggctgtcggtggactgctcgagctgcttccgcggcgagagcgggtcgtcgcgtgccggtcgggggacggattgggaacgggc

SEQ ID NO: 103611 - DNA, 257 bp, Glycine max
cgcgctgcttcaccatacttcctatggaatttaatctagtggtgcgtcaaaaattcttgaattttgtgcgattcattatgaagaaaagggacaaattgagttgccaggttggaatcaatccatattctatggagtggactggtttggcaaatagactgttgagcaagggagatgacattttgtgttgtgactatgctagttttgatggtctgataactaagcaagtcatgagcaagatggcagaaatgataaacagt

SEQ ID NO: 103612 - DNA, 258 bp, Glycine max
gtggtgccttatcgctgtggttatcatcttcttcttcctctttcttagatctcttctttctctacgccgcacgccgaaaccatggccggaaaaggagagggtcctgctatcggaatcgatctcggaaccacctactcttgcgtcggtgtgtggcaacatgaccgcgttgaaatcatcgccaacgaccaagggaacagaaccacgccgtcttacgtcggattcactgacaccgagcgtctcatcggtgatgcggccaag

SEQ ID NO: 103613 - DNA, 257 bp, Glycine max
ctcgagccgctcgtcgaccgcaaaagagaaaaaaacaaaaatgctgagaatcgctgctagcgcgaagacaattgttcgaacggggtcgttggaggcgccaccattggggattagggttctgcctcggctctaccacgagagggtggtggaccactacgataacccccgcaacgttggatccttcgacaagaacgaccccaccgtcggaacgggtcttgtcggagcacccgcgtgtggtgacgtcatgaaactccaga

SEQ ID NO: 103614 - DNA, 254 bp, Glycine max
gctccattggtccttaaacactcatcagtcatcaccatggccaagctagttttttccctttgtgttctgcttttcagtggctgctgcatcgcattcagttccagagagcagcctcagcaaaacgagtgcgagattcagaaactcaatgccctcaaaccggataaacgtatagagtcataaggagggctcattgtgacatggaaccctaacatcaagccattccagtgtgccggtgttgccctctctcgctgcac

SEQ ID NO: 103615 - DNA, 252 bp, Glycine max
aatcactctagctgttgcaaatttctactatttttcaatggcttctgcagatgttgagttccgttgctttgttggtgggcttgcttgggtcaccggcaacgatgccctcgagaaagccttttcaatctacggcgacatcgttgaatcgaaggttatcaacgaccgtgagactggaaggtccagatgattcggatttgtgaccttcgcctcagagcagtcaatgaaagatgcgatcgcaggaatgaacggcca

SEQ ID NO: 103616 - DNA, 258 bp, Glycine max
cactcactcacaactcagtgaaagagaatccgaggcgaagagaagagaaaaattaagatggaggggaaggagcaggatgtgtcgctgggagcgaacaagttcccggagagacagccgattgggacggcggcgcagagccaagacgacggcaaggactaccaggagccggcgccggcgccactggttgacccgacggagtttacgtcatggtccttttacagagcagggatagcagagtttgtggccacttttctgttt

SEQ ID NO: 103617 - DNA, 255 bp, Glycine max
ggacaacgttcgtgttgcaaagctcttgaggagggggcttgcataacagtactgtagttcgaggattggttctgaaaagtgatgctgtcgggactataaagcaagcagaaaaggcgaaggttgctgtgtttgctagtggtgttgatacatctgcaactgagactaaaggaactgtcctcatacatacagctgatcagctagaaaattattcaaaaactgaagaggctaaagtagaggagctcatcaaggcagtag

SEQ ID NO: 103618 - DNA, 255 bp, Glycine max
actggatctaccttgtgactaaattcctagtgtcttgactacaactgatgtacagttggtaggcacagaacatgagggatatgatccttttcttggtggaattcaaaaatatgctactcccatgatgcccctagatgaagaaattctttctaaggttgcacaagatatggttgaggaatggtttgattgtgttgatgaggaggattcctttgaggaagtttctttaagtgcagcactcaatggtgttgagggttt

SEQ ID NO: 103619 - DNA, 255 bp, Glycine max
agagatttctcagttgtcaacacccttcggcacttcagcacagcatgtggcatcatatttctcagaagccatatcagcaaggttggtcagttcatgcttagggatatatgccactttgccacacactcaccaaatccacaaggtggcttcggcttttcaagtgttcaatggtattagtcctttcgtgaagttctcacacttcacagcaaaccaagctattcaagaagctttcgagagggaagagagggtgcacat

SEQ ID NO: 103620 - DNA, 257 bp, Glycine max
caaccgtttcgacggtcccattccctccctctccaacctcaccgctctcaagctcctcttcctctcccacaacaaattctccggcaagtttcccgccaccgtcacttccctcccccacctctaccgccttgacctctcctacaacaacctctccggtcagattccggcaactctcaacaacttaaccccacggcgaagaagataaagagaacaacttcgataccggagtttgcaagcgacaaggagatgggatttgc

SEQ ID NO: 103621 - DNA, 255 bp, Glycine max
taaaattcttccaccaagttatgggtttccttgtgttgcttcttttctccctcttaggtctctcttctagttccagcatatcaactcatcgttccatattggaccttgacctaaccaagtttaccacacagaaacaggtgtcttcactgttccaactatggaagagtgagcatggacgtgtctaccataaccacgaagaagaggcaaagagacttgagattttcaagaataacttgaactatatcagggacatga

SEQ ID NO: 103622 - DNA, 229 bp, Glycine max
caagaacaatcaaacagaagaggctcaacgtcgcagaagcagcagctacaggacagtcaccacaacattcgtcacttcaatgacggtgacgtactcgtgattcgtcctcgtgatgcctactggacctataacactggcgatgaaccagttgttgccatcagtcttcttggcacctctaacttcagtaaccagcttgatcagacccctagggtattctaccttgctggga

SEQ ID NO: 103623 - DNA, 256 bp, Glycine max
gagctctcgggtgtttgtagggcttgcttttctgctgatgctgtaaataagcatgttgattttgtgagggagtacaaacaggattttgaacgtgatcttgatccagaaagcattactactttcccatctaccctgtctcaactgactgagcggttgaaacactggaaaaatgttcttcaaagcaatgttgaggataggtttccagcagtattaaagttggaagaagaaagcaaggtgttgcgggactttcacgtta

SEQ ID NO: 103624 - DNA, 253 bp, Glycine max
ctctccattgtctttgaacactcatcaccatggccaagcttgttccttccctttgtttccttcttttcagtggctgcttcgctctgagagagcaggcacagcaaaatgagtgccagatccaaaagctgaatgccctcaaaccggataaccgtatagagtcggaaggtgggttcattgagacctggaaccctaacaacaagccattccagtgtgccggtgctgcgctctctcgctggatccttaaccgcaatgc

SEQ ID NO: 103625 - DNA, 254 bp, Glycine max
acacaacaaaaaaagacaacccagagagcgcgtcttaataaacgctcttctctgaaaatccccatttcttatcttctttcttcttctctttcgcttcttcgatcttcgatcttcgtcgctgaaaatgagagagtgcatttcaatccacatcgtccaggccgggattcaggttggacacgcctgctgggagctttactgcctcgaatactgcattcagcctgttaggcagatgccaagtgacaagaccgttggtt

SEQ ID NO: 103626 - DNA, 245 bp, Glycine max
attttagagcaagtgttgatttggatcgcacgcatcgtattaaaggaatgattaaaatggtggtcacagttggtattcctgacaatactggtataacatgggctctgttctaattctagttgcttttagggtgcgtgccagttctgatatttacccatctgctctcaagactgtgaattatgggatcctgtctgcactaaagtgatgaccatgctactatatccagacccgtgttctgatgcatg

SEQ ID NO: 103627 - DNA, 257 bp, Glycine max
tccacgacgaccaagccatggaaagcatgaacatgacgacgacgaggacgaagaagaagatcaacctcgtcctgatcaccctccagatcgaccatgcaggaccgaacaaccagaaccacgtggaagaggatgtcagactagaagtgggggtgatgaacatatttgcaccatgaagcttcacgagaacattgctcgcccatctcgtgctgacttctacaacccacaatctggtacgcattagcagcctcaacagtctc

SEQ ID NO: 103628 - DNA, 254 bp, Glycine max
ctctaatgacattgcaccccgtgtgttgccttacgttgttcacaccatcgctaaatacggttagagttcatttatgtggcttggtccaacaccaagggtattcatcttggatcctgacaaattcaaagaaatggctactaaggtctatgattttcaaaagcccgacactagtccacttttaaagcttctagcatcagggtttgcaaattatgatggcgacaagtgggctaaacacagaaagatcgtgagtccag

SEQ ID NO: 103629 - DNA, 254 bp, Glycine max
tatcattgatcgtagcattcaagatgcttatattaatgctattcgacgtgcaaagaacttcatctatattgaaaatcagtatttccttggaagctcttttgcctggagtgctgatgatattaagcctgaagacattggtgctttgcatctaatcccaaaggaactttcactcaagattgttagtaagattgaagctggggaaaggtttgctgtgtatgttgtagtcccaatgtggccagagggtgttccagaaa

SEQ ID NO: 103630 - DNA, 253 bp, Glycine max
gcctgacgtcacttataatgacattggaggatgtaatatacagtaacaggtaatccgtgaggctgtggagctaccccttacacatcatgaactatacaaacaaattggtattgatcctccccgtggtgtattactgtatggaccccctggcactggcaaaacaatgcttgcgaaagctgttgcgaatcataccactgctgctttcatcagggatgtgggatctgagtttgtgcagaagtatcttggtgatttt

SEQ ID NO: 103631 - DNA, 238 bp, Glycine max
attggtccttaaacactcatcagtcatcaccatggccaagctagcttcatccctttgtcttctgcattgcagttggtgctgcttcgctttcagttccagagagcagcctcagcaaaacgagtgtcagatcgcataactcaatgctctcaaaccggataaccgtatagagtcagtatgagggctcattgagacatggagccctaacagcaagccattccagtgtgccggtgtagcgctc

SEQ ID NO: 103632 - DNA, 254 bp, Glycine max
acctaggcacccagagacgaggaagggcgtagtaagcgacgaaatgcttcggggagttgaaaataagcgtagatccggggattcccgatataggtcaacctttcgaactgctgctgaatccacgggcaggcaagagacaacctggtgaactgaaacatcttagtagccagaggaaaagaaagcaaaagcgattcccgtagtagcggcgagcgaaatgggagcagcctaaaccgtgaaaacggggttgtgggaga

SEQ ID NO: 103633 - DNA, 254 bp, Glycine max
ctcgagccgctgtggcagatgtcacaggaagcaacgttgtgtcgggtgcggaggacgaactcatgagaatcctcattctaatgaggaatttcttgccagggtaccatcaggctggtaatggggaatggaatgttgctggcattgcacatagagcttatgatcttgaaggaaagacactaggaaccgttggcgcgggtcaaattgggaagcttgtgctccagaggttgaaacttttagctgtaatcttctttatt

SEQ ID NO: 103634 - DNA, 254 bp, Glycine max
taccgaatgagagcatcaaactcttcttcttcgatttccattgcgaacgttactttttcttcttctttctcttcattttcttcgctcttcgatcttcgtccggggactgctccgaataccaccaccaccactcgccgatggccacgatcggaggcttacacgactcccaacgctctcacaacagcgtcgaaaacgaagccctcgctcgaatcggcgtagacgaacacaacaagaagcagaattcgcttctggag

SEQ ID NO: 103635 - DNA, 254 bp, Glycine max
ggtggtggcttcttctttgaatccgctttctccaaacttttcaatgaccattttctcaagttggtccctcaagccaacattatagtggtttccgttgagtacagactcgctccagaacaccctctccctgcagcttacgatgattgttgggacgctctcaaatgggtcgcatcccattctactaaagacaccacccccaacaacactgaatcttggttgactgagcacggtgacttcaacagagtgttcatagg

SEQ ID NO: 103636 - DNA, 254 bp, Glycine max
ctctccattggtccttaaacactcatcagtcatcaccatggccaagctagttttttccctttgttttctgcttttcagtggctgctgcttcgctttcagttccagagagcaggctcagcaacacgagtgccagatccagaaactcaatgacctcagaccggataaccgcatagagtcagtaggagggctcattgagacatggaaccctggcaacaagccattccagtgtgccggtgttgccctctctcgctgca

SEQ ID NO: 103637 - DNA, 251 bp, Glycine max
atagagtcagaaggagggctcattgagacatggaaccctaacaacaagccattccagtgtgccggtgttgccctctctcgctgcaccctcaaccgcaacgcccttcgtagaccttcctacaccaacggtccctcggaaatctacatccaacaaggtaagggtatttttggcatgatatacccgggttgtcctagcacatttgaagagcctcaacaacctcaacaaagaggacaaagcagcagaccacaaga

SEQ ID NO: 103638 - DNA, 247 bp, Glycine max
cttaataaataatttaagatactatgatgagagcacggttcccattactgttgctgggacttgttttcctggcttcagtttctgtctcatttggcattgcttactgggaaaaagagaaccccatacacaacaagtgtctccagagttgcaatagcgagagagactcgtacaggaatcaagcatgccacgctcgttgcaacctccttaaggtggagaaagaagaatgtgaagaaggtgaaattccacg

SEQ ID NO: 103639 - DNA, 241 bp, Glycine max
cgctctcccaatcgccagtctctgaccagaagagcgaaccacaacggaagagtaaattaccgtcaagcgaatagccgattctccgtcaaagcctccgccacagagattgcctttgaccagcattcccgctctgctatgcaggccggcattgacaagctcgccgacgccgtcggctcactcttggcccaggggataatgcgtgtcgatgatatcgagtcctaagtggttacgcggtgtcaca

SEQ ID NO: 103640 - DNA, 253 bp, Glycine max
gctcaacaatcctacttgcaaggattcagcaggaacattttagaggcctcctacgataccaaattcgaggagataaacaaggttctgtttagtagagaggaacggcagcagcaaggggagcagaggctgcaagagagcgtgattgtggaaatctcgaaggaacagattcgggcactgagcaaacgtgccaaatctagttcaaggaaaaccatttcttctgaagataaaccttttaacttgagaagccgcgacc

SEQ ID NO: 103641 - DNA, 253 bp, Glycine max
caaaatgatcaaattatatctggtcttgtttccacttttccagtcattatagatacaattttaaaatattggatttatcgttatttaaatcgcgtatctccatcacttgtagtgatttatcattcaatgaatgattgactgacaaaatgattcacttatcaaattttaatttagagttttttagctataaagacaataactttgcatttgcccatctttctaacccccttaaatgaaaaaaggggttccccga

SEQ ID NO: 103642 - DNA, 254 bp, Glycine max
ccccaccatgctgacgctgattacctcatcgttatccttaacgggactgccattcttaccttggtgaacaacgatgaccgagactcttacaaccttcaatctggcgatgccctaagagtccctgtaggaatcacatactaatgtggttaaccctgacaacgacgagaatctcagaatgataacactcgccatacccgttaacaaacccggtagatttgagagtttcttcctatctagcactcaagctcaacagt

SEQ ID NO: 103643 - DNA, 252 bp, Glycine max
gtcctaataatggttttgaaatgtggagttctgagtgggcaaatcaaacttcatggcatttgagtttccttattgacaatcccaaacagtctacagtttttgatattctcttgggaatttctcaagattttgaaattgctggtaatactcttatgccagctttttctgttccacaggctactgccagatcttctgaaaatgcggaatcctctgcatgatctggaatttgtgttttctttcgcttgttcgttt

SEQ ID NO: 103644 - DNA, 266 bp, Glycine max
aatcgttcgaatgggttttagaacatggtgggattgccactgatgatgattatccttacagagctaaagagggtagatgcaaagccaataagatacaagacaaggttacaattgacggatatgaaactctaataatgtcagatgagagtacagaatcagagacagagcaagcgttcttaagcgccatccttgagcaaccaattagtgtctccattgatgcaaaagattttcatttatacaccgggggaatttatgatggagaaaac

SEQ ID NO: 103645 - DNA, 264 bp, Glycine max
agagacttgagattttcaagaataacttgaactatatcagggacatgaatgcaaacagaaaatcaccccattctcatcgtttaggattgaacaagtttgctgacatcactcctcaagagttcagcaaaaagtacttgcaagctcccaaggatgtgtcgcagcaaatcaaaatggccaacaagaaaatgaagaaggaacaatattcttgtgaccatccacctgcatcatgggattggaggaaaaaaggtgtcatcacccaagtaa

SEQ ID NO: 103646 - DNA, 263 bp, Glycine max
cctaaaccctactcattctccatacctcaacgaagaggttaaagagacggcaacactttgctgtccgccttgaccgagcagagcttcgtcttggccctcgattttgccctaaagtactctcagtcacaacagacaccgtcgtcgtcgtcgtcgtcatcaatggcaccgaagcagaccaaggctgagaagaagatcgcttacgatgcgaactgtgcgacctaatggaggagtacggccagatcctcgttgtgaactccgataac

SEQ ID NO: 103647 - DNA, 263 bp, Glycine max
ctcgagcgctaacaataattccttcacttgcagaacttagttctctgttgcatcatcatcatcttcattagtgttagccctaaacttcaccttcaaccatgaccacagtgccaccacacagtgtccaagtgcacacaacaacacaccgctacgaagccggcgtcgtcccgccggctcgttttgaggcgccgcgttacgaagccggcatcaaggcgccctcttccatttaccattccgagagaggtccgacgacctctcaggtt

SEQ ID NO: 103648 - DNA, 263 bp, Glycine max
taccaagcaagttgcaagaaaggccctgttcaactaagaatggaaccggtcataaccatacaggtgcttccatcagtggcagcgcaccggcttctaaggcacaggttgttggttggcctcctataagatcttttaggaaaaactcgatggccacgacaactaacaagaacaatgatgaagtggatgggaaaccaggtgttggcgcactctttgtgaaggtcagcatggatggtgctccgtatcttaggaaggtagatctaaga

SEQ ID NO: 103649 - DNA, 262 bp, Glycine max
cttaaacactcatcagtcatcaccatggccaagctagtttttgcccttcggtttctgcttttcagtggctgctgcttcgctttcagttccagagagcagcctcagcaaaacgagtgccagatccaaaaactcaatgccctcaaaccggataaccgtatagagtcagaaggagggctcattgagacatggaaccctaacaacaagccattccagtgtgccggtgttgccctctctcgctgcaccctcaaccgcaacgcccttc

SEQ ID NO: 103650 - DNA, 263 bp, Glycine max
tactcactcactgcagatctcaattgcatcgctgtccatggctaccatcgttagcatcaaggcccgccagatcttcgacagtcgtggcaatccaactgtcgaggtggatttgacttgctccgatggtacttttgccagagctgctgttccaagtggtgcatccactgggatttatgaggcccttgaattgagagatggaggatctgactaccttggaaagggagtatcaaaggctgttgacaatgtgaacaccgtcattggcc

SEQ ID NO: 103651 - DNA, 247 bp, Glycine max
ggctcgagcggctcgagcgaaactagccagaggttgacctccttacaccccgaaatcgaagaacttgtttacagctctgtggagaatgaagaacacatatgcgtgctgaaggaccgcagcaagccgattatcttcaccatggcaaggttggaccgtgtgaagaacatcacaggactcgtggagtggtacggtaagaacgcgaagctgagggagttggtgaaccttgtggttgttgccggagacagga

SEQ ID NO: 103652 - DNA, 263 bp, Glycine max
ggtggacctaacggttcgatccggaacgaggaagagtattctcacggagccaataatggcttgaagaaagctattgatttctgccaggaagtgaaggcaaaatatcctaaaattacatatgcagatctcttccagcttgcgggtgttgttgcagttgaggttactgggggtccaacaattgatttcgttcctggtagaagagattcaaaagtatctcctaatgaagggcggcttcctgatgctaaaaaaggtgttccacatct

SEQ ID NO: 103653 - DNA, 263 bp, Glycine max
accactgcccgtcttggatcatttaaaatcttgacggccaaagctattgaggctaatgatgggaagcccctgccactgtatcagaaagctctgtgtgggctgactgctggtgctatcggagcaagtgttggtagtccagcagacttggcactcattcggatgcaggctgatgcaacattacctgctgctcagcgccgaaattacacaaatgccttccatgcactctatcgaattactgcagatgaaggggttttggcgctttg

SEQ ID NO: 103654 - DNA, 264 bp, Glycine max
ggaacaacaagatgaagatgaagatgaagacgaagatgatgaagatgaacaaattccctctcaccctcctcgccgaccaagccatggaaagcgtgaacaagacgaggacgaggacgaagatgaagataaacctcgtcctagtcgaccaagccaaggaaagcgtgaacaagaccaggaccaggacgaggacgaagatgaagatgaagatcaacctcgcaagagccgcgaatggagatcgaaaaagacacaacccagaagacctag

SEQ ID NO: 103655 - DNA, 265 bp, Glycine max
gtcaagcttctctacaagcgccacaagaacactgctttctcctggctcagaaacatcttccatgactgtgctgttcagagttgtgatgcttcactgttgctggactccacaagaaggagcttgtctgagaaggaaacagatagaagctttgggttgagaaatttcaggtacattgagaccatcaaagaagctttggaaagggaatgcccaggagttgtttcctgtgctgatatcctcgttctctctgccagagatggcattgttt

SEQ ID NO: 103656 - DNA, 261 bp, Glycine max
tctttgaacactcatcaccatggccaagcgtgttctttccctttgtttccttcttttcagtggctgcttcgctctgagagagcaggcacagcaaaatgagtgccagatccaaaagctgaatgccctcaaaccggataaccgtatagagtcggaaggtgggttcattgagacctggaaccctaacaacaagccattccagtgtgccggtgttgccctctctcgctgcacccttaaccgcaatgcccttcgtagaccttccta

SEQ ID NO: 103657 - DNA, 256 bp, Glycine max
aaacaattcaattcaatctgcctcgatcatggagaggaaaacatttgggtttttgttcttgctcctccttgtcttagcttctgatgtgacggtgaagagagcagaggcgaaagattgcttgacaaggaggcacgggttccagggtagatgcttattcgacaggcaatgtgcacatgtgtgcaggagcgatggtttcatcggtggtcagtgccgaggccctcttcgcaaatgcttttgcagcaggccatgttgatcg

SEQ ID NO: 103658 - DNA, 260 bp, Glycine max
cggaattcaaaaatatgccactcccatgatgcccctagatgaagaaattctttccaaggttgcgcaagatatggttgaggaatggtttgattgtgttgatgaggaggattcctttgaggaagtttctttaagtgcagcactcaatggtgttgagggtttggactacatggaaagaattcctcttgccacatctgagggttttcctcacgtgctttcacgcaaaaatggtgaaaaaggtaagaggagattcgtatctgggg

SEQ ID NO: 103659 - DNA, 190 bp, Glycine max
ctcgacacggcacccacacacacagttcgtcggaatgggcagggtgattagcgctcagcgtaacggcgctgggtcgatgttcaagtctcacactcacgaccgctagggtcaggagaggttccgcaacctcgacctcggcgagcgctacggctacctcaagggcgtcgtcaccgacatcatccacgacccc

SEQ ID NO: 103660 - DNA, 261 bp, Glycine max
tgggttgagtgtggtatcccttctggatttccactcactgttatctgcaatagcattttcaatgagatgcttatcagatatagttatgaaaagttgttgcgtcaagctaaggctcctagtatgtttctccagtcttttaaaaattttatttctttgtgtgtttatggagatgataatttaattagtgttcatgagtatgttaagccatattttagtggttctaaattgaaaagtttcctagctagtcataacatcaccatt

SEQ ID NO: 103661 - DNA, 141 bp, Glycine max
ggctggacctataacactggcgctgaaccagttgttgccatcagtcttcttgacacctctaacttcaataaccagcttgatcgaaccccgagggtattttaccatgctgggaacccagatatagagtacccagagaccatg

SEQ ID NO: 103662 - DNA, 261 bp, Glycine max
ggtaaatacggtgagataacggattccgtcatcatgaaggaccggaagaccggccagccgcgtggtttcggcttcataacttacgctgatccctccgtggttgatacagtgattgaggacactcacattatcaatggcaagcaggtggagattaagcggacgataccgaggggggctgctggctcgaactcaaaggacttccgaacgaagaagatttttgtgggtggaattccttcgactgttactgaagatgaatttagg

SEQ ID NO: 103663 - DNA, 261 bp, Glycine max
gttcaatatcctagtataccttaataaataatttaagatactatgatgagagcacggttcccattactgttgctgggacttgttttcctggcttcagtttctgtctcatttggcattgcttactgggaaaaagagaaccccaaacacaacaagtgtctccagagttgcaatagcgagagagactcgtacaggaaccaagcatgccacgctcgttgcaacctccttaaggtggagaaagaagaatgtgaagaaggtgaaatt

SEQ ID NO: 103664 - DNA, 264 bp, Glycine max
caacaacaataacaatggctgcctcactacaagctgcagctaccttcatgcaacccaccaaggttggcatagcctctcgcaacctcaaatctacacaatgcatttctaaggcttttggcttggaacctgctgcagctaaactcacttgctcccttcagcctgatctcaaagaatttgctcaaaaatgtgtcgacgctgaccaaaattgcaggattcgcccttgccacctctgctctcgttgtttctggagcaagtgcagaaggt

SEQ ID NO: 103665 - DNA, 261 bp, Glycine max
aaacaattcaattcaatctgcctcgatcatggagaggaaaacatttgggtttttgttcttgctcctccttgtcttagcttctgatgtgacggtgaagagagcagaggcgaaagattgcttgacaaggaggcacgggttccagggtagatgcttattcgacaggcaatgtgcacatgtgtgcaggagcgatggtttcatcggtggtcagtgccgaggccctcttcgcaaatgcttttgcagcaggccatgttgatcgaaatt

SEQ ID NO: 103666 - DNA, 262 bp, Glycine max
gtaggagcttgcattccctgggtctgcacaagctgttgagaagctattaaagaaccaaagagaatcctactttgtggatgctcagcctaagaagaaagaggaggggaataagggaagaaagggtcctttgtcttcaattttgagggctttttactgaataagtatgtactaaaatgtatgctgtaatagctcatagtgagcgaggaaagtatcgggctatgtaactatgactagagcttcaactatgaataaataaatcgac

SEQ ID NO: 103667 - DNA, 263 bp, Glycine max
ctcgagccgctcgagccgattcggctcgagcgcaacacaacaaaaaaagacaacccagaactcgcgtcataataaacgctcttctctgaaaacccacatttcttttcttctttcttcttctctttcgcttcttcgatcttcgatcttcgtcgctgaaaatgagagagtgcatttcaatccacatcggccaggccgggattcaggttggaaacgcctgctgggagctttactgcctcgaacacggcattcagcctgatgggcag

SEQ ID NO: 103668 - DNA, 258 bp, Glycine max
tccgactcttagccgccgatctctcagggcttgcatcttctcaggtaagctgtgaagatgtacacatcaaggaagaaaatccacaaggataaggatgctgaaccaactgaatttgaagagtcagttggacaggcattgtttgatctgacaaataccaatcaggagcttaaaagtgatctgaaggatttatacataaactcagccgtgcaagttgatgtttctggaaaccgcaaggctgttgttattcatgtcccttac

SEQ ID NO: 103669 - DNA, 257 bp, Glycine max
tgtctcacttcggacgttcgggtcccccagacatttccgacacttactctcttctcgttctgaacatcaccttccgtaccaccgccgacgacctattccctctcttcgacaagtatgggaaggtcgtcgacatcttcatccccaaggatcgaaggactggtgaatcgaggggttttgcgttcgtgcgttacaagtatgctgatgaggctcagaaggccgttgagaggctcgacgggagaatggttgatggtcgcgaa

SEQ ID NO: 103670 - DNA, 259 bp, Glycine max
cttaattattaacacttccttagttcaatatggggaagcccttcactctctctctttcttccctttgcttgctactcttgtcgagtgcatgctttgctattagctccagcaagctcaacgagtgccaactcaacaacctcaacgcgttggaacccgaccaccgcgttgagtccgaaggtggtttgattcaaacatggaactctcaacaccctgagctgaaatgcgccggtgtcactgtttccaaactcaccctcaaccg

SEQ ID NO: 103671 - DNA, 208 bp, Glycine max
taccttaatagataatttaagatactatgatgagcgcacggttccgattactgttgctgagacttggattcctggcttcagtttctgtctcaattcgcattgcttactgggacaaagagaaccccaaacacaacaagtgtctccagagttgcaatagcgcgcgagactcgtacaggatccaagcatgccacgctcgctgcaacctcct

SEQ ID NO: 103672 - DNA, 258 bp, Glycine max
gatgggcaggtcatcaccattggcgatgagcgtttcagatgtccagaggttctgttccaaccatccatgattggaatggaagcttcaggcattcacgagacaacatacaactccataatgaagtgcgatgttgatatcaggaaggacctctatggtaacattgttctttcaggaggaacaaccgtgttccctggtattgctgacagaatgagcaaggaaatttcggcattggcacccagcagcatgaagatcaaggtt

SEQ ID NO: 103673 - DNA, 259 bp, Glycine max
gaagccacaacagcaatcaagcagaagaggctcaaggtcgcagcagcaactacaagacagtcaccagaagattcgtcacttcaatgaaggagacgtactagtgattcctcctggtgttccttactggacctataacactggcgatgaaccagttgttgccatcagtcttcttgacacctccaacttcaacaatcagcttgatcaaaaccccagagtattttaccttgctgggaacccagatatagagcacccagagacc

SEQ ID NO: 103674 - DNA, 257 bp, Glycine max
ggggatcgaagccggggagcggaggtgcggcgtcggcgcagaacgaagccatagaccggcgagagcgtctccggcgactggctctggagaccatagacttggcgaaggatccctatttcatgcgcaaccacctcggaagctacgaatgcaaactctgtctcactctccacaacaacgagggtaactacttggcccacactcagggcaagcgccaccaaaccaacttggccaaacgtgccgctcgcgaggccaaggac

SEQ ID NO: 103675 - DNA, 261 bp, Glycine max
gtagaggaaccctagctagggtttggaagaagctgatccgagaagatggtgcagcgtctcacctaccgcaaacgccacagctatgctaccaaatccaaccagcacagagtcgtcaagactcccggtggcaagcttgtttatcagaccacgaagaagagggccagcggacccaagtgccctgtcactggaaagaggattcaagggattccacatttaaggccagcagagtataatagatcaaggttacacagaaaccgaagg

SEQ ID NO: 103676 - DNA, 258 bp, Glycine max
cttgggtttagcacagttaatgagatggttggccattccgatatgcttgaatttgataaggacgttgttaagagcaatgaaaaactagagaacattgacctctctctattgcttagacctgcagctgaactgtggccagtagctgctcaatactgtgtgcaaaaacaggatcatggtttggacatggccttggatactaagctcataagtctgtctaatgctgctttggaaaagggtcttccagtatacattgaaact

SEQ ID NO: 103677 - DNA, 230 bp, Glycine max
ctctccattggtccttaaacactcatcagtcatcaccatggccaagctagttttttccctttgttttctgcttttcagtggctgctgcttcgctttcagttccagagagcagcctcagcaaaacgagtgccagatccaaaaactcaatgccctcaaaccggataaccgtatagagtccgaaggagggctcattgagacatggaaccctaacaacaagccattccagtgtg

SEQ ID NO: 103678 - DNA, 256 bp, Glycine max
ctcagtgagagaaactctctctctagaaaccctattgcacgttttgcaatcgaactcgacaatggccaacagcaacctccctcgaagaatcatcaaggaaacgcagcgtttgctcagtgagccagcaccaggaattagtgcctccccttctgaagagaatatgcgatatttcaatgtgatgatcctcgggccaacccagtcgccttatgaaggaggagttttcaagttagaactatttttgccagaagaatatcca

SEQ ID NO: 103679 - DNA, 254 bp, Glycine max
aagtgattagaaatagaggcattcctgctgatgttcttgcaaagcgagctcatgaatttgaaaaacatgttgctcatgaaagcctcaaggatcaaattcctgctgttgacaagttgtattctactaaggttaataagtttgcaaaaattatgaaccttagacaaagtgttgttggtgatcttaaacttcttactgatgggaagttgtatgagggtaagcatattcctgtatctaatattagtgcaggggaaaat

SEQ ID NO: 103680 - DNA, 256 bp, Glycine max
actcgagccgattcggctcgaggtataccttaataaataatttaacttactatgatgagaacacggttcccattactgttgctgggacttgttttcctggcttcagtttctgtctcatttggcattgcttactgggaaaaagagaaccccaaacacaacaagtgtctccagagttgcaatagcgagagagactcgtacaggaaccaagcatgccacgctcgttgcaacctccttaaggtggagaaagaagaatgtg

SEQ ID NO: 103681 - DNA, 255 bp, Glycine max
atcatattcgaaatttgatcttacaaaacagcaaagtgatactgcctataatcttccctgctatggagaaaaatatacgggaccattggaatcaagctgttcagagcttgaccatgaatgttagaaaaatattctctgatgctgaccaggcactttttgatgaatgcttgaagagattccaagaagaagaaatcaaggatagggagaagcaagaaaagcgagaatccatatggaaacaactggaagatgttgctg

SEQ ID NO: 103682 - DNA, 254 bp, Glycine max
tatcactctagctgttgcaaatttctactatttttcaatggcttctgcagatgttgagttccgttgctttgttggtgggcttgcttgggtcaccggcaacgatgccctcgagaaagccttttcaatctacggcgacatcgttgaatcgaaggttatcaacgaccgtgagactggaaggtccagaggattcggatttgtgaccttcgcctcagagcagtcaatgaaagatgcgatcgcaggaatgaacggccagg

SEQ ID NO: 103683 - DNA, 256 bp, Glycine max
gacacgtcaagaatttgctgagttctacaaaagtgcccttctctatttggcatacacatcagtggaatctctctctgattcattcaagctggatctggcatttgatttgtccctctctgcccttcttggggataacatctacaacttcggagagctacttgcccatcctataattaagagccttatggggacaaaggtggaatggctttactacattctgcaggcattcaatgctggtgatttattacaatatcaa

SEQ ID NO: 103684 - DNA, 256 bp, Glycine max
cccaattacccttcccaattttcaccaaaacctaatactcccacaccaatcttcgatcatggacgccgattcacaacctcaacaactcgaagagagaacagaggagcaagaactgaagtacctggaattcgtgcaattcgcgaccatacaggctctgatgcgctgcgccatcctctactcatacgccaaggagcgcgcgggtcctctgaagcccggtgtcgacaccgtggaggaggccgtgaagaccgtcgtggct

SEQ ID NO: 103685 - DNA, 259 bp, Glycine max
gaaatggcattgatgagaccatttgcacaatgagacttcgccaaaacattggtcagaattcatcacctgacatctacaaccctcaagctggtagcatcacaaccgccaccagccttgacttcccagccctctggcttctcaaactcagtgcccagtatggatcactccgcaagaatgctatgttcgtgccacactacaccctgaacgcgaacagcataatatacgcattgaatgggcgggcattggtacaagtggtgaa

SEQ ID NO: 103686 - DNA, 258 bp, Glycine max
attggtccttaaacactcatcagtcatcaccatggccaagctagttttttccctttgttttctgcttttcagtggctgctgcttcgctttcagttccagagagcagcctcagcaaaacgactgccagatccaaaaactcaatgccctcaaaccggataaccgtatagagtcagaaggagggctcattgagacatggaacccgaacaacaagccattccagtgtgccggtgttgccctctctcgctgcaccctcaaccg

SEQ ID NO: 103687 - DNA, 256 bp, Glycine max
tgtataacttgtatgtacgtttgttgcatgggttaagcaaaatcgatcactggacgaagctgatatagttctttggtacgtatttggagtgacacacattcctagattggaagactggcctgttatgcccgtggaacgcattggtttcatgcttatgccgcatgggtttttcaattgctcgcctgctgttgatgttccaccaaaccaaagtgatttggatgacaaagagaatggcctgccagccaagcctattcag

SEQ ID NO: 103688 - DNA, 256 bp, Glycine max
gcatcagcaaagaaagccaaagatttcttgcctttccttcaccgaagtagaaaaatccctgctgttgtggaatatgtccttggtggccatcgctttacattgttaattccaaaagagacttgcagtattgccttttcattttctggtgtcagatgtcctggtcgcgatgagccatattctgacgcagccatcgcactcatgaggcggaaaataatgcagagagatgttgagattgaggtagagactgttgaccgaa

SEQ ID NO: 103689 - DNA, 254 bp, Glycine max
ctctccgcaagactgcaatgttcgtgccacactacaacctgaacgcgaacagcataatatacgcattgaatggacgggcattgatacaagtggtgaattgcaacggtgagagagtgtttgatggagagctgcaagcgggacgggtgctgatcgtgccacaaaactttgtggtggctgcaagatcacagagtgacaacttcgagtatgtgtcattcaagaccaatgatacacccatgatcggcactcttgcaggg

SEQ ID NO: 103690 - DNA, 250 bp, Glycine max
caaacccgtgttctgatgcatggagtttggaatttctgaagcgtaccggatttcattgtgatatcatttgtgtcactggatggactgccaccccaatgcaggatgttcaggttacaattgattggtttatttcctctcaggaatgtgttcccaggacctattgtgttttaaatccacaaaatccttttgtgttaaataggtggatgggaaaactgactttccctcagggcacttcccgaagtgttaagag

SEQ ID NO: 103691 - DNA, 254 bp, Glycine max
tccacgacgaccaagccatggaaagcatgaagatgacgaggacgaggacgaagaagaagatcaacctcgtcctgatcaccctccacagcgaccaagcaggcccgaacaacaagaaccacgtggaagaggatgtcagactagaaatggggttgaggaaaatatttgcaccatgaagcttcacgagaacattgctcgcccttcacgtgctgacttctacaacccaaaagctggtcgcattagcaccctcaacagtc

SEQ ID NO: 103692 - DNA, 253 bp, Glycine max
cttggtccttaaacactcatcagtcatcaccatggccaagctagttttttccctttgcattctgcttttcagtggctgctgcttcgctttcagttccagagagcagcctcagcaaaacgagtgccagatccaaaaactcaatgccctcaaaccggataaccgtatagagtcagaaggagggctcattgagacatggaaccctaacaacaagccattccagtgtgccggtgttgccctctctcgctgcaccctc

SEQ ID NO: 103693 - DNA, 254 bp, Glycine max
ttcgggactttcactagccgcagcagcctcaggaggagaataaggatgtctcacaggaagttcgagcacccaaggcacgggtcactgggatttctccccaggaagcgtgctgctcgtcacaggggaaaagtgaaggcattccccaaggatgacccatccaaggcacccaagctcactgcattcttgggttacaaggctggtatgactcacattgttagagaggtcgagaagccaggatcaaagcttcacaagaa

SEQ ID NO: 103694 - DNA, 252 bp, Glycine max
ctggtagatttgagagtttcttcctatctagcactgaagctcaacaatcctacttgcaaggattcagcaggaacattttagaggcctcctacgataccaaattcgaggagataaacaaggttctgtttagtagagaggaagggcagcagcaaggggagcagaggctgcaagagagcgtgattgtggaaatctcgaaggaacagattcgggcactgagcaaacgtgccaaatctagttcaaggaaaaccattt

SEQ ID NO: 103695 - DNA, 255 bp, Glycine max
cgaggctctggagtatggtgattgccgtttatcccttgcggtgagttaaaattatgatgttgtaaagctactagattctgctcctgtcagtgttttgtacaatcaattgtctggagttccctctgttatttcagattccccaatatggaatatttgaaaatgtaaattcactggacgagcttgcaaaaatgcctcaatggacagaagaaaagcctctacgagttgctactggtttcacctacgtaagttttaaag

SEQ ID NO: 103696 - DNA, 251 bp, Glycine max
caacggagccctctcttcaggtcaccatctagactgcaatcatggctgatggaccacagcatccatcagttgttcagaagctagctggacagtcttacctggtgtccaggcttagccccaactttaactctaggaattattctgcaactggttcttacgtcaatggcggcatgcactcgcctgggttggctgatgtgtcacctgtatctccagttactgtgcatgctccagcagagcaaggagtgagtgga

SEQ ID NO: 103697 - DNA, 251 bp, Glycine max
gagttccctccaaaaagtaatctggatcctgcaatctatggtgatcaaagcagtaagataacagcagattcccttgatctagatgggtacacaatggacgaggcacttggtagtcgaaggttatttatgttagattaccatgatatcttcatgccatatgtgaggcagataaatcagctgaattctgccaagacttatgcgacaaggactatcctttttttgagagaagatggaactttaaagccagtggc

SEQ ID NO: 103698 - DNA, 249 bp, Glycine max
gtgaaatggactgaggaatggcaacagtgagaacaccattgaattttgattctagcaagcagagcttttgtcaattttctatcgaccttctcggtggaggaattttagtggacaaaactggagattggatcacacttatacaaaattctccaattagtaacttgttgagagttgctgcttggaagaaaggctgtttaatggtcaagattgtgatgtctgggaatgcagcagtcaaaaggagtgattggg

SEQ ID NO: 103699 - DNA, 251 bp, Glycine max
gttcaatatcctagtataccttaataaataatttaagatactatgatgagagcacggttcccattactgttgctgggacttgttttcctggcttcagtttctgtctcatttggcattgcttactgggaaaaagagaaccccaaacacaacaagtgtctccagagttgcaatagcgagagagactcgtacaggaaccaagcatgccacgctcgttgcaacctccttaaggtggagacagaagaatgtgaaga

SEQ ID NO: 103700 - DNA, 252 bp, Glycine max
ctcgagccgcttaattattaacacttccttagttcaatatggggaagcccttcactctctctctttcttccctttgcttgctactcttgtcgagtgcatgctttgctattagctccagcaagctcaacgagtgccaactcaacaacctcaacgcgttggaacccgaccaccgcgttgagtccgaaggtggtttgattcaaacatggaactctcaacaccctgagctgaaatgcgccggtgtcactgtttcca

SEQ ID NO: 103701 - DNA, 250 bp, Glycine max
gccatagagttgagtttgccacatcctcagggagatcaatctggtgcttttagtcaagtttttctgcctgcagatgaaggtgttgaaagttctatttggctgctagcaaaggcttatgtagttgtgaatgactcgtgctatcatcaacttgtcagccattggttaaacactcatgcagttgttgagccattcatcatagcaacaaacaggcatctcagtgttgttcaccctatttataaactccttcacc

SEQ ID NO: 103702 - DNA, 250 bp, Glycine max
gttgcaacggtgagagagtgtttgatggagagctgcaagagggacgggtgctgatcgtgccgcaaaactttgtggtggctgcaagatcacagagtgacagcttcgagtatgtgtcattcaagaccaatgatacacccatgatcggcactcttgcaggggcaaactcattgttgaacgcattaccagaggaagtgattcagcacactttcaacctaaaaagccagcaggccaggccgataaagaacaacaa

SEQ ID NO: 103703 - DNA, 231 bp, Glycine max
ggctcgagactagcgatagctgataagagaggtaccaaactgaaaagcgtaaaagaagagttgagattcccttgaagaaaagatggcatcccataggcaaagctatgaagctggtcaaactaagggccgaactgaggaaaagacgaaccagacgatgggcaatattggagagaaggctcaagctgcaaaggagaagacccaggaaatggcccaagctgcaaaggagaagac

SEQ ID NO: 103704 - DNA, 273 bp, Glycine max
aattaagaaaagccatttccatagcagcctaagaaaatgaagagcactagcttgttcgctatctttctactttgcgccttcacctcatacctaccttccgccaccgcccaggacgtgctcgacgtggatggcgatccgattcggacggtttcatatactacgttttgccggcaataagaggaaacggtggcggaatagaacgagccgcactcgggaaagacacttgccctatcactgtagtgcaatctcccaatccaaactctaaggggttag

SEQ ID NO: 103705 - DNA, 217 bp, Glycine max
gccagatccaaaaactcaatgccctcaaaccggataaccgtatagagtcagaaggagggctcattgagacatggaaccctaacaccaagccattccagtgtgccggtgttggcctctctcgctgtaccctcaaccgcaacgccttcgtataccttcctacaccaacggtctccaggaaatctacatccaacaaggtaagggtatttttggcatgata

SEQ ID NO: 103706 - DNA, 271 bp, Glycine max
ctcgagcgattcggctcgacgcaagaatgcaatgttcgtgacacactacaacctgaacgcgaacagcataatatacgcattgaatggacgggcattgatacaagtggtgaattgcaacggtgagagagtgtttgatggaagctgcaagagggacgggtgctgatcgtgccacaaaactttgtggtggctgcaagatcacagagtgacaacttcgagtatgtgtcattcaagaccaatgatacacccatgatcggcactcttgcaggggcaa

SEQ ID NO: 103707 - DNA, 273 bp, Glycine max
attggtccttaaacactcatcagtcatcaccatggccaagctagtttgttccctttgttttctgcttttcagtggctgctgcttcgctttcagttccagagagcagcctcagcaaaacgagtgccagatccaaaaactcatgccctcaaaccggataaccgtatagagtcagaaggagggctcattgagacatggaaccctaacaacaagccattccagtgtgccggtgttgccctctctcgctgcaccctcaaccgcaacgcgcttcgtaga

SEQ ID NO: 103708 - DNA, 272 bp, Glycine max
tctctccattgtctttgaacactcatcaccatggccaagcttgttctttccctttgtttccttcttttcagtggctgcttcgctctgagagagcaggcacagcaaaatgagtgccagatccaaaagctgaatgccctcaaccggataaccgtatagagtcggaaggtgggttcattgagacctggaaccctaacaacaagccattccagtgtgccggtgttgccctctctcgctgcacccttaaacgcaatgcccttcgtagaccttcctac

SEQ ID NO: 103709 - DNA, 273 bp, Glycine max
gaagaagagcacgagcagagagaggaacaggaatggcctcgcaaggaggaaaaacgcggagaaaagggaagtgaagaggaagatgaggatgaggatgaggaacaagatgaacgtcaattcccattcccacgcccacctcatagaaggaagagcgaaagcaagaggaagatgaggatgaggagcagcagcgagagagcgaagaaagtgaagattctgagttacgaagacataagaataagaacccttttctcttcggctctaacaggttcgaaa

SEQ ID NO: 103710 - DNA, 272 bp, Glycine max
tcagtttctcctcgttgttcttcgctttcctgttttcaatttcgattctttcgttaatttaataagatgtttgggagggcaccgaagaagagcgataatacgaggtactacgaaatcctcggcgtctccaagaacgcttgcaggatgatctgaagaaggcttacaagaaagccgccattaagaatcaccccgacaagggcggtgatcccgagaagtttaaagagctggcgcaactatatgaggttctgagtgaccctgagaagcgtgagata

SEQ ID NO: 103711 - DNA, 190 bp, Glycine max
aggtgaaattccacgaccacgaccacgagcacaacacccggagagggaacctcagcaacccggtgagaaggaggaagacgaagatgagcaaccacgtccaatcccattcccacgcccacaacctcgtcaagaagaagagcacagcagagagacggacaggaatggcctcgcaaggaggaaaaacgcggag

SEQ ID NO: 103712 - DNA, 266 bp, Glycine max
ggtatttttggcatgatattcccgggttgtcctagcacttatcaagagccgcaagaatctcagcaacgaggacgaagccagaggccccaagaccgtcaccaaaaggtacatcgcttcagagagggtgatttgatcgcagtcctactggtgttgcatggtggatgtacaacaatgaagacactcctgttgttgccgtttctattattgacaccaacagcttggagaaccagctcgaccagatgcctaggagattctatcttgctggg

SEQ ID NO: 103713 - DNA, 273 bp, Glycine max
aacaaacccactaagatggcttcctttgtatccttcctagtgctgcttcttgcagcccttatcctcatgcctcaagggcttgctacttactacaaaccaattaagaagccaccagtgtacaagcctccagtgtacaagccaccagtgtacaaaccaccggtttataagccaaaaccaccggtttacaagccgaaaccaccggtttacaagccaccatataagaagccaccatacaagatgccaccttatggaaagtaccctccagtagaggac

SEQ ID NO: 103714 - DNA, 157 bp, Glycine max
gttcaatatcctagtataccttaatgaataatgtaagatactatgatgagagcacggttcccattactgttgctgggacttgttttcctgggctgcagggtctgtctcatttggcattgcttactgggaaaaagagaacccaaacacagcaagtgtc

SEQ ID NO: 103715 - DNA, 212 bp, Glycine max
caagttcacaatcctcctcatctctcttctcttcggcatcgcccacacttgcagcgcctccaaatggcagcaccagcaagatagctgccgcaagcagctccagggggtgaacctcacgccctgcgagaagcacatcatgggaagatccatggccgcggcgatgacgatgatgatgatgacgacgacagtcacattctcaggaccatgcgggg

SEQ ID NO: 103716 - DNA, 213 bp, Glycine max
ctttctttcattctgtttggagatggaagtcacactttcagcgtgcaagtccattagctcgcctgctgtgcccgtcgcagctatatttgcggggaaagcagtgactaagagttcgcaatgcagttttttaactggagcaacaaagtgaggtttcctaggcaagtcggtcaagttagccacggtcgcaaacagcgccaaacgcgtcactgtagt

SEQ ID NO: 103717 - DNA, 265 bp, Glycine max
ataaaattcttccaccaagttatgggttcccttgtgttgcttcttttctccctcttaggtctctcttctagttccagcatatcaactcatcgttccatattggaccttgacctaaccaagtttaccacacagaaacagtgtcttcactgttccaactatggaagagtgagcatggacgtgtctaccataaccacgaagaagaggcaaagagacttgagattttcaagaataacttgaactatatcagggacatgaatgcaaacag

SEQ ID NO: 103718 - DNA, 271 bp, Glycine max
gcgaagaaggtcaaattccacgaccacgaccacaacacccggagagggaacgtcagcaacacggtgagaaggaggaagacgaaggtgagcagccacgtccattcccattcccacgcccacgccaacctcatcaagaggagagcacgagcagaaggaggaacacgaatggcatcgcaaggaggaaaaacacggaggaaagggaagtgaagaggaacaagatgaacgtgaacacccacgcccacaccaacctcatcaaaaggaagaggaaaag

SEQ ID NO: 103719 - DNA, 268 bp, Glycine max
gtgggcaagtttgtcacgaccgttcagttcaaagcctgctggtaatgatgtcattggaattgatctgggtactaccaattcgtgtgtctctgttatggagggaaagaatcctaaagttattgagaattctgaaggagtcgtacaacaccatcagtggttgccttcaaccagaaagcggagttcttgttggtacaccagccaagcgtcaggctgtgactaacccaacaaacactcttttcggaaccaagcgtttgatcggtaggcgttt

SEQ ID NO: 103720 - DNA, 270 bp, Glycine max
atatcctagtataccttaataaataatttaagatactatgatgagagcacggttcccattactgttgctgggacttgttttcctggcttcagtttctgtctcatttggcattgcttactgggaaaaagagaaccccaacacaacaagtgtctccagagttgcaatagcgagagagactcgtacaggaaccaagcatgccacgctcgttgcaacctccttaaggtggagaaagaagaatgtgaagaaggtgaaattccacgaccacgacca

SEQ ID NO: 103721 - DNA, 269 bp, Glycine max
caatatcctagtataccttaataaataatttaagatactatgatgagagcacggttcccattactgttgctgggacttgttttcctggcttcagtttctgtctcatttggcattgcttactgggaaaaagagaaccccaacacaacaagtgtctccagagttgcaatagcgagagagactcgtacaggaaccaagcatgccacgctcgttgcaacctccttaaggtggagaaagaagaatgtgaagaaggtgaaattccacgaccacga

SEQ ID NO: 103722 - DNA, 269 bp, Glycine max
attaattattaacacttccttagttcaatatggggaagcccttcactctctctctttcttccctttgcttgctactcttgtcgagtgcatgctttgctattagctccagcaagctcaacgagtgccaactcaacaacctaacgcgttggaacccgaccaccgcgttgagtccgaaggtggtttgattcaaacatggaactctcaacaccctgagctgaaatgcgccggtgtcactgtttccaaactcaccctcaaccgcaatggcctcc

SEQ ID NO: 103723 - DNA, 211 bp, Glycine max
ggaaactcccaaggaatggcaactggatctaccttgtgacaaaattcctagtgtcttgattacaactgatgagagattggtaggcacagaacatgaggggtatgatccttttcttggtggaattcgaaaatatgccactccatgatgcccctagatgaagaaattctttctaaggttgcacaagatatggttgaggaatggtttgactgtg

SEQ ID NO: 103724 - DNA, 271 bp, Glycine max
agaggattaatgtggagcaacattgtctggccagggatattgtgaatatcattgcttgtgaaggcaaggaaagggttgagagacatgaactgttcggcaagtggaagtcgaggttaacgatggccggcttccgtcagttcctttgagttcttatgtgaattctgtcataagaagccttttgatgtgctattcagaacactatacactggtggagaaggatggagccatgttgttggggtggaaggacagaaatttgatatcagcttcagca

SEQ ID NO: 103725 - DNA, 268 bp, Glycine max
tgaccagattggacttgcattccaatagaatcacggagcttcctgattctgttgggaatcttcttagtctgctttatcttgatctgaggggaaatcagttaacactattgcctgcttcttttagcaggttggtgcgctagaggagctcgatttgagttcaaatcagctttcagcgcttcctgactctatagggtcgcttgttagactaaaaatattgaatgtggagacaaatgatatagaggaacttctacattctgttggtagttgt

SEQ ID NO: 103726 - DNA, 179 bp, Glycine max
ctcggttgtggctactgtggcaaaccccccaaaaagcacaagcctggtaaaacaccagagacacccaaaacacccgttgttaggccaccagtcagcatccctcccattaatgttcctcccgttgttcttccaccactatgaagcccccaggtattctccctccaattccaattattaac

SEQ ID NO: 103727 - DNA, 268 bp, Glycine max
cacctttgttcactcttcttctcttgcggctagggttttagcgcacttcttctagatttaaggaagatgggtaaggaaaaggttcacatcagtattgtggtcattggccatgtcgactctgggaaatccactaccatggtcacctgatttacaagcttggaggcattgacaagcgtgttattgagaggtttgagaaggaagctgctgagatgaacaagatgtctttcaagtatgcctgggtgctggacaaacttaaggctgagcgtga

SEQ ID NO: 103728 - DNA, 267 bp, Glycine max
tgatgagaccatttgcacaatgagacttcgccaaaacattggtcagaattcatcacctgacatctacaaccctcaagctggtagcatcacaaccgccaccagccttgacttcccagccctctggcttctcaaactcatgctcagtatggatcactccgcaagaatgctatgttcgtgccacactacaccctgaacgcgaacagcataatatacgcattgaatgggcgggcattggtacaagtggtgaattgcaatggtgagagagtg

SEQ ID NO: 103729 - DNA, 268 bp, Glycine max
atcagcatatgagcagaggtctgagtattgtgatcgtgatctcacgaaggcagatttggagatggtgactagattggatccacttcgggtgtatccttatagatatcgcgcagcaggtatgatggacaatcataaggagaggtagccattgcggaagtctctagagcaattgcatttacagctgatgtgcacctcctgcatctacgtgcagcattccatgtacacaatcgagatgtcttaggtgcgctaagagactgtcgtgctgcgc

SEQ ID NO: 103730 - DNA, 269 bp, Glycine max
gatgggcaggtcatcaccattggcgatgagcgtttcagatgtccagaggttctgttccaaccatccatgattggaatggaagcttcaggcattcacgagacaacatacaactccataatgaagtgcgatgttgatacaggaaggacctctatggtaacattgttctttcaggaggaacaatcatgttccctggtattgctgacagaatgagcaaggaaatttcggcattggcacccagcagcatgaagatcaaggttgtagcaccaccg

SEQ ID NO: 103731 - DNA, 267 bp, Glycine max
agcatgtgctgctgttggcttgacatcaagttacactccaactccattgttggaatctggtttgcaaaaagacagagggttaattgtggagtattttggaaggatgtcttacgttgctcataacgttaatcagcccaagagaaagatttgttagagggaaatttttcctttgatattaaatctcgctctagattggaaaaagtttcctctacaaaagcacaatttgttagtggaaaaaccttcaaatatgatataattggtgctggt

SEQ ID NO: 103732 - DNA, 267 bp, Glycine max
gttcaatatcctagtataccttaataaataatttaagatactatgatgagagcacggttcccattactgttgctgggacttgttttcctggcttcagtttctgtctcatttggcattgcttactgggaaaaagagaccccaaacacaacaagtgtctccagagttgcaatagcgagagagactcgtacaggaaccaagcatgccacgcgcgttgcaacctccttaaggtggagacagaagaatgtgaagcaggtgaaattccacgac

SEQ ID NO: 103733 - DNA, 266 bp, Glycine max
atcaagacttcccttcagatattgacattacaacgggagactaacaaggtcatggttaaacggcagagaacagcttttcccccaaattttgttcactctcttgatggttctcacatgatgatgactgcagttgctttaaaaaagcagggttgaactttgcaggggttcatgattcatattggacacatgcgtgtgatgttgatgaaatgaacaggatactcagggaaaagtttgttgaactctatgatgctccaatattggaaaat

SEQ ID NO: 103734 - DNA, 267 bp, Glycine max
atggagagctgcaagagggacgggtgctgatcgtgccacaaaactttgtggtggctgcaagatcacagagtgacaacttcgagtatgtgtcattcaagaccaatgatacacccatgatcggcactcttgcaggggaaactcattgttgaacgcattaccagaggaagtgattcagcacactttcaacctaaaaagccagcaggccaggcagataaagaacaacaaccctttcaagttcctggttccacctcaggagtctcagaagag

SEQ ID NO: 103735 - DNA, 267 bp, Glycine max
cttgagcacactgatgtggctgtcctgctcgacaatgaagccatttatgacatctgcaggcgttcactggacattgagaggccaacctacaccaaccttaatcgtttagtttctcaggtgatatcatcactgactgttccctgaggtttgatggagccttgaatgttgatgtcaatgaattccagaccaaccttgtgccataccccaggattcattttatgctttcatcttatgctcctgtaatttcagccgagaaggctcaccatg

SEQ ID NO: 103736 - DNA, 261 bp, Glycine max
caaaacactcataacacaaagcacaaagcaaagctcatccttgagttaaaaaatggcagcagcttcttccatggctctctcatccccatccttggctggcaaggccgtgaagctgggcccatcagccccagaagtggaagggtgagcatgaggaagaccgtcaccaagcaggtctcctcaggaagcccatggtacggcccagaccgagtcaagtacttgggcccattctctggcgagcccccgtcctacctaaccggtgag

SEQ ID NO: 103737 - DNA, 268 bp, Glycine max
gcaatagcgagaaagactcctacaggaaccaagcatgccacgctcgttgcaacctccttaaggtggaggaagaagaagaatgcgaagaaggtcaaattccacgaccacgaccacaacacccggagagggaacgtcacaacacggtgagaaggcggaagacgaaggtgagcagccacgtccattcccattcccacgcccacgccaacctcatcaagaggaagagcacgagcagaaggaggaacacgaatggcatcgcaaggaggaaaaa

SEQ ID NO: 103738 - DNA, 223 bp, Glycine max
agcggctggaagagcaccgcacgtcgcgtggtgtccggtgcgcccccggcggcccttgaaaatccggcggaccgattgcctcccacgcccggtcgtactcataaccgcatcaggtctccaaggtgaacagcctctgtcgatggaacaatgtacccaatgcaagtcggctgcatggatccgtaacctctggaaaaagattagctctgaggcctaggcacagggg

SEQ ID NO: 103739 - DNA, 266 bp, Glycine max
tctctccattggtccttaaacactcatcagtcatcaccatggccaagctagttttttccctttgttttctgcttttcagtggctgctgcttcgctttcagttccagagagcagcctcagcaaaacgagtgccagtccaaaaactcaatgccctcaaaccggataaccgtatagagtcagaaggagggctcattgagacatggaaccctaacaacaagccattccagtgtgccggtgttgccctctctcgctgcaccctcaaccgca

SEQ ID NO: 103740 - DNA, 269 bp, Glycine max
caagaacaatcaaacagaagaggctcaaggtcgcagaagcagcagctacaggacagtcaccagaagattcgtcacttcaatgaaggagacgtactcgtgattcctcctggtgttccttactggacctataacactgcgatgaaccagttgttgccatcagtcttcttgacacctctaacttcaataaccagcttgatcaaacccctagggtattttaccttgctgggaacccagatatagagtacccagagaccatgcaacaacaacaa

SEQ ID NO: 103741 - DNA, 265 bp, Glycine max
ctctccgcaagaatgcaatgttcgtgccacactacaacctgaacgcgaacagcataatatacgcattgaatggacgggcattgatacaagtggtgaattgcaacggtgagagagtgtttgatggagagctgcagagggacgggtgctgatcgtgccacaaaactttgtggtggctgcaagatcacagagtgacaacttcgagtatgtgtcattcaagaccaatgatacacccatgatcggcactcttgcaggggcaaactcattg

SEQ ID NO: 103742 - DNA, 262 bp, Glycine max
tataccttaataaataatttaagatactatgatgagagcacggttcccattactgttgctgggacttgttttcctggcttcagtttctgtctcatttggcattgcttactgggaaaaagagaaccccaaacacacaagtgtctccagagttgcaatagcgagagagactcgtacaggaaccaagcatgccacgctcgttgcaacctccttaaggtggagaaagaagaatgtgaagaaggtgaaattccacgaccacgaccac

SEQ ID NO: 103743 - DNA, 267 bp, Glycine max
ttctcgagccgaatcggctcgagcttattaacactttccttagttcagtttatggggaagcccatcttcactctctctctttcttccctttgcttgctactcttgtcgagtgcatgctttgctattacctccagcaattcaacgagtgccaactcaacaacctcaacgcgttggaacccgaccaccgcgttgagtccgaaggtggtcttattgaaacatggaactctcaacaccctgagctgcaatgcgccggtgtcactgtttcca

SEQ ID NO: 103744 - DNA, 252 bp, Glycine max
attggtccttaaacactcatcagtcatcaccatggccaagctagtgttttccctgtgtattctgctgtgcagtggccgctgcttcgctttcagttccagagagcagcctcagcaaaacgagtgccagatccaaaactcaatgccctcaaaccggataaccgtatagagtccgaaggagggctcattgagacatggaaccctaacaacaagccattccagtgtgccggtgttggcctctctcgctgcaccctc

SEQ ID NO: 103745 - DNA, 260 bp, Glycine max
aattattaacacttccttagttcaatatggggaagcccttcactctctctctttcttccctttgcttgctactcttgtcgagtgcatgctttgctattagctccagcaagctcaacgagtgccaactcaacacctcaacgcgttggaacccgaccaccgcgttgagtccgaaggtggtttgattcaaacatggaactctcaacaccctgagctgaaatgcgccggtgtcactgtttccaaactcaccctcaaccgcaatg

SEQ ID NO: 103746 - DNA, 265 bp, Glycine max
tccacgacgaccaagccacggaaagcatgaagatgacgaggacgaggacgaagaagaagatcaacctcgtcctgatcaccctccacagcgaccaagcaggcccgaacaacaagaaccacgtggaagaggatgcagactagaaatggggttgaggaaaatatttgcaccatgaagcttcacgagaacattgctcgcccttcacgtgctgacttctacaacccaaaagctggtcgcattagcaccctcaacagtctcaccctcccag

SEQ ID NO: 103747 - DNA, 262 bp, Glycine max
caaccctgacaacaacgaaaatctcagattaataacactcgccatacccgttaacaagcctggtagatttgagagtttcttcctatctagcactgaagctcaacaatcctacttgcaaggattcagcaggacattttagaggcctcctacgataccaaattcgaggagataaacaaggttctgtttagtagagaggaagggcagcagcaaggggagcagagggctgcagagagcgtgattgtggaaatctcgaaggaacaga

SEQ ID NO: 103748 - DNA, 183 bp, Glycine max
gagcacttggagttgcaattccaggatgtcctgagacgtttgaggagccacaagaacaatcaaacagaagaggctcaaggtcgcagaagcagcagctacaggacagtcaccagaagattcgtcacttcaataaggagacgtactcgtgattcctcctggtgttccttactggacctataacac

SEQ ID NO: 103749 - DNA, 259 bp, Glycine max
gggaaacaaaactacccttttgcttttgctctttgttctttgccatggagtggccacaacaacaatggccttccatgatgatgagggtggtgataaaaagtcaccaaaaagtttgtttttgatgagcaactcacgagggttttcaagactgatgcaggggaaatgcgtgtgctgaaaagccatggtggtaggatattttataggcacatgcacattggcttcatctctatggaaccaaagtccttgtttgttcctcagt

SEQ ID NO: 103750 - DNA, 261 bp, Glycine max
ttctttatctaatattggagtggcttttatttgttgtctccttcattatgcactatcccactttcaccaccctgatgagacaagcacacgtaatgttaagagggaagatgataagtgctggcttttgccctcatcctttttctattcaagtcaatacaggcccgttttgtgaattggcacatagcgaatctagaaattgaagatttttctctatattgtccggatccagatgctttttgggctcatgaacctggtttatga

SEQ ID NO: 103751 - DNA, 262 bp, Glycine max
ggaggttcacatttgcttagtcatgtgtctccaccaaagtcatcaagcttctttgcagactttggaatggatagtggctttccaaagaaatctgggccaagctcctccaaagtgcaaattcaggaaactgtgaagcaagaaggaagttctcaaatgctaaatctatttcttcatcccaatattttggagatcagaacaaggctgcagatgtggattctcaagctacattgtctaagttttcgggttcaagtgccatctccag

SEQ ID NO: 103752 - DNA, 257 bp, Glycine max
ctcgagccgcttaattattaacacttccttagttcaatatggggaagcccttcactctctctctttcttccctttgcttgctactcttgtcgagtgcatgctttgctattagctccagcaagctcaacgatgccaactcaacaacctcaacgcgttggaacccgaccaccgcgttgagtccgaaggtggtttgattcaaacatggaactctcaacaccctgagctgaaatgcgccggtgtcactgtttcaaactcac

SEQ ID NO: 103753 - DNA, 261 bp, Glycine max
tgaacactcatcaccatggccaagcttgttctttccctttgtttccttcttttcagtggctgcttcgctctgagagagcaggcacagcaaaatgagtgccagatccaaaagctgaatgccctcaaaccggtaaccgtatagagtcggaaggtgggttcattgagacctggaaccctaacaacaagccattccagtgtgccggtgttgccctctctcgctgcacccttaaccgcaatgcccttcgtagaccttcctacacca

SEQ ID NO: 103754 - DNA, 261 bp, Glycine max
attgcaacggtgagagagtgtttgatggagagctgcaagagggacgggtgctgatcgtgccacaaaactttgtggtggctgcaagatcacagagtgacaacttcgagtatgtgtcattcaagaccaatgtacacccatgatcggcactcttgcaggggcaaactcattgttgaacgcattaccagaggaagtgattcagcacactttcaacctaaaaagccagcaggccaggcagataaagaacaacaaccctttcaagtt

SEQ ID NO: 103755 - DNA, 261 bp, Glycine max
tcctagtacaccgtattagagaatttaagatatactatgatgagagcgcggttcccattactgttgctgggagttgttttcctggcatcagtttctgtctcatttggcattgcgtattgggaaaagcagaccccagtcacaacaagtgcctccgaagttgcaatagcgagaaagactcctacaggaaccaagcatgccacgctcgttgcaacctccttaaggtggaggaagaagaagaatgcgaagaaggtcaaattccac

SEQ ID NO: 103756 - DNA, 262 bp, Glycine max
agaatattctagaggcctcatacgacaccaaattcgaggagataaacaaggttctgtttggtagagaggaggggcagcaacaaggggaggagaggctgcaagagagtgtgattgtggaaatctcaaagaacaaattcgggaactgagcaaacatgccaaatctagttcaaggaaaaccatttcttctgaagataaacctttcaacttgagaagccgcgaccccatctattccaacaagcttggcaagttgtttgagattacc

SEQ ID NO: 103757 - DNA, 257 bp, Glycine max
gagagatctaactattatgattctcttcttgctgctgaatcgcgtgcaatttctggaaggaaaggcacccactctgccaaggatcctccagtgatgcatataactgatttgaccatggcatcggctaagaagccagagacttcttgcctttcctgcaccgaagtagaagagttcctgctgttgtggaatatgtgctcagtggccatcgttttaaattgttaattccaaaagaaacttgcagcattgcgttctctttt

SEQ ID NO: 103758 - DNA, 258 bp, Glycine max
accgggacgctgtccctgttgtccctgctgaaccattggcacgaaaaaattcggcacaggagctgcttcctaggggacgtgtctatcgttatcctcctggtaggggtattcctgatgttcctatacctggggttgctggaggtatgttttctgttccatatgatgtgggtgggatgccgctgcgtgatgcatcaatctcccagcaaatacctgttggggctctggcaacggctctggctaatgcttctccagagcagc

SEQ ID NO: 103759 - DNA, 220 bp, Glycine max
gggttgcaaagatgcttggcgcggtcttctccataggggtcataagataaaagggacagtggtgttgatgcgcaataatgtgttggacgtgaatatcgtaaccagcgtttggggaattattggtcaaagtctcgacttagttggctcaacactcgatactcttactggcttcttgaggcgatccgtgtctctacagcgtattgatgctaccaaagctgat

SEQ ID NO: 103760 - DNA, 219 bp, Glycine max
aacactcataagacaaagcacaaagctaagctgcatccttgagttaaaaaatggcagcagcttcttccatggctctctcatccccatccttggctggcaaggccgtgaagctgggcccatcagccccagaagtgggaagggtgagcatgaggaagaccgtcaccaagcaggtctcctcaggaagctcatggtacggcccagaccgagtcaagtacttgg

SEQ ID NO: 103761 - DNA, 254 bp, Glycine max
gaaaaacaagtagttgagaactaagaaggaggccatggcttcctcaatgatctcctccccaactgttaccaccgtcaaccgtgccggtgccggcatggttgctccattcaccggggtcaaatccatggctggcttccccacgaggaagaccaacaatgacattacctccattgctagcaacggtcgaagagtacaatgcatgcaggtctgcccaccaattggcaagaagaagtgtcgagactctttcctactta

SEQ ID NO: 103762 - DNA, 256 bp, Glycine max
ggaggaaaaacgcggagaaaagggaagtgaagaggaagatgaggatgaggatgaggaacaagatgaacgtcaattcccattcccacgcccacctcatcagaaggaagagcgaaagcaagaggaagatgaagatgaggagcagcagcgagagagcgaagaaagtgaagattctgagttacgaagacataagaataagaacccttttctcatcggctctaacaggttcgagactcacttcaaaaaccaatatggtcgc

SEQ ID NO: 103763 - DNA, 265 bp, Glycine max
ttttgttcctcactgaccaagccatggcgatgagaaccaaactttctttagctatctttttcttatttcttttagccttattttcaaacctagcctttggcaaatgtaaagaaaccgaggtagaagaagaagaccctgagctcgtaacatgcaaacaccaatgccaacagccacagcaatacactgagggtgacaagcgggtatgcttgcaaagatgtgacaggtatcatcgtatgaagcaagagcgagagatacaaatccaaga

SEQ ID NO: 103764 - DNA, 270 bp, Glycine max
aatatttgcttgtattgatagcccctccgttcccaagagtataaaactgcatcgaataatacaagccactaggcatggtaaattaaattgtgcctgcacctcgggatatttcatgtggggttcatcatatttgttgaggaaaagaaactcccgaccttgaattatgcatttatatatcctttttcatttctagatttcctgaaggcttaggtgtaggcacctagctagtagctacaatatcagcacttctctctattgataaacaattgg

SEQ ID NO: 103765 - DNA, 268 bp, Glycine max
ccatcttctccgccgttatcggtaatcgccgccgccaagctcgccggaatctctcccacgattgatatcgctctctctcctgactcacctccctcattgatcgtctccgatgggctaaagtttcacggactatatgctcttctacgttatatcgggcgagttgccagccttcctaatttctatgggcaaaatccatttgaatctagccagattgatgaatggctggactatgctcctatcctctcattgggccctgcttttgagaatg

SEQ ID NO: 103766 - DNA, 273 bp, Glycine max
tgggacactagtgtgacggtggaggtcaaaattggagatagagtagaaactgtccgtttctttcactgctacaagcgtggagtggatcgtgtttttgtggaccacccatgtttccttgagaaggtatgtggcaagactaggtcaaaactctatggccctagtgctggagtagattatgaagacgaccaacttacgttcagcttgttatgccaggcagcacttgatgcaccaagggttttgaatttaaacagcaacatgtatttctctggacca

SEQ ID NO: 103767 - DNA, 278 bp, Glycine max
ttcggaacactttatggaaaaagaagggatattttacaacattgaaagctttttcattagcgcaatctatttttacggggaattcaaaaagctttttttgtaacaaatacaaacgttagactaatttcaattaactaggttcaacgaatatttttaaatacaaaaagaaatacgaatataaatttcatatataatctaatatagtataatattcattttggatatttacattatatctatatatctatctatatatagatagatatatagatagaaaa

SEQ ID NO: 103768 - DNA, 281 bp, Glycine max
caaagccagaaaggaaagcaacaagaagaagaaaacgaaggaagcaacatattgagtggcttcgcccctgaattcttgaaagaagcgttcggcgtgaacatgcagatagtgagaaacctacaaggtgagaacgaagaggaggatagtggagccattgtgacagtgaaaggaggtctaagagtcacagctccagccatgaggaagccacagcaagaagaagatgatgatgatgaggaagagcagccacagtgcgtggagacagacaaaggttgccaacgccc

SEQ ID NO: 103769 - DNA, 256 bp, Glycine max
tgcagaccgagctagctagctagcaagcaagcacagagatggaggcaaagcgaggccatgccctcatgtgcttggcacgtgtttcactcttcctctgcgctctaaccctatccgctgctcacggaagcaccacggttcaagacatcgcgagaaagttgaaactcggggacaacgagcttctgcgcacggagaagaagttcaaggttttcatggagaattacgggaggagctactccacagaggaggagtatttgcg

SEQ ID NO: 103770 - DNA, 272 bp, Glycine max
gaaccccgtcgcccagagtttcaccgagttctacgataaatgggtttggaagctcgaggagatcctccaccagctccttgaggtgtccaagcagagaacccaggtggtgaaaactgaacaagagctgcaggttttgatttccaaggtcacatcccatttgaaggaatattacactgtcaagtgggcttcggctcatgaagacgttctcgtgttcttctcgccaacgtggctgagtcctttggagaatgcttatttgtggatgacggggtgga

SEQ ID NO: 103771 - DNA, 271 bp, Glycine max
tgcggaaggcccattcgggtggttacatttccaaataccatcgtgcagattgaaccagacatgaattcaaggtttcagcttttgagtaccactaccaatggtgattttgttcaaggaaaagatctcgcaatggttaaagttaatgtagcatgtgctgctgttggcttgacatcaagttacactccaactccattgttggaatctggtttgcaaaaagacagagggttaattgtggagtattttggaaggatgtcttacgttgctcataacg

SEQ ID NO: 103772 - DNA, 264 bp, Glycine max
acttattaacactttccttagttcaatatggggaagcccttcttcactctctctctttcttccctttgcttgctactcttgtcgagtgcatgctttgctattacctccagcaagttcaacgagtgccaactcaacaacctcaacgcgttggaacccgaccaccgcgttgagtccgaaggtggtcttattgaaacatggaactctcaacaccctgagctgcaatgcgccggtgtcactgtttccagacgcaccctcaaccgcaac

SEQ ID NO: 103773 - DNA, 268 bp, Glycine max
ggagcatagagcctattgtagacttgttcgccgacgaggtagataccgaaggcgacgacggcgatgccaaggccaggggtggcgtagcggagctgattggtgagcatcggatgcttcctccatgcatcccttctcctgaagaactctccagtgtgttttccacttccagatcccattctattcttccctcccttccttcctcctcacccactcgctttgctttgcttttctttctttccttcgcaccttactgggctcccgagacccg

SEQ ID NO: 103774 - DNA, 265 bp, Glycine max
ctcgagccgcttacaaccttcaatctggcgatgccctaagagtccctgcaggaaccacagactatgtggttaaccctgacgacgacgagaatctcagaatgataacactcgccatacccgttaacaaacccggtagatttgagagtttcttcctatctagcactcaagctcaacagtcctacttgcaagggttcagcaagaatattctagaggcctcatacgacaccaaattcgaggagataaacaaggttctgtttggtagaga

SEQ ID NO: 103775 - DNA, 275 bp, Glycine max
atcctcaagtttccacaacctcacgtcgttcaagtgagtcagtctgcatggatgactgatgaagacatttgctagagagatgattgctggtgtaaatccctgcgtaattcgtggtcttgaagagttccctccaaaaagtaatctggatcctgcaatctatggtgatcaaagcagtaagataacagcagattcccttgatctagatgggtacacaatggacgaggcacttggtagtcgaaggttatttatgttagattaccatgatatcttcatgc

SEQ ID NO: 103776 - DNA, 278 bp, Glycine max
aaaattcttccaccaagttatgggtttccttgtgttgcttcttttctccctcttaggtctctcttctagttccagcatatcaactcatcgttccatattggaccttgacctaaccaagtttaccacacagaaacaggtgtcttcactgttccaactatggaagagtgagcatggacgtgtctaccataaccacgaagaagaggcaaagagacttgagattttcaagaataacttgaactatatcagggacatgaatgcaaacagaaaatcaccccatt

SEQ ID NO: 103777 - DNA, 273 bp, Glycine max
agcaggcacagcaaaatgagtgccagatccaaaagctgaatgccctcaaaccggataaccgtatagagtcggaaggtgggttcattgagacctggaaccctaacaacaagccattccagtgtgccggtgttgccctctctcgctgcacccttaaccgcaatgcccttcgtagaccttcctacaccaacggtccccaggaaatctacatacaacaaggtaatggtattattggcatgatattcccgggttgtcctagcacttatcaagagccgc

SEQ ID NO: 103778 - DNA, 257 bp, Glycine max
gttcctcactgaccaagccatggcgatgagaaccaaactttctttagctatctttttcttttttcttttagccttattttcaaacctagcctttggcaaatgtaaagaaaccgaggtagaagaagaagaccctgagctcgtaacatgcaaacaccaatgccaacagccacagcaatacactgagggtgacaagcgggtatgcttgcaaagatgtgacaggtatcatcgtatgaagcaagagcgagagaaacaaatcc

SEQ ID NO: 103779 - DNA, 260 bp, Glycine max
gaagaggacaagatggaagtgattagaaatagaggcattcctgctgatgttcttgcaaagcgagctcatgaatttgaaaaacatgttgctcatgaaagcctcaaggatcaaattcctgctgttgacaagttgtattctactaatgttaataagtttgcaaaaattatgaaccttagacaaagtgttgttggtgctcttaaacttcttactgatgggaagttgtatgagggtaagcatattcctgtatctcatattagtgc

SEQ ID NO: 103780 - DNA, 269 bp, Glycine max
gccaccgcttcagtggcatttaagtccagggaggaccaccgcaagcagattgagttggaggatgcgcgtaaagcggggcttgcgccagctgaaatcgatgaagatggaaagggaatcaatcctcacattccccagtatatggcctctgctccttggtatcttaatgctgagagacctagtttgaaacatcaaaggaaatggaaatcagaccccaattacaccagatcatggtacgatagaggtgctagaatctttcaggcagacaagta

SEQ ID NO: 103781 - DNA, 267 bp, Glycine max
gatgacttctccctacattaaatgtacagtctctttcttcatagcatttggaaatttggctgatgacaccattaattttgaggcttttccccacaagctggtgcagtttggagagattcaggaaaaagttgtattgaaattttcacaagaggaatttcttacagcttggtcaactcaggtgcgtcctgcaacaactctgttggctgatgggtgtccatatctgtatgctatggtgcatgatagttcagtgtctacaataccacgtga

SEQ ID NO: 103782 - DNA, 266 bp, Glycine max
gttcaatatcctagtataccttaataaataatttaagatactatgatgagagcacggttcccattactgttgctgggacttgttttcctggcttcagtttctgtctcatttggcattgcttactgggaaaaagagaaccccaaacacaacaagtgtctccagagttgcaatagcgagagatactcgtacaggaaccaagcatgccacgctcgttgcaacctccttaaggtggagatagaagaatgtgaagaaggtgaaattccacg

SEQ ID NO: 103783 - DNA, 265 bp, Glycine max
tctcgagcgaatcggctcgaggcttggcaagttctttgagatcaccccagagaaaaacccaccagcttcgggacttggataccttcctcagtattgtggatatgaacgagggagctcttcttctaccacacttcaattcaaaggcgatagtgatactggtaattaatgaaggagatgcaaacattgaacttgttggactaaaagaacaaccacaggagcagctacaggcagagcaacctttggaagtgcggtaatctagagccga

SEQ ID NO: 103784 - DNA, 266 bp, Glycine max
gttctgagtctcaaagagaaccacgaagacataagaataagaacccttttcacttcaactctaaaaggttccaaactctcttcaaaaaccaatatggccacgttcgcgtcctccagaggttcaacaaacgctcccaacagcttcagaatctccgagactaccgcattttggagttcaactccaaacccaacacccttcttctcccccaccatgctgacgctgattacctcatcgttatccttaacgggactgccattcttaccttg

SEQ ID NO: 103785 - DNA, 269 bp, Glycine max
gccgaattgtctgaacaagatatatttgtaatcccagcaggttatccagttgtgatcaacgctacctcaaatctgaatttctttgctattggtattaatgccgagaacaaccagaggaacttcctcgcaggttcgcaagacaatgtgataagccagatacctagtcaagtgcaggagcttgcattccctgggtctgcacaagctgttgagaagctattaaagaaccaaagagaatcctactttgtggatgctcagcctaagaagaaaga

SEQ ID NO: 103786 - DNA, 270 bp, Glycine max
aaatgaccaagttcacaatcctcctcatctctcttctcttctgcatcgcccacacttgcagcgcctccaaatggcagcaccagcaagatagctgccgcaagcagctccagggggtgaacctcacgccctgcgagaagcacatcatggagaagatccaaggccgcggcgatgacgatgatgatgatgacgacgacaatcacattctcaggaccatgcggggaagaatcaactacataaggaggaacgaaggaaaagacgaagacgaagaag

SEQ ID NO: 103787 - DNA, 177 bp, Glycine max
aaatatttcaatattgatgaagacaatattcgtgagatctattcaaacctaaaaggtgctcatcttgtgcctaacgatgtggccgaagctgctctttacttggcaagtgatgagtccaagtatgttagtagtcacaatcttgtgatagatggagcgacctgattaatgcaggattac

SEQ ID NO: 103788 - DNA, 273 bp, Glycine max
aataatttaagatactatgatgagagcacggttcccattactgttgctgggacttgttttcctggcttcagtttctgtctcatttggcattgcttactgggaaaaagagaaccccaaacacaacaagtgtctccagagttgcaatagcgagagagactcgtacaggaaccaagcatgccacgctcgttgcaacctccttaaggtggagaaagaagaatgtgaagaaggtgaaattccacgaccacgaccacgaccacaacacccggagaggga

SEQ ID NO: 103789 - DNA, 271 bp, Glycine max
gtaggccaaccttttaccaaatctacaagaagaaatccactgaagggttccagtcacttccttatgttgttgcactgttcagtgcaatgctttggatttactatgctttcgtcaaaagggaagctgccctccttctcattaccattaacacatttggaattgttgtggagtcaatttaccttgcaatcttcctactttatgccccaaggaagcctaggcttacaaccatcaagcttcttctcttactgaatgtgtttgggtttggagccat

SEQ ID NO: 103790 - DNA, 238 bp, Glycine max
tgtgtgtgtgtgtgtgtgttgggcatgtgcactaatgactaacctttttggtttggatttgggttcggtttttattttgagcagccggaccgacccgacgagttgcttcggatccaagtagcgggacggcgcgtgatatattgggacggacctagagtgcttggggtgctggctatgtccagagccataggtgactaatcaataaatacacgcgcggcgcattatagcagattggagg

SEQ ID NO: 103791 - DNA, 269 bp, Glycine max
acttattaacactttccttagttcaatatggggaagcccttcttcactctctctctttcttccctttgcttgctactcttgtcgagtgcatgctttgctattacctccagcaagttcaacgagtgccaactcaacaacctcaacgcgttggaacccgaccaccgcgttgagtccgaaggtggtcttattgaaacatggaactctcaacaccctgagctgcaatgcgccggtgtcactgtttccaaacgcaccctcaaccgcaacggcct

SEQ ID NO: 103792 - DNA, 267 bp, Glycine max
tcctaacctaaaccctactcattctccatacctcaacgaataggttatagagacggtaacaatttgctgtccgatttgaccgagcagagcttcgtcttggccctcgattttgccctaaaggactctcagtcacaaccgacaccgtcgtcgtcgtcgtcgtcatcaatggcaccgaagcagaccaaggctgagaagaagatcgcttacgatgcgaactgtgcgatctaatcgaggagtacggccagatcctcgttgtgaactccgata

SEQ ID NO: 103793 - DNA, 266 bp, Glycine max
gaaagaatcccaggcgaggagaaagatggaggggaaggagcaggatgtgtcgttgggagcgaacaagttccccgagagacagccgattgggacggcggcgcagagccaagacgacggcaaggactaccaggagccggcgccggcgccgctggttgacccgacggagtttacgtcatggtcgttttacagagcagggatagcagagtttgtggccacttttctgtttctctacatcaccgtcttaaccgttatgggagtcgccgggg

SEQ ID NO: 103794 - DNA, 265 bp, Glycine max
gcaagttatgagcaagatggcagaaatgataaacagtctttgtggtggtgatgaaaaattgatgcgtgaaaggacgcacctgctgttggattgttgttcaaggatggcaatttgtaaaaaagatgtttggagagttgaatgtggaatcccttctggatttccgctcacagttatttgcgatagcatttttaatgagatgctcattagatatagctatgaacaaattactgcgtcacgctaaagctccaagtatgtttttacaatc

SEQ ID NO: 103795 - DNA, 267 bp, Glycine max
ctcatcttatccccaaatgatcattgtcgttcaagggaagggagcaattggatttgcatttccgggatgtcctgagacgtttgagaagccacaacagcaatcaagcagaagaggctcaaggtcgcagcagcaactacgagacagtcaccagaagattcgtcacttcaatgaaggacacgtactagtgattcctcctggcgttccatactggacctataacactggcgatgaaccagttgctgccatcagtctatcttgacacctcca

SEQ ID NO: 103796 - DNA, 264 bp, Glycine max
cattggtccttaaacactcatcagtcatcaccatgggcaagctagttttttccctttgtcatctgcttttcagtggctgctggttcgctttcagttccagagagcagcctcagcaaaacgagtgccagatccaaaaactcaatgccctcaaaccggataagcgtatagagtcagaaggacggctcattgagacatgggaccctaacaacaagccattccagtgtggcggtgttgcactctctcgctgcacgctcaaacgcaacg

SEQ ID NO: 103797 - DNA, 263 bp, Glycine max
acaccgtattaaagaatttaagatatactatgatgagagcgcggttcccattactgttgctgggagttgttttcctggcatcagtttctgtctcatttggcattgcgtattgggaaaagcagaaccccagtcacaacaagtgcctccgaagttgcaatagcgagaaagactcctacaggaaccaagcatgccacgctcgttgcaacctccttaaggtggaggaagaagaagaatgcgaagaaggtcaaattccacggccacga

SEQ ID NO: 103798 - DNA, 266 bp, Glycine max
gcccaacagatatgaagtttcccaatacagatatcgcaatgtgccaataaagcgcagagcatgggttgaaggccagatgtctttcgatcagtctgtagtagcaattatgtctaaatgcaaagccagcatgagaatgggaaacactgatgctcaaattttgatggttccagggcgcagattcatagctcatggacattttttcaaaaatctgactcagaaagtgcgagtccaaattgttacatctgacaagagttactggcatgtgt

SEQ ID NO: 103799 - DNA, 264 bp, Glycine max
aaacaattcaattcaatctgcctcgatcatggagaggaaaacatttgggtttttgttcttgctcctccttgtcttagcttctgatgtgacggtgaagagagcagaggcgaaagattgcttgacaaggaggcacgggttccagggtagatgcttattcgacaggcaatgtgcacatgtgtgcaggagcgatggtttcatcggtggtcagtgccgaggccctcttcgcaaatgcttttgcagcaggccatgttgatcgaacatact

SEQ ID NO: 103800 - DNA, 262 bp, Glycine max
cacacaactactacaagtacttccttacaatcaaaaccaacaacaactatggcaagttatcaaaagcactacgatgatcagggtcgcaaggttgacgagtatggcaacgttgagaagcaaaccgacgaatacggcaaccctgttcatgctgctagtgtcacctatgtagccaccagaactgctgctggtggttacagtgatgacattaataagcaccatgataccaccaatgcctacggcgtagacactggtagacagcatt

SEQ ID NO: 103801 - DNA, 266 bp, Glycine max
caaaaagaaagaatcccaggcgaggagaaagatggaggggaaggagcaggatgtgtcgttgggagcgaacaagttccccgagagacagccgattgggacggcggcgcagagccaagacgacggcaaggactaccaggagccggcgccggcgccgctggttgacccgacggagtttacgtcatggtcgttttacagagcagggatagcagagtttgtggccacttttctgtttctctacatcaccgtcttaaccgttatgggagtcg

SEQ ID NO: 103802 - DNA, 266 bp, Glycine max
cacttttgtgttgtgttgggaaaccctaaaccccgttttcggtgagatcgagatcgatcgaacatggatgaggagtacgatgtgatcgtgttgggcacgggtctcaaggagtgcattctcagcggtcttctctccgtcgatggcctcaaggttctgcatatggataggaacgactattacggaggagaatccacttcgctcaatcttattcagctttggaagagattcaggggagatgacaagcctcctccacatttgggcgctag

SEQ ID NO: 103803 - DNA, 265 bp, Glycine max
gtactctgatccagagcagactccacgaattgtttccctcctatcagaatcttacaatccacatgttcgatatggagcagctcttgctgtgggtatttcctgtgcgggtacaggtctcagcgaggctatctctttattggagcctttgacatcggatgttgttgattttgttcgtcaaggtgcccttatagcaatggctatggtcatggttcagatcagtgaagctagtgactcacgcgttggaacatttaggcgacaattggag

SEQ ID NO: 103804 - DNA, 263 bp, Glycine max
cactgctctgtttcaccgagtttgggcgtttagatcagaaccaaatcgtgttctcttccattggcaaacatggcaactcaaatgagcaagaagagaaagtttgttgcggacggagtgttctttgccgaactgaacgaggttctgacacgtgaattggcggaggacggttactccggcgtcgaagttagggttacgccgatgcgcaccgagatcatcatcagagccaccagaacccaagccgttctaggtgagaagggaaggag

SEQ ID NO: 103805 - DNA, 268 bp, Glycine max
gcaacgccttggtgttggagatcgtgatgaccttcggtctggtgtacacggtctacgcaactgccattgaccccaagaagggtaatttgggaattattgctcccatcgccattggtttcattgtcggcgctaacattttgttgggtggggccttctctggagcggccatgaaccccgctgtgacatttgggcctgctgtcgtgagctggacctggaccaaccactggatctactgggccgggcctctcatcggtggtggaatcgctgg

SEQ ID NO: 103806 - DNA, 255 bp, Glycine max
gtggtcaaccctgacaacaacgaaaatctcagattaataacactcgccatacccgttaacaagcctggtagatttgagagtttcttcctatctagcactgaagctcaacaatcctacttgcaaggattcagcaggaacattttagaggcctcctacgataccagattcgaggagataaacaaggttctgtctagtagagaggaagggcagcagcaaggggagcagaggctgcaagagagcgtgattgtggaaatc

SEQ ID NO: 103807 - DNA, 267 bp, Glycine max
gtgcaaaaggcttctcaattcttaggcttggcaacaaaccatactggatcatcaagaattcgtggggggagaaatggggagaagatggctattacaagctctgcagagggcatggcatgtgtggaataaacactatggtttctgctgcaatggtgcctcaaccacaaacaacacctacaaagaattatgcttcttattagctatgcacttaaggaaatctaaataaatatttttcattctaggtgatgtatcatggtatgtaccaaa

SEQ ID NO: 103808 - DNA, 259 bp, Glycine max
attcgatgaactttttgttgacttccaggatttcaatgtggaagctctagagaaatttgttgaggaatctagtacccctgttgttactgtctttaacaatgatccgagcaatcaccctttcgttgccaaattcttcaacagtcgcaatgcaaaggcaatgttgttcatcaacttcactgccgaagtgctgaatctttcaaatcaaaataccgtgaagctgctgagcaacataaacaacagggtgtaagctttttcgtgg

SEQ ID NO: 103809 - DNA, 263 bp, Glycine max
gccgcttttgttattgcaggtacatagagaattccgcaagcctctcattgtaatgtcccctaagaacctgcttcgtagcaaggcttgcagatcaaatttatctgagtttgatgatgtccaaggccacccaggctttgacaaacagggaaccagattcaagcgcctcataaaagatcaaaatgagcacaaagatgttgaggagggtattagacgtttagtactttgctctggaaaggtttactatgaacttgatgaacatcgaa

SEQ ID NO: 103810 - DNA, 266 bp, Glycine max
ctcctaccgcatttgttttcggaccccagaaaagcctgactcagcaatcaggttcctcagagaccacggtttctctaactcccaaataaacagtatggttagaagggtaccatggttgctttcctgcgacccttgcaaaagagtattgcccaagtttcaatttttactctcaaaaggtgtttctagctctacaattgttgacatagtgagtaagtcccctgcaatactgagtcgaagcctggagaatactatagtcccaagctatg

SEQ ID NO: 103811 - DNA, 262 bp, Glycine max
gttcaatatcctagtataccttaattaataatttaagatactatgatgggagcacgggtcccattactgttgctaggacatgttttcctggcttcagtttctggctcatttggcattagcttactgggaaaaagatgaccccatacacgacaagtgtctccagagttgcaatagcgagagatatcgtacaggaaccacgcatgccacgctcgttgtcacctccttaaggtggcgaaagaagaatgtgaaaaaggtgaaattc

SEQ ID NO: 103812 - DNA, 273 bp, Glycine max
tctccattgtctttgaacactcatcaccatggccaagcttgttctttccctttgtttccttcttttcagtggctgcttcgctctgagagagcaggcacagcaaaatgagtgccagatccaaaagctgaatgccctcaaaccggataaccgtatagagtcggaaggtgggttcattgagacctggaaccctaacaacaagccattccagtgtgccggtgttgccctctctcgctgcacccttaaccgcaatgcccttcggtagacttcctacac

SEQ ID NO: 103813 - DNA, 268 bp, Glycine max
ctctccattggtccttaaacactcatcagtcatcaccatggccaagctagttttttccctttgtgtgctgcttttcagtggctgctgcttcgctttcagttccagagagcagcctcagcaaaacgagtgccagatccaagaactcaatgccctcaaaccggataaccgtatagagtcagaaggagggctcattgagacatggaaccctaacgacaagccattccagtgtgccggtgttgccctctctcgctgcaccctcaaccgcaac

SEQ ID NO: 103814 - DNA, 267 bp, Glycine max
cttggttcatcaatattcatgggatctggtaaaagcaaaacagtctcatctgacgtgggatacgttccacttgattctggtgatgcacgtcttcgacaactcggttacaaacaagaactcaatcgtcatctttcggtgatttcgaatttcgcgttttcgtattctattatatcagtgctcaccggagtgaccactctttacaacactgggttgaactatggtggccctgtttcgttcgtctatggttagttcatagcttctggtttc

SEQ ID NO: 103815 - DNA, 265 bp, Glycine max
tctcgagcgattcggctcagaaagaaaggaaataattgaatctttgaaaatgcagggaggaaagaaagctggaaagtccatcaaggaaacagctgcaaacattggtgcttctgccaaggctggcatggagaaaaccaaggccactgtccaggagaaggcagaaagaatgacggcacgtgatccgatgcaaaaggagttggcaacccagaagaaagaggcaaagatgagccaggcagagctggacaagcaggcggcgcgtcagcat

SEQ ID NO: 103816 - DNA, 258 bp, Glycine max
atcatgtctcacttcaagggcaagtaccatgatgagcttatcgccaatgctgcgtacattggcactcctggaaagggtattcttgctgctgatgagtcaacagggacaattggcaagcgtttggccagcatcagtgtagagaacattgaatccaacaggcgagctcttagggagctgcttttcactgctcctggtgttcttcaatattcagtggtgtcatcctctttgaggaaaccctctaccagagtacagctgcag

SEQ ID NO: 103817 - DNA, 254 bp, Glycine max
aactagttcaatatcctagtataccttaataaataatttaagataccatgctgagagctcggttcccattactgttgctgtggacttgttttcctggcttcatgtttctggctcatttggcattgtttactgggttaaatagtactccatacacgtcaagtgtctccagagtggcattagcgagagtgactcgtacaggtaccaagcatgccacgctcgttgcaatctccttaaggtgtagaaactaagaatgt

SEQ ID NO: 103818 - DNA, 260 bp, Glycine max
ggggtgccctgagatcacattgaacaatggtgaaggctgtggccgttcttggcagcagtgagggtgtcactggaactattcacttcgttcaggagggaagtggtccaaccaccgtaactggatctcttgctggtcttaagcctggtctccatggtttccatgtccatgccttgggggacactaccaatggttgcctctcaactggatcacatttcaatcctaataacaaggagcatggtgcccctgaggatgagaatcgt

SEQ ID NO: 103819 - DNA, 259 bp, Glycine max
tccttgtgttgcttcttttctccctcttaggtctctcttctagttccagcatatcaactcatcgttccatattggaccttgacctaaccaagtttaccacacagaaacaggtgtcttcactgttccaactatggaagagtgagcatggacgtgtctaccataaccacgaagaagaggcaaagagacttgagattttcaagaataacttgaactatatcagggacatgaatgcaaacagaaaatcaccccattctcatcg

SEQ ID NO: 103820 - DNA, 257 bp, Glycine max
attgtctttgaacactcatcaccatggccaagcttgttctttccctttgtttccttcttttcagtggctgcttcgctctgagagagcaggcacagcaaaatgagtgccagatccaaaagctgaatgccctcaaaccggataaccgtatagagtcggaaggtgggttcattgagacctggaaccctaacaacaagccattccagtgtgccggtgatgccctctctcgctgcacccttaaccgcaatgcccttcgtaga

SEQ ID NO: 103821 - DNA, 258 bp, Glycine max
tggagcccttggggctttctattttattgtattgaaaggcccaatgaattgggatttccctattgggccaggtcatttcgggacaagcggatcatttatgatgaagaggatgagcttcaagagaatgattcagagttcttgcagggtggaaccatgcagtaccagacacgagatagatcttccaaagaacagggtcttttttcgaataagccaattcatttgggaccccgcggatccactctggtacctattcaaaga

SEQ ID NO: 103822 - DNA, 266 bp, Glycine max
agagagactcgtacaggaaccaagcatgccacgctcgttgcaacctccttaaggtggagaaagaagaatgtgaagaaggtgaaattccacgaccacgagcacgaccacaagcacccggagagggatcctcagcaacccggtgagaaggaggaagacgtagatgaggaaccacgtccaatcccattcccacgcgcacaagctcgtcaagacgaagagcacgaccagagataggctcaggaatggcctcgctagcgaggaaatacgcg

SEQ ID NO: 103823 - DNA, 259 bp, Glycine max
tcgagcgattcggctcacttatggtggatacctaggaccccagagacgaggacagggcgtagtaagcgacagaatgcttcggggagttgaaaataagcgtagatccggggattcccgatataggtcaacctttcgaactgctgctgaatccacgggcagagcgacaaggaaaagtatgagaaagctaggacgttaaaggattatatagggaatattaggtctgcatacacaaaagattttaccagtaaagatattacaa

SEQ ID NO: 103824 - DNA, 266 bp, Glycine max
tagaaaatggcttcaaagagtgtttcagctgttgccctaattctggtctccctcaacctccttttcttctccatggttagctccaaccccctaatgacccctgcccttgtctcatcaataatatctaacaaaaagtgccccgaattacatgtttgcgccactattttgcctccccatcacaagccagacaagggttgctgccccctcatcgccggtcttattgatcttgaagccgccgtgtgcctctgcgccgtactcaagctcga

SEQ ID NO: 103825 - DNA, 264 bp, Glycine max
taaattgtgaccctcgtcacgccaacgctttcgttgttcccctttctctcgttttttctcagaaccttctgaggttaaagcaaaaaacatagagagtgagagagagacaatgatgaagccatcgatgctcagatctctccactccgccgccacccgcggcgcctctcatctcttccgccgtgggtacgcctccgagccggtgccggagcgcaaggtagccgttctcggcgccgccggcggagatcgggcagtctctctcccttc

SEQ ID NO: 103826 - DNA, 259 bp, Glycine max
tcagaatctccgagactaccgcattttggagttcaactccaaacccaacaccctccttctccccaaccatgctgacgctgattacctcatcgttatccttaacgggactgccattctttccttggtgaacaacgacgacagagactcctacagacttcaatctggtgatgccctgagagtcccctcaggaaccacatactatgtggtcaaccctgacaacaacgaaaatctcagattaataacactcgccatacccgtt

SEQ ID NO: 103827 - DNA, 257 bp, Glycine max
gcatgacggacttcatcctcaggagcaccatgtgtcaagttattagggtgacctgggaaacatagttgctaatgcagagggggttgcagaggctacaattgtggataatcagataccactctctggccctaattcagtagttggaagagccttggtggtccatgagcttgaggatgaccttggaaagggtcggcatgaactcagtttgacaactggaaatgctggtggaagattagcgtgtggtgtggttggtttga

SEQ ID NO: 103828 - DNA, 258 bp, Glycine max
gtgagtcacagttgttctcatcgaagcagaagaagaagaaatggcgacttctctgcaactgttccaatgcaaactagcgagaccctttcggccattccctttgcgaagttcaactccccctctgagtctgaggtgttgcgcttcgcccccttcttcctacagcatcactctcattcccggcgatggaatcggccccgaaatcatctccgtggccaaagacgttcttgtcctcgtgggttctctcgaagggatcaaatt

SEQ ID NO: 103829 - DNA, 258 bp, Glycine max
tttcacatcaaactgtttggactcaaatggcaatggtgttctcactgttgctctttgattccaaacagtttgcgtgaaatagtacagaggaatggtacccaaaagacgagaaccccattgaattatgatactagcaagcagagcttgtgtcaattgtctattgaccttctcggtggacgaatttcagtggacaaacactggatattcgatcacacttatacgatattctccaattagtaacttgttgagagctgctgc

SEQ ID NO: 103830 - DNA, 251 bp, Glycine max
tggccaacaagaaaatgaagaaggaacaatattcttgtgaccatccacctgcatcatgggattggaggaaaaaaggtgtcatcacccaagtaaagtaccaagggggctgtggaagcggttgggcgttttctgccacgggagccatagaagcagcacatgcaatagcaacaggagaccttgttagcctttctgaacaagaactcgtagactgtgtggaagaaagcgaaggttgttacaatggatggcactat

SEQ ID NO: 103831 - DNA, 260 bp, Glycine max
gttcaatatcctagtataccttaataaataatttaagatactatgatgagagcacggttcagcatttgttgctgggacttgttttcctggcttcagtttctgtctcatttggcattgcttactgggaaaaagagaaccccaaacacaacaagtgtctccagagttgcaatagcgagagagactcgtacaggaaccaagcatgccacgctcgttgcaacctccttaaggtgtggaaagaagaatgtgaagaaggtgaaatt

SEQ ID NO: 103832 - DNA, 265 bp, Glycine max
cgctagctagctagcaagcaagcacagagatggaggcaaagcgaggccatgccctcatgtgcttggcacgtgtttcactcttcctctgcgctctaaccctatccgctgctcacggaagcaccacggttcaagacatcgcgagaaagttgaaactcggggacaacgagcttctgcgcacggagaagaagttcaaggttttcatggagaattacgggaggagctactccacagaggaggagtatttgcgccgtttggggattttcgc

SEQ ID NO: 103833 - DNA, 266 bp, Glycine max
gctgcttctgccaaaattagtggcgccaccgcctttgagatttcaggaactcctgtggattgtgtttcgctagcgttatctggagcgttgttttcgtggtctaagcctatgctggttattagtgggattaaccgcggatcaaactgtggtcatcacatgttctactcaggggttgttgccggagctagggaagcgttgttatgtggtgtaccggcattatcaatatcattaaattggaagaaggatgaaagtcaggaaaacgattt

SEQ ID NO: 103834 - DNA, 261 bp, Glycine max
caataatttaagatactatgatgagagcacggttcccattactgttgctgggacttgttttcctggcttcagtttctgtctcatttggcattgcttactgggaaaaagagaaccccaaacacaacaagtgtctccagagttgcaatagcgagagagactcgtacaggaaccaagcatgccacgctcgttgcaacctccttaaggtggagaaagaagaatgtgaagaaggtgaaattccacgaccacgaccacgaccacaac

SEQ ID NO: 103835 - DNA, 261 bp, Glycine max
cttaattattaacacttccttagttcaatatggggaagcccttcactctctctctttcttccctttgcttgctactcttgtcgagtgcatgctttgctattagctccagcaagctcaacgagtgccaactcaacaacctcaacgcgttggaacccgaccaccgcgttgagtccgaaggtggtttgattcaaacatggaactctcaacaccctgagctgaaatgcgccggtgtcactgtttccaaactcaccctcaaccgca

SEQ ID NO: 103836 - DNA, 257 bp, Glycine max
gaaatttttcccaaagctgatcgagaagccagccaggccagaaagagttgaagaagaatgggaagggggaagatcgaaatcaaaaggattgagaacacaacaaatcggcaagtgaccttctgcaagagaagaaatgggcttctgaagaaagcttatgagctgtcagtgctgtgtgatgcagaagttgccctcatcgtcttctccagccgtggccgtctctatgagtattccaacaacaacataagaacaacaataga

SEQ ID NO: 103837 - DNA, 256 bp, Glycine max
attaaagtgattgacaaagataaggttatgaaaactgggcaagctgaacaaatcaagcgtgaaatatctgttatgagactggccaggcaccccaatattatacagcttttcgaggttttggctaacaagaataagatttactttgttatagaatgtgctaaaggtggagagctcttcaacaaggtggctaaaggaaaactcaaggaagatgttgcacacaagtattttaagcagctaatcaatgctgtagactatt

SEQ ID NO: 103838 - DNA, 258 bp, Glycine max
attctctccattgtctttgaacactcatcaccatggccaagcttgttctttccctttgtttccttcttttcagtggctgcttcgctctgagagagcaggcacagcaaaatgagtgccagatccaaaagctgaatgccctcaaaccggataaccgtatagagtcggaaggtgggttcattgagacctggaaccctaacaacaagccattccagtgtgccggtgttgccctctctcgctgcacccttaaccgcaatgccc

SEQ ID NO: 103839 - DNA, 256 bp, Glycine max
ctgtttggaactcgattgcctgcagtaattggagggtcttatacttacgttgcaacaacaatctctattattctttctggtcgattcagtgatgagccagatcctatagagaaattcaagaggataatgcgggcaacccaaggtgctcttattgttgcttcaactcttcaaatagtactaggctttagtggcctttggcgaaatgttgcaaggttggtctcaggttcttagttcttaagtccactttcagcagttc

SEQ ID NO: 103840 - DNA, 255 bp, Glycine max
tctctccattggtccttaaacactcatcagtcatcaccatggccaagctagttttttccctttgttttctgcttttcagtggctgctgcttcgctttcagttccagagagcagcctcagcaaaacgagtgccagatccaaaaactcaatgccctcaaaccggataaccgtatagagtcagaaggagggctcattgagacatggaaccctaacaacaagccattccagtgtgccggtgttgccctctctcgctgca

SEQ ID NO: 103841 - DNA, 259 bp, Glycine max
ccttgtgttgcttcttttctccctcttaggtctctcttctagttccagcatatcaactcatcgttccatattggaccttgacctaaccaagtttaccacacagaaacaggtgtcttcactgttccaactatggaagagtgagcatggacgtgtctaccataaccacgaagaagaggcaaagagacttgagattttcaagaataacttgaactatatcagggacatgaatgcaaacagaaaatcaccccattctcatcgt

SEQ ID NO: 103842 - DNA, 259 bp, Glycine max
attctctccattgtctttgaacactcatcaccatggccaagcttgttctttccctttgtttccttcttttcagtggctgcttcgctctgagagagcaggcacagcaaaatgagtgccagatccaaaagctgaatgccctcaaaccggataaccgtatagagtcggaaggtgggttcattgagacctggaaccctaacaacaagccattccagtgtgccggtgttgccctctctcgctgcacccttaaccgcaatgccct

SEQ ID NO: 103843 - DNA, 261 bp, Glycine max
cacttccctggttgaagagaagggaacaattaaaggtgtgcaatataagaacaaagatggccaggagttgacaacatatgctcctcttaccattgtttgtgatggttgcttctcaaacttacgccgttctctttgtaatcctaaggtggatattccctcatgttttgttggtttagttttagagaactgtgaacttccatgtgcaaatcatggccatgtcatactgggagacccttcgccgattctattctatcctatcag

SEQ ID NO: 103844 - DNA, 263 bp, Glycine max
ctggtctgaggccagttgttgagggcatgaacatgggatttctacttctggcatttaaccagatctctaataattgtggcatgctgcattacacatctggaggccagttcaaaataccaattgtcattcgtggacctggtggagttgggcggcaacttggagcagagcactcacagcgattggagtcatattttcaatcaatccctggaatccagatggtggcttgctcaaccccttacaatgccaagggcttgatgaaagct

SEQ ID NO: 103845 - DNA, 259 bp, Glycine max
cactgaccaagccatggcgatgagaaccaaactttctttagctatctttttcttttttcttttagccttattttcaaacctagcctttggcaaatgtaaagaaaccgaggtagaagaagaagaccctgagctcgtaacatgcaaacaccaatgccaacagccacagcaatacactgagggtgacaagcgggtatgcttgcaaagatgtgacaggtatcatcgtatgaagcaagagcgagagaaacaaatccaagaggaa

SEQ ID NO: 103846 - DNA, 258 bp, Glycine max
gattaccagagctgatgtggatgtgcagccctatgctttcactaccaagtctctctttgtgggtcatactgattataaatacctgaggtaccaagtaattgatacgccagggattttggacaggccttttgaagatcgtaatattattgagatgtgcagtatcactgctctagcacatttgagagctgcaatcttgtttttcttggacgtctctggatcttgtggttacagtattgctcagcaggcagcgctgtttca

SEQ ID NO: 103847 - DNA, 256 bp, Glycine max
ctcgagcgctcgagccgcttaattattaacacttccttagttcaatatggggaagcccttcactagctctctttcttccctttgcttgctactcttgtcgagtgcatgctttgctattagctccagcaagctcaacgagtgccaactcaacaacctcaacgcgttggaacccgaccaccgcgttgagtccgaaggtggtttgattcaaacatggaactctcaacaccctgagctgaaatgcgccggtgtcactgtt

SEQ ID NO: 103848 - DNA, 257 bp, Glycine max
aaaagagaaccccaaacacaacaagtgtctccagagttgcaatagcgagagagactcgtacaggaaccaagcatgccacgctcgttgcaacctccttaaggtggagaaagaagaatgtgaagaaggtgaaattccacgaccacgaccacgaccacaacacccggagagggaacctcagcaacccggtgagaaggaggaagacgaagatgagcaaccacgtccaatcccattcccacgcccacaacctcgtcaagaag

SEQ ID NO: 103849 - DNA, 255 bp, Glycine max
aagaggctcaaggtcgcagaagcagcagctacaggacagtcaccagaagattcgtcacttcaatgaaggagacgtactcgtgattcctcctggtgttccttactggacctataacactggcgatgaaccagttgttgccatcagtcttcttgacacctctaacttcaataaccagcttgatcaaacccctagggtattttaccttgctgggaacccagatatagagtacccagagaccatgcaacaacaacaaca

SEQ ID NO: 103850 - DNA, 255 bp, Glycine max
aagttctatttggctgctagcaaaggcttatgtagttgtgaatgactcgtgctatcatcaacttgtcagccattggttaaacactcatgcagttgttgagccattcatcatagcaacaaacaggcatctcagtgttgttcaccctatttataaactccttcaccctcactatcgtgacaccatgaacataaatggccttgctcggttatcactggtcaacgacggtggcgttatagaacaaacatttttgtgggg

SEQ ID NO: 103851 - DNA, 260 bp, Glycine max
cgaaccattcgctttgtttgcaactcatgggtttataacactaaactttacaaaagcgtgcgcattttctttgccaaccatacatatgttccaagtgagacaccagcagcacttgtggggtacagagaagaagaattgaagaatttaagaggagatggaaaaggagagcgcaaagaacatgataggatctatgattatgatgtctacaatgatttgggcaatccagatcacggtgaaaattttgctcgcccaattcttgg

SEQ ID NO: 103852 - DNA, 259 bp, Glycine max
cggctcgagtaacaattccttcacttgcagcactgttgcatcatcatcttcattgcaaaaccctaaacttcaccttcaaccatgaccacacaagtaccaccacacagtgtccaagtccacacaacaacacaccgctacgaagctggcgtcgtcccccccggagcccgtttcgaaccgccgcgttatgaagccggcgtcaaagcgccctccatttaccattccgagagaggtccaacgacttcccaggtcctcgccgtcc

SEQ ID NO: 103853 - DNA, 259 bp, Glycine max
aatctcagcaacgaggacgaagccagaggccccaagaccgtcaccaaaaggtacatcgcttcagagagggtgatttgatcgcagtgcctactggtgttgcatggtggatgtacaacaatgaagacactcctgttgttgccgtttctattattgacaccaacagcttggagaaccagctcgaccagatgcctaggagattctatcttgctggaaccaagagcaagagtttctaaaatatcagcagcagcagcaaggaggt

SEQ ID NO: 103854 - DNA, 264 bp, Glycine max
gttgtcctctacaggaatggaatttactctccacattggaacttgaacgcgaacagtgtgatctatgtgactcgagggaaaggaagagttagagtggtgaactgccaagggaatgcagtgttcgacggtgagctaaggaggggacaattgctagtggtgccgcagaactttgtggtggctgagcaagggggagaacaaggattggaatacgtagtgttcaagacacaccacaacgccgtgagcagctacattaaggatgtgttt

SEQ ID NO: 103855 - DNA, 260 bp, Glycine max
gaagaggaaccctagctagggcttggaagaagctgatccgagaagatggtgcagcgtctcacctaccgcaaacgccacagctatgctaccaaatccaaccagcacagagtcgtcaagactcccggtggcaagcttgtttatcagaccacgaagaagagggccagcggacccaagtgccctgtcactggaaagaggattcaagggattccacatttaaggccagcagagtataatagatcaaggttacacagaaaccgaag

SEQ ID NO: 103856 - DNA, 255 bp, Glycine max
atttggatgaatcgggctttgtccgttgcacatgacatagcaattgagaggaatttgctgctttgcctccaggttgttggtgtattgtgggtaatatcttacattggtagtttgttcaactttttgactttgatctattttggtgttcttctttgcttgtctcttcctgtgttgtatgacaagtaccaggaccgagttgatgacaggctgtgtgtgattcatgggattattcagacacagtatacaaaagttcac

SEQ ID NO: 103857 - DNA, 256 bp, Glycine max
tctccctctgcgcaggaattgggaacattcgacaggtagagtttcttcaatggctcctaaagttgataagaagaacgacccaaaggcacaggccttgaagactgctaaggcagttaagtctggtgctacctttaagaagaaggcaaagaagatccgaacttctgtcactttccacagaccgaggacattgaagaaggataggaaccccaagtaccctcgcattagcgcgcctccaagaaataagcttgatcattat

SEQ ID NO: 103858 - DNA, 255 bp, Glycine max
ggtttatttcctctcaggaatgtgttcccaggacctattgtgttttaaatccacaaaatccttttgtgttaaataggtggatggggaaattgactttcccccagggcacttcccgaaatgttaaaagaatgcctctttctatagggggaggagctggtgcaaagaatgctattctcatgaatatgccaaatgctgttctttcaatgtggagatattttgttggagatctcgtctttgaagtttctaagatgactt

SEQ ID NO: 103859 - DNA, 254 bp, Glycine max
gggttttagggcagcttctttctttgagattaagtttcagtagtaatgggtaaggaaaaggttcacattaacatcgtggtcattggccatgtcgactctgggaagtcaaccaccaccggtcaccttatctacaagctcggaggtattgacaagcgtgtcatcgagagattcgagaaggaagctgctgagatgaataagaggtctttcaagtatgcctgggtgcttgacaagctcaaggctgagcgtgaaagagg

SEQ ID NO: 103860 - DNA, 256 bp, Glycine max
caaaaagatagaatcccaggcgaggagtcagatggaggggaaagagcaggatgactcgttgggagcgaacaagttccccgagatacagccgattgggacggcagcgcagagtcaagacgacggcaaggactaccaggagacggcgccggcgccgctggttgacaccgacggagtttaacgtcatggtcgtgttacagaccagggatagcagagtttgtggccacttttcatgctctctacatcgaccgtcttaacc

SEQ ID NO: 103861 - DNA, 256 bp, Glycine max
ctaaattgaaaagctttctagctggtcataatatcaccattactgatggtattgacaaaactagtgcaactttgcaatttagaaagttagcagattgtgattttctcaagagaaactttaagcagatgtctaatgttttatgggtggctcctgaggacaaggcgagtttatggtcacaacttcattatgtttcgtgcaataatctggaaatgcaagaagcttatcttgtcaatctcgtaaatgtgttacgagaatt

SEQ ID NO: 103862 - DNA, 258 bp, Glycine max
gatcactgggacatcccaagctgactgtgctgttcttatcattgattccactactggtggttttgaagctggaatttcaaaggatggacagactcgtgaacatgctctgctttcattcacccttggtgtgaaacagatgatttgttgctgtaacaagatggatgctactacaccaaagtactccaaggccaggtatgatgaaattgtgaaggaagtttcttcctatttgaagaaagtaggatacaaccctgacaagat

SEQ ID NO: 103863 - DNA, 258 bp, Glycine max
taacaacacaggcgcagacgcaaacgcaaacgcaaacgcaaacgcaaacgcagagcgtgatccattgacgaagatggtgcagcgtctcacctaccgcaagcggcacagctatgccaccaagtccaaccaacacagggtcgtcaaaacccctggtgggaagctcgtttatcagactaccaagaagagggccagcggacccaagtgccccgtcactggcaagaggattcaggggattccacacttgaggcctgcagagta

SEQ ID NO: 103864 - DNA, 258 bp, Glycine max
cactgctctgtttcaccgagtttgggcgtttagatcagaaccaaatcgtgttctcttccattggcaaacatggcaacgcatctgagcaagaagagaaagtttgttgcggacggagtgttctttgccgaactgaacgaggttctgacacgtgaattggcggaggacggttactccggcgtcgaagttagggttacgccgatgcgcaccgagatcatcatcagagccacagaaacccaagtcgttctaggtgagaaggga

SEQ ID NO: 103865 - DNA, 258 bp, Glycine max
tgatcaagcactacctgcagatcttatcaagagaggagtggcaattaaggatccatctgccccacatggacttcgacttctgatagaggactacccttatgctgttgatgggctagagatatgggctgcaattaagacatgggtccaagaatatgtgtccttgtactatgcaagagatgatgatgtcaaacctgattctgaactccaacagtggtggaaagaagctgtagagaaaggtcatggtgatctgaaagacaa

SEQ ID NO: 103866 - DNA, 258 bp, Glycine max
acaccgtattagagaatttaagatatactatgatgagagcgcggttcccattactgttgcttggagttgttttcctggcatcagtttctgtcacatttggcattgcgtattcggaaaagcagaaccccagtcacaatatgtgcctccgaagttgcaatatcgagatagactcctacaggaaccaagcatgccacgctcgttgcaacctccttaaggtggaggaagtagaactatacgaagaaggtcaaattccacgac

SEQ ID NO: 103867 - DNA, 256 bp, Glycine max
tctcgagccgtattcggctcgaggttttttttgttcctcactacccaagccatggcgatgagaaccaaactttctttagctatctttttcttttatcttttagccttattttcaaacctagcctttggcaaatgtaaagaaaccgaggtagaagaagaagaccctgagctcgtaacatgcaaacaccaatgccaacagccacagcaatacactgagggtgacaagcgggtatgcttgcaaagatgtgacaggtatc

SEQ ID NO: 103868 - DNA, 254 bp, Glycine max
agcctgcttccaatggttaaccctgacgacattgtgtttgggggatgggatatcagcaacatgaacctggctgatgccatggccagggcaaaggtgtttgacatcgatttgcagaagcagttgaggccttacatggaatccatgcttccactccccggaatctatgacccggatttcattgctgccaaccaagaggagcgtgccaacaacgtcatcaagggcacaaagcaagagcaagttcaacaaatcatcaa

SEQ ID NO: 103869 - DNA, 254 bp, Glycine max
ataacttttgcaggcgaacaatatcacaatcatgcccattttgccgcgacagtctgaagagagtgaactcaggtgatctctgggtattcaccgatagaagggatgtggtagacatggcaacagtgacaagggagaatctcagaaggcttttcatgtacatagataagttgcctctgattgttccagactccctttttgacacatatgactctcacataaggtaagtgattgcaacagaacagattttaatgcat

SEQ ID NO: 103870 - DNA, 252 bp, Glycine max
gggtatttttggcatgatatacccgggttgtcctagcacatttgaagagcctcaacaacctcaacaaagaggacaaagcagcagaccacaagaccgtcaccagaagatctataacttcagagagggtgatttgatcgcagtgcctactggtgttgcatggtggatgtacaacaatgaagacactcctgttgttgccgtttctattattgacaccaacagcttggagaaccagctcgaccagatgcctaggag

SEQ ID NO: 103871 - DNA, 254 bp, Glycine max
ccactaacaattccttcacttgcagcactgttgcatcatcatcttcattgcaaaaccctaaacttcaccttcaaccatgaccacacaagtaccaccacacagtgtccaagtccacacaacaacacaccgctacgaagctggcgtcgtcccccccggagcccgtttcgaaccgccgcgttatgaagccggcgtcaaagcgccctccatttaccattccgagagaggtccaacgacttcccaggtcctcgccgtca

SEQ ID NO: 103872 - DNA, 253 bp, Glycine max
attcgatgaactttttgttgacttccaggatttcaatgtggaagctctagagaaatttgttgaggaatctagtacccctgttgttactgtctttaacaatgatccgagcaatcaccctttcgttgccaaattcttcaacagtcccaatgcaaaggcaatgttgttcatcaacttcactgccgaaggtgctgaatctttcaaatcaaaataccgtgaagctgctgagcaacataaacaacagggtgtaagcttt

SEQ ID NO: 103873 - DNA, 245 bp, Glycine max
ggcggagaagccggagaacaaggattcgaatacatagtattcaagacacaccacaacgcagtcactagctacttgaaggatgtgtttagggcaattccctcagaggttcttgcccattcttacaaccttcgacagagtcaagtgtctgagcttaagtatgaaggaaattggggtcctttggtcaaccctgagtctcaacaaggctcaccccgtgttaaagtcgcataaatgacaagcatgatggt

SEQ ID NO: 103874 - DNA, 254 bp, Glycine max
gtggtgccttatcgctgtggttatcatcttcttcttcctctttcttagatctcttctttctctacgccgcacgccgaaaccatggccggaaaaggagagggtcctgctatcggaatcgatctcggaaccacctactcttgcgtcggtgtgtggcaacatgaccgcgttgaaatcatcgccaacgaccaagggaacagaaccacgccgtcttacgtcggattcactgacaccgagcgtctcatcggtgatgcggc

SEQ ID NO: 103875 - DNA, 268 bp, Glycine max
ggcaacagtgagaacaccattgaattttgattctagcaagcagagcttttgtcaattttctattgaccttctcggtggaggaattttagtggacaaaactggagattggatcacacttatacaaaattctccaattagtaacttgttgagagttgctgcttggaagaaaggttgtttaatggtcaagattgtgatgtctgggaatgcagcagtcaaaaggagtgattgggcctcattggtacaagtgtttttaacaaacagaacagta

SEQ ID NO: 103876 - DNA, 254 bp, Glycine max
ataagagaaccccaaacacaacaagtgtctccagagttgcaatagcgagagagactcgtacaggaaccaagcatgccacgctcgttgcaacctccttaaggtggagaaagaagaatgtgaagaaggtgaaattccacgaccacgaccacgaccacaacacccggagagggaacctcagcaacccggtgaaacggtggaagccgaagatgagcaaccacgtccaatcccattcccacgcccacaacctcgtcaag

SEQ ID NO: 103877 - DNA, 264 bp, Glycine max
cggctcgagcggctcgagtaagaaagtcttccatagccccccaaaaatgaagagcaccatcttactttgctcactttctcttttgtgccttcaccacctcatacctaccttcagccatcgctgatttcgtgctcgataatgaaggtaaccctcttgaaaatggtggcacatattatatcttgtcagacataacagcatttggtggaataagagcagccccaacgggaaatgaaagatgccctctcactgtggtgcaatctcgca

SEQ ID NO: 103878 - DNA, 261 bp, Glycine max
gttggcaaaggcattcgtggagcactactacagcaccttcgacaccaaccggaacggtttagcgaatctgtatcaggagggttccatgctgaccttcgaagggcagaagatccagggcgcttccagcatcgtcgctaagctcacttccctccctttccagcagtgccaccactccatctccaccgtcgactgccagccctccggtgtcaacgctggcatgcttgtctttgtcagcggcaacctccagctcgctggcgaaca

SEQ ID NO: 103879 - DNA, 255 bp, Glycine max
cagatgcatatctttctgtactgaaggcacttgcatgcttctgttcttgcaatcatgagcttgttgtggatttggttcccgctgaacatctcgaagatgatacctctaaagaggatcctgatgcatataaagctgcttggggtcttttgaagggagctaatgggattctagttccaggaggttttggtgacagaggagtggaaggaaaaattcttgctgccaagtatgctcgagaaaatagcattccatactggg

SEQ ID NO: 103880 - DNA, 259 bp, Glycine max
ggagtggcgaatggcgctgtggtccaaattttatgcatagtcactctgctgttatgcagcgattgtgcagcatcttttgccaaggagcagcaaaaggaccgggttggtaggctcccaggtcaaggcttcaacatcagcttcgcacactatgctgggtacatcaccgtcaatgagaaagctgggagaacactcttctactggttcattgaggcacttgaagatcctcattctaagccccttgttttgtggctcaatggag

SEQ ID NO: 103881 - DNA, 261 bp, Glycine max
actgaaagcactcagtagggtttgcggtttcagagtttgtgacgcacgcatccatggccaccaccaccaacgccgccgcagccccgccgcgccagctctcccagaaggaagccgacatccagatgatgttagccgccgacgtccacctcggcaccaaaaactgcgacttccaaatggaacgttacatcttcaagcgccgcaacgacgggatttacattattaaccttgggaagacatgggagaagcttcagttagcagcta

SEQ ID NO: 103882 - DNA, 266 bp, Glycine max
gtgccctcacagagaacacttcacggaggcatatttagagcatgttcagattttgaaaacgaggctgcagtgctcttcaacagcaagctctcatcccaaatggatgctcttaagaaacagtttcaagaggctagatttgtctaccttgacctttacaacccagtactaaatttgattcaaaacccagctaaatatggttttgaagtaatggaccaaggatgctgtggcactggaaaattggaagtaggcccgttgtgcaacatttc

SEQ ID NO: 103883 - DNA, 272 bp, Glycine max
agaacttagttctctgttgcatcatcatcatcttcattagtgttagccctaaacttcaccttcaaccatgaccacagtgccaccacacagtgtccaagtgcacacaacaacacaccgctacgaagccggcgtcgtcccgccggctcgttttgaggcgccgcgttacgaagccggcatcaaggcgccctcttccatttaccattccgagagaggtccgacgacctctcaggttctcgcagttgtcgccggccttccggtcggcggcatctcct

SEQ ID NO: 103884 - DNA, 205 bp, Glycine max
ataaaattcttccaccaagttatgggtttccttgtgttgcttcttttctccctcttaggtctctcttctagttccagcatatcaactcatcgttccatattggaccttgacctaaccaagtttaccacacagaaacaggtgtcttcactgttccaactatggaagagtgagcatggacgtgtctaccataaccacgaagaagagg

SEQ ID NO: 103885 - DNA, 258 bp, Glycine max
aagagatcaataatgggatctggggccggcaatttcctcaaggtgcttctcataaacttcgatgtgcttgctgagcctgtcattagtcttgtttatcctctatatgctacaattagggcaattgagagcaagtctcctattgatgatcagcagtggctcacttactgggttctctactccttgatcaccctcttagagcttacttatgctaaagtctttgagtggattccaatatggccctatgcaaagctgatgcaa

SEQ ID NO: 103886 - DNA, 237 bp, Glycine max
tagttcaatatcctagtataccttaataaataatttaagatactatgatgagagcacggttcccattactgttgctgggacttgttttcctggcttcagtttctgtctcatttggcattgcttactgggaaaaagagaaccccaaacacaacaagtgtctccagagttgcaatagcgagagtgactcgtacaggaaccaagcatgccacgctcgttgcaacctccttaaggtggaga

SEQ ID NO: 103887 - DNA, 255 bp, Glycine max
taaaattcttccaccaagttatgggtttccttgtgttgcttcttttctccctcttaggtctctcttctagttccagcatatcaactcatcgttccatattggaccttgacctaaccaagtttaccacacagaaacaggtgtcttcactgttccaactatggaagagtgagcatggacgtgtctaccataaccacgaagaagaggcaaagagacttgagattttcaagaataacttgaactatatcagggcatgaa

SEQ ID NO: 103888 - DNA, 254 bp, Glycine max
ctgaataattaagaaaagccatttccatagcagcctaagaaaatgaagagcactagcttgttcgctatctttctactttgcgccttcacctcatacctaccttccgccaccgcccaggacgtgctcgacgtggatggcgatccgattcggaacggtttcatatactacgttttgccggcaataagaggaaacggtggcggaatagaacgagccgcactcgggaaagacacttgccctatcactgtagtcaatct

SEQ ID NO: 103889 - DNA, 257 bp, Glycine max
tgaaattttgataaaccgcgatccaggttgccgcaccttaaaaccggaaacataagcaatcgttacttgatttcaagaatctttcaatttttcctacttctttgtgcacgatttcttaagggaaagaaaatcactctctgtgccggtcacagacttcgtgaatcattttcttttccactcttagtttatttgctgaacactctcctatttgatataggacttcgtgtcagatttaaacttctcctgtctcttctcag

SEQ ID NO: 103890 - DNA, 258 bp, Glycine max
ctttgttcactcttcttctcttgcgctagggttttagcgcacatcttctagatttaaggaagatgggtaaggaaaaggttcacatcagtattgtggtcattggccatgtcgactctgggaaatccactaccactggtcacctgatttacaagcttggaggcattgacaagcgtgttattgagaggtttgagaaggaagctgctgagatgaacaagaggtctttcaagtatgcctgggtgctggacaaacttaggctga

SEQ ID NO: 103891 - DNA, 266 bp, Glycine max
gttcaatatcctagtataccttaataataatttaagatactatgatgagagcacggttcccattactgttgctgggacttgttttcctggcttcagtttctgtctcatttggcattgcttactgggaaaaagagaaccccaaacacaacaagtgtctccagagttgcaatagcgagagagactcgtacaggaaccaagcatgccacgctcgttgcaacctccttaaggtggagaaagaagaatgtgaagaaggtgaaattcacgac

SEQ ID NO: 103892 - DNA, 267 bp, Glycine max
tcctagtataccttaataaataatttaagtactatgatgagagcacggttcccattactgttgctgggacttgttttcctggcttcagtttctgtctcatttggcattgcttactgggaaaaagagaaccccaaacacaacaagtgtctccagagttgcaatagcgagagagactcgtacaggaaccaagcatgccacgctcgttgcaacctccttaaggtggagaaagaagaatgtgaagaaggtgaaattccacgaccacgccac

SEQ ID NO: 103893 - DNA, 270 bp, Glycine max
gtttttgatattctcttgggaatttctcaagattttgaaattgctggtaatactcttatgccagctttttctgttccacaggctactgccagatcttctgaaaatgcggaatcctctgcatgatctggaatttgtgttttctttcgcttgttcgtttgtttaattcaataaaggaaattaggcatgaccctcttgttgagtatgctctgcctatttgaaaatttccacacctcttttaattgtcgtaatgatgtgtgaagtgtgtttatt

SEQ ID NO: 103894 - DNA, 254 bp, Glycine max
gagttgatcagcaaagggcagcagcttgatgcggttcactttacctatgaagtgggtctggtggaaaagttccctcctgttcccttgttgaagtcttttctcaaggatgctaagaaagttgcggcttctattttggaagatcctaataatgcaggccgagctgcgtacctagctgcaaggaaagagcagtctgcactcagggctgtgattaaatgcattgaagaatacaaacttgaggatgagttccctccaga

SEQ ID NO: 103895 - DNA, 258 bp, Glycine max
ctaatttctggaaaaagaaccagttgcggggatgaagatcctgattactttggagtttctaaaggaaaaattccttttggtgaacaatcttctagaacactttttgttagaaacatcaatagcaatgtagaagattctgagctaaaggctctctttgagcaatatggagatatccgaaccatatatactgcctgcaagcatcgtggatttgttatgatttcttattatgatataagggcagcacaaaatgcatgaaag

SEQ ID NO: 103896 - DNA, 255 bp, Glycine max
aacactttccttagttcaatatggggaagcccttcttcactctctctctttcttccctttgcttgctactcttgtcgagtgcatgctttgctattacctccagcaagttcaacgagtgccaactcaacaacctcaacgcgttggaacccgaccaccgcgttgagtccgaaggtggtcttattgaaacatggaactctcaacaccctgagctgcaatgcgccggtgtcactgtttccaaacgcaccctcaccgcaa

SEQ ID NO: 103897 - DNA, 254 bp, Glycine max
agatgacccaaattatgtttgagactttcaatgtgcctgccatgtatgttgcaattcaggctgtcttgtctctgtatgccagtggacgtactacaggtattgtgcttgattctggtgatggtgtgagccacacggtgcccatatatgaagggtatgctcttcctcatgcaattcttcggttggaccttgctggccgtgatttaacagagtacttggtgaaaatccttaccgagagaggatactccttcacacct

SEQ ID NO: 103898 - DNA, 256 bp, Glycine max
ttccttagttcaatatggggagcccttcactctctctctttcttccctttgcttgctactcttgtcgagtgcatgctttgctattagctccagcaagctcaacgagtgccaactcaacaacctcaacgcgttggaacccgaccaccgcgttgagtccgaaggtggtttgattcaaacatggaactctcaacaccctgagctgaaatgcgccggtgtcactgtttccaaactcaccctcaaccgcaatggctccact

SEQ ID NO: 103899 - DNA, 258 bp, Glycine max
atcctagtacaccgtattaaagatttaagatatactatgatgagagcgcggttcccattactgttgctgggagttgttttcctggcatcagtttctgtctcatttggcattgcgtattgggaaaagcagaaccccagtcacaacaagtgcctccgaagttgcaatagcgagaaagactcctacaggaaccaagcatgccacgctcgttgcaacctccttaaggtggaggaagaagaagaatgcgaagaaggtcaattc

SEQ ID NO: 103900 - DNA, 265 bp, Glycine max
caaatatgggcacccatcagccaacagagtcgttgcgggacgcacctgagttgaccaagctgtagacactgaactatcatgcaccatagcatacaaatatggtcacccatcagccaacagagtcgttgcgggacgcacctgagttggctgatgggtgcccatatttgtatgctatggtgcatgatagttcagtgtctacaataccaggtgattttgtcattggtgttaagttgactaagtgcgcactatgtgtgcatagggctcc

SEQ ID NO: 103901 - DNA, 266 bp, Glycine max
ctgctcgagctgctcgagcggctcgacggctcgagcagaatctccgagactaccgcattttggacttcaactgcaaacccaacacccttcatctcccccaccatgctgacgctgattacctcatcgttatccttaacgggactgccattcttaccttggtgaacaacgacgaccgagactcttacaaccttcaatctggcgatgccctaagagtccctgcaggaaccacatactatgtggttaaccctgacaacgacgagatctca

SEQ ID NO: 103902 - DNA, 250 bp, Glycine max
cgagataaaattcttccaccaagttatgggtttccttgtgttgcttcttttctccctcttaggtctctcttctagttccagcatatcaactcatcgttccatattggaccttgacctaaccaagtttaccacacagaaacaggtgtcttcactgttccaactatggaagagtgagcatggacgtgtctaccataaccacgaagaagaggcaaagagacttgagattttcaagaataacttgaactatatc

SEQ ID NO: 103903 - DNA, 253 bp, Glycine max
gcaagctcaaagtgctgaagttactttgacttcttccctgtggaggttaatagtcaagagggagttgctcatattggtgaattgaaatctggtgtatatgttccactgcctacaaaaactaatttggtggaaactcccaaggaatggcaactggatctaccttgtgacaaaattcctagtgtcttgactacaactgatgagagattggtaggcacagaacatgagggatatgatccttttcttggtggattca

SEQ ID NO: 103904 - DNA, 255 bp, Glycine max
cgaagccagaggccccaagaccgtcaccaaaaggtacatcgcttcagagagggtgatttgatcgcagtgcctactggtgttgcatggtggatgtacaacaatgaagacactcctgttgttgccgtttctattattgacaccaacagcttggagaaccagctcgaccagatgcctaggagattctatcttgctgggaaccaagagcaagagtttctaaaatatcagcagcagcagcaaggaggttcccaagccaga

SEQ ID NO: 103905 - DNA, 250 bp, Glycine max
tcctacgataccaaattcgaggagataaacaaggttctgtttagtagagaggaagggcagcagcaaggggagcagaggctgcaagagagcgtgattgtggaaatctcgaaggaacagattcgggcactgagcaaacgtgccaaatctagttcaaggaaaaccatttcttctgaagataaaccttttaacttgagaagccgcgaccccatctactccaacaagcttggcaagttctttgagatcacccaga

SEQ ID NO: 103906 - DNA, 251 bp, Glycine max
gcggcttgtctgcaactgtggcaatgcaaactagcgagaccctttgactcattaccggtgcgaaggtcaattcctttgagtctgaggtgttcggccgcgccctcttcttccaagccgacgcgctcctacagcatcactctcatccccggcgacggcatcggccccgaaatcatctcggtggccaaagacgttcttgtcctcgccggttatctcgaagggattaaatacgacttccgcgagatgcttatggg

SEQ ID NO: 103907 - DNA, 254 bp, Glycine max
gaactcgcagcaccaccaccagcaccaccaccagcaccgttctattcttcttccacaatgggtatctctcgtgattccatgcacaagaggcgcgccaccggcggcaagaagaaggcttggaggaagaagagaaagtatgagcttgggaggcagccagcaaacacaaagctatcaagcaacaagacggtgaggaggattagggttcgcgatggaaacgtgaagtggcgtgctttgaggcttgataccgggaacta

SEQ ID NO: 103908 - DNA, 253 bp, Glycine max
aaggaagactgggatatgcttcattgataccatatgttgagccagttgtgcaagctcaaagtgctgaagtttactttgacttcttccctgtggaggttgatagtcaagagggagttgctcacattggtgaattgaaatctggtgtctatgttccactgcctacaaaaactaatttgatggaaactcccaaggaatggcaactggatctaccttgtgacaaaattcctagtgtcttgactacaactgatgagag

SEQ ID NO: 103909 - DNA, 262 bp, Glycine max
caacatacaaaaatcaacgtgtgcgcttttcttctctttacccgttgaaacatccttagttttcagattctgaaatcttgattctgaattcatcacaatgaattcgtcaactacagtgaggaagttgcaggtggtgtcccctgttcctgcggacatagacattgcaaactccgttgaaccagttcatatctcccagattgccaaagagctcaaccttagtcccaatcactatgacctttacggtaaatacaaggctaaggtt

SEQ ID NO: 103910 - DNA, 269 bp, Glycine max
cggctcgagtaacaattccttcacttgcagcactgttgcatcatcatcttcattgcaaaaccctaaacttcaccttcaaccatgaccacacaagtaccaccacacagtgtccaagtccacacaacaacacaccgctacgaagctggcgtcgtcccccccggagcccgtttcgaaccgccgcgttatgaagccggcgtcaaagcgccctccatttaccattccgagagaggtccaacgacttcccaggtcctcgccgtcctcgcggcctc

SEQ ID NO: 103911 - DNA, 270 bp, Glycine max
atcatccccttccttccatgccacccctactctccgccccctcgcgccacgcgcctccatgtccgcctcagcgccgccctacgacttcggatcgttccggttcgatccgattagagagtcgattgtgtcgcgcgagatgacccgcaggtacatgatcgacatggtcacccacgccgacaccgacgtcgtcatcgttggcgcgggctccgcgggtctctcgtgcgcctacgagctctccaaaaacccctccatcaacatcgccatgttgag

SEQ ID NO: 103912 - DNA, 256 bp, Glycine max
gacaatcttataggtttagcatgctggggagtgtgtatagggcagagcttccagatggaaagatacttgctgtgaagaaactagacaagagagtttctgatcaacaaacagatgatgagtttctcgaattgataaacagtattgacagaatccggcatccaaatattgttgagcttattgggtactgtgcagagcatggccaaaggcttcttatttatgagtattgcagtaatgggtcgttgcaggatgcatccat

SEQ ID NO: 103913 - DNA, 256 bp, Glycine max
taaaattcttccaccaagttatgggtttccttgtgttgcttcttttctccctcttaggtctctcttctagttccagcatatcaactcatcgttccatattggaccttgacctaaccaagtttaccacacagaaacaggtgtcttcactgttccaactatggaagagtgagcatggacgtgtctaccataaccacgaagaagaggcaaagagacttgagattttcaagaataacttgaactatatcagggaatgaat

SEQ ID NO: 103914 - DNA, 254 bp, Glycine max
caaaaaaagacaacccagagagcgcgtcttaataaacgctcttctctgaaaacccccatttcttttcttctttcttcttctctttcgcttcttcgatcttcgatcttcgtcgctgaaaatgagagagtgcatttcaatccacatcggccaggccgggattcaggttggaaacgcctgctgggagctttactgcctcgaacacggcattcagcctgatgggcagatgccaagtgacaagaccgttggtgcaggtg

SEQ ID NO: 103915 - DNA, 250 bp, Glycine max
  unsure (1)..(250): unsure at all n locations
ctctgcgacatgttcnacaccacctccttgttcacatcatcatcatcatcatcatcatcatcttcttcttcttcaatcagttgactcttcgttcctccctctattcatctgatggagcccatggacatcgttgggaaggccaaggaagacgcttctcttcctaaagcgacaatgacgaaaattattaaagagatgttgcccccggacgtgcgtgtcgccagagatgcacaggatttattgatcggtgttg

SEQ ID NO: 103916 - DNA, 253 bp, Glycine max
agatggtcaagtttgtttcaatagtgagttaatcacatgtgctaccattgcagtttctacaattgcaatggtagcacatgtgattaactcactatttgaaacaaacttgcccgtcttgatagaaacacagaaggccccaacaatggctgatcgaacaaacaaaccaactaaatcaacggattcagaaatcatgcctaaagacatgagacatttttcaaccaatcccaaagcacaggaactagccagaatacac

SEQ ID NO: 103917 - DNA, 255 bp, Glycine max
gcacttcccaaaaacacagttggaggaaccattctgcgtagtgatctattggcaaattttttgacagagggcaattttagagcaagtgttgatttgcagcgcacgcatcgtattaaaggaatgattaaaatggtggccacagttggtattcctgagaatacaggtatagcattggcctgtgctatgaatagttcttttagggggcgtgccagttctgatatttacaccatctgctctcaagactgtgaatatgga

SEQ ID NO: 103918 - DNA, 257 bp, Glycine max
agcaaaatgaccaagttcacaatcctcctcatctctcttctcttctgcatcgcccacacttgcagcgcctccaaatggcagcaccagcaagatagctgccgcaagcagctccagggggtgaacctcacgccctgcgagaagcacatcatggagaagatccaaggccgcggcgatgacgatgatgatgatgacgacgacaatcacattctcaggaccatgcggggaagaatcaactacataaggaggaacgaagaaaa

SEQ ID NO: 103919 - DNA, 258 bp, Glycine max
gcagacggtgaacccaccgaatgcggcgacgttttcggtgtctccaccgccgcggagcctcacgctgcgccggtggtgtccgccggtatcggttcggctgccatagatggcgacaccataaccatcggagaagctctggaagcggcggcaatatcgatcggggataaaccagtggaccaaaatgacgccgatgcgattggcgtcgcggagattagggccaccggagagaataaggtgaggtccggtggggtgggtaaa

SEQ ID NO: 103920 - DNA, 263 bp, Glycine max
cgatgccctaagagtccctgcaggcaccacatactatgtggttaaccctgacaacgacgagaatctcagaatgataacactcgccatacccgttaacaaacccggtagatttgagagtttcttcctatctagcactcaagctcaacagtcctacttgcaagggttcagcaagaatattctagaggcctcatacgacaccaaattcgaggagataaacaaggttctgtttggtagagaggaggggcagcaacaaggggagagag

SEQ ID NO: 103921 - DNA, 264 bp, Glycine max
tagtgactcttcatctgcctatctcaaacatcttgcatatcatacagcaaaatgtggatggaaagttgttgtcagtaatcaccgaggacttggaggtgtttcaatcacgtctgattgtttctacaatgctggatggactgaggatgtccgcacagtggttaattatctacacaaagagaaccccagggcacctttgtttgttgttgggactagcattggagctaatattctgataaaatatcttggtgaggatggtgagatatt

SEQ ID NO: 103922 - DNA, 242 bp, Glycine max
ctcgagccgcaacaattccaagccttgcgagctatggtgcaggctaatccacaaatattgcagccaatgctacaagagcttggcaagcaaaatccccatcttatgagattgattcgagaccatcaagctgacttccttcgcttgataaatgaacctgctgaaggtggcgaagggaatatattggggcagatggttctggaatgccaccagccagtaactgtcacccctgaggagcgccaagc

SEQ ID NO: 103923 - DNA, 250 bp, Glycine max
gttcaatatcctagtaaccttaataaataatttaagatactatgatgagagcacggttcccattactgttgctgggacttgttttcctggcttcagtttctgtctcatttggcattgcttactgggaaaaagagaaccccaaacacaacaagtgtctccagagttgcaatagcgagagagactcgtacaggaaccaagcatgccacgctcgttgcaacctccttaaggtggagaaagaagaatggaagaa

SEQ ID NO: 103924 - DNA, 248 bp, Glycine max
cttaattattaacactccttagttcaatatggggaagcccttcagtctctctctgtcttccctttgcttgctactcttctcgagtgcatgctttgctattagctccagcaagctcaacgagtgccaactcaacaacctcaacgcgttggaacccgaccaccgcgttgagtccgaaggtggtttgattcacacatggaactctcaacactctgagctgaaatgcgccggtgtcactgtttccaactcac

SEQ ID NO: 103925 - DNA, 247 bp, Glycine max
aaattctcaaatccaaatccaattccaattccaattcccaatcttctcaaaccctaattcctcatcttgaaaatgagagaaatcttgcacatccagggagggcaatgcgggaaccagatcggagcgaagttctgggaggtgatatgcgacgagcacggcatcgaccacaccggaaagtacagtggcgactctgaactccaattggaacgcatcaatgtttattacaacgaagcgagtggcggaagta

SEQ ID NO: 103926 - DNA, 247 bp, Glycine max
cttaattattaacactccttagttcaatatggggaagcccttcactctctctctttcttccctttgcttgctactcttgtcgagtgcatgctttgctattagctccagcaagctcaacgagtgccaactcaacaacctcaacgcgttggaacccgaccaccgcgttgagtccgaaggtggtttgattcaaacatggaactctcaacaccctgagctgaaatgcgccggtgtcactgtttccaactca

SEQ ID NO: 103927 - DNA, 254 bp, Glycine max
tttgaacactcatcaccatggccaagcttgttctttccctttgtttccttcttttcagtggctgcttcgctctgagagagcaggcacagcaaaatgagtgccagatccaaaagctgaatgccctcaaaccggataaccgtatagagtcggaaggtgggttcattgagacctggaaccctaacaacaagccattccagtgtgccggtgttgccctctctcgctgcacccttaaccgcaatgcccttcgagacctt

SEQ ID NO: 103928 - DNA, 249 bp, Glycine max
acaataccaggtgatttttcattggtgttaagttgacaaccataaacaatatgtgtgcatatgggcttaatcctggtatttcaggttctcgtcttttgggcaccattcctcagtccatttcacagcaaactgtttggaatcaaatggcaacagtgagaacaccattgaattttgattctagcaagcagagcttttgtcaattttctatcgaccttctcggtggaggaattttagtggacaaaactggga

SEQ ID NO: 103929 - DNA, 260 bp, Glycine max
cctaaacttcaccttcaaccatgaccacagtgccaccacacagtgtccaagtgcacacaacaacacaccgctacgaagccggcgtcgtcccgccggctcgttttgaggcgccgcgttacgaagccggcatcaaggcgccctcttccatttaccattccgagagaggtccgacgacctctcaggttctcgcagttgtcgccggccttccggtcggcggcatcctcctgcacctggcaggactgaccctggctggactctca

SEQ ID NO: 103930 - DNA, 261 bp, Glycine max
ggccatcctttgagccttaagttcgattcatttgcagttataatgctgtgtgttggaattcctaccgagtggtctgttgtggaggatctaccagaaggacctgctgttaaaattggtgagaacaaagatgcaatggatggttggtttagacttgagagagtttctgatgatgaattcaataactataagcttgtgttctgtccacagcaagctgaggatgacaaatgtggggatattgggattagtattgatcatgagatg

SEQ ID NO: 103931 - DNA, 263 bp, Glycine max
atgcttgtctcaaagattaagccatgcatgtgtcagtatgaactaattcagactgttgaactgcgaatggctcattaaatcagttatagtttgtttgatggtatctactactcggataaccgtagtaattctagagctaatacgtgtaacaaaccccgacttctggatgggatgcatttattagatagaaggtcaacacaggctctgcctgttgctttgatgattcatgataactcgtcggatcgccggcctttgtgccgcga

SEQ ID NO: 103932 - DNA, 274 bp, Glycine max
aattcaggaagaaaaaattgacagctcccttgagtttcttattctggccagtgacgggctatgggatgttgtcacaaatgaggaagctgttgctatgattaaatcaattgaggatgctgaggaggcagcaaagaggctgatgcaagaagcatatcagagaggtagtgctgacaatatcacatgtgttgtcgttcgtttcttgatgaaccaaggtggatccaaagacaaagaggtagtagctcctcctcataatagtagctctgccagtaggaat

SEQ ID NO: 103933 - DNA, 278 bp, Glycine max
gtacttgcaagctcccaaggatgtgtcgcagcaaatcaaaatggccaacaagaaaatgaagaaggaacaatattcttgtgaccatccacctgcatcatgggattggaggaaaaaaggtgtcatcacccaagtaaagtaccaagggggctgtggaagcggttgggcgttttctgccacgggagccatagaagcagcacatgcaatagcaacaggagaccttgttagcctttctgaacaagaactcgtagactgtgtggaagaaagcgaaggttgttaca

SEQ ID NO: 103934 - DNA, 273 bp, Glycine max
gacaaatactatttacagatccactttgtaccccaaaggcgaacaaagaacagttggtgcaactaatgtttgaaacattcaatatatcaggattttatgcctcagaacaagcagtgttatcactctatgctgtgggacgtatctcaggctgcactgttgatattggacatggaaaaatagatattgcaccggtaattgagggtgctgttcaccacatcgcctcgagaagatttgagtttggaggtactgatctaactaatttcctggctcaag

SEQ ID NO: 103935 - DNA, 272 bp, Glycine max
gtggttctaaattgaaaagcttgacatattcatgaacactaattttgtttctttgtgtgtgtatggtgatgataacttaattagtgttcatgaatatgtcaagccttactttagtggttctaaattgaaaagctttctagctggtcataatatcaccattactgatggtattgacaaaactagtgcatctttgcaatttagaaagttagcagattgtgattttctcaagagaaactttaagcagatgtctaatgttttgtgggtggctcctg

SEQ ID NO: 103936 - DNA, 270 bp, Glycine max
gttgtcctctacaggaatggaatttactctccacattggaacttgaacgcgaacagtgtgatctatgtgactcgagggaaaggaagagttagagtggtgaactgccaagggaatgcagtgttcgacggtgagctaaggaggggacaattgctagtggtgccgcagaactttgtggtggctgagcaagggggagaacaaggattggaatacgtagtgttcaagacacaccacaacgccgtgagcagctacattaaggatgtgtttagggca

SEQ ID NO: 103937 - DNA, 265 bp, Glycine max
attgtctttggacactcatcatcatggccaagcttgttctttccctttgcttccttctaatcagtggctgcttcgctctgagagagcaggcacagcataatgagtgccagatccatcagctgcatgccctcaaaccggctaaccgtatagagtcggaaggtgggcttcattgagacctggaaccctaccaacaagccattccagtgtgccggtgatgcccactctcgctgcacccttaaccgaaatgcccttcgaagaccttcct

SEQ ID NO: 103938 - DNA, 273 bp, Glycine max
tttggcattgcgtattgggaaaagcagaaccccagtcacaacaagtgcctccgaagttgcaatagcgagaaagactcctacaggaaccaagcatgccacgctcgttgcaacctccttaaggtggaggaagaagaagaatgcgaagaaggtcaaattccacgaccacgaccacaacacccggagagggaacgtcagcaacacggtgagaaggaggaagacgaaggtgagcagccacgtccattcccattcccacgcccacgccaacctcatcaa

SEQ ID NO: 103939 - DNA, 271 bp, Glycine max
ataaaattcttccaccaagttatgggttcccttgtgttgcttcttttctccctcttaggtctctcttctagttccagcatatcaactcatcgttccatattggaccttgacctaaccaagtttaccacacagaaacaggtgtcttcactgttccaactatggaagagtgagcatggacgtgtctaccataaccacgaagaagaggcaaagagacttgagattttcaagaataacttgaactatatcagggacatgaatgcaaacagaaaat

SEQ ID NO: 103940 - DNA, 274 bp, Glycine max
cttaattattaacacttccttagttcaatatggggaagcccttcactctctctctttcttccctttgcttgctactcttgtcgagtgcatgctttgctattagctccagcaagctcaacgagtgccaactcaacaacctcaacgcgttggaacccgaccaccgcgttgagtccgaaggtggtttgattcaaacatggaactctcaacaccctgagctgaaatgcgccggtgtcactgtttccaaactcaccctcaaccgcaatggcctccactt

SEQ ID NO: 103941 - DNA, 271 bp, Glycine max
ctacagacttcaatctggtgatgccctgagagtcccctcaggaaccacatactatgtggtcaaccctgacaacaacgaaaatctcagattaataacactcgccatacccgttaacaagcctggtagatttgagagtttcttcctatctagcactgaagctcaacaatcctacttgcaaggattcagcaggaacattttagaggcctcctacgatacgagattcgaggagataaacaaggttctgtttagtagagaggaagggcagcagcag

SEQ ID NO: 103942 - DNA, 268 bp, Glycine max
agaagatgatgatgatgaggaagagcagccacagtgcgtggagacagacaaaggttgccaacgccaaagcaaaaggagcagaaatggcattgatgagaccatttgcacaatgagacttcgccaaaacattggtcagaattcatcacctgacatctacaaccctcaagctggtagcatcacaaccgccaccagccttgacttcccagccctctggcttctcaaactcagtgcccagtatggatcactccgcaagaatgctatgttcgtg

SEQ ID NO: 103943 - DNA, 271 bp, Glycine max
cttaattattaacacttccttagttcaatatggggaagcccttcactctctctctttcttccctttgcttgctactcttgtcgagtgcatgctttgctattagctccagcaagctcaacgagtgccaactcaacaacctcaacgcgttggaacccgaccaccgcgttgagtccgaaggtggtttgattcaaacatggaactctcaacaccctgagctgaaatgcgccggtgtcactgtttccaaactcaccctcaagcgcaatggcctcca

SEQ ID NO: 103944 - DNA, 271 bp, Glycine max
tagcacttatcaagagccgcaagaatctcagcaacgaggacgaagccagaggccccaagaccgtcaccaaaaggtacatcgcttcagagagggtgatttgatcgcagtgcctactggtgttgcatggtggatgtacaacaatgaagacactcctgttgttgccgtttctattattgacaccaacagcttggagaaccagctcgaccagatgcctaggagattctatcttgctgggaaccaagagcaagagtttctaaaatatcagcagcag

SEQ ID NO: 103945 - DNA, 267 bp, Glycine max
ctcttcttctcttgcggctagggttttagcgcacttcttctagatttaaggaagatgggtaaggaaaaggttcacatcagtattgtggtcattggccatgtcgactctgggaaatccactaccactggtcacctgatttacaagcttggaggcattgacaagcgtgttattgagaggtttgagaaggaagctgctgagatgaacaagaggtctttcaagtatgcctgggtgctggacaaacttaaggctgagcgtgaaagaggaatc

SEQ ID NO: 103946 - DNA, 268 bp, Glycine max
ggagatttaccaagaggatctcatcaaacgccttgagtccgagatctctggtgactttgagagagctatgtaccggtggatgttgcagcctgcggatcgtgatgctgttttggtgaatgtggcaatcaagaatggcaccaaagactaccatgtgattgcagagattgcttgtgtcctatcagctgaagagctcttggcagtgaggcgggcctaccaccgccgctacaagtgttccttggaggaagatgtggcagctaacaccaccggc

SEQ ID NO: 103947 - DNA, 261 bp, Glycine max
gtgagtcacagttgttctcatcgaagcagcagacgaagaaatggagacttctctgcaactgttccaatgcaaactagcgagactctttcggccattccctttgcgaagttcaaatcaccctctgagtctgaggtgttgcgcttcgccagcttcttcctacagcatcactctcattcccggcgatggaatcggacccgaaatcatctccgtgggcacagacgttcttgtcctcgtgggttctctcgaagggatcaaatacga

SEQ ID NO: 103948 - DNA, 261 bp, Glycine max
aattcttccaccaagttatgggtttccttgtgttgcttcttttctccctcttaggtctctcttctagttccagcatatcaactcatcgttccatattggaccttgacctaaccaagtttaccacacagaaacaggtgtcttcactgttccaactatggaagagtgagcatggacgtgtctaccataaccacgaagaagaggcaaagagacttgagattttcaagaataccttgaactatatcagggacatgaatgcaaaca

SEQ ID NO: 103949 - DNA, 263 bp, Glycine max
ctcgagccgcaacaattccaagccttgcgagctatggtgcaggctaatccacaaatattgcagccaatgctacaagagcttggcaagcaaaatccccatcttatgagattgattcgagaccatcaagctgacttccttcgcttgataaatgaacctgctgaaggtggcgaagggaatatattggggcagatggcttctggaatgccacaagcagtaactgtcacccctgaggagcgccaagcaattgaacgtcttgaagcaat

SEQ ID NO: 103950 - DNA, 265 bp, Glycine max
atcttttctcactgctgaaattaaatataagcggaatttgagtaatattcatatttccggcttattttacgacggcagatataaattctggactaaacacgagaaaaatcttgctttgacagaagaggaaaagatggaggtgattagaaatagaggcattcctgctgatgttcttgcaaagcgagctcatgaatttgaaaaacatgttgctcatgaaagcctcaaggatcaaattcctgctgttgacaagttgtattctactaag

SEQ ID NO: 103951 - DNA, 271 bp, Glycine max
agcaaaatgaccaagttcacaatcctcctcatctctcttctcttctgcatcgcccacacttgcagcgcctccaaatggcagcaccagcaagatagctgccgcaagcagctccagggggtgaacctcacgccctgcgagaagcacatcatggagaagatccaaggccgcggcgatgacgatgatgatgatgacgacgacaatcacattctcaggaccatgcggggaagaatcaactacataaggaggaacgaaggaaaagacgaagacgaag

SEQ ID NO: 103952 - DNA, 233 bp, Glycine max
tgctagctagctagcaagcaagcacagagatggaggcaaagcgaggccatgccctcatgtgcttggctcgtgtttcactcttcctctgcgctctaaccctatccgctgctcacggaagcaccacggttcaagacatcgcgagatagttgaaactcggggacaacgagcttctgcgcacggagaagaagttcaaggttttcatggagaattacgggaggagctactccacagag

SEQ ID NO: 103953 - DNA, 199 bp, Glycine max
cctcagtattgtggatatgaacgagggagctcttcttctaccacacttcaattcaaaggcgatagtgatactggtaattaatgaaggagatgcaaacattgaacttgttggcctaaaagaacaacaacaggagcagcaacaggaagagcaacctttggaagtgcggaaatatagagccgaattgtctgaacaagatata

SEQ ID NO: 103954 - DNA, 270 bp, Glycine max
tataacactcgccatacccgttaacaagcctggtagatttgagagtttcttcctatctagcactgaagctcaacaatcctacttgcaaggattcagcaggaacattttagaggcctcctacgataccaaattcgaggagataaacaaggttctgtttagtagagaggaagggcagcagcaaggggagcagaggctgcaagagagcgtgattgtggaaatctcgaaggaacagattcgggcactgagcaaacgtgccacatctagttcaag

SEQ ID NO: 103955 - DNA, 265 bp, Glycine max
ttaaacactcatcagtcatcaccatggccaagctagttctttcccattgtttactgcttttcagtggctgctgcttcgctttcagttccagagagcagcctcagcagaacgagtggcagatccaaaaactcaatgccctcaaaccggatgaccgtatagagtcagaaggagggctcattgagacatggaaccctaacaacaagccattccagtgtgccggcgttgccctctctcgctgaaccctcaaccgcaacgcccttcgtag

SEQ ID NO: 103956 - DNA, 265 bp, Glycine max
attctctccattggtccttaaacactcatcagtcatcaccatggccaagctagttttttccctttgttttctgcttttcagtggctgctgcttcgctttcagttccagagagcagcctcagcaaaacgagtgccagatccaaaaactcaatgccctcaaaccggataaccgtatagagtcagaaggagggctcattgagacatggaaccctaacaacaagccattccagtgtgccggtgttgccctctctcgctgcaccctcaac

SEQ ID NO: 103957 - DNA, 269 bp, Glycine max
tcttcactcaaaactcttctctttcattttcataattcccacacattatggctgagcttcactaccaaccacaacaccaataccccctccgctaccctaacgatccacaccaacaaacccgttcctccacccaccaggtcgtcaaggccgccaccgccgtcacagcgggcggctccctcttgatcctcgcctcgttgatcctcgccgccaccgtcattgccctcaccatcgtcaccccgctgttcgtcattttcagtccggttctcgtc

SEQ ID NO: 103958 - DNA, 267 bp, Glycine max
cttaaacactcatcagtcatcaccatggccaagctagttttttccctttgttttctgcttttcagtggctgctgcttcgctttcagttccagagagcagcctcagcaaaacgagtgccagatccaaaaactcaatgccctcaaaccggataaccgtatagagtcagaaggagggctcattgagacatggaaccctaacaacaagccattccagtgtgccggtgttgccctctctcgctgcaccctcaaccgcaacgcccttcgtaga

SEQ ID NO: 103959 - DNA, 264 bp, Glycine max
cttgctggttgccacactacaccgatatttccaccaaacccgtttgcgttgttgtttgcgaataaatggcaactaagaggagcgtgggaacgttgaaggagggtgatttgaaggggaagagggtattcgtgagggtcgatctgaacgtgcctttggatgacaaccttaacatcaccgatgacactagagtccgtgctgctgttcccaccatcaagtacttgactggttatggtgctaaagtgatcctttctagccatttgggac

SEQ ID NO: 103960 - DNA, 264 bp, Glycine max
aacttattaacactttccttagttcaatatggggaagcccttcttcactctctctctttcttccctttgcttgctactcttgtcgagtgcatgctttgctattacctccagcaagttcaacgagtgccaactcaacaacctcaacgcgttggaacccgaccaccgcgttgagtccgaaggtggtcttattgaaacatggaactctcaacaccctgagctgcaatgcgccggtgtcactgtttccaaacgcactctcaaccgcaa

SEQ ID NO: 103961 - DNA, 273 bp, Glycine max
ctccattggtccttaaacactcatcagtcatcaccatggccaagctagttttttccctttgttttctgcttttcagtggctgctgcttcgctttcagttccagagagcagcctcagcaaaacgagtgccagatccaaaaactcaatgccctcaaaccggataaccgtatagagtcagaaggagggctcattgagacatggaaccctaacaacaagccattccagtgtgccggtgttgccctctctcgctgcaccctcaaccgcaacgcccttc

SEQ ID NO: 103962 - DNA, 266 bp, Glycine max
cgaacgtttttgagggttgatagagcacgatggttcagtacaattttaagaagattaccgtggtgccaaatgggaaggatgtggtcgacattatcctctctcgcacccagcgtcagacaccaaccgttgtgcacaaaggatatgcgatttcacggctgcgccaattctacatgcgcaaagtgaagtatactcagcagaattttcacgacaagctctccaccataatcgacgagttcccccggcttgacgacattcatccattctac

SEQ ID NO: 103963 - DNA, 266 bp, Glycine max
cttaattattaacacttccttagttcaatatggggaagcccttcactctctctctttcttccctttgcttgctactcttgtcgagtgcatgctttgctattagctccagcaagctcaacgagtgccaactcaacaacctcaacgcgttggaacccgaccaccgcgttgagtccgaaggtggtttgattcaaacatggaactctcaacaccctgagctgaaatgcgccggtgtcactgtttccaaactcaccctcaaccgcaatggc

SEQ ID NO: 103964 - DNA, 256 bp, Glycine max; identical to SEQ ID NO: 103657

SEQ ID NO: 103965 - DNA, 267 bp, Glycine max
ctttaagcctgttaactggcgtgatgctcttgctgtggtagcagaggttgcccaccaagtcaaaccggaagaaattgttggcatagctggcaaactttctgatgctgagtccatgattgcactaaaagatttcataaataggatggggtcaaatgatgtatggggtgaaggcattggtgtaaatactaatgctgatttcagatcaggatatattatgaatactagcattgctggtcttgaaaaagcggatgcgttcctgttggttgg

SEQ ID NO: 103966 - DNA, 268 bp, Glycine max
gtttgttgttcctcactgacctcaccatggcgaccagagccaagctttctttagctatcttccttttctttcttttagccttgatttcaaacctagccttgggcaaacttaaagaaaccgaggtcgaagaagatcccgagctcgtaacatgcaaacaccagtgccaacagcaacggcaatacactgagagtgacaagcgaacatgcttgcaacaatgtgacagtatgaagcaagagcgagagaaacaagtcgaagaggaaactcgcga

SEQ ID NO: 103967 - DNA, 235 bp, Glycine max
  unsure (1)..(235): unsure at all n locations
caaaaaccctaggtagagagctcttcctccctttctcacagcaatggccgccgcagcacgccctctcgtcaccgtgcaggccctcgacggtgacatggcaaccgatgcctccgacaccgttcncatccctgacgtcatgaaggcctctatccgccccgacatcgtcaatttcgtacactcgaacatctccaagaacagccgccagccatacgccgtcagtcgtcgcgctggtcac

SEQ ID NO: 103968 - DNA, 263 bp, Glycine max
tccggataaaggtgaaaatcatgcccgtcctgttcttggaggaaatgacacctttccttatcctcgtagggggagaactggtagaaaaccaacaaggaaagatcctaatagtgagagtaggagcaatgatgtttatcttccaagagatgaggcttttggacacttgaagtcatctgactttcttacttatggactaaaatccgtatctcaaaatgttcttccattattgcaatctgcttttgatttgaatttcacaccccgtg

SEQ ID NO: 103969 - DNA, 262 bp, Glycine max
gagaaaagagaattagggtcacgagggtttcatcctgcggcatcagacatgggaggaggcaatgggcaaaaggcaaagatggctcgcgagaagaacatcgagaagcagaaggccgcctcaaagggaagccagctggattcaaacaagaaagcaatgtcgatccagtgcaaggtgtgcatgcaaacatttatgtgcaccacatcggaagtgaagtgtagggagcatgctgaagccaaacaccctaaatctgatgtttatgctt

SEQ ID NO: 103970 - DNA, 269 bp, Glycine max
atcagcttgatcaaaaccccagagtattttaccttgctgggaacccagatatagagcacccagagaccatgcaacaacagcagcagcagaagagtcatggtggacgcaagcaggggcaacaccagcagcaggaggaagaaggtggcagtgtgctcagtggcttcagcaaacatttcttagcacaatccttcaacaccaacgaggacacagctgagaaacttcggtctccagatgacgaaaggaagcagatcgtgacagtggagggaggc

SEQ ID NO: 103971 - DNA, 259 bp, Glycine max
gtatttttgttgcgcctttcagaggcggaaggcccattcgggtggttacatttccaaataccatcgtgcatattgaaccagacatgaattcaaggtttcagcttttgagtaccactaccaatggtgattttgttcaaggaaaagatctcgcaatggttaaagttaatgtagcatgtgctgctgttggcttgacatcaagttacactccaactccattgttggaaatctggtttgcaaaaagacaaagggtaattgtgga

SEQ ID NO: 103972 - DNA, 163 bp, Glycine max
ttgtcctctacaggaatggaatttactctccacattggaacttgaacgcgaacagtgtgatctatgtgactcgagtgaaaggaagagttagagtggtgaactgccaagggaatgcagtgttcgacggtgagctaaggaggggacaattgctagtggtgccgca

SEQ ID NO: 103973 - DNA, 262 bp, Glycine max
gttcaatatcctagtacaccgtattaaagaatttaagatatactatgatgagagcgcggttcccattactgttgctgggagttgttttcctggcatcagtttctgtctcatttggcattgcgtattgggaaaagcagaaccccagtcacaacaagtgcctccgaagttgcaatagcgagaaagactcctacaggaaccaagcatgccacgctcgttgcaacctcctaaaggtggaggaagaagaagattgcgaagagggtct

SEQ ID NO: 103974 - DNA, 257 bp, Glycine max
cttaataaataatttaagatactatgatgagagcacggttcccattactgttgctgggacttgttttcctggcttcagtttctgtctcatttggcattgcttactgggaaaaagagaaccccaaacacaacaagtgtctccagagttgcaatagcgagagagactcgtacaggaaccaagcatgccacgctcgttgcaacctccttaaggtggagaaagaagaatgtgaagaaggtgaaattccacgaacacgacca

SEQ ID NO: 103975 - DNA, 265 bp, Glycine max
tagttctgcagttaacaatcgctcctcagatatcaacaaaaagattcgcacagcacttgggaaaggtaagaaaattgtttttcttaccagagttgatccttttccagtagctttactggctgttctttttggcgttaagaatgaaattctgagttctaacgccactaaccctatgctgacgcgacttcttgagaactgtaagagtctcaaatatctggttgatgagtgtccttttgcatttgtgaactagtatgtaatattttat

SEQ ID NO: 103976 - DNA, 264 bp, Glycine max
ctcagtctctgtgtttgcggctgaggattccgaacgagtgaccttcttcgtttctcgcaaagtttaagtaatcatgggtaaggaaaaggttcacatcaacattgtcgtcattggacatgtcgactctgggaagtcaactaccactggtcacttgatctacaagcttggaggtattgacaagcgtgtgattgagaggttcgagaaggaggctgccgagatgaacaagaggtcattcaagtatgcctgggtgctcgacaagctcaa

SEQ ID NO: 103977 - DNA, 262 bp, Glycine max
ggggaaggcacgggagcaacaatgtctgatgacgaagatgagcaagtaggtagtgatgccaatctgtttgatggtgctttggatggtcctgatagcatgggattcggtcctcttattcccacagagaatgagaggtccctcacggaacgtgtaagacctgaagtaaagcacgaattgaaacagggttataaagagaaaattgtggacataagagaggaaattttacgcaagagatgagttgggaaacttcctggtgacacga

SEQ ID NO: 103978 - DNA, 260 bp, Glycine max
agagaatccgaggcgaagagaagagaaaaattaagatggaggggaaggagcaggatgtgtcgctgggagcgaacaagttcccggagagacagccgattgggacggcggcgcagagccaagacgacggcaaggactaccaggagccggcgccggcgccactggttgacccgacggagtttacgtcatggcccttatacagcacgggtatcacaatttggtggccacttttctgtttctatacatcactgtcttaaccgtca

SEQ ID NO: 103979 - DNA, 266 bp, Glycine max
ctcgagccgaatcggctcgagcaagaagacgaagacgaagatgaagacgaagaatatgaacaaactccctcttatcctccaagacgaccaagccatggaaagcatgaagatgacgaggacgaggacgaagaagaagatcaacctcgtcctgatcaccctccacagcgaccaagcaggcccgaacaacaagaaccacgtggaagaggatgtcagactagaaatggggttgaggaaaatatttgcaccatgaagcttcacgagaacat

SEQ ID NO: 103980 - DNA, 265 bp, Glycine max
accttgtcctcgaaacaaggagttgagcatcctctgcttctatcagtccatgagtttgtcaaaggtgccttgttccacaatcttgatctcaagggcccctattgatttatctgacacacgcccttggcgatacacgctgttgagcgactcctcaacggttaagcaacaatcctagatatataagagataagttgatgagagataagatagtaaactatttgcatatttggtttgctgttggaaatcttagaacacatgttcctat

SEQ ID NO: 103981 - DNA, 267 bp, Glycine max
ctgatgccaaggtttggacacacaatggccgtattgcctccttaatctatgtaaaagattgtagttctgggtctgctattgaggactctcagaaaattaataagattgaattgcgcttaagaaatgttttgaagggagacaatgacattagaagtgcaaaaatgtctgtctctatggccgtgatgcacactgaaagaaggctacaccaattgatgtttgttgaccgtgattatgagaggactccaattcttaaattgacttctgata

SEQ ID NO: 103982 - DNA, 246 bp, Glycine max
cttattaacactttccttagttcaatatggggaagcccttcttcactctctctctttcttccctttgcttgctactcttgtcgagtgcatgctttgctattacctccagcaagttcaacgagtgccaactcaacaacctcaacgcgttggaacccgaccaccgcgttgagtccgaaggtggtcttattgaaacatggacctctcaacaccctgagctgcaatgcgccggtgtcactgtttccaaac

SEQ ID NO: 103983 - DNA, 266 bp, Glycine max
ataacttttgcaggcgaacaatatcacaatcatgcccattttgccgcgacagtctgaagagagtgaactcaggtgatctctgggtattcaccgatagaagggatgtggtagacatggcaacagtgacaagggagaatctcagaaggcttttcatgtacatagataagttgcctctgattgttccagactccctttttgacacatatgactctcacataaggtaagtgattgcaacagaacagattttaatgcatgctgttttcttg

SEQ ID NO: 103984 - DNA, 266 bp, Glycine max
aattgatagggtcaggcagacggatcgtatgttggtgggaagcattgcttgttgcagttacttcttgtcattagtagttactagctgtcagctgattatcggcagtctctgcagtttcagaatttgaatgcagtaaaacaaaatatacaattggaggctattagaggtgggagaacaattaaaatttcaatatttgatattgttgttggtgatgttataccccttaaaataggagatcaggttcctgctgatggagtattaatcac

SEQ ID NO: 103985 - DNA, 265 bp, Glycine max
caagaccgtcaccaaaaggtacatcgcttcagagaggagtgatttgatcgcagtgcctactggtgttgcatggtggatgtacaacaatgaagacactcctgttgttgccgtttctattattgacaccaacagcttggagaaccagctcgaccagatgcctaggagattctatcttgctgggaaccaagagcaagagtttctaaaatatcagcagcagcagcaaggaggttcccaaagccagaaaggaaagcaacaagaagaagaa

SEQ ID NO: 103986 - DNA, 262 bp, Glycine max
tccagcgaaaccacagccaagggaacgggcttggcggaatcagcggggaaagaagaccctgttgagcttgactctagtccgactttgtgaaatgacttgagaggtgtaggataagtgggagctggaaacagcgaaagtgaaataccactacttttaacgttattttacttattccgtgaatcggaagcggggcactgcccctctttttggacccaaggtcggcttcggccggtcgatccgggcggaagacattgtcaggtgg

SEQ ID NO: 103987 - DNA, 263 bp, Glycine max
gcaagatagctgccgcaagcagctccagggggtgaacctcacgccctgcgagaagcacatcatggagaagatccaaggccgcggcgatgacgatgatgatgatgacgacgacaatcacattctcaggaccatgcggggaagaatcaactacataaggaggaacgaaggaaaagacgaagacgaagaagaagaaggacacatgcagaagtgctgcacagaaatgagcgagctgagaagccccaaatgccagtgcaaagcgctgc

SEQ ID NO: 103988 - DNA, 264 bp, Glycine max
ccctggcaggaaccctcaccggactggcagttgccacgccgctcttcgtcctcttcagcccggtgctggttccagccacggtcgccatcggcctggccgtggccgggttcctgacgtcgggggccttcgggctcacggcgctgtcttccttctcctggatcctgaactacatccgggagacccagccagcctcggagaacctcgccgccgccgcgaagcatcacctcgccgaggcggcggagtacgtggggcagaagacgaaag

SEQ ID NO: 103989 - DNA, 266 bp, Glycine max
caagttattatcaaataattaattagattcctcgtggaatcttgttgaagccatgtctacagctggtcaggtcatcaagtgcagagctgcggtggcatgggaagcagggaagccactatcgatagacaccatagaagtggcaccaccccagaaaggtgaagtgcgtctgaagatcctcttcaactccctttgccgtacagatgtttactggtgggatgctaagggccagactccgctgtttcctcgaatcttaggccacgaagctt

SEQ ID NO: 103990 - DNA, 265 bp, Glycine max
atgcttgtctcaaagattaagccatgcatgtgtaagtatgaactaattcagactgtgaaactgcgaatggctcattaaatcagttatagtttgtttgatggtatctactactcggataaccgtagtaattctagagctaatacgtgcaacaaaccccgacttctggaagggatgcatttattagataaaaggtcaacacaggctctgactgttgctttgatgattcatgataactcgtcggatcgcacggctttgtgccggcgac

SEQ ID NO: 103991 - DNA, 281 bp, Glycine max
ggctcagcgtgccccatatcttccaccctttggctattcctaaccattgagtacaacttcacattttagaagaataccccctcttttgctgcatcagaggagttgtaaattaagagcatggctgcacaagctcttgtatcatcatcttctcttaccttctcagcggaggctgcaagacaaagtcttggaccaagatcactccaatctccatttggcttctccagaaaagctcctttcttgttaaggcagctgctaccccacctgtcaagcaaggatcagac

SEQ ID NO: 103992 - DNA, 261 bp, Glycine max
cctacttggcctccaatagctccagtcccctctggtatgcagttaggcgtgcgtctgctcatataattgtgctatccagctattcaccatttgtgaaatacactcctcaatacatgtggcttaaagaagagctgaagcgagttgagagggagaagactccttggctcattgtgctcatgcacgtgccgctctacaatagtaatggagctcactatatggagggtgagagcatgcgatctgtttttgagagctggttcatcg

SEQ ID NO: 103993 - DNA, 273 bp, Glycine max
tcattttctgcatagaaaaaacccttttctggagaaagaatatagtcttcagctggacaaggatcattcatcttgaaagaagagtttgtgtgtgacaatctttatagttctaaggagggtgcaagagagaactgaatttgctgtgatggcaactcgtagatatgcttttggaagagctgatgaggccactcatccagactccatgagggccactttggctgaatttgtttctactttcatctttgtctttgctggagaaggctctggccttgc

SEQ ID NO: 103994 - DNA, 277 bp, Glycine max
caatttgtaagaaagatgtttggagagttgaatgtggaatcccttctggatttccgctcacagttatttgtaatagcatttttaatgagatgctcattagatatagctatgaaaaattactgcgccaggctaaagctccaagtatgtttttacaatccttcaaaaattttgtttctttgtgtgtgtatggtgatgataacttaattagtgttcatgaatatgtcaagccttactttagtggttctaaattgaaaagctttctagctggtcataatat

SEQ ID NO: 103995 - DNA, 271 bp, Glycine max
gttcaatatcctagtataccttaataaataatttaagatactatgatgagagcacggttcccattactgttgctgggacttgttttcctggcttcagtttctgtctcatttggcattgcttactgggaaaaagagaatcccaaacacaacaagtgtctccagagttgcaatagcgagagagactcgtacaggaaccaagcatgccacgctcgttgcaacctccttaaggtggagaaagaagaatgtgaagaaggtgaaattccacgaccac

SEQ ID NO: 103996 - DNA, 270 bp, Glycine max
attgtctttgaacactcatcaccatggccaagcttgttctttccctttgtttccttcttttcagtggctgcttcgctctgagagagcaggcacagcaaaatgagtgccagatccaaaagctgaatgccctcaaaccggataaccgtatagagtcggaaggtgggttcattgagacctggaaccctaacaacaagccattccagtgtgccggtgttgccctctctcgctgcacccttaaccgcaatgcccttcgtagaccttcctacacca

SEQ ID NO: 103997 - DNA, 273 bp, Glycine max
gtgccctcacagagaacacttcacggaggcatatttagagcatgttcagattttgaaaacgaggctgcagtgctcttcaacagcaagctctcatcccaaatggatgctcttaagaaacagtttcaagaggctagatttgtctaccttgacctttacaacccagtactaaatttgattcaaaacccagctaaatatggttttgaagtaatggaccaaggatgctgtggcactggaaaattggaagtaggcccgttgtgcaaccatttcaccttg

SEQ ID NO: 103998 - DNA, 270 bp, Glycine max
gagaaactttaagcagatgtctaatgttttgtgggtggctcctgaggacaaggcgagtttatggtcacaacttcattatgtttcgtgtaataatctggaaatgcaagaagcttatcttgtcaatctcgtaaatgtgttacgagaattgtatttgcacagtccagaggaagctcgccaattgagaaggaaagctctctctcgtattgaatggctgcaaaaagctgatgtgcctaccatagcacagattgaagagttccattcgatgcagag

SEQ ID NO: 103999 - DNA, 274 bp, Glycine max
agaacttagttctctgttgcatcatcatcatcttcattagtgttagccctaaacttcaccttcaaccatgaccacagtgccaccacacagtgtccaagtgcacacaacaacacaccgctacgaagccggcgtcgtcccgccggctcgttttgaggcgccgcgttacgaagccggcatcaaggcgccctcttccatttaccattccgagagaggtccgacgacctctcaggttctcgcagttgtcgccggccttccggtcggcggcatcctcctg

SEQ ID NO: 104000 - DNA, 199 bp, Glycine max
atcgaatccgttttatcgccgaaggccatcctttgagccttaagttcgattcatttgcagttataatgctgtgtgttggaattcctaccgagtggtctgttgtggaggatctaccagaaggacctgctgttaaaattggtgagaacaaagatgcaatggatggttggtttagacttgagagagtttctgatgatgaatt

SEQ ID NO: 104001 - DNA, 257 bp, Glycine max
ctgaataattaagataagccatttccatagcagcctaagataatgaagagcactagcttgttcgctatctttctactttgcgccttcacctcatacctaccttccgccaccgcccaggacgtgctcgacgtggatggcgatccgattcggaacggtttcatatactacgttttgccggcaataagaggtaacggtggcggaatagaacgagccgcactcgggaaagacacgtgccctatcactgtagtgcaatctcc

SEQ ID NO: 104002 - DNA, 266 bp, Glycine max
ggaagctaagaagaagatttacaatgtttcctgtgagaggtactttggattcggctgcgagattgatgaagaaacttctaataagctcgaagggttgcctggtgttctgtttgtgctgccggattcgtatgttgatcctgagaacaaggactatggtgctgaattatttgtgaatggagagatcgtccagagatcacctgaaagacagagaagggtggaaccacagccacaaaggcatcaggacagacacgatacaatgatagaac

SEQ ID NO: 104003 - DNA, 270 bp, Glycine max
attcccgggttgtcctagcacttatcaagagccgcaagaatctcagcaacgaggacgaagccagaggccccaagaccgtcaccaaaaggtacatcgcttcagagagggtgatttgatcgcagtgcctactggtgttgcatggtggatgtacaacaatgaagacactcctgttgttgccgtttctattattgacaccaacagcttggagaaccagctcgaccagatgcctaggagattctatcttgctgggaaccaagagcaagagtttct

SEQ ID NO: 104004 - DNA, 271 bp, Glycine max
aattcttccaccaagttatgggttcccttgtgttgcttcttttctccctcttaggtctctcttctagttccagcatatcaactcatcgttccatattggaccttgacctaaccaagtttaccacacagaaacaggtgtcttcactgttccaactatggaagagtgagcatggacgtgtctaccataaccacgaagaagaggcaaagagacttgagattttcaagaataacttgaactatatcagggacatgaatgcaaacagaaaatcacc

SEQ ID NO: 104005 - DNA, 270 bp, Glycine max
cttagagatttagagtttaacacaaaatattattatgaagttggaattgggcatactactaggcaattttggtttgtgactcctcctgaagttcaccctgatgcgccttatacatttggtctcattggtgatctgggtcaaacttttgattcaaacaagacccttgttcactatgaatcaaaccctcacaaaggacaagctgtgttgtatgttggagacctctcttatgcagataatcacccaaatcatgataacgttaggtgggatacg

SEQ ID NO: 104006 - DNA, 268 bp, Glycine max
tctctccattgtctttgaacactcatcaccatggccaagcttgttctttccctttgtttccttcttttcagtggctgcttcgctctgagagagcaggcacagcaaaatgagtgccagatccaaaagctgaatgccctcaaaccggataaccgtatagagtcggaaggtgggttcattgagacctggaaccctaacaacaagccattccagtgtgccggtgttgccctctctcgctgcacccttaaccgcaatgcccttcgtagacctt

SEQ ID NO: 104007 - DNA, 267 bp, Glycine max
cacactcactcgctccctcggaatcccaatggcggagaacggtgaaggcggcgaggaatacctgttcaagatagtgctgattggggactccgcggtggggaagtccaacctcctctcgcggttcgcgcggaacgagttcgatagcaactccaaggccaccattggggtcgagttccagacgcagctcgtcgagatcgacggcaaagagatcaaggcgcagatctgggacactgcgggacaagagaggtttcgagctgtcacctctgc

SEQ ID NO: 104008 - DNA, 196 bp, Glycine max
attgtcgatgaacactcatcaccatggccaagcttgtactttcccgttgtttccctcatgtcagtggctgcttcgctctgagagagcaggcacagcactatgagtgccagatccacaagctgaatgccctcaaaccggataaccgtatagagtcggaaggtgggttcatagagacctggaaccctaacaacaagcc

SEQ ID NO: 104009 - DNA, 195 bp, Glycine max
gtcggaaggtgggttcattgagacctggaaccctaacaacaagccattccagtgtgccggtgttgccctctctcgctgcacccttaaccgcaatgcccttcgtagaccttcctacaccaacggtccccaggaaatctacatacaacaaggtaatggtatttttggcatgatattcccgggttgtcctagcactta

SEQ ID NO: 104010 - DNA, 214 bp, Glycine max
ggaatcttgttgaagccatgtctacagctggtcaggtcatcaagtgcagagctgcggtggcatgggaagcagggaagccactatcgatagaaaccatagaagtggcaccaccccagaaaggtgaagtgcgtttgaagatcctcttcaactccctttgccgtacagatgtttactggtgggatgctaagggccagactccgctgtttcctcgtat

SEQ ID NO: 104011 - DNA, 269 bp, Glycine max
tcctgctcctattccaatcaagcgcgagggaggatatgaaagactaagggatgattaccaaagtcactactaacataaccaacctttcagctatgaacgctctagcagccaccaaccgtaacttccgacgtgcagctcacattctcggtttggacactaagcttgagaatagccttctcattcccttcagggaaatcaaagttgaatgcacgatcccaaaagatgacggaacgctagtatcgtatgtaggattcaggattcaacatgac

SEQ ID NO: 104012 - DNA, 245 bp, Glycine max
gcctcggttgagataggacttttaattgcagtctctatatcctttgcaaagatcctattacaagtcacaaggccacgaactgcaattctggggaagatccctaggactactgtctacagaaacatccaacaataccctgaagccacaagggttcctggtgtactgattattagagttgattctgcaatatatttttccaactccaactatgttaaagaaaggatattaagatggctgatggatga

SEQ ID NO: 104013 - DNA, 267 bp, Glycine max
ggtttttatctacgcagaaagtgccattccttagtgacgacttggagcttgaatgtgaaggaaaggacaaatacaagtgcggttctaatgttttctggaaatggtgaaaggaggcaacattttatgcctaactgcgaacttttcgccttgcaatgtacctaactgcttgaatatatatcatatttttctgcattgatttattattatattgttgctgttggattttatttgttgaaaaaaatgtgtgcattaggcggctatttactc

SEQ ID NO: 104014 - DNA, 262 bp, Glycine max
cagaggttcaacaaacgctcccaacagcttcagaatctccgagactaccgcattttggagttcaactccaaacccaacacccttcttctcccccaccatgctgacgctgattacctcatcgttatccttaacgggactgccattcttaccttggtgaacaacgacgaccgagactcttacaaccttcaatctggcgatgccctaagagtccctgcaggaaccacatactatgtggttaaccctgacaacgacgagaatctca

SEQ ID NO: 104015 - DNA, 267 bp, Glycine max
gcataacctaaacttacccttcttctctctgtgtgtgtgcgcatcaaacgcaaccagaagcagccatggccactgcaagaactgtgaaggacgtttctcctcatgagttcgtcaaagcttactcttctcacctcaagcgatctggcaagatggagctgccagagtggactgatattgtgaaaactgcaagatttaaggagttggctccttatgatcctgactggtactatgtcagagctgcttccatggcaagaaagatctacttga

SEQ ID NO: 104016 - DNA, 193 bp, Glycine max
catgaatatgtcaagccttactttagtggttctaaattgaaaagctttctagctggtcataatatcaccattactgatggtattgacaaaactagtgcaactttgcaatttagaaagttagcagattgtgattttctcaagagaaactttaagcagatgtctaatgttttgtgggtggctcctgaggacaagg

SEQ ID NO: 104017 - DNA, 269 bp, Glycine max
cgaccacaacacccggagagggaacctcagcaacccggtgagaaggaggaagacgaagatgagcaaccacgtccaatcccattcccacgcccacaacctcgtcaagaagaagagcacgagcagagagaggaacaggaatggcctcgcaaggaggaaaaacgcggagaaaagggaagtgaagaggaagatgaggatgaggatgaggaacaagatgaacgtcaattcccattcccacgcccacctcatcagaaggaagagcgaaagcaaga

SEQ ID NO: 104018 - DNA, 263 bp, Glycine max
attgctgtgaagttttctgaaatcttgaccaagattgacaggcgatctggtaaggagcttgagaaggagcccaaatttttgaagaatggtgatgctggtatggttaagatggttccaaccaagcccatggtggttgaaactttctctgagtatcctccccttggtcgttttgctgtgagggacatgcgtcagaccgtagctgttggagtcatcaagagtgttgagaagaaagaccccaccggagccaaggtcacaaaggctgc

SEQ ID NO: 104019 - DNA, 264 bp, Glycine max
ggcaagatgtcgaagagaggacgcggtggttcggcggggaacaagttccggatgtcgctgggtctgccggtggcggcgacggtgaactgcgccgacaatacgggggcgaagaacctctacatcatatcggtgaaagggatcaaagggcgtttgaaccgtctcccctcggcttgcgttggcgacatggtgatggccaccgtgaagaaggggaaacccgatctgaggaagaaggttttgccagctgtcattgttcgccagcgcaag

SEQ ID NO: 104020 - DNA, 265 bp, Glycine max
gaggtctttcaagtatgcctgggtgcttgataagcttaaggctgagcgtgaaagaggaatcacaattgatattgccttgtggaagtttgaaaccaccaagtactattgcacagtcattgatgcccctggacacagggatttcatcaagaacatgatcactgggacatcccaagctgactgtgctgttcttatcattgattccactactggtggttttgaagctggaatttcaaaggatggacagactcgtgaacatgctctgctt

SEQ ID NO: 104021 - DNA, 264 bp, Glycine max
  unsure (1)..(264): unsure at all n locations
agggtataatgcctaaggatctgcagatttatgtcacaactgcatccaatgcacaagagaatagttggggaacttattgtcctggaatggatccttctccacctccagagtacatcacttgcctaggggatttgtacagtgttgcttggatggangatagtgagactcataatctaaaaagggagtccgtgaaacaacaatacaaatcggtaaagcaacggacttcaaatttcaacaactatgcgatgggttctcatgtgatgc

SEQ ID NO: 104022 - DNA, 262 bp, Glycine max
ctagtcctgatcctgaattgaagaactatattgagaaggctaggagcatttctggtgtctccgttgatccaaagcttgccaaattacaagaaaaggatatcatagagatgatattctttcctgtggtgaatgaggcttgtcgggtccttgatgaaggtatcgcagtcaaagcagcagatcttgatatttctgctatcatgggcatgggttttcccccttacaggggaggcatcatattctgggctgattctcttggatccaa

SEQ ID NO: 104023 - DNA, 223 bp, Glycine max
ttctctccattgtctttgaacactcatcaccatggccaagcttgttctttccctttgtttccttcttttcagtggctgcttcgctctgagagagcaggcacagcaaaatgagtgccagatccaaaagctgaatgccctcaaaccggataaccgtatagagtcggaaggtgggttcattgagacctggaaccctaacaacaagccattccagtgtgccggtgtt

SEQ ID NO: 104024 - DNA, 237 bp, Glycine max
cttaaacactcatcagtcatcaccatggccaagctagttttttcactttgttttctgcttttcagtggctgctgcttcgctttcagttccagagagcagcctcagcaaaacgagtgccagatccaaaaactcaatgccctcaaaccggataaccgtatagagtcagaaggagggctcattgagacatggaaccctaacaacaagccattccagtgtgccggtgttagcctctctcgc

SEQ ID NO: 104025 - DNA, 269 bp, Glycine max
atctctccattggtccttaaacactcatcagtcatcaccatggccaagctagttttttccctttgttttctgcttttcagtggctgctgcttcgctttcagttccagagagcagcctcagcaaaacgagtgccagatccaaaaactcaatgccctcaaaccggataaccgtatagagtcagaaggagggctcactgagacatggaaccctaacaacaagccattccagtgtgccggtgttgccctctctcgctgcaacctcaaccgcaa

SEQ ID NO: 104026 - DNA, 191 bp, Glycine max
atgaacactcatcaccatggccaagcttgttctttccctttgtatccttcttttcagtggctgcttcgctctgagagagcaggcacagcaaaatgagtgccagatccaaaagctgaatgccctcaaaccggataaccgtatagagtcggaaggtgggttcattgagacctggaaccctaacaacaagccat

SEQ ID NO: 104027 - DNA, 268 bp, Glycine max
ctcactacaagctgcagctaccttcatgcaacccaccaaggttggcatagcctctcgcaacctcaaatctacacaatgcatttctaaggcttttggcttggaacctgctgcagctaaactcacttgctcccttcagcctgatctcaaagaatttgctcaaaaatgtgtcgacgctaccaaaattgcaggattcgcccttgccacctctgctctcgttgtttctggagcaagtgcagaaggtgttccaaaaaggctaaccttcgacgaa

SEQ ID NO: 104028 - DNA, 267 bp, Glycine max
gttcaatatcctagtataccttaataaataatttaagatactatgatgagagcacggttcccattactgttgctgggacttgttttcctggcttcagtttctgtctcatttggcattgcttactgggaaatagagaaccccaaacacaacaagtgtctccagagttgcaatagcgagagagactcgtacaggaaccaagcatgccacgctcgttgcaacctccttaaggtggagaaagaagaatgtgaagaaggtgaaattccacga

SEQ ID NO: 104029 - DNA, 266 bp, Glycine max
ttctctccattgtctttgaacactcatcaccatggccaagcttgttctttccctttgtttccttcttttcagtggctgcttcgctctgagagagcaggcacagcaaaatgagtgccagatccaaaagctgaatgccctcaaaccggataaccgtatagagtcggaaggtgggttcattgagacctggaaccctaacaacaagccattccagtgtgccggtgttgccctctctcgctgcacccttaaccgcaatgcccttcgtagac

SEQ ID NO: 104030 - DNA, 260 bp, Glycine max
taccgaatgagagcatcaaactcttcttcttcgatttccattgcgaacgttactttttcttcttctttctcttcattttcttcgctcttcgatcttcgtccggggactgctccgaataccaccaccaccactcgccgatggccacgatcggaggcttacacgactcccaaggctctcaaaacagcgtcgaaaccgaagccctcgctcgattcgccgtagacgaacacaacaagaagcagaattcgcttctggagtttgct

SEQ ID NO: 104031 - DNA, 262 bp, Glycine max
tgcaaagccaataagatacaagacaaggttacaattgacggatatgaaactctaataatgtcagatgagagtacagaatcagagacagagcaagcgttcttaagcgccatccttgagcaaccaattagtgtctccattgatgcaaaagattttcatttatacaccgggggaatttatgatggagaaaactgtacaagtccgtatgggattaatcactttgttttacttgtgggttatggttcagcggatggtgtagattact

SEQ ID NO: 104032 - DNA, 262 bp, Glycine max
gtactcttcacctcgtcctccgtctccgtggtggcatgcagatcttcgttaagacactcaccggcaagaccataaccctagaggttgaaagctccgacaccatcgataacgtcaaggccaagatccaggacaaggagggtatccccccggaccagcaacgtctcatcttcgccggaaagcagctcgaggacggccgcaccctcgccgactacaacatccagaaggaatcaacccttcacctcgtcctccgtctccgtggtgg

SEQ ID NO: 104033 - DNA, 254 bp, Glycine max
cctgattctgaacttgagaaacacattccagatgcacatgtcatcatatctactccattccaccccgcctatgtcaccgcagaaagaattaagaaagccaaaaatttggagctgcttttgactgctggcattggttctgatcatgttgatctcaaagctgcagctgctgctggtttaactgtggcagaggtcacaggaagcaacgttgtgtcggttgcggaggacgaactcatgagaatcctcattctaatgag

SEQ ID NO: 104034 - DNA, 259 bp, Glycine max
tgtagattcattggtgaagagagcatatgaaaattgggatcaggttgtggattatgatggcaaatcactcgagaatgctaaaattgcttctgaaaatgaacttcgggtggagtcaattgattatggtagtggtttagatcatcaactgcaactgccggcacttcccgtgtctgttccttctgagcagcaaatcaattcagggatgcctgttggaggttataatgataataatatagtaatacgatatccaacccagtca

SEQ ID NO: 104035 - DNA, 264 bp, Glycine max
tctctccattgtctttgaacactcatcaccatggccaagcttgttctttccctttgtttccttcttttcagtggctgcttcgctctgagagagcaggcacagcaaaatgagtgccagatccaaaagctgaatgccctcaaaccggataaccgtatagagtcggaaggtgggttcattgagacctggaaccctaacaacaagccattccagtgtgccggtgttgccctctctcgctgcacccttaaccgcaatgcccttcgtaga

SEQ ID NO: 104036 - DNA, 252 bp, Glycine max
gttcctcactgaccaagccatggcgatgagaaccaaactttctttagctatctttttcttttttcttttagccttattttcaaacctagcctttggcaaatgtaaagaaaccgaggtagaagaagaagaccctgagctcgtaacatgcaaacaccaatgccaacagccacagcaatacactgagggtgacaagcgggtatgcttgcaaagatgtgacaggtatcatcgtatgaagcaagagcgagagataca

SEQ ID NO: 104037 - DNA, 185 bp, Glycine max
caaaggtaaggtaggttaacactcttcttcatcgtcgtcgcaatgggacgtgtgatccgtgcgcacgtaagggagcaggctcggtcttcaagtcccacacgcaccaccgcaagggccctgcacgcttccggagcctggacttcggggagcgcaacggctacctcaagggcgtggtcaccgacgtc

SEQ ID NO: 104038 - DNA, 260 bp, Glycine max
tcctagtataccttaataaataatttaagatactatgatgagagcacggttcccattactgttgctgggacttgttttcctggcttcagtttctgtctcatttggcattgcttactgggaaaaagagaaccccaaacacaacaagtgtctccagagttgcaatagcgagagagactcgtacaggaaccaagcatgccacgctcgttgcaacctccttaaggtggagaaagaagaatgtgaagaaggtgaaattccacgac

SEQ ID NO: 104039 - DNA, 178 bp, Glycine max
cctaaacttcaccttcaaccatgaccacagtgccaccacacagtgtccaagtgcacacaacaacacaccgctacgaagccggcgtcgtcccgccggctcgttttgaggcgccgcgttacgcagccggcatcaaggcgccctcttccatttaccattccgagagaggtccgacgacctc

SEQ ID NO: 104040 - DNA, 219 bp, Glycine max
cactaacaattccttcacttgcagcactgttgcatcatcatcttcattgcaaaaccctaaacttcaccttcaaccatgaccacacaagtaccaccacacagtgtccaagtccacacaacaacacaccgctacgaagctggcgtcgtcccccccggagcccgtttcgaaccgccgcgttatgaagccggcgtcaaagcgccctccatttaccattccgag

SEQ ID NO: 104041 - DNA, 129 bp, Glycine max
ctggtacctcccaggccgactgtgctgtccttattattgactccaccactggtggttttgaagctggtatttctaaggatggacagatccgtgagcatgctcttcttgctttcaccctaggtgtgaagc

SEQ ID NO: 104042 - DNA, 256 bp, Glycine max
tgtcagtgtcagacatgaacatgaggcagcaggtagcatcatcagatcacagtgcagccacaggagaggagaacgaatgcacggtgagggagcaagacaggttcatgccaatcgccaacgtgattaggatcatgcgcaagattctccctccacacgcaaaaatctcggacgatgcaacagaaacaatccaagagtgcgtgtctgagtacatcagcttcatcacaggtgaggcgaacgagcgttgccagagggagca

SEQ ID NO: 104043 - DNA, 255 bp, Glycine max
ctcttaagaagctttttgatgatggtgtggtgaagcgtgaggacttatggatcacctccaaactctggtgttcagatcatgcttcagaagatgtgcccaaagcattggataaaacattgcaggatttgcaacttgattaccttgacctctatctgatccactggccagtgcgcatgaaaagcggatcagttggattcaagaaggaatatctcgatcaaccggacattcccagcacatggaaagcaatggaggcac

SEQ ID NO: 104044 - DNA, 257 bp, Glycine max
gagaaactttaagcagatgtctaatgttttgtgggtggctcctgaggacaaggcgagtttatggtcacaacttcattatgtttcgtgtaataatctggaaatgcaagaagcttatcttgtcaatctcgtaaatgtgttacgagaattgtatttgcacagtccagaggaagctcgccaattgagaaggaaagctctctctcgtattgaatggctgcaaaaagctgatgtgcctaccatagcacagattgaagagttcc

SEQ ID NO: 104045 - DNA, 253 bp, Glycine max
atcgaatccgttttatcgccgaagccatcctttgagccttaagttcgattcatttgcagttataatgctgtgtgttggaattcctaccgagtggtctgttgtggaggatctaccagaaggacctgctgttaaaattggtgagaacaaagatgcaatggatggttggtttagacttgagagagtttctgatgatgaattcaataactataagcttgtgttctgtccacagcaagctgaggatgacaatgtgggg

SEQ ID NO: 104046 - DNA, 137 bp, Glycine max
gaaattttgataaaccgcgatcacaggttgccgcaccttaaaaccggaaacaaaagcaatcgttacttgatttcaagaatctttcaatttttcctactgctttgtgcacgatttcttaagggaaagagaatcactct

SEQ ID NO: 104047 - DNA, 254 bp, Glycine max
ttcaagctctgcaaggttaggtcagtgcagtttggccagaaaggtatcccatacctgaacacctatgatggtcgcaccatccgttacccagaccctctcatcagggccaacgacaccattaagctggatctggaggaaaacaagattgttgattttatcaaatttgatgttgggaatgtagttatggcgacaggtgggagaaacagggggcgtgttggagtgatcaagaacagggagaagcataagggtagctt

SEQ ID NO: 104048 - DNA, 253 bp, Glycine max
agtctttgtggtggtgatgcaaaattgatgcgtgaaaggacacacctgctgttggcttgttgttcaaggatggcaatttgtaagaaagatgtttggagagttgaatgtggaatcccttctggatttccgctcacagttatttgcaatagcatttttaatgagatgctcattagatatagctatgacaaattactgcgccaagctagagctccaagcatgtttttacaatccttcaaaaattttgtgtctctgt

SEQ ID NO: 104049 - DNA, 256 bp, Glycine max
ctctaatgacattgcaccccgtgtgttgccttacgttgttcacaccatcgctaaatacggtaagagttcatttatgtggcttggtccaacaccaagggtattcatcttggatcctgacaaattcaaagaaatggctactaaggtctatgattttcaaaagcccgacactagtccacttttcaagcttctagcatcagggtttgcaaattatgatggcgacaagtgggctaaacacagaaagatcgtgagtccagca

SEQ ID NO: 104050 - DNA, 245 bp, Glycine max
ggctcgagagtccctgcaggatccacaacctatgtggttaacactgacaacgacgagaatctacgaatgataacactcgccatacccgttaacaaacccggtagatttgagagtttcttcctatctagcactcaagctcaacagtcctacttgcaagggttcagcaagaatattctagaggcctcatacgacaccaaattcgaggagataaacaaggttctgtttggtagagaggaggggcagca

SEQ ID NO: 104051 - DNA, 260 bp, Glycine max
ctccgcagcagccacacttcttcgccgtttcagctgaagagccatccgcaggtaagcaatggttaagcataataatgttatccccaatgggcacttccggaaacactggcaaaactatgtgaagacttggtttaatcaaccagcccgaaagaccagaagacggttggctcggcagaagaaggctgtcaagattttccccaggcctactgctggatctctcaggcctattgttcatggccagactctgaaatacaacatga

SEQ ID NO: 104052 - DNA, 256 bp, Glycine max
tcggctcgaggccccccaaaaatgaagagcaccatcttctttgctctctttctcttttgtgccttcaccacctcatacctaccttcagccatcgctgatttcgtgctcgataatgaaggtaaccctcttgaaaatggtggcacatattatatcttgtcagacataacagcatttggtggaataagagcagccccaacgggaaatgaaagatgccctctcactgtggtgcaatctcgcaatgagctcgacaaatgga

SEQ ID NO: 104053 - DNA, 240 bp, Glycine max
gttcaatatcctagtataccttaataaataatttaagatactatgatgagagcacggttcccattactgttgctgggacttgttttcctggcttcagtttctgtctcatttggcattgcttactgggaaaaagagaaccccaaacacaacaagtgtctccagagttgcaatagcgagagagactcgtacaggaaccaagcatgccacgctcgttgcaacctccttacagtggagaaagaa

SEQ ID NO: 104054 - DNA, 253 bp, Glycine max
ggcaaaaggagatttgtttctggggatggtgaagagatgacattgattccgggaaccagtgttgaagaggcttacaacaagctaatagttgaacttgagaaaagtgttcctacattggttggcattgaatgtcccaaggatgagaaacttcctcgtcgcaaaatttttgacaaacctaagacgcgctgcttcactattctccctatggagtttaatcttgtggttcgtcagaagtttttaaattttgtgaggt

SEQ ID NO: 104055 - DNA, 251 bp, Glycine max
agctttttgatcaacagaacgagggaagtattttcgcaataagcagagaacaggtgcgtgcgttggcccctaccaagaaaagctcttggaggccattcggtggcgaatccaagcctcaattcaatattttcagcaagcgtcccactatctccaacggatatggtcgtttaactgaagttggtcctgacgatgatgaaaagagttggcttcaaagactcaatctcatgcttacctttaccaacatcacccag

SEQ ID NO: 104056 - DNA, 250 bp, Glycine max
tatcaccattactgatggtattgacaaaactagcgcaactttgcaatttagaaagttagcagattgtgactttctcaaaagaaactttaagcagatgtctaatgtcttgtgggtggctcctgaggacaaggcgagtttatggtcacaacttcattatgtttcatgtaacaatctggaaatgcaagaagcttatcttgtcaatctcgtaaatgtgttacgagaattgtatttgcacagtccagaggaagct

SEQ ID NO: 104057 - DNA, 249 bp, Glycine max
acaacatacaaaaatcaacgtgtgcgcttttcttctctttacccgttgaaacatccttagttttcagattctgaaatcttgattctgaattcatcacaatgaattcgtcaactacagtgaggaagttgcaggtggtgtcccctgttcctgcggacatagacattgcaaactccgttgaaccagttcatatctcccagattgccacagagctcaaccttagtcccaatcactatgagctttacggtaaat

SEQ ID NO: 104058 - DNA, 252 bp, Glycine max
agagagttttttttgttcctcactgaccaagccatggcgatgagaaccaaactttctttagctatctttttcttttttcttttagccttattttcaaacctagcctttggcaaatgtaaagaaaccgaggtagaagaagaagaccctgagctcgtaacatgcaaacaccaatgccaacagtcacagcaatacactgagggtgacaagcgggtatgcttgcaaagatgtgacaggtatcatcgtatgaagcaa

SEQ ID NO: 104059 - DNA, 255 bp, Glycine max
ggagattggtggaagtagctcgtatagatactcaggtacttttgatgcggtacttaaaatgatacgttatgaaggactacctggcttttataaggggatgagcacaaagatagtacaaagtgtttttgcagcttctgttctattcatggttaaggaggagcttgttaaggcttttatggttgtggcagataagagcaaaaaagttgtatcaaatataagtagtctcttttcttcttttggataaagaagtaaaac

SEQ ID NO: 104060 - DNA, 251 bp, Glycine max
ctccattggtccttaaacactcatcagtcatcaccatggccaagctagttttttccctttgttttctgcttttcagtggctgctgcttcgctttcagttccagagagcagcctcagcaaaacgagtgccagatccaaaaactcaatgccctcaaaccggataaccgtatagagtcagaaggagggctcattgagacatggaaccctaacaacaagccattccagtgtgccggtgttgccctctctcgctgc

SEQ ID NO: 104061 - DNA, 177 bp, Glycine max
attaccatgatatcttcatgccatatgtgaggcagataaatcagctgaattctgccaagacttatgcgacaaggactatcctttttttgagagaagatggaactttaaagccagtggccatcgaattaagtttgccacattctgctggggatctgtcagctgccgtcagtcaagtcg

SEQ ID NO: 104062 - DNA, 248 bp, Glycine max
tacattccagaacccctctcttggcgcaccccagaactctctagtctctatccagtaccttttggttttctataagctcttctctttccacttgttcaaatcaaattcattcctttccttctttcttctaaaccctatggccgacgaagccaaagccaaaggcaacgcagccttctcctccggggactattctgccgccatccaccacttctccgatgccatcgccctggctccctccaaccatgtcc

SEQ ID NO: 104063 - DNA, 250 bp, Glycine max
gtaatagaaacctctcagcccctctccgatcaaatggccaccgtaatcgacggcaaagccgttgcgcaaaccatccgatctgaaatcgccgacgaggtgcgccactctctcaaaaatacggcaaggttccgggattagcggtggtgatagtagggaacagaaaagattcacagagctatgttggaatgaagagaaaggcatgcgctgaattgggaatcacatccttcgatgtggaccttcccgaacaagt

SEQ ID NO: 104064 - DNA, 244 bp, Glycine max
aacgggtatggcgagtgttattaatctgagattttcttcctatctagcactgaagctcaacaatcctacttgcaaggattcagcaggaacattttagaggcctcctacgataccaaattcgaggagataaacaaggttctgtttagtagagaggaagggcagcagcaaggggagcagaggctgcaagagagcgtgattgtggaaatctcgaaggaacagattcgggcactgagcaaacgtgcca

SEQ ID NO: 104065 - DNA, 248 bp, Glycine max
gaaagtgagaggagagagaaagtagcagatcctccatggcctccaccaaggaacgtgaaaacttcgtctacgtcgccaagctcgccgaacaagccgaacgctatgaagaaatggtggaagcaatgaagaatgtggcgaactaaacgtggaattgacggtagaggagcggaaccttctgtcggttgggtacaagaacgtggtgggtgctcgtagggcttcgtggaggattctttcctcgattgaacaga

SEQ ID NO: 104066 - DNA, 251 bp, Glycine max
attgctgtgaagttttctgaaatcttgaccaagattgacaggcgatctggtaaggagcttgagaaggagcccaaatttttgaagaatggtgatgctggtatggttaagatggttccaaccaagcccatggtggttgaaactttctctgagtatcctccccttggtcgttttgctgtgagggacatgcgtcagaccgtagctgttggagtcatcaagagtgttgagaagaaagaccccaccggagccaaggt

SEQ ID NO: 104067 - DNA, 112 bp, Glycine max
tggcaagatgtcgaagagatgacgcggtggttcggcggggaacaagttccggatgtcgctgggtctgccggtggcggcgaccgtgaactgcgccgacaatacgggggcgaag

SEQ ID NO: 104068 - DNA, 253 bp, Glycine max
ctctccattgtctttgaacactcatcaccatggccaagcttgatctttccctttgtttccttcttttcagtggctgcttcgctctgagagagcaggcacagcaaaatgagtgccagatccaaaagctgaatgccctcaaaccggataaccgtatagagtcggaaggtgggttcattgagacctggaaccctaacaacaagccattccagtgtgccggtgttgccctctctcgctgcacccttaaccgcaatgc

SEQ ID NO: 104069 - DNA, 254 bp, Glycine max
attgtgttttaaatccacaaaatccttttgtgttaaataggtggatgggaaaactgactttccctcagggcacttcccgaagtgttaagagaatgcctctttatatagggggaggagctggtgcaaagaatgctattctcatgaatatgccaaatgctgttctttcaatgtggagatattttgttggagatctcgtctttgaagtttctaagatgacttctccctacattaaatgtacagtctctttcttcata

SEQ ID NO: 104070 - DNA, 197 bp, Glycine max
ctggtataatgcctaatgatctgcagatttatgtcacaactgcatccaatgcacaagagaatagttggggaacttattgtcctggaatggatccttctccacctccagagtacatcacttgcctaggggatttgtacagtgatgcttggatggaagatagtgagactcataatctaaaaagggagtccgtgaaacaa

SEQ ID NO: 104071 - DNA, 258 bp, Glycine max
gtcataatatcaccattactgatggtattgacaaaactagtgcaactttgcaatttagaaagttagcagattgtgattttctcaagagaaactttaagcagatgtctaatgttttgtgggtggctcctgaagacaaggcgagtttatggtcacaacttcattatgtttcgtgtaataatctggaaatgcaagaagcttatcttgtcaatctcgtaaatgtgttacgagaactgtatttgcacagtccagaggaagctc

SEQ ID NO: 104072 - DNA, 252 bp, Glycine max
ttcagaatgaggttctctgtcgtttcacctttccagaaagacctggtgctttgatgaaatttttggaccccttcagtccacgttggaatatcagtttattccattaccgaggggagggtgaaactggagcaaatgtgctagttggaatacaggtacccaaaagtgagatggatgagttccacgatcgtgccaacaaacttggatatgattataaagtggtgaataatgatgatgacttccagcttctaatgc

SEQ ID NO: 104073 - DNA, 132 bp, Glycine max
ttctctccattggtccttaaacactcatcagtcatcaccatggccaagctagttttgtccctttggtttctgcctgtcagtggctggtgcttcgctttcaggtccagagagcagcctgagcaaaacgagtgc

SEQ ID NO: 104074 - DNA, 246 bp, Glycine max
aataaaatcaagaaagcatgcatatgatgaagaaggtgtgtgggtttgcaatagtggtgatggcagcactttttctggtggagatgagtcccatggcagaggctgtgacttgtagccctgtggagttgagtccctgtttgggggcaatcacgtcctcttcaccaccatcgacaacttgttgccagaaggtgagggaacaaaggccatgcctctgtggttacctcaaaaaccctagtctgaggccat

SEQ ID NO: 104075 - DNA, 243 bp, Glycine max
gaaagacaagccatggtggcctaagttgcagacaattgaagagcttgttgaaatttgcaccattatcatatggactgcttcagctctccatgcagccgttaactttggtcaatatccatatggaggtttcattctgaatcgcccaacttcttctagaaggttgcttcctgagaaaggcaccccagaatatgaagagatggtgattagtcatcacaaggcttatttgagaactattacatcaaa

SEQ ID NO: 104076 - DNA, 243 bp, Glycine max
ctcatcgttatccttaacgggactgccattctttccttggtgaacaacgacgacagagactcctacagacttcaatctggtgatgccctgagagtcccctcaggaaccacatactatgtggtcaaccctgacaacaacgcaaatctcagattagataacactcgccatacccgttaacaagcctggtagatttgagagtctcttcctatctagcacagaagctcaacaatcctacttgcaagg

SEQ ID NO: 104077 - DNA, 247 bp, Glycine max
gttgttgccaaggttggaaatcacaaacaaattgttggtttccatgttgctggaagcaaaggaagactgggatatgcttcattgataccatatgttgagccagttgtgcaagctcaaagtgctgaagtttactttgacttcttccctgtggaggttgatagtcaagagggagttgctcacattggtgaattgaaatctggtgtctatgttccactgcctacaaaaactaatttggtggaaactccca

SEQ ID NO: 104078 - DNA, 248 bp, Glycine max
gccacaacggaacaggtgaatgctgctggtgacatgtgtgctatatgccaggagaagatgcaggctcccatattgttgagctgtaaacacatgttctgtgaggagtgtgtatctgaatggtttgagagagaacgaacttgtccattatgcagggcattggtaaaaccagctgatctgcggaccttcggagatggatcaacaagtctattttttcagttgttttaagttcattttctttgacttgttgg

SEQ ID NO: 104079 - DNA, 248 bp, Glycine max
caaaagggagttttgggatttctggagtctcaggaaaattttcctttcacaagacaaggcattgttcctgatattgtcataaatccgcatgcatttccctcacgacaaactcctgggcaactcctagaggctgctttaggaaaggggattgcttgtggtggtatactgaaacaagctacgcctttctccactccttctgttgatgccattactgaacagcttcacagagctgggttttcaagatgggg

SEQ ID NO: 104080 - DNA, 253 bp, Glycine max
atatcctagtataccttaataaataatttaagatactatgatgagagcacggttcccattactgttgctgggacttgttttcctggcttcagtttctgtctcatttggcattgcttactgggaaaaagagaaccccaaacacaacaagtgtctccagagttgcaatagcgagagagactcgtacaggaaccaagcatgccacgctcgttgcaacctccttaaggtggagaaagaagaatgtgaagaaggtgaa

SEQ ID NO: 104081 - DNA, 120 bp, Glycine max
aagagaaccccacacacaacaagtgtctccagagttgcaatagcgagagagactcgtacaggagccaagcatgccacgctcgttgcaacctccttaaggtggagaaagaagaatgtgaag

SEQ ID NO: 104082 - DNA, 243 bp, Glycine max
gcaggcccgaacaacaagaaccacgtggaagaggatgtcagactagaaatggggttgaggaaaatatttgcaccatgaagcttcacgagaacattgctcgcccttcacgtgctgacttctacaacccaaaagctggtcgcattagcaccctcaacagtctcaccctcccagccctccgccaattcggactcagtgcccaatatgttgtcctctacaggaatggaatttactctccacattgga

SEQ ID NO: 104083 - DNA, 231 bp, Glycine max
gctggtaatactcttatgccagctttttctgttccacaggctactgccagatcttctgaaaatgcggaatcctctgcatgatctggaatttgtgttttctttcgcttgttcgtttgtttaattcaataaaggaaattaggcatgaccctcttgttgagtatgctctgcctatttgaaaatttccacacctcttttaattgtcgtaatgatgtgtgaagtgtgtgttatttt

SEQ ID NO: 104084 - DNA, 167 bp, Glycine max
ctgatgagagattggttggcacagaacatgagggatatgatccgtttcttggcggaattcaaaagtatgtcactcccatgatgcccctagatgaagaaattctttccaaggtttcgcaagatatggttgaggaatggtttgattgtgttgatgatgaggattccttt

SEQ ID NO: 104085 - DNA, 255 bp, Glycine max
ctcaagacgcgcaaatcctgattgttcaatctttggtgcaatgcttttggttgaaacttcatctaccaatcctgaaaatgcagttcgtagtatgtttgttgcgcctttcagaggcggaaggcccattcgggtggttacatttccgaataccattgtgcagcttgaaccagacatgaattcaaggtttcagcttttgagtaccactaccaatggtgattttgttcaatccggaaatgtcgcaatggttaaagttaa

SEQ ID NO: 104086 - DNA, 254 bp, Glycine max
gtgttacaacttacggctaaattctcaaagatttaaactttgtctcagagtttccaaattcacccaaccccagagagaaaatgtctctaatcccaaatttcttcggtggcagaaggatcaacgttttcgatcctttatccctcgacgtctgggaccccttcaaggattttcctttcccaaacactctttcttcagcttcctttcctgaattttctcgggaaaattctgcattcgtgaggactcgtgtggattgg

SEQ ID NO: 104087 - DNA, 256 bp, Glycine max
caaggaagtgaagaggaacaagatgaacgtgaacacccacgcccacaccaacctcatcaaaaggaagaggaaaagcacgaatggcaacacaagcaggaaaagcaccaaggaaaggaaagtgaagaagaagaagaagaccaagacgaggatgaggagcaagacaaagagagccaagaaagtgaaggttctgagtctcaaagagaaccacgaagacataagaataagaacccttttcacttcaactctaaaaggttcc

SEQ ID NO: 104088 - DNA, 254 bp, Glycine max
gacaagcttagttgccaagttggaatcaatccatactccatggaatggaccggtttggccaacagactactgagtaagggcaacgatattctgtgttgcgattatgctagttttgatggtttgattaccaagcaagttatgagcaagatggcagaaatgataaacagtctttgtggtggtgatgaaaaattgatgcgtgaaaggacgcacctgctgttggcttgttgttcaaggatggcaatttgtaaaaaaga

SEQ ID NO: 104089 - DNA, 254 bp, Glycine max
ctctccattgtctttgaacactcatcaccatggccaagcttgtactttccctttgtttccttcttttcagtggctgcttcgctctgagagagcaggcacagcaaaatgagtgccagatccaaaagctgaatgccctcaaaccggataaccgtatagagtcggaaggtgggttcattgagacctggaaccctaacaacaagccattccagtgtgccggtgttgccctctctcgctgcacccttaaccgcaatgcc

SEQ ID NO: 104090 - DNA, 255 bp, Glycine max
caacaacacaccgctacgaagctggcgtcgtcccccccggagcccgtttcgaaccgccgcgttatgaagccggcgtcaaagcgccctccatttaccattccgagagaggtccaacgacttcccaggtcctcgccgtcctcgccggcctcccggtcggtggcatcctgctcctcctggcgggattgaccctggcaggaaccctcaccggactggcagttgccacgccgctcttcgtcctcttcagcccggtgctgg

SEQ ID NO: 104091 - DNA, 254 bp, Glycine max
tgatcagaaggataagctgtggcctatgctgcaaaagcttggggtcaccatgaaatctgaggagaaggacctaatgggcaaagcattgatgaagcgtgtcatgcaaacctggcttccagcaagtagtgcattactggaaatgatgatatttcatctaccctctccatcaacagcccagaagtatcgtgtggagaatttgtatgagggtccccttgatgatcaatatgcttcggctatcagaaactgtgatcctg

SEQ ID NO: 104092 - DNA, 258 bp, Glycine max
gcacgagcggctcgagcggctcgagcgacaccaaattcgaggagataaacaaggttctgtttggtagagaggaggggcagcaccaaggggaggagaggctgcaagagagtgtgattgtggaaatctcaaagaaacaaattcgggaactgagcaaacatgccaaatctagttcaaggaaaaccatttcttctgaagataaacctttcaacttgagaagccgcgaccccatctattccaacaagcttggcaagttgtttg

SEQ ID NO: 104093 - DNA, 257 bp, Glycine max
atgagtgccagatccaaaagctgaatgccctcaaaccggataaccgtatagagtcggaaggtgggttcattgagacctggaaccctaacaacaagccattccagtgtgccggtgttgccctctctcgctgcacccttaaccgcaatgcccttcgtagaccgtcctacaccaacggtccccaggagatctacatacaacaaggtaatggtatttttggcatgatattcccgggttgtcctagcacttatcaagagccg

SEQ ID NO: 104094 - DNA, 251 bp, Glycine max
cttgctctaccgtgttgcaactatgaaagggttggtttggctactatgtgtttatggggtgccattgctcattgtgaacggttttcttgtgaccatcacatatctgcagcacacacactatgccttgcctcactatgattcatcagaatgggattggctgaggggtgctttggcaactatggacagagattatggaattctgaacaaggtgtttcaccacataactgatactcatgtggctcaccatcttt

SEQ ID NO: 104095 - DNA, 251 bp, Glycine max
gctggtaatactcttatggcagctttttctgttccacaggctactgccagatcttctgaaaatgcggaatcctctgcatgatctggaatttgtgtattctttcgcttgttcgtttgtttaattcaataaaggaaattaggcatgaccctcttgttgagtatgctctgcctatttgaaaatttccacacctcttttaattgtcgtaatgatgtgtgaagtgtgtgttatttttatacaatgaataaaatgat

SEQ ID NO: 104096 - DNA, 252 bp, Glycine max
ctagtataccttaataaataatttaagatactatgatgagagcacggttcccattactgttgctgggacttgttttcctggcttcagtttctgtctcatttggcattgcttactgggaaaaagagaaccccaaacacaacaagtgtctccagagttgcaatagcgagagagactcgtacaggaaccaagcatgccacgctcgttgcaacctccttaaggtggagaaagaagaatgtgaagaaggtgaaattc

SEQ ID NO: 104097 - DNA, 252 bp, Glycine max
caaacccaacacccttcttctcccccaccatgctgacgctgattacctcatcgttatccttaacgggactgccattcttaccttggtgaacaacgacgaccgagactcttacaaccttcaatctggcgatgccctaagagtccctgcaggaaccacatactatgtggttaaccctgacaacgacgagaatctcagaatgataacactcgccatacccgttaacaaacccggtagatttgagagtttcttcct

SEQ ID NO: 104098 - DNA, 250 bp, Glycine max
ctcgtctttgaagtttctaagatgacttctccctacattaaatgtacagtctctttcttcatagcatttggaaatttggctgatgacaccatcaattttgaggcttttccccataagctggtgcagtttggagagattcaggaaaaagttgtattgaaattttcacaagaggaatttcttacagcttggtcaactcaggtgcgtcctgcaacaactctgttggctgatgggtgtccatatttgtatgcta

SEQ ID NO: 104099 - DNA, 249 bp, Glycine max
tgcctctagggttatcatttctccatttccattttctctctcacttttcaagaatcgtaagctatgggaaagtcttacccaactgtgagtgctgattaccagaaggccgttgagaaggcgaagaagaagctcagaggcttcatcgctgagaagagatgcgctcctctaatgctccgtttggcatggcactctgctggaacctttgacaagggcacgaagaccggtggacccttcggaaccatcaagcac

SEQ ID NO: 104100 - DNA, 250 bp, Glycine max
aaaaaagatcatacatagtagtgttggtgggttgcaaagatgcttgggggtcttctccataggggtcataagataaaagggacagtggtgttgatgcgcaagaatgtgttggacgtgaatagcgtaaccagcgttgggggaattattggtcaaggtctcgacttagttggctcaacactcgatactcttactgccttcttgggccgatccgtgtctctccagcttattagtgctaccaaagctgatgcca

SEQ ID NO: 104101 - DNA, 254 bp, Glycine max
ctcgagccgggaaaaacagtaaagatgggtttgaagaacaacatggtggtgctaaaggtgtgtttcttggttcttttccttgtgggggttactaatgcacgcatggaactgaacctcttcaaaagtgatcactcatcaagtgatgatgagtcttcaaaaccatgctgtgatctctgcatgtgcacagcctcaatgccacctcaatgccattgtgcagatattaggttgaatacatgtcactcagcttgtgatcg

SEQ ID NO: 104102 - DNA, 219 bp, Glycine max
gcacggttcccattactgttgctgggacttgttttcctggcttcagtttctgtctcatttggcattgcttactgggaaaaagagaaccccaaacacaacaagtgtctccagagttgcaatagcgagagagactcgtacaggaaccaagcatgccacgctcgttgcaacctccttaaggtggagaaagaagaatgtgaagaaggtgaaattccacacaac

SEQ ID NO: 104103 - DNA, 256 bp, Glycine max
tggccacgcgcgctagagttgctgcatacaaggtatgctggaaaggagggtgtttcagctctgacattcttgccgcaattgaaagggcaatattggacaacgtgaatgttctttctttatctctcggtggtggcatttctgattattacagagacagtgtcgctattggagctttttcagcgatggagaaagggattttggtatcatgctccgctgggaactcgggtccgggtccctacagtctctccaatgtggt

SEQ ID NO: 104104 - DNA, 254 bp, Glycine max
gcatggtggatgtacaacaatgaagacactcctgttgttgccgtttctattattgacaccaacagcttggagaaccagctcgaccagatgcctaggagattctatcttgctgggaaccaagagcaagagtttctaaaatatcagcaagagcaaggaggtcatcaaagccagaaaggaaagcatcagcaagaagaagaaaacgaaggaggcagcatattgagtggcttcaccctggaattcttggaacatgcatt

SEQ ID NO: 104105 - DNA, 250 bp, Glycine max
aaaattcttccaccaagttatgggtttccttgtgttgcttcttttctccctcttaggtctctcttctagttccagcatatcaactcatcgttccatattggaccttgacctaaccaagtttaccacacagaaacaggtgtcttcactgttccaactatggaagagtgagcatggacgtgtctaccataaccacgaagaagaggcaaagagacttgagattttcaagaataacttgaactatatcagggac

SEQ ID NO: 104106 - DNA, 250 bp, Glycine max
gttcaatatcctagtataccttaataaataatttaagatactatgatgagagcacggttcccattactgttgctgggacttgttttcctggcttcagtttctgtctcatttggcattgcttactgggaaaaagagaaccccaaacacaacaagtgtctccagagttgcaatagcgagagagactcgtacaggaaccaagcatgccacgctcgttgcaacctccttaaggtggagaaagaagaatgtgaag

SEQ ID NO: 104107 - DNA, 249 bp, Glycine max
ttctctccattgtctttgaacactcatcaccatggccaagcttgttctttccctttgtttccttcttttcagtggctgcttcgctctgagagagcaggcacagcaaaatgagtgccagatccaaaagctgaatgccctcaaaccggataaccgtatagagtcggaaggtgggttcattgagacctggaaccctaacaacaagccattccagtgtgccggtgttgccctctctcgctgcacccttaaccg

SEQ ID NO: 104108 - DNA, 246 bp, Glycine max
cttattgacaatcccaaacagtctacagtttttgatattctcttgggaatttctcaagattttgaaattgctggtaatactcttatgccagctttttctgtcccacaggctactgccagatcttctgaaaatgcggaatcctctgcatgatctggaatttgtgttttctctcgcttgttcgtttgtttaattcaataaaggaaattaggcatgaccctcttgttgagtatgctctgcctatttgaa

SEQ ID NO: 104109 - DNA, 253 bp, Glycine max
ctccaggctccaactgaagacacccacctgattttgaattaagttaagggatgtattaagtatatgctaaataagaggtgtatctacaaccattgactttgtcatgctcaaaaatttagtttaatttacaaattatggcaagggttacacctggctagcttccgcgtttagatcatttgtttatagtgctatggccacgacaagagtgttatgggtgcatgaatgtaaaacgaaaaaaaaaaaaaattgtgtt

SEQ ID NO: 104110 - DNA, 248 bp, Glycine max
tccggataaaggtgaaaatcatgcccgtcctgttcttggaggaaatgacacctttccttatcctcgtagggggagaactggtagaaaaccaacaaggaaagatcctaatagtgagagtaggagcaatgatgtttatcttccaagagatgaggcttttggacacttgaagtcatctgactttcttacttatggactaaaatccgtatctcaaaatgttcttccattattgcaatctgcttttgatttga

SEQ ID NO: 104111 - DNA, 247 bp, Glycine max
cgggttcctgacgtcgggagtctttgggctcacggcgctgtcgtccttctcctggatcctgaactacatccgggagacccagccggcgtcggagaatctggccgctgcggcgaacaccatctggcggaggcggcggagtacgtggggcagaagaccaaagaagtagggcagaaaacccatgaagttgggcaggatattcagagcaaggcacaagatacaagggaagcagctgcaagagatgcaagag

SEQ ID NO: 104112 - DNA, 247 bp, Glycine max
attccaatatattccattctctctgtgtatttccctacctctcccttcaagatgcagatcttcgtcaagaccctcaccggcaagaccatcacccttgaggtggaaagctctgacaccatcgacaacgtcaaggccaagatccaggacaaggaaggaatccccccggaccagcaacgtctcattttcgccggaaagcaacttgaggacggccgtacccttgctgactacaacattcagaaggagagta

SEQ ID NO: 104113 - DNA, 248 bp, Glycine max
taataatctggaaatgcaagaagcttatcttgtcaatctcgtaaatgtgttacgagaattgtatttgcacagtccagaggaagctcgccaattgagaaggaaagctctctctcgtattgaatggctgcaaaaagctgatgtgcctaccatagcacagattgaagagttccattcgatgcagaggatgatgaatgctcctgattcaaatgataatattgatcttctgttgagcattgatttgttgggtt

SEQ ID NO: 104114 - DNA, 244 bp, Glycine max
cccttgtaaaacttcttattgtgatgtctaaaagcgaagacttgaagcttttgggaggctggttcagcccatttgccctgagggtgcagattgcccttaacctcaagggtctagaatatgaggttgttgaagagaccttgaatcccaaaagtgacctgcttcttaagtccaaccctgtgcacaagaaaatcccagttttcttccatggagataaagtcatttgtgaatctgcgatcatagttga

SEQ ID NO: 104115 - DNA, 246 bp, Glycine max
ctgcaaaggattctacccgccgctcgatgggaattgcgcttcaaggcgtctcgtagggctaatccgcctcacgagggtcaccaacggcacgtgcctttggggggccgaggccccctactgctggtcggcaaacggacggcgggcgcacgcgtcgcttctagcccggattctgacttagaggcgttcagtcataatccaacgcacggtagcttcgcgccactggcttttacaccaagcgcgatgacc

SEQ ID NO: 104116 - DNA, 251 bp, Glycine max
atttaatccaaacccgtgttctgatgcatggagtttggaatttctgaagcgtaccggatttcattgtgatatcatttgtgtcactggatggactgccactccaatacaggatgttcaggttacaattgattggtttatttcctctcaggaatgtgttcccaggacctattgtgttttaaatccacaaaatccttttgtgttaaataggtggatggggaaatcgactttcccccagggcacttcccgaagtg

SEQ ID NO: 104117 - DNA, 121 bp, Glycine max
aagatttgaaattttgataaaccgcgatcacaggttgccgcaccttaaaaccggaaacaaaagcaatcgttacttgatttcaagaatctctcaatttcttcctacttctttgtgtacgatt

SEQ ID NO: 104118 - DNA, 248 bp, Glycine max
caaccacaagtgttcttcctctgtaaacacacaaactctgttcctatttcagagtactgtccctttacctcgtacacatcaaacaatggaaggagatgggtattgtgggagtttctttcagaggtgcaagccttacatagccatgatttctctgcaattcgggtttgcgggtatgaacataatcaccaaggtttccctcaaccgtgggatgagccactatgtgcttgtggtttatagacacgcctttg

SEQ ID NO: 104119 - DNA, 245 bp, Glycine max
taagatatgaagagtactatcttctttgctctctttctagtttgtgccttcaccatctcatacctgccttcagccatcgctcagttcgtgctcgacactgatgatgatcctcttcaaaacggtggcacatactatatgttgccagttatgagaggatagggcggtggaatagaagtagattcaactggaaaagaaatatgccctctcactgttgtgcaatcacccaatgagctcgataaggggat

SEQ ID NO: 104120 - DNA, 245 bp, Glycine max
attatcaatgaaggtaataactaaaaatattgctcgtatactattttttcaatttcccgaatggtcggaagattttagggattggaagagagaaatgtatattaaatgcacatataatggtgttcaattatccgaaagagaatttccaaaaaaatggctaacagatggtattcagataaagatcttatttccttttcgtctcaaaccttggcacaaatctaagctacgatccaatgaaaagaaaa

SEQ ID NO: 104121 - DNA, 246 bp, Glycine max
tgccacattaaaaaactggaggttgatagttaatctatctgcaacagcaacattgtgacagtgacagtgtcgtaggatggagaaggtggtatgtgtgaccggcggcagcggcctgcattggttcatggctcgtccatctcctcttggatcgcggctacagcgttcacgccaccgtccaaaacctcaacgatgaagccgagacgaagcatcttcaatccctcgacggagcgtccacgcgcctccgcc

SEQ ID NO: 104122 - DNA, 258 bp, Glycine max
gcattatttgcccattcatagagaagctcctgcttttgttgagcaagaaaccgcacagcagattcttgttactggaatcaaggttgttgacctgcttgcaccatatcaaagaggaggaaagattgggttgtttggtggtgctggtgtaggaaaaactgtgcttattatggaacttattaacaatgttgcaaaagctcatggtggtttctctgcgtttgctggtgttggagagcgaacccgagagggtaatgacttgta

SEQ ID NO: 104123 - DNA, 243 bp, Glycine max
ctcgagccgcgcaaaaatggtgaaaaaggcaaaaggagatttgtttctggggatggtgaaacgatgacattgattccgggaaccagtgttgaagaggcttacaacaagctaatagttgaacttgagaaaagtgttcctacattggttggcattgaatgtcccaaggatgagaaacttcctcgtcgcaaaatttttgacaaacctaagacgcgctgcttcactattctccctatggagtttaat

SEQ ID NO: 104124 - DNA, 246 bp, Glycine max
caatatcctagtataccttaataaataatttaagatactatgatgagagcacggttcccattactgttgctgggacttgttttcctggcttcagtttctgtctcatttggcattgcttactgggaaaaagagaaccccaaacacaacaagtgtctccagagttgcaatagcgagagagactcgtacaggaaccaagcatgccacgctcgttgcaacctccttaaggtggagaaagaagaatgtgaa

SEQ ID NO: 104125 - DNA, 249 bp, Glycine max
gagaaagaagaatgtgaagaaggtgaaattccacgaccacgaccacgaccacaacacccggagagggaacctcagcaacccggtgagaaggaggaagacgaagatgagcaaccacgtccaatcccattcccacgcccacaacctcgtcaagaagaagagcacgagcagagagaggaacaggaatggcctcgcaaggaggaaaaacgcggagaaaagggaagtgaagaggaagatgaggatgaggatgag

SEQ ID NO: 104126 - DNA, 251 bp, Glycine max
gatgaacgtcaattcccattcccacgcccacctcatcagaaggaagagcgaaagcgagaggaagatgaggatgaggagcagcagcgagagagcgaagaaagtgaagattctgagttacgaagacataagaataagaacccttttctcttcggctctaacaggttcgaaactctcttcaaaaaccaatatggtcgcattcgcgtcctccagaggttcaaccaacgctccccacaacttcagaatctccgaga

SEQ ID NO: 104127 - DNA, 243 bp, Glycine max
cactattctccctatggagtttaatcttgtggttcgtcagaagtttttaaattttgtgaggttcattatgaagaaaagggacaagcttagttgtcaagttggaatcaacccatactccatggaatggactggtttggccaatagattactgagtaagggcaacgatattctgtgttgcgattatgctagttttgatggtttgattaccaagcaagttatgagcaaaatggcagaaatgataaa

SEQ ID NO: 104128 - DNA, 245 bp, Glycine max
gttcaacgagtgccaactcaacaacctcaacgcgttggaacccgaccaccgcgttgagtccgaaggtggtcttattgaaacatggaactctcaacaccctgagctgcaatgcgccggtgtcactgtttccaaacgcaccctacaaccgcaacggcctccacttgccatcttactcaccttatccccaaatgatcattgtcgttcaagggaagggagcaattggatttgcatttccgggatgtcct

SEQ ID NO: 104129 - DNA, 242 bp, Glycine max
ggaaccattcgctttgtttgcaactcatgggtttataacactaaactttacaaaagcgtgcgcattttctttgccaaccatacatatgttccaagtgagacaccagcagcacttgtggggtacagagaagaagaattgaagaatttaagaggagatggaaaaggagagcgcaaagaacatgataggatctatgattatgatgtctacaatgatttgggcaatccagatcacggtgaaaattt

SEQ ID NO: 104130 - DNA, 243 bp, Glycine max
gacaaactgaacaggacaattgagttctactattcactctcttcttagttagagaagcctattattgagactttaaataatgatttacttttttctttgttcacaaatatagggagctcttcttctaccacactttaattcaaaggcgatagtgatactggtaattaatgaaggagatgcaaacattgaacttgttggcctaaaagaacaacaacaggagcagcaacagtaagagcaaccttt

SEQ ID NO: 104131 - DNA, 243 bp, Glycine max
tgcagtttcctcgctctcttttctgcaattttcttttttgttccttctctgcggttatctttttgagcttcaatggcggacgctgaaaccttcgctttccaggctgagatcaaccagcttctcagcctcatcatcaacaccttctacagcaacaaggagattttcttgcgtgaactcatcagcaacgcttctgatgctttggataagattcgatttgagagtttaaccgacaagagcaagctc

SEQ ID NO: 104132 - DNA, 244 bp, Glycine max
tgtctctccgcagcagccacacttcttcgccgtttcagctgaagagccatccgcaggtaagcaatggttaagcataataatgttatccccaatgggcacttccggaaacactggcaaaactatgtgaagacttggtttaatcaaccagcccgaaagaccagaagacggttggctcggcagaagaaggctgtcaagattttccccaggcctactgctggatctctcaggcctattgttcatggcc

SEQ ID NO: 104133 - DNA, 244 bp, Glycine max
agcaaagccaataagatacaagacaaggttacaattgacggatatgaaactctaataatgtcagatgagagtacagaatcagagacagagcaagcgttcttaagcgccatccttgagcaaccaattagtgtctccattgatgcaaaagattttcatttatacaccgggggaatttatgatggagaaaactgtacaagtccgtatgggattaatcactttgttttacttgtgggttatggttcag

SEQ ID NO: 104134 - DNA, 242 bp, Glycine max
cggctcgagcggctcgagcggctcgagtggaggtcttatgacaaatgcctacaattatttgctcgagtctggacggttggaagaggagtcttcatatccctacactggggagagaggtgaatgcaagtttgatccagagaaaatagcagttaagatcacaaatttcaccaatatccctgctgatgagaaccaaattgccgcatatttagtagaaaatggtccacttgctatgggcgtgaatg

SEQ ID NO: 104135 - DNA, 241 bp, Glycine max
gttcaatatcctagtataccttaataaataatttaagatactatgatgagagcacggttcccattactgttgctgggacttgttttcctggcttcagtttctgtctcatttggcattgcttactgggaaaaagagaaccccaaacacaacaagtgtctccagagttgcaatagcgagagagactcgtacaggaaccaagcatgccacgctcgttgcaacctccttaaggtggagaaagaag

SEQ ID NO: 104136 - DNA, 243 bp, Glycine max
ctcaaacctcttcgttccttcgattcattccatttcttccaaaatggccaaagacccagttcgcgttctcgtcactggagccgcaggcaaattggatatgctcttgtccctatgattgctaggggagtgatgctgggtcctgaccagcccgtgatcctccacatgcttgacattcctccagcagcagagtcgttgaatggggttaaaatggaattggtggatgctgcattccctcttcttaaa

SEQ ID NO: 104137 - DNA, 246 bp, Glycine max
cttggagaaaatgccattatggcaaaaagcaattttgtgtggaatgggacattgtttgtctcggaaaagcaaagaaacatggtatcatgggattggaggaaaaaaggtgtcatcacccaagtaaagtaccaagggggctgtggaagcggttgggcgttttctgccacgggagccatagaagcagcacatgcaatagcaacaggagaccttgttagcctttctgaacaagaactcgtagactgtgtg

SEQ ID NO: 104138 - DNA, 247 bp, Glycine max
ctccattggtccttaaacactcatcagtcatcaccatggccaagctagttttttccctttgttttctgcttttcagtggctgctgcttcgctttcagttccagagagcagcctcagcaaaacgagtgccagatccaaaaactcaatgccctcaaaccggataaccgtatagagtcagaaggagggctcattgagacatggaaccctaacaacaagccattccagtgtgccggtgttgccctctctcg

SEQ ID NO: 104139 - DNA, 246 bp, Glycine max
cttaattattaacacttccttagttcaatatggggaagcccttcactctctctctttcttccctttgcttgctactcttgtcgagtgcatgctttgctattagctccagcaagctcaacgagtgccaactcaacaacctcaacgcgttggaacccgaccaccgcgttgagtccgaaggtggtttgattcaaacacggaactctcaacaccctgagctgaaatgcgccggtgtcactgtttccaaac

SEQ ID NO: 104140 - DNA, 278 bp, Glycine max
cactcgtaattaagctcgagggaatatttacattgccagatttgatctctgggataattttgccaagtttgctgaaacttgatagagcaacatctgtgctctctataagatcaatagagcttaagcaaaatggtattccatcctttgacatttgaacaggacagtcaagaacatccacaccatctgaaatagctttttccctagtacaccgtattaaagaatttaagatatactatgatgagagcgcggttcccattactgttgctgggagttgtttt

SEQ ID NO: 104141 - DNA, 255 bp, Glycine max
gtgttacaacttacggctaaattctcaaagatttaaactttgtctcagagtttccaaattcacccaaccccagagagaaaatgtctctaatcccaaatttcttcggtggcagaaggagcaacgttttcgatcctttttccctcgacgtctgggaccccttcaaggattttcctttcccaaacactctttcttcagcttcctttcctgaattttctcgggaaaattctgcattcgtgagcactcgtgtggattgga

SEQ ID NO: 104142 - DNA, 203 bp, Glycine max
cacagaagcagaaggaggagaagcagaaagaggagacgaagcaatggcgccgagaaagccccgaaccacgtcgaggaaccctgatttggtcaggggaattggcaaatattcgaggtcgcagatgtaccacaagaggggcatctgggccatcaaggccaaaaacggcggtgttttgcccctccacgatcccaagcccaaacccg

SEQ ID NO: 104143 - DNA, 257 bp, Glycine max
ccacctcatacctaccttcagccatcgctgatttcgtgctcgataatgaaggtaaccctcttgaaaatggtggcacatattatatcttgtcagacataacagcatttggtggaataagagcagaccccaacgggaaatgaaagatgccctctcactgtggtgcaatctcgcaatgagctcgacaaagggattggaacaatcatctcgtccccatatcgaatccgttttatcgccgaagccatcctttgagccttaag

SEQ ID NO: 104144 - DNA, 258 bp, Glycine max
ctgagattcagatgatggcgagtgagtcgcaaaactgggtgttcatggtcactgcacagacaccaaccaacattgccgttatcaagtattgggggaaaagagacgaaaccctcatcttaccggttaacgacagtatcagtgtcactctcgatcccagccacctctgcaccaccaccactgctgccgtcagtcccgctttccaccaagatcgcatgtggctcaatggaaaggagatttctctttctgggggcaggttcc

SEQ ID NO: 104145 - DNA, 255 bp, Glycine max
cgcaatcttcactacattcaccgagcatttgcattcacattgaatatggctgagactacacaatctaatgctgagttgttggagtggcctaagaaagataagcgccgcttcctgcatgttgtgtatcgtgttggtgatcttgatcgcaccattaagttttatactgaatgttttgggatgaagcttttgaggaaaagagatattccagaggagaaatatgccaatgcttttcttggatttggccctgaacaatcc

SEQ ID NO: 104146 - DNA, 258 bp, Glycine max
tcggctctaacaggttcgaaactctcttcaaaaaccaatatggtcgcattcgcgtcctccagaggttcaaccaacgctccccacaacttcagaatgtccgagactaccgcattttggagttcaactccaaacccaacaccctccttctccccaaccatgctgacgctgattacctcatcgttatccttaacgggactgccattctttccttggtgaacaacgacgacagagactcctacagacttcaatctggtgatg

SEQ ID NO: 104147 - DNA, 252 bp, Glycine max
ggtagcttcgcgccactggcttttcaaccaagcgcgatgaccaattgtgcgaatcaacggttcctctcgtactaggttgaattactattgcgacactgtcatcagtagggtaaaactaacctgtctcacgacggtctaatcccagctcacgttccctattggtgggtgaacaatccaacacttggtgaattctgcttcacaatgataggaagagccgacatcgaaggatcaaaaagcaacgtcgctatgaac

SEQ ID NO: 104148 - DNA, 261 bp, Glycine max
gccgagaacaaccagaggaacttccttgcaggttcgaaagacaatgtgataagccagatacctagtcaagtgcaggagcttgcgttccctgggtctgcaaaagatattgagaacctaataaagagccaaagtgagtcctactttgtggatgctcagcctcagcagaaagaggaggggaacaagggaagaaagggtcctttgtcttcaattttgagggctttttactgaataagtatgtagtactaaaatgtatgctgtaat

SEQ ID NO: 104149 - DNA, 204 bp, Glycine max
cttaattattaacacttccttagttcaatatggggaagcccttcactctctctctttcttccctttgcttgctactcttgtcgagtgcatgctttgctattagctccagcaagctcaacgagtgccaactcaacaacctcaacgcgttggaacccgaccaccgcgttgagtccgaaggtggtttgattcaaacatggaactctc

SEQ ID NO: 104150 - DNA, 256 bp, Glycine max
gtttgatcagactcaagggtttaagccatgggaaaaaggaaggcaaaggcaaagcctcctccaaagaagcgaatggataagctcgataccgtcttcagctgccctttctgcaatcatggcagcagcgtcgaatgccgccttgacatgaagaacttgataggggaagctatttgcgggatatgccaagagagctttagcactaccatcacagctttatcagagccaatagacatatacagtgagtggattgatgaat

SEQ ID NO: 104151 - DNA, 222 bp, Glycine max
gtcgccggccttccggtcggcggcatcctcctgctcctggcaggactgaccctggctggaactctcaccgggctggtggtggctacaccgctcttcatcatcttcagcccggtgctgattccggccacggtcgcaattggcctggccgtggccgggttcctgacgtcgggagtctttgggctcacggcgctgtcgtccttctcctggatcctgaactacatc

SEQ ID NO: 104152 - DNA, 217 bp, Glycine max
ggtggaaccaggagtctcagaggagagctgtggcttagagagccctttttgaatgtgctaccacacttttgtccttttgggctctagctagtgctggtagcagtaaataagaatgaataaaagaaacaaaggcttagatgccctttgttaagtgtagaataacgggtatagtaactatgtacccttgtgtaatgagtcactcaagtacctatgcggg

SEQ ID NO: 104153 - DNA, 252 bp, Glycine max
ggcgtcttcataaacgcctttcttctccgtttccgtttcctcgttcgaattcgctttttgatctgcgaaaatgagagagtgcatctcgatccacattggtcaggctggtatccaggtcggaaatgcttgctgggagctctactgcctcgagcacggcatcgggcccgatgggcaaatgccaagtgacaagacagttggcggtggtgatgatgctttcaatactttcttcagcgagactggtgctggaaagca

SEQ ID NO: 104154 - DNA, 252 bp, Glycine max
tgacaatcccaaacagtctacagtttttgatattctcttgggaatttctcaagattttgaaattgctggtaatactcttatgccagctttttctgttccacaggctactgccagatcttctgaaaatgcggaatcctctgcatgatctggaatttgtgttttctttcgcttgttcgtttgtttaattcaataaaggaaattaggcttgaccctcttgttgagtatgctctgcctatttgaaaatttccacac

SEQ ID NO: 104155 - DNA, 233 bp, Glycine max
acgaggtagaagaagaagaccctgagctcgtaacatgcaaacaccaatgccaacagccacagcaatacactgagggtgacaagcgggtatgcttgcaaagatgtgacaggtatcatcgtatgaagcaagagcgagagaaacaaatccaagaggaaactcgtgagaagaaagaggaggaaagccgtgaaagggaagaagaacaacaagagcagcatgaggaacaagatgaaaat

SEQ ID NO: 104156 - DNA, 212 bp, Glycine max
tgagttgatcagcaaagggcagcagcttgatgcggttcactttacctatgaagtgggtctggtggaaaagttccctcctgatcgcttgttgaagtcttttctcaaggatgctaagaaagttgcggcttctattttggaagatcctaataatgcaggccgagctgcgtacctagctgcaaggaaagagcagttagcactcagggctgtgatta

SEQ ID NO: 104157 - DNA, 251 bp, Glycine max
gtgttgctcattttctgaagcttccttttgcgaatcaattccagcattatcaacaacaccctgctgtcaatggcacagatgacggttgtaatctgttaaagatggtaactaatgctgatgctgaatctgaattggatactgttgcctctgctgaacccagtaagagaatgcgtctcacgcctcttgcagatgcaagcaatcccattatggctcaggctgcattcctgtctgctttggctgggtcagaggtt

SEQ ID NO: 104158 - DNA, 228 bp, Glycine max
gaaagaagctgtagagaaaggtcatggtgatctgaaagacaagccatggtggcctaagttgcaaacaattgaagagcttgttgaaatttgcaccattatcatatggactgcttcagccctccatgcagccgttaactttggtcaatatccatatggaggtttcattctgaatcgcccaacttcttctagaaggttgcttcctgagaaaggcaccccagaatatgaaga

SEQ ID NO: 104159 - DNA, 219 bp, Glycine max
gaacactcatcaccatggccaagcttgttctttccctttgtttccttccattcagtggctgcttcgctctgagagagcaggcacagcaaaatgagtgccagatccaaaagctgaatgccctcaaaccggataaccgtatagagtcggaaggtgggttcattgagacctggaaccctaacaacaagccattccagtgtgccggtgttgccctctctcgct

SEQ ID NO: 104160 - DNA, 253 bp, Glycine max
agctttttgatcaacagaacgagggaagtattttcgcaataagcagagaacaggtgcgtgcgttggcccctaccaagaaaagctcttggaggccattcggtggcgaatccaagcctcaattcaatattttcagcaagcgtcccactatctccaacggatatggtcgtttaactgaagttggtcctgacgatgatgaaaagagttggcttcaaagtatcgatctcatgcttacctttaccaacatcacccagag

SEQ ID NO: 104161 - DNA, 209 bp, Glycine max
tatcaccattactgatggtattgacaaaactagcgcaactttgcaatttagcaagttagcagattgtgactttctcaaaagagactttaagcagatgtctaatgtcttgtgggcagctcctgaggacaaggcgagtttatggtcacaacttcattatgtttcatgtaacaatctggaaatgcaagaagcttatcttgtcaatctcgtaa

SEQ ID NO: 104162 - DNA, 255 bp, Glycine max
tctctccattgtctttgaacactcatcaccatggccaagcttgttctttccctttgtttccttcttttcagtggctgcttcgctctgagagagcaggcacagcaaaatgagtgccagatccaaaagctgaatgccctcaaaccggataaccgtatagagtcggaaggtgggttcattgagacctggaaccctaacaacaagccattccagtgtgccggtgttgccctctctcgctgcacccttaaccgcaatgcc

SEQ ID NO: 104163 - DNA, 252 bp, Glycine max
caaaagcacaatttgttagtggaaaaaccttcaaatatgatataattggtgctggttcacattcttcaggagattttcctgaaaaggaagatcaagaaaaacccaaaaagattgataccagattgagacaaagaatagatcctcaatacaatgaggttcaggctcagatggaaacaaatttgtataaattgtctcatgatgatgttgaaactcctaaaggttctatgttggatcttaaaatttctcaatcta

SEQ ID NO: 104164 - DNA, 251 bp, Glycine max
gcggaaagaataaagaaagcgcaaaaattggagctgcttttgactgctggcattggttctgatcacgttgatctcaaagctgcagctgctgctggtttaactgtggcagaggtcacgggaagcaatgtcgtgtcggttgcggaggatgaactcatgagaatcctcattctaatgaggaatttcttgcctgggtaccatcaggctgttaagggtgaatggaatgttgctggcattgcacatagagcttatga

SEQ ID NO: 104165 - DNA, 253 bp, Glycine max
agtttcatgaagaaacatgtcgaaaaattaaagctcttcatctttatgactgcctgagagccaataaatcaactgcagcatggggtgtagaggcacgtgtaccattcttggataaagaatttatcaacgtagccatgagtatagatccggaatggaaaatgataaggcctgatcttggaaggatagagaagtgggtattacgcaatgcatttgatgacgataagaatccatatttaccaaagcacatattgta

SEQ ID NO: 104166 - DNA, 232 bp, Glycine max
gtttatggtcacaacttcattatgtttcgtgcaataatctggaaatgcaagaagcttatcttgtcaatctcgtaaatgtgttacgagaattgtatttgcacagtccagaggaagctcgccaattgagaaggaaagctctctctcgtattgaatggctgcaaaaagctgatgtgcctaccatagcacagattgaagagttccattcgatgcagaggatgatgaatgctcctga

SEQ ID NO: 104167 - DNA, 252 bp, Glycine max
cacaatccttcaacaccaacgaggacacagctgagaaacttcggtctccagatgacgaaaggaagcagatcgtgacagtggagggaggcctcagcgttatcagccccaagtggcaagaacaagaagacgaagacgaagatgaagacgaagaatatgaacaaactccctcttatcctccacgacgaccaagccatggaaagcatgaagatgacgaggacgaggacgaagaagaagatcaacctcgtcctgatc

SEQ ID NO: 104168 - DNA, 249 bp, Glycine max
cccttgtaaaacttcttattgtgatgtctaaaagcgaagacttgaagcttttgggaggctggttcagcccatttgccctgagggtgcagattgcccttaacctcaagggtctagaatatgaggttgttgaagagaccttgaatcccaaaagtgacctgcttcttaagtccaaccctgtgcacaagaaaatcccagttttcttccatggagataaagtcatttgtgaatctgcaatcatagttgagtaca

SEQ ID NO: 104169 - DNA, 207 bp, Glycine max
gaaagtgagaggagagagaaagtagcagatcctccatggcctccaccaaggaatgtgaaaacttcgtctacgtcgccaagctcgacgaacaagccgaacgctatgaagaaatggtacgagcaatgaagaatgtggcgaagctaaacgtggaattgacggtagaggagcggaaccttctgtcggttgggtacaagaacgtggtgggtg

SEQ ID NO: 104170 - DNA, 249 bp, Glycine max
ctgcaaaggattctacccgccgctcgatgggaattgcgcttcaaggcgtctcgtagggctaatccgcctcacgagggtcaccaacggcacgtgcctttggggggccgaggccccctactgctggtcggcaaacggacggcgggcgcacgcgtcgcttctagcccggattctgacttagaggcgttcagtcataatccaacgcacggtagcttcgcgccactggctttataaccaagcgcgatgaccaat

SEQ ID NO: 104171 - DNA, 250 bp, Glycine max
atgcgccgtttctgtgcttttactctgctaccttgtgacaatggtgagggttagtgtgttgaatgatgctcttaagagcatgtacaatgctgagaaacgggggaagcgccaggtcatgattaggccatcctcaaaagtgattataaaattccttttggtgatgcaaaagcatgggtacattggagagtttgagtacgttgatgatcacagagctggaaaaattgttgttgaattgaatggtagactgaac

SEQ ID NO: 104172 - DNA, 255 bp, Glycine max
aagcaaagcaatggctacttcaaagttgaaaacccagaatgtggttgtatctctctccctaaccttaaccttggtactggtgctactgaccagcaaggcaaactcagcggaaactgtttctttcagctggaacaagttcgtgccgaagcaaccaaacatgatcctccaaggagacgctattgtgacctcctcgggaaagttacaactcaataaggttgacgaaaacggcaccccaaaaccctcgtctcttggtcg

SEQ ID NO: 104173 - DNA, 252 bp, Glycine max
taagaaatgaagagtactatcttctttgctctctttctagtttgtgccttcaccatctcatacctgccttcagccaccgctcagttcgtgctcgacactgatgatgatcctcttcaaaacggtggcacatactatatgttgccagttatgagaggaaagggcggtggaatagaagtagattcaactggaaaagaaatatgccctctcactgttgtgcaatcacccaatgagctcgataaggggattggacta

SEQ ID NO: 104174 - DNA, 248 bp, Glycine max
gattagtccactacccgtgcttaaggaaatcttccgaactgatggtgaacaggcccttaagtttcctcctcctaaagtaattcaagcagtgagtaagtctgcatggatgactgatgaagaatttgcaagagaaatgcttgctggtgtaaatccaaacttgattcgttgtcttaaggatttccctccacgaagcaagctagatagccaagtctatggtgatcatactagtcaaataaccaaagaacacc

SEQ ID NO: 104175 - DNA, 250 bp, Glycine max
ctcgagccgctcgagccgctcgagccgtcccagtagaaaagattagtcctggcacagaagataggtgatatacaagtgtaatcttattgggaagccagtggtgactgctacccaaatgcttgaatcaatgataaagtctcccaggccaacccgagctgaagcaactgatgtagctaatgcagttcttgatggaacagattgtgtgatgcttagtggtgaaagtgctgctggggcatacccagaacttgct

SEQ ID NO: 104176 - DNA, 246 bp, Glycine max
gttcaatatcctagtacaccgtattaaagaatttaagatatactatgatgagagcgcggttcccattactgttgctgcgagttgttttcctggcatcagtttctgtctcatttggcattgcgtattgggaaaagcagaaccccagtcacaacaagtgcctccgaagttgcaatagcgagaaagactcctacaggaaccaagcatgccacgctcgttgcaacctccttaaggtggaggaagaagaag

SEQ ID NO: 104177 - DNA, 250 bp, Glycine max
gagaaagagatagtgtggtagagagagaggagcggaggagagaaaatgacgacgaggttcaagaagaacaggaagaagagaggccacgtcagcgccggtcacggtcgtatcgggaagcaccgcaagcatcccggtggtcggggtaacgccggtggcatgcaccaccaccgcatcctcttcgacaagtaccatcccggtttcttcggaaaggtgggtatgcgctacttccacaaactccgcaacaaattct

SEQ ID NO: 104178 - DNA, 247 bp, Glycine max
aagagagtttttttttgttcctcactgaccaagccagagcgatgagaaccaaactttctttagctatctttttcttttttcttttagccttattttcaaacctagcctttggcaaatgtaaagaaaccgaggtagaagaagaagaccctgagctcgtaacatgcaaacaccaatgccaacagccacagcaatacactgagggtgacaagcgggtatgcttgcaaagatgtgacaggtatcatcgtat

SEQ ID NO: 104179 - DNA, 239 bp, Glycine max
atggcactgagcaaacgtgccaaatctagttcaaggaaaaccatttcttctgaagataaaccttttaacttgagaagccgcgaccccatctactccaacaagcttggcaagttctttgagatcaccccagagaaaaacccccagcttcgggacttggatatcttcctcagtattgtggatatgaacgagggagctcttcttctaccacactgtaattcaaaggcgatagtgatactggt

SEQ ID NO: 104180 - DNA, 249 bp, Glycine max
gtcacaacggaacaggtgaatgctgctggtgacatgtgtgctatatgccaggagaagatgcaggctcccatattgttgagctgtaaacacatgttctgtgaggagtgtgtatctgaatggtttgagagagaacgaacttgtccattatgcagggcattggtaaaaccagctgatctgcggaccttcggagatggatcaacaagtctattttttcagttgttttaagttcattttctttgacttgttggg

SEQ ID NO: 104181 - DNA, 250 bp, Glycine max
caagttcacaatcctcctcatctctcttctcttctgcatcgcccacacttgcagcgcctccaaatggcagcaccagcaagatagctgccgcaagcagctccagggggtgaacctcacgccctgcgagaagcacatcatggagaagatccaaggccgcggcgatgacgatgatgatgatgacgacgacaatcacattctcaggaccatgcggggaagaatcaactacataaggaggaacgaagaaaagacg

SEQ ID NO: 104182 - DNA, 252 bp, Glycine max
gaagattcgtcacttcaatgaaggagacgtactagtgattcctcctggtgttccttactggacctataacactggcgatgaaccagttgttgccatcagtcttcttgacacctccaacttcaacaatcagcttgatcaaaaccccagagtattttaccttgctgggaacccagatatagagcacccagagaccatgcaacaaggccagcagcagaagagtcatggtggacgcaacaggggcaacaccagcag

SEQ ID NO: 104183 - DNA, 255 bp, Glycine max
acttattaacactttccttagttcaatatggggaagcccttcttcactctctctctttcttccctttgcttgctactcttgtcgagtgcatgctttgctattacctccagcaagttcaacgagtgccaactcaacaacctcaacgcgttggaacccgaccaccgcgttgagtccgaaggtggtcttattgaaacatggaactctcaacaccctgagctgcaatgcgccggtgtcactgtttccaaacgcaccctc

SEQ ID NO: 104184 - DNA, 247 bp, Glycine max
gtcagttgcaggaaaaatggtttcgctgaaactgcagaagcggctcgcagccagcgtcctcaagtgtggcagaggaaaggtttggcttgaccccaatgaagtcaacgaaatctccatggctaattctcgccaaaacataaggaagctggttaaggatgggtttattatcaggaagcccaccaagattcactctcgctcacgtgcccgccgaatgaaggtagcgccgatgaaaggacgtcactctgga

SEQ ID NO: 104185 - DNA, 200 bp, Glycine max
atcgagccgaatcggctcgaggttcaatatcctagtacaccgtaagtaagaatttaagatattctatgatgagagcgcggatcccattactgttgctgggagttgttttcctggcatcagtttctgtctcatttggcattgcgtattgggaaaagcagaaccccagtcacaacaagtgcctccgaagttgcaatagcgag

SEQ ID NO: 104186 - DNA, 235 bp, Glycine max
ggctcgagcggctcgagtgcgagtcaacgggagagtaaacccgtaagacgcaaggaagctgattggtacgatccccccgtgggttgcaccgccgaccgaccctgatcttctgtgaagggttcgagtgagagcatacctgtcgggacccgaaagatggtgaactatgcctgagcggggcgaagcagatgaaactctggtggaggcccgcagcgatactgacgtgcaaatcgttcgt

SEQ ID NO: 104187 - DNA, 247 bp, Glycine max
ctcgagccgctctggttgattcggatctagagtcttcagtttctcctcgttgttcttcgcattcctgttttcaatttcgattctttcgttaatttaataagatgtttgggagggcaccgaagaagagcgataatacgaggtactacgaaatcctcggcgtctccaagaacgcttcgcaggatgatctgaagaaggcttacaagaaagccgccattaagaatcaccccgacaagggcggtgatcccga

SEQ ID NO: 104188 - DNA, 245 bp, Glycine max
gcgaagagaatggctcccaagggtttaatctttttggctgtgttatgcttctcagcactgtcactgagtcgttgtcttgcggaggataatggacttgttatgaacttctacaaggaatcatgccctcaggctgaagacatcatcaaagaacaagtcaagcttctctacaagcgccacaagaacactgctttctcctggctcagaaacatcttccatgactgtgctgttcagagttgtgatgcttc

SEQ ID NO: 104189 - DNA, 247 bp, Glycine max
ggggataacgttgttatgcttaaccatatcttacctgcacggaagaccagaaggcgtttagctcggcagaagaaggctgtcaagattttcccaaggcctactgctggacctctcaggccaattgttcatggccagactctgaaatacaacatgaaagtcagatctgggagaggattttctctcgaagagttgaaggctgtgggaattcccaagaaacttggtccaactattgggatttctgttgatc

SEQ ID NO: 104190 - DNA, 250 bp, Glycine max
  unsure (1)..(250): unsure at all n locations
gactgccattcttaccttggtgaacaacgacgaccgagactcttacaaccttcaatctggcgatgccctaagagtccctgcaggaaccacatactatgtggttaaccctgacaacgacgagaatctcagaatgataacactcgccatacccgttaacaaacccggtagatttgagagtttctacctatctagcactcaagctcaacattggtnattgcaagggttcagcaagaatattctagaggcctca

SEQ ID NO: 104191 - DNA, 244 bp, Glycine max
cggctcgagcggctcgagcggctcgagtggaggtcttatgacaaatgcctacaattatttgctcgagtctgatgggttggaggaggagtcttcatatccctacactggggagagaggtgaatgcaagtttgatccagagaaaatagcagttaagatcacaaatttcaccaatatccctgctgatgagaaccaaattgccgcatatttagtaaaaaatggtccacttgctatgggcgtgaatgca

SEQ ID NO: 104192 - DNA, 248 bp, Glycine max
tggttacacgtctaggttgcctaagtctcctaatgagaaacatttggagcttattgtgaggttggttatggaatctaagaaaccggttttgtatgttggtggtggttgtttgaattctagtgaggaattgcgagcgttttgtcgagctcaccggtgttcctgttgctagcactttgatgggtcttggtgcttatcccattgctgatgataattctcttcagatgcttgggatgcatgggactgtttat

SEQ ID NO: 104193 - DNA, 249 bp, Glycine max
agaaattgcacgtgttgaatggatcagagaaggtagagttcctctacaaaccattcgagcgaaaatcgattattgttgctatacagttcgaactatttatggggttttagggatcaaagtttggatattttctaaataaagaaaaatatattattctttatcttaaatgtgctatattttatcttaaatgtgctatatttttttttagaaaacaaaaaatgaaaaattactcgatttttatttctccaa

SEQ ID NO: 104194 - DNA, 249 bp, Glycine max
ataaaattcttccaccaagttatgggtttccttgtgttgcttcttttctccctcttaggtctctcttctagttccagcatatcaactcatcgttccatattggaccttgacctaaccaagtttaccacacagaaacaggtgtcttcactgttccaactatggaagagtgagcatggacgtgtctaccataaccacgaagaagaggcaaagagacttgagattttcaagaataacttgaactatatcagg

SEQ ID NO: 104195 - DNA, 221 bp, Glycine max
gtgaattttgagaatgctgatgatgctgctagggctgttgaggctctcaatggcaaaaattttgatgacaaagaatggtatgttggaaaagctcagaagaaatctgaaagggagaatgaattgaaacaacgatttgagcagagcatgaaagaagctgctgataaatatcaaggcgcaaacttgtatgtaaaaaatttagatgatagcattggtgatgaaaa

SEQ ID NO: 104196 - DNA, 260 bp, Glycine max
tgttgttgctgcaccaccgaacaacttcccctgtaaatcgcgtttcgtttgtgcaaggttttaaaagatggctgatgctgaggacattcaacctcttgttgttgataatggaactggaatggtcaaggctggttttgcaggtgatgatgctcctagggccgtgttccccagcattattgggagaccagccatactggtgtaatggttgggatgggtcagaaggatgcttacgtgggtgatgaagcccaatcaaaaagggg

SEQ ID NO: 104197 - DNA, 260 bp, Glycine max
gttaatttacttgaacaaaactttggaaatgaacgcaaacttgagtccgaaagaaaggataggctggcaatggagcttggtttggaccctcgacaagttgctgtgtggtttcaaaacagaagagcccgttggaagaacaaaaagttggaagaagagtactccagccttaaaaaaaatcatgaagccacttgcttgagaaatgttgcctggagagtgaggtgttgaagctcaaagagcaactttctgaggcagagaaagag

SEQ ID NO: 104198 - DNA, 261 bp, Glycine max
gtctgtgatgataatgatgatgatgatgtgttccatgtggatgtgggttgtccttgtggccattgctggtgcccttttagtcctaagatctatcctcaagaatgtaaattggtggctctatgaatccaaattgggtgtgaagcagtactctttgccaccaggtgacatgggatggcccttcattggcaacatgtggtcctttctcagtgctttcaagtccaaggaccctgattccttcatctcctcctttgtctccagatt

SEQ ID NO: 104199 - DNA, 261 bp, Glycine max
accgtattaaagaatttaagatatactatgatgagagcgcggttcccattactgttgctgggagttgttttcctggcatcagtttctgtctcatttggcattgcgtattgggaaaagcagaaccccagtcacaacaagtgcctccgaagttgcaatagcgagaaagactcctacaggaaccaagcatgccacgctcgttgcaacctccttaaggtggaggaagaagaagaatgcgaagaaggtcaaattccacgaccacga

SEQ ID NO: 104200 - DNA, 264 bp, Glycine max
aaagtcttccatagccccccaaaaatgaagagcaccatcttctttgctctctttctcttttgtgccttcaccacctcatacctaccttcagccatcgctgatttcgtgctcgataatgaaggtaaccctcttgaaaatggtggcacatattatatcttgtcagacataacagcatttggtggaataagagcgccccaacgggaaatgaaagatgccctctcactgtggtgcaatctcgcaatgagctcgacaaagggattggaa

SEQ ID NO: 104201 - DNA, 266 bp, Glycine max
caccggggcaatggtggccatagggaacatgatggagaagaagatcacgatgccggcgcaccttatgtacgatggggatgaccccaggctattcgagcactactccgctgtggcgcacgcataggcgtgtacaccgccaacgactacgcagacatcttggagtttctcgttgaacggtggagattggagaagcttgaaggattgatggctgaggggaagcgggcgcaggatttcgtgtgtgggttggcgccgaggattaggaggtt

SEQ ID NO: 104202 - DNA, 264 bp, Glycine max
ctcgatcacttgtgggatgataccctcgccggtcctcgcccggagaacggcctcggcaagctccgaaagcaccactccttcgctttccgatctgcctccgccaaggaatcagacagcggaagcgtgaaatcgtacggtgaggattcgcccaagaatgcggtgagagtgacgcgaagtataatgatcgtgaaacacctggtaaccagagtcccagtggatccgctccggcttcccccgccggttctactcctccggtgtctccgt

SEQ ID NO: 104203 - DNA, 269 bp, Glycine max
caatatcctagtataccttaataaataatttaagatactatgatgagagcacggttcccattactgttgctgggacttgttttcctggcttcagtttctgtctcatttggcattgcttactgggaaaaagagaaccccaaacacaacaagtgtctccagagttgcaatagcgagagagactcgtacaggaacaagcatgccacgctcgttgcaacctccttaaggtggagaaagaagaatgtgaagaaggtgaaattccacgaccacga

SEQ ID NO: 104204 - DNA, 272 bp, Glycine max
tgaaattttgataaaccgcgatcacaggttgccgcaccttaaaaccggaaacaaaagcaatcgttacttgatttcaagaatctctcaatttcttcctacttctttgtgtacgatttcttaagggaaagaaaatcactctctgtgctggccacagacttcgtgaatcattttcttttccactcttagtttatttgctgaacactctcctatttgatataggacttcgtgtcacatttaaacttcttctgtctctttctcagttctctgtttaa

SEQ ID NO: 104205 - DNA, 257 bp, Glycine max
ggttgcattggatatagagtaccaccacaatatgttaatatcccaccaaaaagtgaatccaaaggaaatcatagtaggatggtattcaaccggtcttggagtaactggtggtagtgcattaatccacgagttttattctcgagaagtgcccaatcccatacacttgactgttgatacaggatttacaaatggagcgggtacgattaaagcatacgtgtctaacaatttatctcttggagaacgtcaaattgctgcac

SEQ ID NO: 104206 - DNA, 259 bp, Glycine max
cacacaactactacaagtacttccttacaatcaaaaccaacaacaactatggcaagttatcaaaagcactacgatgatcagggtcgcaaggttgacgagtatggcaacgttgagaagcaaaccgacgaatacggcaaccctgttcatgctgctagtgtcacctatgtagccaccagaactgctgctggtggttacagtgatgacattaataagcaacatgataccaccaatgcctacggcgtagacactggtagacagc

SEQ ID NO: 104207 - DNA, 260 bp, Glycine max
tgttgatctacattctcccatcttttctcactgctgaaattaaatataagcggaatttgagtaatattcatatttccggcttattttacgacggcagatataaattctggactaaacacgagacaaatcttgctttgacagaagaggaaaagatggaggtgattagaaatagaggcattcctgctgatgttcttgcaaagcgagctcatgaatttgaaaaacatgttgctcatgaaagcctcaaggatcaaattcctgct

SEQ ID NO: 104208 - DNA, 260 bp, Glycine max
tcaaaaaagaagaagaagaagaagagaggaaagtagtagaagaatacagggcagagctgcagccaacaccacccatggctgaatccgtttcagtggacatggagatgatctttctcggcggaaaggaacatcatattcaaactggctgtggttctgtatctgtaatagtctgtggggatcaagaaaaccagctctgatcacttatccagatatagcgctaaattatatgtcatgtttccaaggattatttttctgtccag

SEQ ID NO: 104209 - DNA, 266 bp, Glycine max
ccaagttatgggtttccttgtgttgcttcttttctccctcttaggtctctcttctagttccagcatatcaactcatcgttccatattggaccttgacctaaccaagtttaccacacagaaacaggtgtcttcactgttccaactatggaagagtgagcatggacgtgtctaccataaccacgaagaagaggcaaagagacttgagattttcaagaataacttgaactatatcagggacatgaatgcaaacagaaaatcaccccatt

SEQ ID NO: 104210 - DNA, 267 bp, Glycine max
gcaaagcaatggctacttcaaagttgaaaacccagaatgtggttgtatctctctccctaaccttaaccttggtactggtgctactgaccagcaaggcaaactcagcggaaactgtttctttcagctggaacaagttcgtgccgaagcaaccaaacatgatcctccaaggagacgctattgtgacctcctcgggaaagttacaactcaataaggttgacgaaaacggcaccccaaaaccctcgtctcttggtcgcgccctctactcca

SEQ ID NO: 104211 - DNA, 268 bp, Glycine max
cttattttcaagtctaagcctgatatggatccaacgaaacttcattggatgatcggaattatggtgtgtgtgactgtagtgaagttcattcttatggtctactgtcgaagattcaaaaatgaaattgttagagcatatgcacaagatcacttttttgatgtcattactaattctgttggattagctgctgctgtgctagctgtcaagttctactggtggattgatccaacaggagctattattatagcattgtatacaatcaatacat

SEQ ID NO: 104212 - DNA, 274 bp, Glycine max
accgtattaaagaatttaagatatactatgatgagagcgcggttcccattactgttgctgggagttgttttcctggcatcagtttctgtctcatttggcattgcgtattgggaaaagcagaaccccagtcacaacaagtgcctccgaagttgcaatagcgagaaagactcctacaggaaccaagcatgccacgctcgttgcaacctccttaaggtggaggaagaagaagaatgcgaagaaggtcaaattccacgaccacgaccacaacacccgg

SEQ ID NO: 104213 - DNA, 271 bp, Glycine max
gaaaggaaaggttaactaagaagcaatacttcaatggccacccttgttgttcataaccaaacttcttctgctcaagatgctgaggctctccaacaggctttcaaaggatggggggctgatgacaaggccattatagcaatactgggtcacataaatgttcatcagaggcaagaaatcagaaaagcttatgaggagtttaccaagaggatctcatcaaacgccttgagtccgagatctctggtgactttgagagagctatgtaccggtggat

SEQ ID NO: 104214 - DNA, 260 bp, Glycine max
tcccgaccctgttcccctctcgtatccgtcatgaaaggaggaaagtccaagaccgaatctaagagagccgatcccaaacttgctgtgaataagaagggagccgccaccaaggctaggaaacccgccggcaaggggaaggcagcgaaagaccctaacaagccaaagaggcctccaagtgctttcttcgttttcatggaggagttcaggaaggtattcaacaaagaacatcctgaaaacaaagcagtgtctgctgtgggcaa

SEQ ID NO: 104215 - DNA, 256 bp, Glycine max
aagaaagaaggtttttttagtatagttaacagcatggagagggaggaagatgttaaggttggagcacagaaattctcggagaggcaagcactgggtacaggagctaagagtgacaaggactacaaggaggcaccaccagcacccttgtttgagccaggggagttaaagtcatggtctttttacagagctgggatcgcagagtttgtggccacattcttgttcctctacatcactgtcttgactgtcatgggtgtca

SEQ ID NO: 104216 - DNA, 259 bp, Glycine max
gatactggtaattaatgaaggagatgcaaacattgaacttgttggcctaaaagaacaacaacaggagcagcaacaggaagagcaacctttggaagtgcggaaatatagagccgaattgtctgaacaagatatatttgtaatcccagcaggttatccagttgtggtcaacgctacctcaaatctgaatttctttgctattggtattaatgccgagaacaaccagaggaacttcctcgcaggttcgcaagacaatgtgata

SEQ ID NO: 104217 - DNA, 181 bp, Glycine max
gaggaagggcagcagcaaggggagcagaggctggaagagagcgtgattgtggaaatctcgaaggaacagattcgggcactgagcaaacgtgccaaatctagttcaaggaaaaccatttcttctgaagataaaccttttaacttgagaagccgcgaacccatctactccaacaagcttggca

SEQ ID NO: 104218 - DNA, 254 bp, Glycine max
caagggtttaacctttctggctgtgttaatatgcgtatcagcactgtcactgagtccttctgttgcgggggaagggcaaaataatggccttgttatgaacttctacaaggaatcatgccctcaggctgaagacatcatcacagaacaagtcaagcttctctacaagcgccacgagtacactgctttctcctggctcaggaacatcttccatgactgtgctgatcagagttgtgatgcttcactgttgctggact

SEQ ID NO: 104219 - DNA, 258 bp, Glycine max
ggtgttggaaagagttgccttcttctacgattctctgatggttctttcacaactagtttcatcacaaccataggcattgattttaagataagaaccattgagcaggatggaaaacggatcaagctccaaatttgggatactgcaggtcaggagcggttccgaacaattacaactgcttactatcgtggtgctatgggcatattgctagtctatgacgttacagacgaatcttcatttaacaatatcaggaattggatt

SEQ ID NO: 104220 - DNA, 259 bp, Glycine max
atcttcatcatgcacaagagctcttcagattccacgttgggcccgggtggcctggacctctcccaggccttcttcaggcccataaacaacgccgcccctccctccccgaccaagcgccacaacaagatctccgtcatcggcgccggcaacgtgggaatggccatcgcgcagaccatcctcactcagacctcaccgacgagctcgtcctcgtcgacaccaactccgacaagctccgcggcgagatgctcgacctccagca

SEQ ID NO: 104221 - DNA, 257 bp, Glycine max
tgccaccgcttcagtggcatttaagtccagggaggaccaccgcaagcagattgagttggaggaggcgcgtaaagcggggcttgcgccactgaactcgatgaagatggaaaggaaatcaatcctcacattccccagtatatgtcctctgctccttggtatcttaatgctgagagacctagtttgaaaatcaaaggaaatggaaatctgaccccaattacaccaaatcatggtacgatagaggtgctaaaatctttcag

SEQ ID NO: 104222 - DNA, 264 bp, Glycine max
cttaaacactcatcagtcatcaccatggccaagctagttttttccctttgttttctgcttttcagtggctgctgcttcgctttcagttccagagagcagcctcagcaaaacgagtgccagatccaaaaactcaatgccctcaaaccggataaccgtatagagtcagaaggagggctcattgagacatggaaccctaacaacaagccattccagtgtgccggtgttgccctctctcgctgcaccctcaaccgcaacgcccttcgt

SEQ ID NO: 104223 - DNA, 264 bp, Glycine max
gttcaatatcctagtataccttaataaataatttaagatactatgatgagagcacggttcccattactgttgctgggacttgttttcctggcttcagtttctgtctcatttggcattgcttactgggaaaaagagaaccccaaacacaacaagtgtctccagagttgcaatagcgagagagactcgtacaggaaccaagcatgccacgctcgttgcaacctccttaaggtggagaaagaagaatgtgaagaaggtgaaattcca

SEQ ID NO: 104224 - DNA, 267 bp, Glycine max
tgaaaccttccgagcgatgaacctcttttaggaagttctgatgatacaaggctcattgacctgactgatattgatatccgtcttccccttcttgtttatgtttctcgagagaagcgcccaggctatgatcacaacaaaaaagccggggccatgaatgcattggttcgagcctcagctataatgtctaatggccttttatactcaatcttgactgtgatcactatatctacaactcaaaggcaatgagggaaggcatgtgctttatga

SEQ ID NO: 104225 - DNA, 269 bp, Glycine max
gttcaatatcctagtacaccgtattaaagaatttaagatatactatgatgagagcgcggttcccattactgttgctgggagttgttttcctggcatcagtttctgtctcatttggcattgcgtattgggaaaagcagaaccccagtcacaacaagtgcctccgaagttgcaatagcgagaaagactcctacaggaaccaagcatgccacgctcgttgcaacctccttaaggtggaggaagaagaagaatgcgaagaaggtcaaattcca

SEQ ID NO: 104226 - DNA, 269 bp, Glycine max
cttttaagatatttttggtcacatagtttatggtctgcctctgcgtagtgcttcaacagccccctgctcgctcgatcatcttgattattttttaagccttttaaatgcccaacatcttgttcttgatgtttgagattgatgtatccaattcttagtgaaatcttcttttccgggtgtatgatcaattctactgtgagacgacgcaggacccatttagttcaatccttctccgttgcttttctttactggctctactacgtttcatgatt

SEQ ID NO: 104227 - DNA, 271 bp, Glycine max
tactcgagcgaattcggctcgaggggaagagtacccagataggatgatgcttactttctacgtttttccttctccaaaggtttcggacactgttgtggaaccctacaatgctactctctctgttcaccagcttgttgaaaacgcagacgagtgcatggtgcttgacaatgaagctttgtatgacatttgcttccgaccctcaagctaaccaccccaagctttggtgacttgaaccatctgatctcagctacaatgtctggtgtcacttgtt

SEQ ID NO: 104228 - DNA, 252 bp, Glycine max
ataaaattcttccaccaagttatgggtttccttgtgttgcttcttttctccctcttaggtctctcttctagttccagcatatcaactcatcgttccatattggaccttgacctaaccaagtttaccacacagaaacaggtgtcttcactgttccaactatggaagagtgagcatggacgtgtctaccataaccacgaagaagaggcaaagagacttgagattttcaagaataacttgaactatatcagggac

SEQ ID NO: 104229 - DNA, 254 bp, Glycine max
gaagaaaagggacaagcttagttgtcaagttggaatcaacccatactccatggaatggactggtttggccaatagattactgagtaagggcaacgatattctgtgttgcgattatgctagttttgatggtttgattaccaagcaagttatgagcaaaatggcagaaatgataaacagtctttgtggtggtgatgcaaaattgatgcgtgaaaggacacacctgctgttggcttgttgttcaaggatggcaattt

SEQ ID NO: 104230 - DNA, 256 bp, Glycine max
gaacaagtttgctgacatcactcctcaagagttcagcaaaaagtacttgcaagctcccaaggatgtgtcgcagcaaatcaaaatggccaacaagaaaatgaagaaggaacaatattcttgtgaccatccacctgcatcatgggattggaggaaaaaaggtgtcatcacccaagtaaagtaccaaggggctgtggaagcggttgggcgttttctgccacgggagccatagaagcagcacatgcaatagcaacaggag

SEQ ID NO: 104231 - DNA, 262 bp, Glycine max
atttaagatactatgatgagagcacggttcccattactgttgctgggacttgttttcctggcttcagtttctgtctcatttggcattgcttactgggaaaaagagaaccccaaacacaacaagtgtctccagagttgcaatagcgagagagactcgtacaggaaccaagcatgccacgctcgttgcaacctccttaaggtggagaaagaagaatgtgaagaaggtgaaattccacgaccacgaccacgaccacaacacccgg

SEQ ID NO: 104232 - DNA, 269 bp, Glycine max
gcggaaggcccattcgggtggttacatttccaaataccatcgtgcatattgaaccagacatgaattcaaggtttcagcttttgagtaccactaccaatggtgattttgttcaaggaaaagatctcgcaatggttaaagttaatgtagcatgtgctgctgttggcttgacatcaagttacactccaactccattgttggaatctggtttgcaaaaagacagagggttaattgtggagtattttggaaggatgtcttacgttgctcataac

SEQ ID NO: 104233 - DNA, 209 bp, Glycine max
caaccattgactttgtcatgctcaaaaatttagtttaatttacaaattatggcaagggttacacctggctagcttccgcgtttagatcatttgtttatagtgctatggccacgacaagagtgttatgggtgcatgaatgtaaaacgaaaaaaaaaaaaattgtgtttattttgtacttcagttatgaataaaagaatttcactgtttgt

SEQ ID NO: 104234 - DNA, 249 bp, Glycine max
gtgggcaacttcaatgctggatcgtgtgatcggcatggttgagagagataaaaatcacacatgtattatctcctggtctttagggaatgaatctggatttggaacaaatcattttgctttagctggttggattcggggaagagattcatctcgggtattgcattatgaaggaggtggaccaggactccgtgcactgatattgtgtgtcctatgtatatgcgtgtttgggacatggtgaaaatagccaat

SEQ ID NO: 104235 - DNA, 254 bp, Glycine max
ggaaacaaatttgtttaaattgtctcttgatgatgttgaaactcctaaaggttccatgttggatcttaaaatttctcaatctaaaattgcacttcccaaaaacacagttggaggaaccattctgcgtagtgatccattggcaaattttctgacagagggcaattttagagcaagtgttgatttgcagcgcactcatcgtattaaaggaatgattaaaatggtggccacagttggtattcctgagaatacaggta

SEQ ID NO: 104236 - DNA, 252 bp, Glycine max
ctcaccgaggttcgcaagaacggtacctgcccttggctgaggcctgatgggaagacccaagtgaccgttgagtattacaatgacaatggtgccagggttcctattcgtgtacacaccgtgctaatctccacccaacacgacgagactgtcaccaatgacgaaattgctgctgacctcaaagagcatgtgatcaagcctgtgatcccagagaagtaccttgatgagaagaccattttccacttgaacccttca

SEQ ID NO: 104237 - DNA, 256 bp, Glycine max
aaaaccacccacggacgagcagcaacaaagaccccaggaagaggaagaagaagaagaggatgagaagccacagtgcaagggtaaagacaaacactgccaacgcccccgaggaagccaaagcaaaagcagaagaaatggcattgacgagaccatatgcaccatgagacttcgccacaacattggccagacttcatcacctgacatctacaaccctcaagccggtagcgtcacaaccgccaccagccttgacttccca

SEQ ID NO: 104238 - DNA, 257 bp, Glycine max
agatgacttctccctacattaaatgtacagtctctttcttcatagcatttggaaatttggctgatgacaccatcaattttgaggcttttccccacaagctggtgcaatttggagagattcaggaaaaagttgtattgaaattttcacaagaggaatttcttacagcttggtcaactcaggtgcgtcctacaacaactctgttggctgatgggtgtccatatttgtatgctatggtgcatgatagttcagtgtctaca

SEQ ID NO: 104239 - DNA, 259 bp, Glycine max
gttcaatatcctagtataccttaataaataatttaagatactatgatgagagcacggttcccattactgttgctgggacttgttttcctggcttcagtttctgtctcatttggcattgcttactgggaaaaagagaaccccaaacacaacatatgtctccagagttgcaatagcgagagagactcgtacaggaaccaagcatgccacgctcgttgcaacctccttaaggtggagaaagaagaatgtgaagaaggtgaaa

SEQ ID NO: 104240 - DNA, 262 bp, Glycine max
tccattgtctttgaacactcatcaccatggccaagcttgttctttccctttgtttccttcttttcagtggctgcttcgctctgagagagcaggcacagcaaaatgagtgccagatccaaaagctgaatgccctcaaaccggataaccgtatagagtcggaaggtgggttcattgagacctggaacctaacaacaagccattccagtgtgccggtgttgccctctctcgctgcacccttaaccgcaatgcccttcgtagacct

SEQ ID NO: 104241 - DNA, 264 bp, Glycine max
gcaatttgctgcagaagaaatctcttctatggtgctcatcaagatgcgtgagattgctgaggcttaccttggctccacggtgaagaatgctgttgtcactgtccctgcttacttcaatgattctcagcgtcaagctaccaaggatgctggagtcattgctggtcttaatgtgatgcgaattatcaatgagcctactgcagctgccattgcttatggtcttgataagaaggccacaagtgttggtgagaagaatgtgttgatttt

SEQ ID NO: 104242 - DNA, 266 bp, Glycine max
ccctcacccacgtctctccccgcttcagatcttaaacgtctttcgctgttccaagatgggtgtggctgagaacattcccgatatggaggagggtaccttggagattggaatggaatacagaactgtatctggagttgctggaccattggtcattcttgacaaagttaagggacccaaatttcaagagatgttaatattcgtttaggagatggaactactcggcgtggacaagttctagaggttgatggtgaaaaagctgttgttca

SEQ ID NO: 104243 - DNA, 266 bp, Glycine max
ggcagaggcgcggagaagatgtggttcaccctctcaaggtctctctggaggacctttatctcgggacttctaagaagctctccctctccagaaatgtcatatgctccaagtgcactggtaagggttctaagtctggtgcttcgatgaagtgtgctggttgtcaaggaactggtatgaaggtttctataagacatcttggcccgtccatgattcagcagatgcagcatgcttgcaatgaatgcaagggtactggagaaaccatcaac

SEQ ID NO: 104244 - DNA, 252 bp, Glycine max
ctagttcaatatcctagtataccttaataaataatttaagatactatgatgagagcacggttcccattactgttgctgggacttgttttcctggcttcagtttctgtctcatttggcattgcttactgggaaaaagagaaccccaaacacaacaagtgtctccagagttgcaatagcgagagagactcgtacaggaaccaagcatgccacgctcgttgcaacctccttaaggtggagaaagaagaatgtgaa

SEQ ID NO: 104245 - DNA, 253 bp, Glycine max
tcaatatcctagtataccttaataaataatttaagatactatgatgagagcacggttcccattactgttgctgggacttgttttcctggcttcagtttctgtctcatttggcattgcttactgggaaaaagagaaccccaaacacaacaagtgtctccagagttgcaatagcgagagagactcgtacaggaaccaagcatgccacgctcgttgcaacctccttaaggtggagaaagaagaatgtgaagaaggt

SEQ ID NO: 104246 - DNA, 253 bp, Glycine max
cggtcatatttcattagagagagagagagagagagatgcggaagagaaagggtgcatctgcagtggtagaagacgaagaagaaaacgaaaacgaggattgtgaaggaaatggtttctttgcttgctacctcttgacatccctcagcccccgctacaaaggccacacttatatcggattcacagtgaatccgaggcgccggatcaggcaacacaatggggagattgggtgtggagcttggagaacgaggaagag

SEQ ID NO: 104247 - DNA, 257 bp, Glycine max
gagaaaagggaagtgaagaggaagatgaggatgaggatgaggaacaagatgaacgtcaattcccattcccacgcccacctcatcagaaggaagagcgaaagcaagaggaagatgaggatgaggagcagcagcgagagagcgaagaaagtgaagattctgagttacgaagacataagaataagaacccttttctcttcggctctaacaggttcgaaactctcttcaaaaaccaatatggtcgcattcgcgtcctccag

SEQ ID NO: 104248 - DNA, 257 bp, Glycine max
gaaccactttgttcaagagtttaagagaaagaacaagaaggacataagtgggaaccccagagcacttagaaggttgaggactgcttgtgagagggccaagagaacattgtcatccactgcccagaccaccattgaaattgattctctctatgagggaattgatttctactccactgttactcgtgccagattcgaggaactgaacatggatctctttaggaagtgtatggagccggtggagaaatgtttgagggatg

SEQ ID NO: 104249 - DNA, 260 bp, Glycine max
agttatcttctagtatttttcaagtaacttaaggtttcaaacctaggaagttggaagtcatggcagcaacattgatggcagcaacaagttctggcactcttaaagcaactcctttcctaggccaaggcaagggtgccaatgccaatgctcttagggatgttgtttccatgggaactgggaagtaaccatgggcaatgatttgtggtatggaccagacagagtgaaatacttgggacccttttcagctcagaccccttcat

SEQ ID NO: 104250 - DNA, 261 bp, Glycine max
ctccattgtctttgaacactcatcaccatggccaagcttgttctttccctttgtttccttcttttcagtggctgcttcgctctgagagagcaggcacagcaaaatgagtgccagatccaaaagctgaatgccctcaaaccggataaccgtatagagtcggaaggtgggttcattgagacctggaacctaacaacaagccattccagtgtgccggtgttgccctctctcgctgcacccttaaccgcaatgcccttcgtagac

SEQ ID NO: 104251 - DNA, 264 bp, Glycine max
ccttctctttattttcaattttcatccaaaagattcttatgatagttacagcataggtgtagaagaagctggggaatatcaaattattctaaacacagatgaaataaagtatggaggtcaagggatccttaaagaagaacagtattttctaaaaactatcagcagaagagttgatggccttcgaaacgcttagaggtgtcactacccagcagaacttctcaggtttacaagttaaggcggattttgagaatataaggcacactg

SEQ ID NO: 104252 - DNA, 100 bp, Glycine max
tgtctttgaacactcatcaccatggccaagcttgttctttccctttgtttccttcttttcagtggctgcttcgctctgagagagcaggcacagcaaaatg

SEQ ID NO: 104253 - DNA, 264 bp, Glycine max
atgagtttgaagaacaacatggtggtgctaaaggtgtgtttgttgcttcttttccttgtgggggttacagctgcacgcatggaactgagcttcttcaaaagtgatcagtcatcaagttatgatgatgatgagtattcaaaccatgctgtgatctctgcatgtgcacacgctcaatgcctcctcaatgcagctgtgaagatattaggctgaattcatgccactcagattgtaagagctgtatgtgcacacgctcacagccaggac

SEQ ID NO: 104254 - DNA, 260 bp, Glycine max
atcataaaattcttccaccaagttatgggtttccttgtgttgcttcttttctccctcttaggtctctcttctagttccagcatatcaactcatcgttccatattggaccttgacctaaccaagtttaccacacagaacaggtgtcttcactgttccaactatggaagagtgagcatggacgtgtctaccataaccacgaagaagaggcaaagagacttgagattttcaagaataacttgaactatatcagggacatgaat

SEQ ID NO: 104255 - DNA, 252 bp, Glycine max
gagaatggctcccaagggtttaatctttttggctgtgttatgcttctcagcactgtcactgagtcgttgtcttgcggaggataatggacttgttatgaacttctacaaggaatcatgccctcaggctgaagactcatcaaagaacaagtcaagcttctctacaagcgccacaagaacactgctttctcctggctcagaaacatcttccatgactgtgctgttcagagttgtgatgcttcactgttgctggac

SEQ ID NO: 104256 - DNA, 251 bp, Glycine max
ataaaattcttccaccaagttatgggtttccttgtgttgcttcttttctccctcttaggtctctcttctagttccagcatatcaactcatcgttccatattggaccttgacctaaccaagtttaccacacagaacaggtgtcttcactgttccaactatggaagagtgagcatggacgtgtctaccataaccacgaagaagaggcaaagagacttgagattttcaagaataacttgaactatatcagggac

SEQ ID NO: 104257 - DNA, 256 bp, Glycine max
aaaagagttggcttcaaagactcaatctcatgcttacctttaccaacatcacccagagatctatgagtactattcactacaactcacatgcaacgaagatagcactggtgatcgatggcagagggcatcttcaaaatcatgtccacacatgtcatcaaggtcgtcacactcgaagcatgataagagtagcccttcataccatagaatcagttccgatttgaagcctggaatggtgtttgttgtccctcccggtcat

SEQ ID NO: 104258 - DNA, 263 bp, Glycine max
gaaatgaagagtactatcttctttgctctctttctagtttgtgccttcaccatctcatacctgccttcagccaccgctcagttcgtgctcgacactgatgatgatcctcttcaaaacggtggcacatactatatgttgcagttatgagaggaaagggcggtggaatagaagtagattcaactggaaaagaaatatgccctctcactgttgtgcaatcacccaatgagctcgataaggggattggactagtctttacatctcca

SEQ ID NO: 104259 - DNA, 258 bp, Glycine max
gtggtgactgtgctctgctctcatctcattcatattcatttcaatggcaactcaaggtcaagtcattacctgcaaagctgcggtggcctgggaacccaacaagcccttaaccgtccaagacgttcaggttgctccgcccaggccggcgaggtccgtgtccaaatcctcttcaccgctctctgccacaccgatgcttacacttggggcggcaaggatcccgaaggtctcttcccctgtattctcggccacgaagctgca

SEQ ID NO: 104260 - DNA, 258 bp, Glycine max
cgagactaccgcattttggagttcaactccaaacccaacaccctccttctccccaaccatgctgacgctgattacctcatcgttatccttaacgggactgccaatctttccttggtgaacaacgacgacagagactctacagacttcaatctggtgatgccctgagagtcccctcaggaaccacatactatgtggtcaaccctgacaacaacgaatctcagattaataacactcgccatacccgttaacaagcctggt

SEQ ID NO: 104261 - DNA, 250 bp, Glycine max
acgatattctgtgttgcgattatgctagttttgatggtttgattaccaagcaagttatgagcaagatggcagaaatgataaacagtctttgtggtggtgatgaaaaattgatgcgtgaaaggacgcacctgctgttgcttgttgttcaaggatggcaatttgtaaaaaagatgtttggagagttgaatgtggaatcccttctggatttccgctcacagttatttgcaatagcatttctaatgagatgctc

SEQ ID NO: 104262 - DNA, 256 bp, Glycine max
acaccgtattaaagaatttaagatatactatgatgagagcgcggttcccattactgttgctgggagttgttttcctggcatcagtttctgtctcatttggcattgcgtattgggaaaagcagaaccccagtcacacaagtgcctccgaagttgcaatagcgagaaagactcctacaggaaccaagcatgccacgctcgttgcaacctccttaaggtggaggaagaagtagaatgcgaagaaggtcaaattccacga

SEQ ID NO: 104263 - DNA, 256 bp, Glycine max
caagaatctcagcaacgaggacgaagccagaggccccaagaccgtcaccaaaaggtacatcgcttcagagagggtgatttgatcgcagtgcctactggtgttgcatggtggatgtacaacaatgaagacactcctttgttgccgtttctattattgacaccaacagcttggagaaccagctcgaccagatgcctaggagattctatcttgctgggaaccaagagcaagagtttctaaaatatcagcagcagcagca

SEQ ID NO: 104264 - DNA, 254 bp, Glycine max
tctcgagccgaatcggctcgacgtaagcttcaagagcttagcataattcctggttgcccctacattatgttaccagccaaactatcctcgcacaccttatattcgaaagggttggctgtttcgccaacttgtcaactgataatatttacaggagttatgggatttataatagaacaatacattaatcccattgtacaaaattcacagcatcctctcaagggaaaccttctttacgccatcgagagagttctgaa

SEQ ID NO: 104265 - DNA, 247 bp, Glycine max
caatatcctagtacaccgtattaaagaatttaagatatactatgatgagagcgcggttcccattactgttgctgggagttgttttcctggcatcagtttctgtctcatttggcattgcgtattgggaaaagcagaccccagtcacaacaagtgcctccgaagttgcaatagcgagaaagactcctacaggaaccaagcatgccacgctcgttgcaagctccttaaggtggacgaagaagaagaatgc

SEQ ID NO: 104266 - DNA, 253 bp, Glycine max
ttgtcttgcggaggataatggacttgttatgaacttctacaaggaatcatgccctcaggctgaagacatcatcaaagaacaagtcaagcttctctacaagcgccacaagaacactgctttctcctggctcagaacatcttccatgactgtgctgttcagagttgtgatgcttcactgttgctggactccacaagaaggagcttgtctgagaaggaaacagatagaagctttgggttgagaaatttcaggtaca

SEQ ID NO: 104267 - DNA, 252 bp, Glycine max
tgcaagctcctgcacttgactaggtatctggcttatcacattgtctttcgaacctgcaaggagcttgcgttccctgggtctgcaaaagatattgagaacctaataaagagccaaagtgagttcctactttgtagtgctccgcctcatcagaaagaggaggggaacaaaggaccctttcttcccttgttcccctcctctttctgctgaggctgagcatccacaaagtaggaggggaacaagggaagaaagggt

SEQ ID NO: 104268 - DNA, 250 bp, Glycine max
aagaaagtcttccatagccccccaaaaatgaagagcaccatcttctttgctctctttctcttttgtgccttcaccacctcatacctaccttcagccatcgctgatttcgtgctcgataatgaaggtaaccctctgaaaatggtggcacatattatatcttgtcagacataacagcatttggtggaataagagcagccccaacgggaaatgaaagatgccctctcactgtggtgcaatctcgcaatgagct

SEQ ID NO: 104269 - DNA, 256 bp, Glycine max
gtcctctacaggaatggaatttactctccacattggaacttgaacgcgaacagtgtgatctatgtgactcgagggaaaggaagagttagagtggtgaactgccaagggaatgcagtgttcgacggtgagctaaggggggacaattgctagtggtgccgcagaactttgtggtggctgagcaagggggagaacaaggattggaatacgtagtgttcaagacacaccacaacgccgtgagcagctacattaaggatgt

SEQ ID NO: 104270 - DNA, 85 bp, Glycine max
tcccgaccctgttaccctctcgtatccgtcatgagaggaggaaagtccaagaccgaatctaagagagccgatcacaaacttggtg

SEQ ID NO: 104271 - DNA, 259 bp, Glycine max
tggcacaggaggaaattctgtcttctagtgcaagtgatttcagaactgcaatggtgagtaaaaatagcaaacctcaagctactgcaatgcatgtgggagctatagaaattatcattgatagtttcgcaagtcctgttgcaacatagttggtgcaatgcttttggttgatacttatcataccaatcctgaaaatgcagttcgtagtatttttgttgcgcctttcagaggcggaaggcccattcgggtggttacatttccg

SEQ ID NO: 104272 - DNA, 257 bp, Glycine max
gccacagcaagaagaagatgatgatgatgaggaagagcagccacagtgcgtggagacagacaaaggttgccaacgccaaagcaaaaggagcagaaatggcattgatgagaccatttgcacaatgagacttcgccaaacattggtcagaattcatcacctgacatctacaaccctcaagctggtagcatcacaaccgccaccagccttgacttcccagccctctggcttctcaaactcagtgcccagtatggatcact

SEQ ID NO: 104273 - DNA, 257 bp, Glycine max
ccggcggcgcacaactccgaccacctccaggaggtagggtggaagctcgcgcagctggcggaggagatcaacgtgcagttcgagtaccgtggcttcgtcgcgaacagcctcgccgatctcgacgcctccatgctcatctccgggaaggcgaacgtccgctgtgaactctgtcttcgagtttcacaagctcctcgctcgccccggcgcggtggagaaagtactctccgtcgtacggcagattcggccggagattgtca

SEQ ID NO: 104274 - DNA, 256 bp, Glycine max
gttgaaactcctaaaggttctatgttggatcttaaaatttctcaatctaaaattgcacttcccaagaacacagttggaggaaccattctgcgtagtgatctattggcaaattttttgacagagggcaattttaggcaagtgttgatttgcagcgcactcatcgtattataggaatgattaaaatggtggccacagttggtattcctgagattacaggtatagcattggcctgtgctatgaatagttcttttagggg

SEQ ID NO: 104275 - DNA, 255 bp, Glycine max
ggtgttggaaagagttgccttcttctacgattctctgatggttctttcacaactagtttcatcacaaccataggcattgattttaagataagaaccattgagcaggatggaaaacggatcaagctccaaatttggatactgcaggtcaggagcggttccgaacaattacaactgcttactatcgtggtgctatgggcatattgctagtctatgacgttacagacgaatcttcatttaacaatatcaggaattgga

SEQ ID NO: 104276 - DNA, 254 bp, Glycine max
gcgcattatagcacaccacacaaaaaagcaaaacagagagaacaactgttactcacacacgccatgggtaaatgaatggtttttgagcaacagcagttaaaagagaaaagggattcagcgaagatgacatcggtggtgtggcaccaacttcgggtttgagagaagccagtgggcatggagcagcagctgcggatagattgccagaggagatgaacgatatgaaaattagggatgatagagagatggaagccaca

SEQ ID NO: 104277 - DNA, 253 bp, Glycine max
tcaagttacactccaactccattgttggaatctggtttgcaaaaagacagagggttaattgtggagtattttggaaggatgtcttacgttgctcataacgttaatcagccccaagagaaagatttgttggaggaaatttttcctttgatattaaatctcgctctagattggaaaaagtttcctctacaaaagcacaatttgttagtggaaaaaccttcaaatatgatataattggtgctggttcacattcttc

SEQ ID NO: 104278 - DNA, 251 bp, Glycine max
gaagattccagcaggcaagcgatgtgggtttgtccaattcgcagacaggagctgtgccgaagaggcacttcgggtgttgaatgggaccctgttgggtggtcaaaatgttcgtctttcatggggccgcagtcttcaaacaaacaggctcaggcagatccaaaccagtggaatggtggtgctggttctggtggtggatactatgggtatgctgcacaaggttatgaaaattatgggtatgctcctgctgctgg

SEQ ID NO: 104279 - DNA, 251 bp, Glycine max
gcgttggaacccgaccaccgcgttgagtccgaaggtggtcttattgaaacatggaactctcaacaccctgagctgcaatgcgccggtgtcactgtttccaaacgcaccctcaaccgcaacggcctccacttccatcttactcaccttatccccaaatgatcattgtcgttcaagggaagggagcaattggatttgcatttccgggatgtcctgagacgtttgagaagccacaacagcaatcaagcagaaga

SEQ ID NO: 104280 - DNA, 249 bp, Glycine max
gttcaatatcctagtacaccgtattaaagaatttaagatatactatgatgagagcgcggttcccattactgttgctgggagttgttttcctggcatcagtttctgtctcatttggcattgcgtattgggaaagcagaaccccagtcacaacaagtgcctccgaagttgcaatagcgagaaagactcctacaggaaccaagcatgccacgctcgttgcaacctccttaaggtggaggaagaagaagaatg

SEQ ID NO: 104281 - DNA, 248 bp, Glycine max
agaaaacagatcatacatagtagtgttggtgggttgcaaagatgcttgggggtcttctccataggggtcataagataaaagggacagtggtgttgatgcgcaagaatgtgttggacgtgaatagcgtaacagcgttgggggaattattggtcaaggtctcgacttagttggctcaacactcgatactcttactgccttcttgggccgatccgtgtctctccagcttattagtgctaccaaagctgatg

SEQ ID NO: 104282 - DNA, 248 bp, Glycine max
agaattttaaggttgagtgtcctaatgtgaagtacaccgagactgagattcagtccgtgtacaactacgaaaccaccgaacttgttcacgagaacaggaatggcacctatcagtggattgtcaaacccaatctgtcaaatacgaatttaaaaccaacatccatgttcctaaattaggggtaatgcttgtgggttggggtggaaacaacggctcaaccctcaccggtggtgttattgctaaccgagagg

SEQ ID NO: 104283 - DNA, 251 bp, Glycine max
agcgcctccaaatggcagcaccagcaagatagctgccgcaagcagctccagggggtgaacctcacgccctgcgagaagcacatcatggagaagatccaaggccgcggcgatgacgatgatgatgatgacgagacaatcacattctcaggaccatgcggggaagaatcaactacataaggaggaacgaaggaaaagacgaagacgaagaagaagaaggacacatgcagaagtgctgcacagaaatgagcgag

SEQ ID NO: 104284 - DNA, 250 bp, Glycine max
tctacgaccgaattcggctcgagggaaccctaacaacaagccatttcagtgtgccggtgtttctctctctcgctgcacccttaaccgcaatgcccttcgtagaccttcctacaccaacggtccccaggaaattacatacaacaaggtaatggtatttttggcatgctattcccgggttgtcctagcacttatcaagagccgcaagaatctcagcatcgaggacgaagccagaggccccaagaccgtcacc

SEQ ID NO: 104285 - DNA, 253 bp, Glycine max
cactgacctcaccatggcgaccagagccaagctttctttagctatcttcctattctttctgttagccttgatttcaaacctagccttgggcaaacttaaagaaaccgaggtcgaagaagatcccgagctcgtacatgcaaacaccagtgccaacagcaacggcaatacactgagagtgacaagcgaacatgcttgcaacaatgtgacagtatgaagcaagagcgagagatacaagtcgaagaggcaactcgcg

SEQ ID NO: 104286 - DNA, 250 bp, Glycine max
aaatatcattttgcgaggcaatcccattctcatcttccatttccaccatcaatactattttcttgtcgttgagaagcttcgcgaacgaaagcaaagaaccctagaccgtcacagaaccattccatagccatgctggtgttggccctctttctcaggattgggaacctgtcgtcctccgcaagaaggctcccaccgccgccgccaagaaggacgagaaagccgtcaacgccgcccgccgctctggcgccga

SEQ ID NO: 104287 - DNA, 253 bp, Glycine max
gagagattggtaggcacagaacatgagggatatgatccttttcttggtggaattcaaaaatatgccactcccatgatgcccctagatgaagaaattctttctaaggttgcacaagatatggttgaggaatggttgattgtgttgatgaggaggattcctttgaggaagtttctttaagtgcagcactcaatggtgttgagggtttagactatatggaaagaattcctcttgccacatctgagggttttcctca

SEQ ID NO: 104288 - DNA, 254 bp, Glycine max
gttggctgatgatgagagagaaaaaggaaatgaattcttcaagcagcagaagtatcctgatgctgtgaagcattacacagagtctatacgaagaaatccaaaagatcctagggcttatagtaacagagcagatgctacactaaattgggggcaatgcctgaagggttaaaggatgcagagaagtgcattgaacttgatccaacctttgtaaagggttatacccggaaaggtgcagtccagtatttcatgaagga

SEQ ID NO: 104289 - DNA, 251 bp, Glycine max
ctatgatgagagtgcggtttcctttgttggtgttgctgggaactgttttcctggcatcaggttgtgtctcattaaaggtgagtgaggatgaggataaccctttctacttgagaagctctaacagcttccaagtctctttgagaaccagaacggtcggattcgtctccttcagagattcaacaaacggtccccacaacttgagaacgttcgagactaccggattgtccagtttcagtcatgacccagcacaa

SEQ ID NO: 104290 - DNA, 248 bp, Glycine max
atcctagtacaccgtattaaagaatttaagatatactatgatgagagcgcggttcccattactgttgctgggagttgttttcctggcatcagtttctgtctcatttggcattgcgtattgggaaaagcaaaccccagtcacaacaagtgcctccgaagttgcaatagcgagaaagactcctacaggaaccaagcatgccacgctcgttgcaacctccttaaggtggaggaagaagaagaatgcgaaga

SEQ ID NO: 104291 - DNA, 249 bp, Glycine max
agaaacttcggtctccagatgacgaaaggaagcagatcgtgacagtggagggaggcctcagcgttatcagccccaagtggcaagaacaagaagacgaagacgaagatgaagacgaagaatatgaacaaatccctcttatcctccacgacgaccaagccatggaaagcatgaagatgacgaggacgaggacgaagaagaagatcaacctcgtcctgatcaccctccacagcgaccaagcaggcccgaaca

SEQ ID NO: 104292 - DNA, 249 bp, Glycine max
ttctcgagccgattcggctcgagcggctcgagagaggacaaagcagatgaccacaagaccgtcaccagaagatctataacttcagagagggtgatttgatcgcagtgcctactggtgttgcatggtggattacaacaatgaagacactcctgttgttgccgtttctattattgacaccaacagcttggagaaccagctcgaccagatgcctaggagattctatcttgctgggaaccaagagcaagagtt

SEQ ID NO: 104293 - DNA, 245 bp, Glycine max
cgacagtgttcatggacactggaagcatcacgatgtcaccgttaaggacgagaagacccttctcttcggtgacaagccagtcactatttttggacacagaaaccctgaagagatcccatgggggtcactggagctgacatcattgttgagtccaccggagttttcaccgataaggacaaggccgccgcacatttgaagggtggtgcaaagaaggttattatttctgcccccagtaaggatgcccc

SEQ ID NO: 104294 - DNA, 238 bp, Glycine max
atcaaaatgaccaagttcacaatcctcctcatctcacttctcttccgcatcgcccacacttgcagcgcctccaagatggcagcaccagcaagatagctgccgcaagcagctccagggggtgaacctcagccctgagagaagcacatcatggagaagatccaaggccgcggcgatgacgatgatgatgatgacgacgacaatcagattctcaggaccatgcggggaagaatcaactaca

SEQ ID NO: 104295 - DNA, 246 bp, Glycine max
ctttgaacactcatcaccatggccaagcttgttctttccctttgtttccttcttttcagtggctgcttcgctctgagagagcaggcacagcaaaatgagtgccagatccaaaagctgaatgccctcaaccggataaccgtatagagtcggaaggtgggttcattgagacctggaaccctaacaacaagccattccagtgtgccggtgttgccctctctcgctgcacccttaaccgcaatgcccttc

SEQ ID NO: 104296 - DNA, 251 bp, Glycine max
atcaaaacaaggtgccatctttgtttgttatacatgaccatggccatgcccctgtttctgatgttccttcttctgcacatagcttgggtggcatcgtcggatctccgacctgggttttactcaaaaacatgtccaaaagcggaactcatagtccgagatgtgatgaagaaggcccttatgagggaacccagaagtgttgcctctgttatgcgcttccagttccatgattgctttgtcaacgggtgtgatgg

SEQ ID NO: 104297 - DNA, 253 bp, Glycine max
aaaccctcttttttctctctcttgcaaaacctaattttcatttcttccctcaaatttcaaaatgcgtgagatccttcacatccagggtggccaatgcggcaaccagatcggcgccaagttctgggaggtggttgcgcggacacgggatcgaccctaccggaaggtacggtggggactcggagttgcagctcgagaggatcaatgtctactacaacgaggccagttgcggtcggttcgtgccgcgcgcggttct

SEQ ID NO: 104298 - DNA, 243 bp, Glycine max
cccaagtaaagtaccaagggggctgtggaagcggttgggcgttttctgccacgggagccatagaagcagcacatgcaatagcaacaggagaccttgttagcctttctgaacaagaactcgtagactgtgtgaagaaagcgaaggttgttacaatggatggcactatcaatcgttcgaatgggttttagaacatggtgggattgccactgatgatgattatccttacagagctaaagagggtag

SEQ ID NO: 104299 - DNA, 247 bp, Glycine max
ggcacatattatatcttgtcagacataacagcatttggtggaataagagcagccccaacgggaaatgaaagatgccctctcactgtggtgcaatctcgcaatgagctcgacaaagggattggaacaatcactcgtccccatatcgaatccgttttatcgccgaaggccatcctttgagccttaagttcgattcatttgcagttataatgctgtgtgttggaattcctaccgagtggtctgttgtgga

SEQ ID NO: 104300 - DNA, 245 bp, Glycine max
ctagttcaatatcctagtataccttaataaataatttaagatactatgatgagagcacggttcccattactgttgctgggacttgttttcctggcttcagtttctgtctcatttagcattgcttactggaaaaagagaaccccaaacacaacaagtgtctccagagttgcaatagcgagagagactcgtacaggaaccaagcatgccacgctcgttgcaacctccttaaggtggagaaagaagaa

SEQ ID NO: 104301 - DNA, 245 bp, Glycine max
tgataaggtgcgacttgtcctccgatgactgcaaaaaaagtactactaacacatatatgtgttagtttatgctagctagaagaacgtataagctatctccgtatgttgtatattagtaaaaagatctcactggtgaatggtgatcgtgtatgtaacgtagtgggcaatggaagcacttagagtgtgctttgtggctcttgccctctgttttgataactgagacttttgcgaataccgttcgtttt

SEQ ID NO: 104302 - DNA, 236 bp, Glycine max
attgtctttgaacactcatcaccatggccaagcttgttctttccctttgtttccttcttttcagtggctgcttcgctctgagagagcaggcacagcaaaatgagtgccagatccaaaagctgaatgcctcaaaccggataaccgtatagagtcggaaggtgggttcattgagacctggaaccctaacaacaagccattccagtgtgccggtgttgccctctctcgctgcaccctta

SEQ ID NO: 104303 - DNA, 244 bp, Glycine max
aaacaatatgtgtgcatatgggctcaatcctggtatttcaggttctcgtcttttgggcaccattcctcagtctatttcacagcaaactgtttggaatcaaatggcaacagtgagaacaccattgattttgattctagcaagcagagtttttgtcaattttctattgaccttctcggtggaggaattttagtggacaaaactggagattggatcacacttatacaaaattctccaattagtaact

SEQ ID NO: 104304 - DNA, 244 bp, Glycine max
ttgtctttgaacactcatcaccatggccaagcttgttctttccctttgtttccttcttttcagtggctgcttcgctctgagagagcaggcacagcaaaatgagtgccagatccaaaagctgaatgcctcaaaccggataaccgtatagagtcggaaggtgggttcattgagacctggaaccctaacaacaagccattccagtgtgccggtgttgccctctctcgctgcacccttaaccgcaatg

SEQ ID NO: 104305 - DNA, 247 bp, Glycine max
ggcagaggcgcggagaagatgtggttcaccctctcaaggtctctctggaggacctttatctcgggacttctaagaagctctccctctccagaaatgtcatatgctccaagtgcactggtaagggttcaagtctggtgcttcgatgaagtgtgctggttgtcaaggaactggtatgaaggtttctataagacatcttggcccgtccatgattcagcagatgcagcatgcttgcaatgaatgcaagggt

SEQ ID NO: 104306 - DNA, 253 bp, Glycine max
cccttctccttctctctctctttttcgcctcattccattttcatctatcaatggctccagtagcagcagcatcttcagattcaatcaagccaagagatgtttgcatcgttggtgttgcacgtacaccaagggtggatttcttggtactctgtcatctctatctgccaccaagctaggctctatagctattgaagctgctcttaaaagggccaatgttgatccatcccttgtggaagaagtattttttgggaat

SEQ ID NO: 104307 - DNA, 249 bp, Glycine max
tgaagacgaagatgatgaagatgaacaaattccctctcaccctcctcgccgaccaagccatggaaagcgtgaacaagacgaggacgaggacgaagatgaagataaacctcgtcctagtcgaccaagccaggaaagcgtgaacaagaccaggaccaggacgaggacgaagatgaagatgaagatcaacctcgcaagagccgcgaatggagatcgaaaaagacacaacccagaagacctagacaagaagaa

SEQ ID NO: 104308 - DNA, 250 bp, Glycine max
agatgacttctccctacattaaatgtacagtctctttcttcatagcatttggaaatttggctgatgacaccatcaattttgaggcttttccccacaagctggtgcaatttggagagattcaggaaaagttgtattgaaattttcacaagaggaatttcttacagcttggtcaactcaggtgcgtcctacaacaactctgttggctgatgggtgtccatatttgtatgctatggtgcatgatagttcagtg

SEQ ID NO: 104309 - DNA, 248 bp, Glycine max
aggatagtggcctaccatggtggtgacgggagagaagttattagggtttttgagtgcggcggtccaaacactcttctctgcagcttttgcctacaactcccttcaccatggctgaacaaaccgagaagcttttctgaagcaaccaaaagtgtttctcagcacaaagaagactgggaagggaaagagacctggaaaaggtgggaaccgcttttggaagtccattgggcttggatttaagactcccaggg

SEQ ID NO: 104310 - DNA, 246 bp, Glycine max
atcactctcaactttactcctcttcaatcagttgcatattctttgctattccaatggccactgttgaggttgtgtcagccaaggttgccctcccagaggacacaaaagaggcatcattgaaggttacgaggagaagaacacagaagaagttgttgagactccaacaccagaaactgtggtcactgagcaaaccaaggaggaaagtactgaggccccacgacctgcagcttcagaagacaagccctc

SEQ ID NO: 104311 - DNA, 243 bp, Glycine max
cactttttggtacagaaaatgagaggatgcaattggactggcccagaagaatgacaatttgtgtggggattgcaaagggattagcttatcttcatgaggagtcaaggttgcaaattgtgcacagggtattaaggcaaccaatgtcttacttgataaacatctgcatgccaagatctctgactttggtttagccaaacttgatgaagaagagaacactcatatcaggacaaggatagccgggac

SEQ ID NO: 104312 - DNA, 268 bp, Glycine max
cagaattataaacatggcctcaaaagacccagtccgagtgaaatacttgtccaccttagtgagtcaaaagacagtctccacggccccaatcgcttcgggccaggccttcaacatcggcaactatgtggtgagggtcaaattgggaacacccggtcaacttttgttcatggtcctcgacaccagcactgacgaggccttcgtaccctgctcgggctgcactggctgctccgacaccactttctcgcccaaagcctcaaccagttacggc

SEQ ID NO: 104313 - DNA, 264 bp, Glycine max
tttggaaggcaagggcttgtgttgtcacaatccaagagagaagtaatggcgaacatagacatcgaagggatcttgaagcagcagcagccttatgatgggcgcgttccgaagacgaagatagtgtgtactttgggccctgcttctcgatccgtagaaatgaccgagaagcttctgagggcagggatgaacgttgctcgtttcaatttctctcatggcactcacgactatcaccaggaaaccctcaacaatctcaagactgccatg

SEQ ID NO: 104314 - DNA, 262 bp, Glycine max
gagtaatagaaacctctcagcccctctccgatcaaatggccaccgtaatcgacggcaaagcgttgcgcaaaccatccgatctgaaatcgccgacgaggtgcgccagctctctcaaaaatacggcaaggttccgggattagcggtggtgatagtagggaacagaaaagattcacagagctatgttggaatgaagagaaaggcatgcgctgaattgggaatcaaatccttcgatgtggaccttcccgaacaagtctcccaagct

SEQ ID NO: 104315 - DNA, 277 bp, Glycine max
ctatgatgagagcgcggttcccattactgttgctgggagttgttttcctggcatcagtttctgtctcatttggcattgcgtattgggaaaagcagaaccccagtcacaacaagtgcctccgaagttgcaatagcgagctagactcctacaggaaccaagcatgccacgctcgttgcaacctccttaaggtggaggaagaagatgaatgcgaagaaggtcaaattccacgaccacgaccacaacacccggagagggaacgtcagcaacacggtgagaa

SEQ ID NO: 104316 - DNA, 275 bp, Glycine max
taacaacaagccattccagtgtgccggtgttgccctctctcgctgcacccttaaccgcaatgcccttcgtagaccttcctacaccaacggtccccaggaaatctacatacaacaaggtaatggtatttttggcatgatattcccgggttgtcctagcacttatcaagagccgcaagaatctcagcaacgaggacgaagccagaggccccaagaccgtcaccaaaaggtacatcgcttcagagagggtgatttgatcgcagtgcctactggtgttg

SEQ ID NO: 104317 - DNA, 281 bp, Glycine max
attgtctttgaacactcatcaccatggccaagcttgttctttccctttgtttccttcttttcagtggctgcttcgctctgagagagcaggcacagcaaaatgagtgccagatccaaaagctgaatgccctcaaaccggataaccgtatagagtcggaaggtgggttcattgagacctggaaccctaacaacaagccattccagtgtgccggtgttgccctctctcgctgcacccttaaccgcaatgcccttcgtagaccttcctacaccaacggtccccag

SEQ ID NO: 104318 - DNA, 266 bp, Glycine max
attgtctttgaacactcatcaccatggccaagcttgttctttccctttgtttccttcttttcagtggctgcttcgctctgagagagcaggcacagcaaaatgagtgccagatccaaaagctgaatgccctcaaaccggataaccgtatagagtcggaaggtgggttcattgagacctggaaccctaacaacaagccattccagtgtgccggtgttgccctctctcgctgcacccttaaccgcaatgcccttcgtagaccttcctac

SEQ ID NO: 104319 - DNA, 265 bp, Glycine max
ctcatttggcattgcgtattgggaaaagcagaaccccagtcacaacaagtgcctccgaagttgcaatagcgagaaaggctcctacaggaaccaagcatgccacgctcgttgcaacctccttaaggtggaggaagaagaagaatgcgaagaaggtcaaattccacgaccacgactacaacacccggagagggatcgtcagctacacggtgagaaggaggaagacgacggtgagcagccacgtccattcccatttccacgcccacgc

SEQ ID NO: 104320 - DNA, 259 bp, Glycine max
gtgcatatgggctcaatcctggtatttcaggttctcgtcttttgggtaccattcctctgtctatttcacagcaaactgtttggaatcaaatggcaacagtgagaacaccattgaattttgattctagcaagcagagcttttgtcaattttctattgaccttctcggtggaggaattttagtggacaaaactggagattggatcacacttatacaaaactctccaattagtaacttgttgagagttgctgcttggaagaa

SEQ ID NO: 104321 - DNA, 240 bp, Glycine max
gtcccccaaaaatgaagagcaccatcttctaatgctctctttcacttctgtgccttcaccacctcatacctaccttcagccatcgctgatttcgcgctcgctaatgacggtaaccctcttgcaaaatgtgtggcacatattatatcttgtcagacataacagcatttggtggactaagagcagccccaacggggcatgatagctgccctctcactgtggtgcaatctcgcactgtgctcg

SEQ ID NO: 104322 - DNA, 232 bp, Glycine max
cctcgctctatttctcaatctctgtgtttacggctgacgattccgcacgagtgcaattcttcgaatctcgcaaagtttaagtcatcatgggtatggtccaggttcacatgaacattgtcgtcattggacacgtcgactctgggaagtcaactaccaccggtcacttgatctacaagctcggaggtattgacaagcgtgtgattgagatgttcgagaaggcggctaccgagat

SEQ ID NO: 104323 - DNA, 261 bp, Glycine max
tcccgaccctgttcccctctcgtatccgtcatgaaaggaggaaagtccaagaccgaatctaagagagccgatcccaaacttgctgtgaataagaagggagccgccaccaaggctaggaaacccgccggcaaggggaaggcagcgaaagaccctaacaagccaacgaggcctccaagtgctttcttcgttttcatggaggagttcaggaaggtattcaacaaagaacatcctgaaaacaaagcagtgtctgctgtgggcaaa

SEQ ID NO: 104324 - DNA, 272 bp, Glycine max
ggttcaaccaacgctccccacaacttcagaatctccgagactaccgcattttggagttcaactccaaacccaacaccctccttctccccaaccatgctgacgctgattacctcatcgttatccttaacgggactgccattctttccttggtgaacaacgacgacagaacctcctacagacttcaatctggtgatgccctgagagtcccctcaggaaccacatactatgtggtcaaccctgacaacaacgaaaatctcagattaataacactc

SEQ ID NO: 104325 - DNA, 250 bp, Glycine max
cacacttctcacattgctgtcaagttttctgaaatcttgacgatgagtgacaggcgatctggtaaggagcttgagaaggagcccaactttttgaagaatggtgatgcaggtatggttaagatgattccaaccaagcccatggtggttgaaactttctctgagtatcctccccttggtcgttttgctgtgagggacatgcgtcaaactgaggctgtcggagtcatcaagagtgttgagaagaaagacccca

SEQ ID NO: 104326 - DNA, 249 bp, Glycine max
cttaattattaacacttccgtagttcaatatggggaagacctacagtctctcgctttcttccctttgcttgcgagtcttgtcgaatgcatactttgctattagctccaacaagctctacgagtgcgaactccagaacctcaacgcgctagctacccgtctaacgcgctgagctccgaaggtggtatgactcaaacatggaactctcaatactctgaggctgaaatgcgccggtgtcactgtttccaaac

SEQ ID NO: 104327 - DNA, 268 bp, Glycine max
cggttcaaggcagaacaaagagcgacagctacttttggacctagacctggacctgctgggcatccaggcaacccttttgatctctcagcaatgtctggtctgctcaatgatccaagtatcaaggaattggctgaacagatagcaaaagatccatcgttcaatcagatggctgagcagcttcagaaaacttttcaaggagctccacaagatgctatccctagcttcgataatcaacaatatttttcaaccatgcaacaggttatgcaga

SEQ ID NO: 104328 - DNA, 260 bp, Glycine max
gggcctcctacgataccaaattcgaggagataaacaaggttctgtttagtagagaggaagggcagcagcaaggggagcagaggctgcaagaaggcgtgattgtggaaatctcgaaggaacagattcgggcactacgcaaacgtgccaaatctagttcaaggaaaaccatttcttctgaagataaaccttttaacttgagaagccgcgaccccatctactccaacaagcttggcaagttctttgagatcaccccagagaaa

SEQ ID NO: 104329 - DNA, 259 bp, Glycine max
ggaaaggttaactaagaagcaatacttcaatggccacccttgttgttcataaccaaacttcttctgctcaagatgctgaggctctccaacaggctttcaaaggatggggggctgatgacaaggccattatagcaatactgggtcacagaaatgttcatcagaggcaagaaatcagaaaagcttatgaggagatttaccaagaggatctcatcaaacgccttgagtccgagatctctggtgactttgagagagctatgta

SEQ ID NO: 104330 - DNA, 259 bp, Glycine max
caaatatatcttgttcagacaattcggctctatatttgtaataccagcaggttatccagttgtggtcaacgctacctcaaatctgaatttctttgcacttggtattaatgccgagaacaaccagaggaacttcctcgcaggttcgcaagacaatgtgataccgcagatacctagtcaagtgcaggagcttgcattccctgggtctgcacaagctgttgagaagctctttaagaaccaaagagaatcctactttgtggat

SEQ ID NO: 104331 - DNA, 260 bp, Glycine max
gataacagcagattcccttgatctagatgggtacacaatggacgaggcacttggtagtcgaaggttatttatgttagattaccatgatatcttcatgccatatgtgaggcagataaatcagctgaattctgccaagacttatgcgacaaggactatcctttttttgagagaagatggaactttaaagccagtggccatcgaattaagtttgccacattctgctggggatctgtcagctgccgtcagtcaagtcgtcttac

SEQ ID NO: 104332 - DNA, 260 bp, Glycine max
ttgggaatcccatgtggaataatttatctgttccaactggcactctttatgcttgggaccctacatcaacttatattcatgagccaccttattttagagatatgagcatgtctcccccaggctctcatggagtgaaagatgcttactgtttgctcaactttggagacagtatcacaactgaccacatctctccagctggcagcatacataaggacagtcctgcagccagataccttatagaacgtggggttgatagacgg

SEQ ID NO: 104333 - DNA, 263 bp, Glycine max
gagaaaaacccccagcttcgggacttggatatcttcctcagtattgtggatatgaacgagggagctcttcttctaccacacttcaattcaaaggcgatagtgatactggtaattaatgaaggagatgcaaacattgaacttgttggcctaaaagaacaacaacaggagcagcaacaggtagagcaacctttggaagtgcggaaatatagagccgaattgtctgaacaagatatatttgtaatcccagcaggttatccagttgt

SEQ ID NO: 104334 - DNA, 264 bp, Glycine max
ctgatatttacaccatctgctctcaagactgtgaattatggaatcctgcttgcacaaaagcaatgactatgtcatttaatccaaacccgtgttctgatgcatggagtttggaatttctgaagcgtaccagatttcattgtgatatcatttgtgtcactggatggactgccaccccaatgcaggatgttcaggttacaattgattggtttatttcctctcaggaatgtgttcccaggacccattgtgttttaaatccacaaaatc

SEQ ID NO: 104335 - DNA, 270 bp, Glycine max
tgatagggtgcgacttgtcctccgatgactgaaaaaaaagtactactaacacatatatgtgttagtttatgctagctagaagaacgtataagctatctccgtatgttgtatattaataaaaagatcatcactggtgaatggtgatcgtgtatgtaacgtagtacgcaatggaagcacttagagtgtgctttgtggccttgccctctgttttgataactgagacttttgcgaataccgttcgtttttcccatcaaaaaaagttttctgctt

SEQ ID NO: 104336 - DNA, 271 bp, Glycine max
ttcggaacactttatggaaaaagaagggatattttacaacattgaaagctttttcattagcgcaatctatttttacggggaattcaaaaagctttttttgtaacaaatacaaacgttagactaatttcaattaactaggttcaacgaatatttttaaatacaaaaagaaatacgaatataaatttcatatataatctaatatagtataatattcattttggatatttacattatatctatatatctatctatatatagatagatatataga

SEQ ID NO: 104337 - DNA, 276 bp, Glycine max
ctagagcggagatagcaatctcatctcattcatttcaatggcaactcaaggtcaagtcattacctgcaaagctgcggtggcctgggaacccaacaagcccttaactgtccaagacgttcaggtggctccgcctcaggccggcgaggtccgtgtccaaatcctcttcaccgctctctgccacaccgatgcttacacttggggcggcaaggatcccgaaggtctcttcccctgtattcttggccatgaagctgcagggattgtggagagtgttggaga

SEQ ID NO: 104338 - DNA, 259 bp, Glycine max
cattcttccaccaagttatgggtttccttgtgttgcttcttttctccctcttaggtctctcttctagttccagcatatcaactcatcgttccatattggaccttgacctaaccaagtttaccacacagaaacaggtgtcttcactgttccaactatggaagagtgagcatggacgtgtctaccataaccacgaagaagaggcaaagagacttgagattttcaagaataacttgaactatatcagggacatgaatgcaaa

SEQ ID NO: 104339 - DNA, 257 bp, Glycine max
tttctctctcgctcgcaaacgcaaataataaaaaacaaggttttagccatggcatcgaagcggatcttgaaggaactcaaggatactccaaaaggatcctcctacctcatgcagcgccggtcctgttgctgaagacatgtttcactggcaagcaacaattatgggtcctccagacagtccttatgctggaggtgttttcctagtcactattcatttccctccagattatccctttaagccacccaaggttgcattca

SEQ ID NO: 104340 - DNA, 254 bp, Glycine max
tgataagaaatgaagagtactatcttctttgctctctttctagtttatgccctcaccatctcatacctgccttcagccaccgctcaattcgtgctcgccactgatgatgatcctcttcaaaacggtggcacatactatatgttgccagttatgagaggaaagggcggtggaatagaagtcgattcgactggaaaagaaatatgccctctcactgttgtgcgatcacccaatgagctcgataacgggattggact

SEQ ID NO: 104341 - DNA, 255 bp, Glycine max
ctctccattggtccttaaacactcatcagtcatcaccatggccaagctagttttttccctttgttttctgcttttcagtggctgctgcttcgctttcagttccagagagcagcctcagcaaaacgagtgccagatccaaaaactcaatgccctcaaaccggataaccgtatagagtcagaaggagggctcattgagacatggaaccctaacaacaagccattccagtgtgccggtgttgccctctctcgctgcac

SEQ ID NO: 104342 - DNA, 260 bp, Glycine max
gctaaggatcccttcttcccttggtgacttggaacatcttctgaagttgaatctaagcagaaacaatttaacaggaattattccagcagaatttggaaatcttagaagtgttatggaaattgatctttcaaataatcaactctctggcttgattcctgatgaacttagtcagcttcaaaacatgatatccttgagacttgaaaataacaaattgactggcgatgtggcatcactttcaaattgcattagtctctctctac

SEQ ID NO: 104343 - DNA, 237 bp, Glycine max
cgtacggatgccttcttcccatggtgagtgagaacagcttctgaagctgaatctacgcagctctaattgaacaggtattcttccaacagaatttggggatcttagatgtgttacggaaattggtctttcacataatcaactcgctggcgtgagtcctgatagacttaggcagctgcaaaccgtgagatccttgagacttgaggataacaaattgactggcgatgtggcatcactttc

SEQ ID NO: 104344 - DNA, 261 bp, Glycine max
caaccataaacaatatgtgtgcatatgggctcaatcctggtatttcaggttctcgtcttttgggcaccattcctcagtccatttcacagcaaactgtttggaatcaaatggcaacagtgagaacaccattgaattttgattctagcaagcagagcttttgtcaattttctattgaccttctcggtggaggaattttagtggacaaaactggagattggatcacacttatacaaattctccaattagtaacttgttgagagt

SEQ ID NO: 104345 - DNA, 235 bp, Glycine max
attttcttaggctgctatggatatgatgagcactagcttgttcgctatcttgctactttgcgccttcacctcagacctagcttccgtcaccgttcaggacgtgctcgacgtggatggcgatccgattcggaacgggtgcatatactacgttttgccggcaataagctgatacggtggcggaatataccgcgctggactcgggctcgatactggggctatcgctgtagtgcaatct

SEQ ID NO: 104346 - DNA, 238 bp, Glycine max
ctggtatcctgcttgcacaatagcaatgactatgtcatttaatccaaactcgtattctgatgcatagtgtttggaatttctgaagcgtaccaggtttcattgtgatatcatttgtgtcactggatggactgccaccccaatgcaggatgttcaagtgtaaattgcttggttagatttcctctcagaaatgtgttcccaggacctattgtgtgttaaatccacaaaatcctttgtgtta

SEQ ID NO: 104347 - DNA, 257 bp, Glycine max
agatgggagacccctctgtcgaggttactgaagagaatcgtgatgcatcgcagatggccaaaattaaagccatggatgctatttctgaaggtaagttggaggaggcgattgagaacttaacagaagctatttcactcaatcctacctctgccataatgtatggaactagagccagtgtttacatcaaaatgaagaaacccaatgctgcgatccgtgatgcaaatgctgctttggagattaatcctgattctgctaaa

SEQ ID NO: 104348 - DNA, 253 bp, Glycine max
ggttcaaccaacgctccccacaacttcagaatctccgagactaccgcattttggagttcaactccaaacccaacaccctccttctccccaaccatgctgacgctgattacctcatcgttatccttaacgggactgccattctttccttggtgaacaacgacgacagagacacctacagacttcaatctggtgatgccctgagagtcccctcaggaaccacatactatgtggtcaaccctgacaacaacgaaaa

SEQ ID NO: 104349 - DNA, 256 bp, Glycine max
ctggtgatgccctgagagtcccctcaggaaccacatactatgtggtcaaccctgacaacaacgaaaatctcagattaataacactcgccatacccgttaacaagcctggtagatttgagagtttcttcctatctagcactgaagctcaacaatcctacttgcaaggattcagcaggaacattttagaggcctcctacgataccaaattcgaggagataaacaaggttctgtttagtagagaggaagggcagcagca

SEQ ID NO: 104350 - DNA, 256 bp, Glycine max
cacttattaacactttccttagttcaatatggggaagcccttcttcactctctctctttcttccctttgcttgctactcttgtcgagtgcatgctttgctattacctccagcaagttcaacgagtgccaactcaacaacctcaacgcgttggaacccgaccaccgcgttgagtccgaaggtggtcttattgaaacatggaactctcaacaccctgagctgcaatgcgccggtgtcactgtttccaaacgcaccctc

SEQ ID NO: 104351 - DNA, 89 bp, Glycine max
catacatagtagtgttggtgggttgcaaagatgcttgggggtcttctccataggggtcataagataaaagggacagtggtgttgatgcg

SEQ ID NO: 104352 - DNA, 258 bp, Glycine max
ctttacaaaagcgtgcgcattttctttgccaaccatacatatgaccctagtgagacaccagcaccacttgtggagtacagagaagaagaattgaagagtttaagaggaaatggaacgggagagcgcaaggaatatgataggatctatgattatgatgtctacaatgatttgggcaacccagataagagtgaaaagttagctcgtccagttcttggagggtctagcacctttccctaccctcgtaggggaagaactggt

SEQ ID NO: 104353 - DNA, 261 bp, Glycine max
tcttcatcatgcacaagagctcttcagattccacgttgggcccgggtggcctggacctctcccaggccttcttcaggcccataaacaacgccgcccctccctccccgaccaagcgccacaacaagatctccgtcatcggcgccggcaacgtgggaatggccatcgcgcacgaccatcctcactcaggacctcaccgacgagctcgtcctcgtcgacaccaactccgacaagctccgcggcgagatgctcgacctccagcac

SEQ ID NO: 104354 - DNA, 261 bp, Glycine max
ggcaagttgtttgagattaccccagagaaaaaccctcagcttcgggacttggatgtcttcctcagtgttgtggatatgaacgagggagctctttttctgccacacttcaattcaaaggccatagtgtactagtgattaatgaaggagaagcaaacattgaacttgttggcattaaagaacaacaacagaggcagcaacaggaagagcaactttggaagtgcggaaatatagagctgaattgtctgaacagatatatttgta

SEQ ID NO: 104355 - DNA, 260 bp, Glycine max
tgcagatctcaattgcatcgctgtccatggctaccatcgttagcatcaaggcccgccagatcttcgacagtcgtggcaatccaactgtcgaggtggatttgacttgctccgatggtacttttgccagagctgctgttccaagtggtgcatccactgggatttatgaggcccttgaattgagagatggaggatctgactaccttggaaagggtgtatcaaaggctattgacaatgtgaacaccgtcattggccctgctttg

SEQ ID NO: 104356 - DNA, 269 bp, Glycine max
cgctcgagccgattcggctcgagctcttctctctccacccaaaccactactcccgaccctgagtccctctcgtatccgtcaactaaggaggaaagtccaagaccgaatctaagagagccgatcccaaacttgctgtgaataagaagggagccgccaccaaggctaggaaacccgccggcaaggggaaggcagcgaaagaccctaacaagccaaagaggcctccaagtgctttcttcgttttcatggaggagttcaggaaggtattcaac

SEQ ID NO: 104357 - DNA, 256 bp, Glycine max
cgcaaaaatggtgaaaaaggtaagaggagattcgtatctggggatggtgaagagatgacattaattccgggaaccagtgttgaggaggcttacaataagctaatagttgaactcgagaaaagtgttcctacattggttggcattgaatgtcccaaggatgagaaacttcctcgtcgcaaaatttttgacaaacctaagacgcgctgcttcactattctccctatggagtttaatcttgtggtccgtcagaagtttt

SEQ ID NO: 104358 - DNA, 255 bp, Glycine max
ggcactatcaatcgttcgaatgggttttagaacatggtgggagcgccagtgctgatgattatccttacagagctaaagagggtagatgcaaagccaataagatacaagacaaggttacaattgacggatatgaaactctaataatgtcagatgagagtacagaatcagagacagagcaagcgttcttaagcgccatccttgagcaaccagccagtgtctccattgatgcaaaagattttcatttatacaccgggg

SEQ ID NO: 104359 - DNA, 237 bp, Glycine max
gatggattccacaaactcaaatgatggagagcctgccccatcaaagccagaaaacacacatccatcttatcctatgttatatcctgcgtattattctccagtgttcccgtttcctctgccctattggtcaggatacagtccagagcccaccaagaaggaggaaacacatgaagtgctgaaaccaactgcagtacattctaaaagccctatcaatgttgatgaactggttggcatatc

SEQ ID NO: 104360 - DNA, 253 bp, Glycine max
gtcccacgcccacaacctcgtcaagaagaagagcacgagcagagagaggaacaggaatggcctcgcaaggaggaaaaacgcggagaaaagggaagtgaagaggaagatgaggatgaggatgaggaacaagatgaacgtcaattcccattcccacgcccacctcatcagaaggaagagcgaaagcaagaggaagatgaggatgaggagcagcagcgagagagcgaaaaaagtgaagattctgagttacgaagac

SEQ ID NO: 104361 - DNA, 254 bp, Glycine max
cttggtccttaaacactcatcagtcatcaccatggccaagctagttttttccctttgttttctgcttttcagtggctgctgcttcgctttcagttccagagagcagcctcagcaaaacgagtgccagatccaaaaactcaatgccctcaaaccggataaccgtatagagtcagaaggagggctcattgagacatggaaccctaacaacaagccattccagtgtgccggtgttgccctctctcgctgcaccctca

SEQ ID NO: 104362 - DNA, 257 bp, Glycine max
caagcttgttctttccctttgtttccttcttttcagtggctgcttcgctctgagagagcaggcacagcaaaatgagtgccagatccaaaagctgaatgccctcaaaccggataaccgtatagagtcggaaggtgggttcattgagacctggaaccctaacaacaagccattccagtgtgccggtgttgccctctctcgctgcacccttaaccgcaatgcccttcgtagaccttcctacaccaacggtccccaggaaa

SEQ ID NO: 104363 - DNA, 258 bp, Glycine max
cgagagcaggcacagcaaaatgagtgccagatccaaaagctgaatgccctcaaaccggataaccgtatagagtcggaaggtgggttcattgagacctggaaccctaacaacaagccattccagtgtgccggtgttgccctctctcgctgcacccttaaccgcaatgcccttcgtagaccttcctacaccaacggtccccaggaaatctacatacaacaaggtaatggtatttttggcatgatattcccgggttgtcct

SEQ ID NO: 104364 - DNA, 266 bp, Glycine max
atagcccaagccctatacaaccaaaccctaacacacacccatttgattcagtttccatggctagcctcaaggttgcatttttggctgcagtgctctgcatggttgtggtgagtgcacccatggcacatgcagctatcacgtgcgggcaggtgacgaatagcctgatcaattgcatcggttacctccagaacggaggaacgccgccgtcgggatgctgcaacggagtgaagagcctcaatgccgccgccaagaccaccgccgaccgc

SEQ ID NO: 104365 - DNA, 239 bp, Glycine max
tcaaaaaagaagaagaagaagaagagaggaaagtagtagaagaatacagggcagagctgcagccaacaccacccatggctgaatccgtttcagtggacatggagatgatctttctcggcggaaaggaacatcatattcaaactggctgtggttctgtatctgtaatagtctgtggggatcaagaaaaaccagctctgatcacttatccagatatagcgctaaattatatgtcatgtttc

SEQ ID NO: 104366 - DNA, 275 bp, Glycine max
  unsure (1)..(275): unsure at all n locations
aggaaaggttaactaagaagcaatacttcaatggccacccttgttgttcataaccaaacttcttctgctcaagatgctgaggctctccaacaggctttcaaaggatggggggctgatgacaaggccattatagcaatactgggtcacagaaatgttcatcagaggcaagaaatcagaaaagcttatgaggagatttaccaagaggatctcatcanacgccttgagtccgagatctctggtgactttgagagagctatgtaccggtggatgttgca

SEQ ID NO: 104367 - DNA, 98 bp, Glycine max
cacaacagcaatgactatgtcatttaatccaatcccgtgttctgatgcatggagtttggaatttttgaagcgtaccggatttcattgtgatatcattt

SEQ ID NO: 104368 - DNA, 268 bp, Glycine max
cgagactaccgcattttggagttcaactccaaacccaacaccctccttctccccaaccatgctgacgctgattacctcatcgttatccttaacgggactgccatagtttccttggtgaacaacgacgacagagactcctacagacttcaatctggtgatgccctgagagtcccctcaggaaccacatactatgtggtcaaccctgacaacaacgaatctcagattaataacactcgccatacccgttaacaagcctggtagatttgag

SEQ ID NO: 104369 - DNA, 264 bp, Glycine max
tctcgagccgattcggctcgagaaaattcttccaccaagttatggatttccttgtgttgcttacttttctccctcttaggtctctcttctagttccagcatatcaactcatcgttccatattggaccttgacctaaccaagtttaccacacagaaacaggtgtcttcactgttccaactatggaagagtgagcatggacgtgtctaccataaccacgaagaagaggcaaagagacttgagattttcaagaataacttgaactat

SEQ ID NO: 104370 - DNA, 267 bp, Glycine max
ggcaacaccggcacacttaaccgcaatgcccttcgtagaccttcctacaccaacggtccccaggaaatctacatacaacaaggtaatggtatttttggcatgatattcccgggttgtcctagcacttatcaagagccgcaagaatctcagcaacgaggacgaagccagaggccccaagaccgtcaccaaaaggtacatcgcttcagagagggtgatttgatcgcagtgcctactggtgttgcatggtggatgtacaacaatgaagac

SEQ ID NO: 104371 - DNA, 280 bp, Glycine max
attcggctcgagtttgttcctcactgaccaagccatggcgatgagaaccaaactttctttagctatctttttcttttttcttttagccttattttcaaacctagcctttggcaaatgtaaagaaaccgaggtagaagaagaagaccctgagctcgtaacatgcaaacaccaatgccaacagccacagcaatacactgagggtgacaagcgggtatgcttgcaaagatgtgacaggtatcatcgtatgaagcaagagcgagagaaacaaatccaagaggaa

SEQ ID NO: 104372 - DNA, 110 bp, Glycine max
acatagtagtgttggtgggttgcaaagatgcttgggggtcttctccataggggtcataagataaaagggacagtcgtgttgatgcgcaagaatgtgttggacgtgaatag

SEQ ID NO: 104373 - DNA, 271 bp, Glycine max
agatcttttagctccttatcgtcgtggaggaaaaataggacttttcggtggagctggagtgggtaaaacggtactgattatggaattgatcaataacattgccaaagctcatggaggtgtatctgtatttggcggagtaggtgaacgtactcgtgagggaaatgatctttatatggaaatgaaagaatctggagtaattaatgaacaaaatattgcagaatcaaaagtagctctagtatatggtcaaatgaatgaaccgcccggagctcgt

SEQ ID NO: 104374 - DNA, 242 bp, Glycine max
aggatcgagcagattgaggcctcgattagatcctcaatacaatgaggttcaggctcagatggaaacaaattagtcaatattgcctctagatgatgttgaaactcccggaggttccatgtaggatctaacaatttctcactcgaaaattgtagttcccaaagacacagttctgaggaaccattctgcgtagtgatctattggctaattttcttgacagatggtcattctagggctagtgttga

SEQ ID NO: 104375 - DNA, 113 bp, Glycine max
gtgtagcagaactggcgatgcgggatgaaccggaagctgggttaaggtgcccaactgcgcgctaacctagaccccacaaagggtgttggtcgattaagacagcaggacggtgg

SEQ ID NO: 104376 - DNA, 262 bp, Glycine max
tctcgctctatttctcagtctctgtgtttgcggctgaggattccgaacgagtgaccttcttcgtttctcgcaaagtttaagtaatcatgggtaaggaaaaggttcacatcaacattgtcgtcattggacatgtcgactctgggaagtcaactaccactggtcacttgatctacaagcttggaggtattgacaagcgtgtgattgagaggttcgagaaggaggctgccgagatgaacaagaggtcattcaagtatgcctgggt

SEQ ID NO: 104377 - DNA, 109 bp, Glycine max
acatagtagtgttggtgggttgcaaagatgcttggagggtcttctccatacgggtcataacatagaagggacagtcctgctgcatgtgcaagactgtgttggacgtgaa

SEQ ID NO: 104378 - DNA, 278 bp, Glycine max
attcggctcgaggtcacttttggggaagaggtcgagtttcacagcagcaatggtgtacgtcaaggctcagaaatcaaaagcctacttcaagagatatcaagtcaagttcaagagaagaagagagggaaaaaccgattaccgtgccaggattcggttgattaatcaggacaagaacaaatataacactccgaaataccgatttgttgttcgctttagcaacaaggacattgttgcacaaataatatctgctagcattgctggcgatattgttcttgctg

SEQ ID NO: 104379 - DNA, 260 bp, Glycine max
cagaattacccaaattgggctctttggtgtcttttttaactgtggtgcaaaattgaaggttcttactctgattagctgctatgggatcaaagatctcaatatggaattgcctgcaatatctccttctgaatcaatttggtcattaacaatccgtgactgccctggatttggcgatgctaaccttgctttacttggaaagctgtgtcctcggattcagcatgttgaattgagtggacttcagggagtaacagatgcagggt

SEQ ID NO: 104380 - DNA, 109 bp, Glycine max
tctcgagtcgaattcggctcgaggtacaatgaagacactcctgttgatgccgtttctattagtgacaccaacagcttggaagaccagctcgaccagatgcctaggagat

SEQ ID NO: 104381 - DNA, 255 bp, Glycine max
cgagtggaagtcctataagacgcgtcagaaggaacatgatgagaatgtgaagaaggttatcaaacgtctcaaacagaggaatccatcaaaagatggtcttgtctgtactgctcgtaagccctggattgctgttgggatgcgaaatgttgactataagagagcccgtcatttcgaagttgatttgtctgctttccggaatgtacttgagatcgacaaagaacggatgattgcaagagttgagcccctagtcaacat

SEQ ID NO: 104382 - DNA, 261 bp, Glycine max
ttctctccattggtccttaaacactcatcagtcatcaccatggccaagctagttttttccctttgttttctgcttttcagtggctgctgcttcgctttcagttccagagagcagcctcagcaaaacgagtgccagatccaaaaactcaatgccctcaaaccggataaccgtatagagtcagaaggagggctcattgagacatggaaccctaacaacaagccattccagtgtgccggtgttgccctctctcgctgcaccctc

SEQ ID NO: 104383 - DNA, 257 bp, Glycine max
tgcaaacattgaacttgttggcctaaaagaacaacaacaggagcagcaacaggaagagcaacctttggaagtgcggaaatatagagccgaattgtctgaacaagatatatttgtaatcccagcaggttatccagttgtggtcaacgctacctcaaatctgaatttctttgctattggtattaatgccgagaacaaccagaggaacttcctcgcaggttcgcaagacaatgtgataagccagatacctagtcaagtgc

SEQ ID NO: 104384 - DNA, 107 bp, Glycine max
ctcgagccgcgaagatgaagatgaagatcaacctcgcaagagccgcgaatggagatcgaaaaagacacaacccagaagacctagacaagaagaaccacgtgaaagag

SEQ ID NO: 104385 - DNA, 222 bp, Glycine max
ctttcaacctaaaaagccagcaggccaggcagataaagaacaacaaccctttcaagttcctggttccacctcaggagtctcagaagagagctgtggcttagagccctttttgtatgtgctaccccacttttgtctttttggcaatagtgctagcaaccaataaataataataataataatgaataagaaaacaaaggctttagcttgccttttgttcactgt

SEQ ID NO: 104386 - DNA, 261 bp, Glycine max
ggaaatgacacctttccttatcctcgtagggggagaactggtagaaaaccaacaaggaaagatcctaatagtgagagtaggagcaatgatgtttatcttccaagagatgaggcttttggacacttgaagtcatctgactttcttacttatggactaaaatccgtatctcaaaatgttcttccattattgcaatctgcttttgatttgaatttcacaccccgtgagtttgatagctttgatggagttcatggactccattca

SEQ ID NO: 104387 - DNA, 241 bp, Glycine max
cttcatttgaacagtgctttccaaagagcaccacagaacacaggacagtcactcatgaagaaactggtcatgtgctcaaagttccctttcgtcgagttcacctgtctggggaagcaggacactttgatacctatgacactagcggtccccaaaatgtaaacccaaggacaggactcccaaaattgcgcggagggtgggttgatacgagggagaaacttggttatccaagagtcactcagat

SEQ ID NO: 104388 - DNA, 96 bp, Glycine max
ttcacaacaagtgtctccagagttgcagtagcgagagagactcgtgcaggaaccatgcatgccaggctcgttgcaaccttcttaaggtggagaaat

SEQ ID NO: 104389 - DNA, 260 bp, Glycine max
attggtccttaaacactcatcagtcatcaccatggccaagctagttttttccctttgttttctgcttttcagtagctgctgcttcgcgttcagttccagagagcagcctcagcaaaacgagtgccagatccaaaaactcaatgccctcaaaccggataaccgtatagagtcagaaggagggctcattgagacatggaaccctaacgacaagccattccagtgtgccggtgttgccctctctcgctgcaccctcaaccgca

SEQ ID NO: 104390 - DNA, 254 bp, Glycine max
caagggtttaacctttctggctgtgttaatatgcgtttcagcactgtcactgagtccttctgttgcgggggaagggcaaaataatggccttgttatgaacttctacaaggaatcatgccctcaggctgaagacatcatcacagaacaagtcaagcttctctacaagcgccacaagaacactgctttctcctggctcaggaacatcttccatgactgtgctgttcagagttgtgatgcttcactgttgctggact

SEQ ID NO: 104391 - DNA, 262 bp, Glycine max
ggagcatagagcctattgtagacttgttcgccgacgaggtagataccgaaggcgacgacggcgatgccaaggccaggggtggcgtggcggagctgattggtgagcatcggatgcttcctccatgcatcccttctcctgaagaactctccagtgtgttttccacttccagatcccattctattcttccctcccttccttcctcctcacccactcgctttgctttgcttttctttctttccttccacccttactgggctcccga

SEQ ID NO: 104392 - DNA, 264 bp, Glycine max
agcgcctccagatggcagcaccagcaagatatctgccgcaagcagctccagggggtgaacctcacgccctgcgagaagcacatcatggagaagatccaaggccgcggcgatgacgatgatgatgatgacgacgacaatcacattctcaggaccatgcggggaagaatcaactacataaggacgaacgaaggaaaagacgaagacgtagaagaagaaggacacatgcagaagtgctgcacagaaatgagccagctgagaagcccc

SEQ ID NO: 104393 - DNA, 103 bp, Glycine max
ctcgagccgttctgaggatcatttgtatgagtcgtgtaaaaaatatgtcagctattatggtggttaagacttaagaagcctgattatgttagggcaatacaat

SEQ ID NO: 104394 - DNA, 267 bp, Glycine max
agagagtgtgattgtggaaatctcaaagaaacaaattcgggaactaagcaaacatgccaaatctagttcaaggaaaaccatttcttctgaagataaacctttcaacttgagaagccgcgaccccatctattccaacaagcttggcaagttgtttgagattaccccagagaaaaaccctcagcttcgggacttggatgtcttcctcagtgttgtggatatgaacgagggagctctttttctgccacacttcaattcaaaggccatagt

SEQ ID NO: 104395 - DNA, 254 bp, Glycine max
agaaggtaatgctcttttgaagttgaggcagagaatagtgagtgacccttttgatgctttgtcaaattgggttgatgatgaggcttctgttgacccttgtaactggtttggagttgagtgctcagatggaagagttgtggtcttgaatttgaaggatctctgccttggaggaactctggcacctgagcttgtgaaacttgtcaacataaagtccattattttgcggaacaactctttctctgggaccatccctg

SEQ ID NO: 104396 - DNA, 256 bp, Glycine max
aatcaatcatccattcattattcatcatgtcgtcggcgaagaaaatcacgctgaagagttcggacggcgaggctttcgaggtggaggaggcggtggcgctggagtcgcagacgataaagcacatgatcgaggacgactgcgccgacagcggcatccctctgccgaacgtgacgagcaagatcctggcgaaggttatcgagtactgcaagaagcacgtcgaggccgcgaatcccgaagacaaaccctccgaggacga

SEQ ID NO: 104397 - DNA, 253 bp, Glycine max
gctcgagctgctcgagcggctcgagctctgtgtttgcggctgaggattccgaacgagcgaccttcttcgtttctcgcaaagtttaagtcatcatgggtaaggaaaagactcacatcaacattgtcgtcattggacatgtcgactctgggaagtcaactaccactggtcatttgatctacaagcttggaggtattgacaagcgtgtgattgagaggttcgagaaggaggctgctgagatgaacaaagagtcatc

SEQ ID NO: 104398 - DNA, 262 bp, Glycine max
tgagtctcaaagagaaccacgaagacataagaataagaacccttttcacttcaactctaaaaggttccaaactctcttcaaaaaccaatatggccacgttcgcgtcctccagaggttcaacaaacgctcccaacagcttcagaatctccgagactaccgcattttggagttcaactccaaacccaacacccttcttctcccccaccatgctgacgctgattacctcatcgttatccttaacgggactgccattcttaccttg

SEQ ID NO: 104399 - DNA, 255 bp, Glycine max
gagaaagggagagatttgatgagatagggaagaagatcaagagggaaggagatgtttcatctcaaatgggaagaagacacatgttaggccctccaggaaccctaaatactatcaccccttgtgcggcatgtaagttgttgagaagaagatgtgcccaagaatgtcccttttctccatatttctctccccatgagccccaaaaatttgcttctgtccacaaagtttttggtgccagcaacgtctcaaagatgctca

SEQ ID NO: 104400 - DNA, 252 bp, Glycine max
cgcacttgagttttataaataatgtccgtgattttagtatttttaccttctctttctctcctcttatcgaaagcttaatcacaaaactaaaatcacggacattatttataaaactcaagtgcgacaaactccaaatgagaaagaaaaagccggtgattttagttttgtgattaagctttcgataagaagtgagaaagagaaggaaaaaaaaagttgcttttgtttatgtacgtaccatgatttggaccttaa

SEQ ID NO: 104401 - DNA, 257 bp, Glycine max
ctctccattgtctttgaacactcatcaccatggccaagcttgttctttccctttgtttccttcttttcagtggctgcttcgctctgagagagcaggcacagcaaaatgagtgccagatccaaaagctgaatgccctcaaaccggataaccgtatagagtcggaaggagggttcattgagacctggaaccctaacaacaagccattccagtgtgccggtgtagccctctctcgatgaacccttaaccgatatgcgctt

SEQ ID NO: 104402 - DNA, 260 bp, Glycine max
accttaataaataatttaagatactatgatgagagcacggttcccattactgttgctgggacttgttttcctggcttcagtttctgtctcatttggcattgcttactgggaaaaagataaccccaaacacaacaagtgtctccagagttgcaatagcgagagagactcgtacaggaaccaagcatgccacgctcgttgcaacctccttaaggtggagaaagaagaatgtgaagtaggtgaaattccacgaccacgaccac

SEQ ID NO: 104403 - DNA, 261 bp, Glycine max
gtattcttccaccaagttatgggtttccttgtgttgcttcttttctccctcttaggtctctcttctagttccagcatatcaactcatcgttccatattggaccttgacctaaccaagtttaccacacagaaacaggtgtcttcactgttccaactatggaagagtgagcatggacgtgtctaccataaccacgaagaagaggcaaagagacttgagattttcaagaataacttgaactatatcagggacatgaatgcaaac

SEQ ID NO: 104404 - DNA, 198 bp, Glycine max
gaagaaagaggaggggaataagggaagaaagggtcctttgtcttcaattttgagggctttttactgaataagtatgtactaaaatgtatgctgtaatagctcatagtgagcgaggaaagtatcgggctatgtaactatgactagagcttcaactatgaataaataaatcgacagcatatgatgcttttgttttgtgtc

SEQ ID NO: 104405 - DNA, 262 bp, Glycine max
acggaagttcttatgttgagcctgctgcacaattctaatcttgtcaagttaattggctactgcactgatggagatcaaaggctttggtttatgagtacatgcccatgggttcacttgaagaccatctatttgatcttcacccagacaaagaaccactaagttggagtactcgaatgaagattgctgttggagctgctcgtggccttgaatatctccattgtaaagcagatccacctgttatctacagggacttgaaatctgc

SEQ ID NO: 104406 - DNA, 226 bp, Glycine max
tggattttgattctcgttatctgtgattgttgactcggcagatgcagatcttcgtcaagaacctcaccggcaagagcatcaccctatatgtggaaagctctgacaccatcgtcaacgtcaaggtcaagatccacgacaaggatggtatccccccggaccagcaatgtctcattttcgccggaaagctactttgcagaggtcgtacccttgctgagtataacattca

SEQ ID NO: 104407 - DNA, 251 bp, Glycine max
aagaaacatgagatgctactggctgaaattgaatacttccagaaaagggagattgaactggaaaatgaaaatctttgcctccgaactaagataactgacgtggagaggattcagcaagtaaacatggtttctgggccagaactgaatgccattcaggcattagcttcccgtaacttcttcaatccaaatatgttggaaggtggaactgtttaccctcactcagataagaagattcttcatcttgggtgatc

SEQ ID NO: 104408 - DNA, 245 bp, Glycine max
ggctcgaggtttttgaatctttcaagattgatccagaacccttcaaagtcctctcttctctctttcttacgatcgcttcgcctgatattctttttggctgagatcaagcaaaaatgagcgtggttggatttgattttggtaatgagagctgcattgttgctgtcgcaagacaaagggggattgacgttgtgctcaacgatgagtcaaagcgtgaaacacctgcaattgtatgctttggtgacaaa

SEQ ID NO: 104409 - DNA, 252 bp, Glycine max
gttcaatatcctagtacaccgtattaaagaatttaagatatactatgatgagagtgcggttcccattactgttgtttggagttgttttcctggcatcagtttctatctcatttggcattgcgtattgggaaaagcagaaccccagtcacaaaaagtgcctccgaagttgcaatagcgagaaagactcctacaggaaccaagcatgccacgctcgttgcaacctccttaaggtggaggaagaagaagaatgcg

SEQ ID NO: 104410 - DNA, 252 bp, Glycine max
gaaaatgaagaaggaacaatattcttgtgaccatccacctgcatcatgggattggaggaaaaaaggtgtcatcacccaagtaaagtaccaagggggctgtggaagcggttgggcgttttctgccacgggagccatagaagcagcacatgcaatagcaacaggagaccttgttagcctttctgaacaagaactcgtagactgtgtggaagaaagcgaaggttgttacaatggatggcactatcaatcgttcga

SEQ ID NO: 104411 - DNA, 249 bp, Glycine max
cttgttcaccaattaagctttcaagagacaaactgctttgaaaaatgggatccaaggttgttgcatccgttgcccttctcctctccatcaacattcttttcatttccatggttagctccagcagccactacgatccacagccccaaccttctcacgtcactgctcttattacacgacctagttgtccggatctgagtatttgcctcaatattttaggcgggtctctaggaaccgtggatgattgttgtg

SEQ ID NO: 104412 - DNA, 255 bp, Glycine max
ctttgttcactcttcttctcttgcggctagggttttagcgcacttgcttctagatttaaggaagatgggtaaggaaaaggttcacatcagtattgtggtcattggccatgtcgactctgggaaatccactaccactggtcacctgatttacaagcttggaggcattgacaagcgtgttattgagaggtttgagaaggaagctgctgagatgaacaagaggtctttcaagtatgcctgggtgctggacaaacttaa

SEQ ID NO: 104413 - DNA, 253 bp, Glycine max
caatcccacaaagtagaaaaagaggttatgttatggcgggcaaaggtgttagttcggtggctaaggcggtagcagaatatcagtatccttggcgtgagaagttggggaaatataaggatgagcttgccaagggtgtgtggggatactgggagctgggggcatggaagccgctgagtatcagtgctcggcatcgtgctagaattcgcaaggaagtcctccttgctggggaagattggccctacgatcctgaaag

SEQ ID NO: 104414 - DNA, 261 bp, Glycine max
tctcgagccgattcggctcgactcttctctctccacccaaacccagtctcccgaccctgttgtcctctcgtatccgtcatagtaggaggaaagtccaagaccgaatctaagagagccgatcccaaacttgctgtgaataagaagggagccgccaccaaggctaggaaacccgccggcaaggggaaggcagcgaaagaccctaacaagccaaagaggcctccatatgctttcttcgttttcatggaggagttcaggaaggta

SEQ ID NO: 104415 - DNA, 200 bp, Glycine max
tgaatatgctagtgtagcttattaactaatttccgatcatatgattagagcaccgttcccattactgttgctacagattgttgtcctggcttcagatgctgtctcacttggcattgctcactgggccaaagagaaccccaaacagaacaggagtctccagagttgcaatatcgagataggatcgtaccggcaacaagcat

SEQ ID NO: 104416 - DNA, 244 bp, Glycine max
ggcactatcaatcgttcgaatgggttttagaacatggtgggattgccactgatgatgattatccttacagagctaaagagggtagatgcaaagccaataagatacaagacaaggttacaattgacggatatgaaactctaataatgtcagatgagagtacagaatcagagacagagcaagcgttcttaagcgccatccttgagcaaccaattagtgtctccattgatgcaaaacttttcattat

SEQ ID NO: 104417 - DNA, 230 bp, Glycine max
ggaaccatcctgcgtagtgatctattggcaaattttttgacagagggcaattttagagcaagtgttgatttgcagcgcactcatcgtattaaaggaatgattaaaatggtagccacagttggtattcctgagaatacaggtatagcattggcctgtgctatgaatagttcttttagggggcgtgccagttctgatatttacaccatctgctctcaagactgtgaattatg

SEQ ID NO: 104418 - DNA, 254 bp, Glycine max
tgaacccattcctgaagctaacgatgaacctgttaaagtggtagttgggaacagtcttgaggacattgttttcaaatctgggaagaatgttctgctggagttttatgctccctggtgtggtcattgcaaacagttggctccaatattggacgaagttgctatctcatatcaaagtgatgctgatgttgttattgcaaaactggatggaactgccaacgatatcccaagtgaaacctttgatgtccaaagttatc

SEQ ID NO: 104419 - DNA, 251 bp, Glycine max
gttcaatatcctagtacaccgtattaaagaatttaagatatactatgatgagagcgcggttcccattactgttgcttggagttgtgttcctggcatcagtttctgtctcatttggcattgcgtattgggaaaatcagaaccccagtcataacaagtgcctccgaagttgcaatagcgagaaagactcctacaggaaccaagcatgctacgctcgttgcaacctccttaaggtggaggatgaagatgaatgc

SEQ ID NO: 104420 - DNA, 252 bp, Glycine max
taaacactcatcagtcatcaccatggccaagctagttttttccctttgttttctgcttttcagtggctgctgcttcgctttcagttccagagagcagcctcagcaaaacgagtgccagatccaaaaactcaatgccctcaaaccggataaccgtatagagtcagaaggagggctcattgagacatggaaccctaacaacaagccattccagtgtgccggtgttgccctctctcgctgcaccctcaaccgcaa

SEQ ID NO: 104421 - DNA, 249 bp, Glycine max
tctcgagccgattcggctcgaggatcaacaagatgctttcgtgtgatggagctgataggctccaaactggaatgagaggtgattttggaaagccacagggtacttgtgctagagtggctattggacaggtccttctttctgtccgctgcaaggacagcaacagccatcatgcccaggaggcccttcgccgtgccaagttcaagttccctggtcgtcaaaagattattgttagcaggaaatggggcttca

SEQ ID NO: 104422 - DNA, 254 bp, Glycine max
agagagcaggcacagcaaaatgagtgccagatccaaaagctgaatgccctcaaaccggataaccgtatagagtcggaaggtgggttcattgagacctggaaccctaacaacaagccattccagtgtgccggtgttgccctctctcgctgcacccttaaccgcaatgcccttcgtagaccttcctacaccaacggtccccaggaaatctacatacaacaaggtaatggtatttttggcatgatattcccgggttg

SEQ ID NO: 104423 - DNA, 258 bp, Glycine max
catggccaagctagttttttccctttgttttctgcttttcagtggctgctgcttcgctttcagttccagagagcagcctcagcaaaacgagtgcaagatctataacttcagagagggtgatttgatcgcagtgcctactggtgttgcatggtggatgtacaacaatgaagacactcctgttgttgccgtttctattattgacaccaacagcttggagaaccagctcgaccagatgcctaggagattctatcttgctgg

SEQ ID NO: 104424 - DNA, 268 bp, Glycine max
tgaaaaggaagatcgagaaaaacccaaaaagattgatgccagattgagacagagaatagatcctcaatacaatgaggttcaggctcagatggaaacagatttgtttaaattgtctacttaatgatgttgaaactcctaaaggttccatgtcggatcttaaaatttctcaatctaaaattgcacttcgcaaaaacacagttggaggaaccatcctgcgtgatgatctattggcaaattgtttgacagagggcaattttagagccagtgt

SEQ ID NO: 104425 - DNA, 279 bp, Glycine max
caggaacattttagaggcctcctacgataccaaattcgaggagataaacaaggttctgtttagtagagaggaagggcagcagcaaggggagcagaggctgcaagagagcgtgattgtggaaatctcgaaggaacagattcgggcactgagcaaacgtgccaaatctagttcaaggaaaaccatttcttctgaagataaaccttttaacttgagaagccgcgaccccatctactccaacaagcttggcaagttctttgagatcaccccagagaaaaaccc

SEQ ID NO: 104426 - DNA, 239 bp, Glycine max
tggcataatagagaaatcttttttgccctcaaagcattccgttgagatgtcttcagcggtttatacgaattaggttttcactgatcaagcactacctgcagatcttatcaagaagaggagtggcaattaaggatccatctgccccacatggccttcgacttctgatagaggactacccttatactgttaatcggctagagatattggctgcgattaagacatgggtccaagaatatgtg

SEQ ID NO: 104427 - DNA, 209 bp, Glycine max
tatagtacgacggcagatacaaattctggactacacacgagaaaaatctggctttgacagaagagggaaagatggaagtgattagagatagaggcattcctactgatcttcttacaaagcgagctcatgaatttcaaaaacatgttgctcatgaaagcgtcaaggagcaaattcgtgctgtcgaaaagttctattctactaaggtgaat

SEQ ID NO: 104428 - DNA, 258 bp, Glycine max
gaaggaacaatattcttgtgaccatccacctgcatcatgggattggaggaaaaaaacgtgtcatcacccaagtaaagtaccaagggggctgtggaagcggttgggcgttttctgccacgggagccatagaagcagcacatgcaatagcaacaggagaccttgttagcctttctgaacaagaactcgtagactgtgtggaagaaagcgaaggttgttacaatggatggcactatcaatcgttcgaatgggttttagaac

SEQ ID NO: 104429 - DNA, 263 bp, Glycine max
cgacgacaccgacctcgacttcgtcgacgacagcaatgtcagccctgctgaagaggaggaacccataaaatccgacattctcggcggcgagaatttcaatcgccgcagggaatttcgggtggtgctggacccgcgaggcaagtgggttcaagaatggaacagggtgttcctcctcgtgtgctgcaccgggttgttcgtggactcgctgttcttctacgcgctgtcgataagcgacaacgtgtatgtgcctcttcgtggatggg

SEQ ID NO: 104430 - DNA, 258 bp, Glycine max
ctcaaacctggggttgaatatgatgagagtgattttactaaaaatcagcgatatttgctggaaacttggtttcatgatcattatgttgtagaccaaacttttgagtcttatgctgatctgctggcacattgttggtactaagtgggagagacatgttaaggagcaagagtcaaatctgtctcaaataaagcgcaagataagtgaaagtggtcattggaataactgtgcacagcttatggatttggctgtctcagggat

SEQ ID NO: 104431 - DNA, 276 bp, Glycine max
tccgcatcctgatgatagagttgagtacgagctatggaccaatagcaacgatgagtgtgggccaaagtgtgacagtctaattaattttctgaaggagtttaaaggggtagctcagcagcttgagaagacatggttcactcaatttacccctcgctatataacttggttctgtcctgaagcatttctcttgagcagacagtgcaaatctcattgcataaacaatggactgtactgtgctcctgatcctgcagcaagatttcagtagagggtatgatg

SEQ ID NO: 104432 - DNA, 275 bp, Glycine max
cttattaacactttccttagttcaatatggggaagcccttcttcactctctctctttcttccctttgcttgctactcttgtcgagtgcatgctttgctattacctccagcaagttcaacgagtgccaactcaacaacctcaacgcgttggaacccgaccaccgcgttgagtccgaagtggtcttattgaaacatggaactctcaacaccctgagctgcaatgcgccggtgtcactgtttccaaacgcaccctcaaccggaacggcctccacttgc

SEQ ID NO: 104433 - DNA, 265 bp, Glycine max
ggtgatcatactagtcaaataaccaaagaacacctagagcccaacttagaagggctcactgtagatgaggcaattcaaaacaagagattgttcctactagatcatcatgacccaatcatgccatatttgaggcgaataaatgcaacctccacaaaggcttatgctaccagaaccatccttttcctgacaaatgacggaactttaaggccacttgccatagcattgagtttgccacatcctcagggagatcattctggggctttta

SEQ ID NO: 104434 - DNA, 255 bp, Glycine max
tgtcaatctcgtaaatgtgttacgagaactgtatttgcacagtccagaggaagctcgccaattgagaaggaaagctctctctcgtattgaatggctgcaaaaagctgatgtgcctaccatagcacagattgaagagttccattcgaggcagaggatgatgaatgctcctgattcaaatgataatattgatccactgttgagcattgatttgttgggtgtacagggagcaggaaaagcttttccaagcaggattgt

SEQ ID NO: 104435 - DNA, 240 bp, Glycine max
gtgaaggttctgagtctcaaagagaaccacgaagacataagaataagaacccttttcacttcaactctaaaaggttccaaactctcttcaaaaaccaatatggccacgttcgcgtcttccagaggttcaacaaacgctcccaacagcttcagaatctccgagactaccgcattttggagttcaactccaaacccaacacccttcttctcgcccaccatgctgacgctgttacctcatcgt

SEQ ID NO: 104436 - DNA, 257 bp, Glycine max
tgaccaagttcacaatcctcctcatctctcttctcttctgcatcgcccacacttgcagcgcctccaaatggcagcaccagcaagatagctgccgcaagcagctccagggggtgaacctcacgccctgcgagaagcacatcatggagaagatccaaggccgcggcgatgacgatgatgatgatgacgacgacaatcacattctcaggcacatgcggggaagaatcactacataaggaggacgaaggaaagacgagacg

SEQ ID NO: 104437 - DNA, 272 bp, Glycine max
ccattggtccttaaacactcatcagtcatcaccatggccaagctagttttttccctttgttttctgcttttcagtggctgctgcttcgctttcagttccagagagcagcctcagcaaaacgagtgccagatccaaaaactcaatgccctcaaaccggataaccgtatagagtcagaaggagggctcattgagacatggaaccctaacaacaagccattccagtgtgccggtgttgccctctctcgctgcaccctcaaccgcaacgcccttcg

SEQ ID NO: 104438 - DNA, 194 bp, Glycine max
cgaagacatgagaatgagaacccttttcacttcaactctagaaggttccagactctcttcaaaaaccaatatggccacgttcgcgtcctccagaggggcagcagacgctcccaacagcgtcagaatctccgagactaccgcagtttggagttcaactccaaacccgacacccttcttctgccccagcatgctga

SEQ ID NO: 104439 - DNA, 241 bp, Glycine max
ggaggggagaccatgaaactgttcttccaaatagtttgtggtcccacttgtacttcaaatcctttaaccacagtggaatggtacttggttttcacttctctatccattgtcctgtctcagcttccaaacctcaattcaactgtaggactctcactcatcggggcagttacagccataacttactcccccatggtttgggtagtctctgtaagccaacaaaggccaccctccatctattatg

SEQ ID NO: 104440 - DNA, 268 bp, Glycine max
cgctgatttcgtgctcgataatgaaggtaaccctcttgaaaatggtggcacatattatatcttgtcagacataacagcatttggtggaataagagcagccccaacgggaaatgaaagatgccctctcactgtggtgcaatctcgcaatgagctcgacaaagggattggaacaatcatctcgtccccatatcgaatccgttttatcgccgaagccatcctttgagccttaagttcgattcatttgcagttataatgctgtgtgttggaa

SEQ ID NO: 104441 - DNA, 182 bp, Glycine max
ctagtataccttaataaataatttaagatactatgatgagagcacggttcccattcatgttgctgggacttgttttcctggcttcagtttctgtctcatttggccttgcttactgggaaaaagagaaccccaaacacaacaagtctctccagagttgcaatagcgagagagactcgtacagg

SEQ ID NO: 104442 - DNA, 265 bp, Glycine max
cggaccttgggctgcgtcttcccggagttgctgtcccgcaacggggtgaagttcggagaagccgtgtggttcaaggccgggtcccagatcttcagcgagggtgggctcgactacttgggcaacccaagcctgatccacgcccagagcatcctcgccatctgggccacacaagttatcctaatgggtggcgttgaaggttaccgtattgctggtggcccctcggtgaggtcacctgacccatctacccagtggcagctcggaccat

SEQ ID NO: 104443 - DNA, 270 bp, Glycine max
cgaaaagaggattagagggtcgccacgtttagcaataaccaaaccctctctactcttttttcttctccttctcttcgctagggttttagcttcttcctcttcacttcgttctttttcgcctctacaatgagcaacgacaaggacacattcaacgtcgccgatctcacttctgctctcaacgaggacaatagagcagaccttgtcaatgctcttaagagcaagatacagagtttggctggacaacactcggatattctagagtctctgtcg

SEQ ID NO: 104444 - DNA, 263 bp, Glycine max
ctgcgaatggctcattaaatcagttatagtttgtttgatggtatctactactcggataaccgtagtaattctagagctaatacgtgcaacaaaccccgacttctggaagggatgcatttattagataaaaggtcaacacaggctctgcctgttgctttgatgattcatgataactcgtcggatcgcacggcctttgtgccggcgacgcatcattcaaatttctgccctatcaactttcgatggtaggatagtggcctaccatg

SEQ ID NO: 104445 - DNA, 240 bp, Glycine max
cacattccagatgcccatgtcatcatatctactccatttcaccccgcctatgtcaccgcggaaagaataaagaaagcgcaaaaattggagctgcttttgactgctggcattggttctgatcacgttgatctcaaagctgcagctgctgctggtttaactgtggcagaggtcacgggaagcaatgtcgcctcggttgcggaggatgaactcatgagaatcctcattctaatgaggaatttc

SEQ ID NO: 104446 - DNA, 267 bp, Glycine max
cctggtctctgtctactcttcaattattcccaacctctcacctcttcatcttcttcttccttacctttgaccagagacagagcagcactcacattcacaacgaaggtttcctattcatcagacatggtgaaggcaatcagagttcacgaactcggtggccctcaagttctgaagtgggaagatatggagattggagatccaatagaaggcgaggtccgtgtgaggaacagagccattgggggtaatttcattgatgtctactttcgc

SEQ ID NO: 104447 - DNA, 258 bp, Glycine max
gccgctcgccatccttgagcaaccaattagtgtctccattgatgcaaaagattttcatttatacaccgggggaatttatgatggagaaaactgtacaagtccgtatggcattaatcactttgttttacttgtgggttatggttcagcggatggtgtagattactggatagcgaagaattcatggggagaagattggggagaagatggttacatttggatccaaagaaacacgggtaatttattatgagtgtgtgggat

SEQ ID NO: 104448 - DNA, 273 bp, Glycine max
ggaggttcccaaagccagaaaggaaagcaacaagaagaagaaaacgaaggaagcaacatattgagtggcttcgcccctgaattcttgaaagaagcgttcggcgtgaacatgcagatagtgagaaacctacaaggtgagaacgaagaggaggatagtggagccattgtgacagtgaaaggaggtctaagagtcacagctccagccatgaggaagccacagcaagaagaagatgatgatgatgaggaagagagccacagtgcgtggagacagaca

SEQ ID NO: 104449 - DNA, 241 bp, Glycine max
cggacacgtcggcagcaagacctcttgtggttatggagtggccactggaggacctttggcctggggtctttgttacaatcatgaaatgagtcctatgcagtcatactgtgatgactacttcaaactcacatacccctgtactcctggtgctgactactatggacgtggagccattcccattttttggaactacaactatggtgctgtcggagaagctttgaagattgacctactaagccat

SEQ ID NO: 104450 - DNA, 270 bp, Glycine max
agcaagcagagcttttgtcaattttctattgaccttctcggtggaggaattttagtggacaaaactggagattggatcacacttatacaaaattctccaattagtaacttgttgagagttgctgcttggaagaaaggttgtttaatggtcaagattgtgatgtctgggaatgcagcagtcaaaaggagtgattgggcctcattggtacaagtgtttttaacaaacagcaccagtacagagcattttgatgcctgtaagtggacaaaatca

SEQ ID NO: 104451 - DNA, 233 bp, Glycine max
cggctcgagccagttgcttttgatgatctggatcttgctcttggcattctgtgttatgatgaacactatgactgcaggttttattgcaatgtatgccactcttgctagcagctacgtggactgctgcttgattccagagtggcgctgctacattggaggaaagggtgtacttattccattgatccacatactgctcaaatgcactgcctatatggtcatagtcatagcttagg

SEQ ID NO: 104452 - DNA, 269 bp, Glycine max
gttcaatatcctagtataccttaataaataatttaagatactatgatgagagcacggttcccattactgttgctgggacttgttttcctggcttcagtgtctgtctcatttggcattgcttactgggcaaaagagaaccccaaacacaacaagtgtctccagagttgcaatagcgagagagactcgtacaggaaccaagcatgccacgctcgttgcaacctccttaaggtggagaaagaagaatgtgaagaaggtgaaattccacgacc

SEQ ID NO: 104453 - DNA, 266 bp, Glycine max
ctcgagccgctagggaatgggaggagtttttgattggtaatgttgctgtcagcatatcacaacttgcaggtgttgctcgacgcccaaagtagaaagcccaacagatatgaagtgtcccaatacagatatcgcaatgtgccaatagagcgcagagcatgggttgaaggccagatgtctttcgatcagtctgtagtagcaattatgtctagatgcaaagccagcatgagaatcgtgaacactgatgctcaaattttgaaggttccagg

SEQ ID NO: 104454 - DNA, 269 bp, Glycine max
cttaattattaacacttccttagttcaatatggggaagcccttcactctctctctttcttccctttgcttgctactcgtgtcgagtgcatgctttgctattagctccagcaagctcaacgagtgccaactcaacaacctcaacgcgttggaacccgaccaccgcgttgagtccgaaggtggtttgattgcagcatggaactctcaacaccctgagctgaaatgcgccggtgtcactgtttccagactcaccctcagccgcaatggcctc

SEQ ID NO: 104455 - DNA, 93 bp, Glycine max
ctttgacacagggtctagcaaaggaaacaacaatgggaggtagacgtcgtgtggccaaagtggaagttcaagggaagaagcctctctcaaggg

SEQ ID NO: 104456 - DNA, 91 bp, Glycine max
cttgatgatgttgaaactcctaaaggttccatgttggatcttaaaatttctcaatctaaaattgcacttcccaaaaacacagttggaggaa

SEQ ID NO: 104457 - DNA, 269 bp, Glycine max
tttggtcgattttcttcaagtgtgaaaggctttcggaatatagacttgtttgtccagcacaacgatgggaaaaagatcatagatcctgaaagccagaaaaccttgtgttcatgcttaaaagaagagatgcttcatccgttgcgggtgacgatagtgaaccggggtccagacacagaacttctgggttgctaatcctgtggagctgagtggacaggggagaccccgtgtattctatgatgttacgtggactttaaaagcgttgggagtag

SEQ ID NO: 104458 - DNA, 98 bp, Glycine max
ggcttccttaagctcctcattagtgctgctccttgcagctctaattctatcccctcaagttcatgctgactatgagaagcccccaatttacaagccac

SEQ ID NO: 104459 - DNA, 93 bp, Glycine max
tacaaggtgagaacgaagaggaggatagtggagccattgtgacagtgaaaggaggtctaagcttcacagctccagccatgaggaagccacatc

SEQ ID NO: 104460 - DNA, 232 bp, Glycine max
gatcttgagaaaagtgttcctacattggttggcattgaatgtcccaagggtgagaaacttcctcgtcggaaaatttttgacaaacctaagacgcagtggttgactattctccctatgtggtttgatcttgtggttcgtcgaagattttacattttgtgaggttcagtatgaggatagggggctagcttaactgtcacggtgggatcaccccgtactccatggaattgactgg

SEQ ID NO: 104461 - DNA, 244 bp, Glycine max
cggctcgagtctccattgtctttgaacactcatcaccatggccaagcttgttctttccctttgattccttcttttcagtggctgcttcgctctgagagagcaggcacagcaaaatgagtgccagatccaaaagctgaatgccctcaaaccggataaccgtatagagtcggaaggtgggttcattgagacctggaaccctaacaacaagccattccagtgtgccggtgtggccctctctcgctgc

SEQ ID NO: 104462 - DNA, 197 bp, Glycine max
cgcgttggaacccggccaccgcgttgagtccgaaggtggtttgattcaaacatggaactctcaacaccctgagctgaaatgcgccggtgtcactgtttccaaactcaccctcaaccgcaatggcctccacttgccatcttactcaccttatccccggatgatcatcatctcccaagggaaaggagcacttggagttg

SEQ ID NO: 104463 - DNA, 267 bp, Glycine max
  unsure (1)..(267): unsure at all n locations
tgaggaaggagctcataacgcacacgaataacatcatcacgaggatgataatggggaagaagagtaatgcggaaaacgatgaggtggccaggttgaggaaggtggtgagggaggtcggggagttgcttggggcgtttaacttgggggatgttattgggttcatgaggcctttggatctgcaagggtttgggaagaagaacatgganactcaccacaaggtggatgcgatgatggagaaggtgttgagggagcatgaggaggctaggg

SEQ ID NO: 104464 - DNA, 266 bp, Glycine max
gtctttgaacactcatcaccatggccaagcttgttctttccctttgtttccttcttttcagtggctgcttcgctctgagagagcaggcacagcaaaatgagtgccagatccaaaagctgaatgccctcaaaccggataaccgtatagagtcggaaggtgggttcattgagacctggaaccctaacaacaagccattccagtgtgccggtgttgccctctctcgctgcacccttaaccgcaatgcccttcgtagaccttcctacacc

SEQ ID NO: 104465 - DNA, 267 bp, Glycine max
aattgattggtttatttcctctcaggaatgtgttcccaggacctattgtgttttaaatccacaaaatccttttgtgttaaataggtggatggggaaactgacttttccccagggcacttcccgaagtgttaaaagaatgcctctttctatagggggaggagctggtgcaaagaatgctattctcatgaatatgccaaatgctgttctttcaatgtggagatattttgttggagatctcgtctttgaagtttctaagatgacttctcc

SEQ ID NO: 104466 - DNA, 267 bp, Glycine max
aaggcactggagacagaggttatgaagattgatcctccaccaagaccgccaaattggggtgagctagaccttccattgaatgcatcatcttggagtgaggaggatctccaagatccagataagttctatgaaatgactgttcttcttaatgcccaaagagaaatctctgataagatcttggatgcacagtgggaaactaaatggcgtcaggacaagttgaatgagatgttggaggcaaaagtgaagccgtacatccaggatatagac

SEQ ID NO: 104467 - DNA, 267 bp, Glycine max
agacaaaagataagaagatgggtttgaagaacaacatggtggtgctaaaggtgtgtttggtgctacttttccttgtggggggtactactagtgccaacttgaggctgagtaagcttggcctgctcatgacaagtgatcatcatcaacactcaaatgatgatgagtcttcaaaaccatgctgtgatcaatgcgcatgcacaaagtcaaaccctcctcaatgccgctgttcagatatgaggctgaattcgtgccattcagcttgcaaat

SEQ ID NO: 104468 - DNA, 268 bp, Glycine max
cgaaaatctcagattaataacactcgccatacccgttaacaagcctggtagatttgagagtttcttcctatctagcactgaagctcaacaatcctacttgcaaggattcagcaggaacattttagaggcctcctacgataccaaattcgaggagataaacaaggttctgtttagtagagaggaagggcagcagcaaggggagcagaggctgcaagagagcgtgattgtggaaatctcgaaggaacagattcgggcactgagcaaacgt

SEQ ID NO: 104469 - DNA, 90 bp, Glycine max
ctccattgtctttgaacactcatcaccatggccaagcttgttctttccctttgtttccttcttttcagtggctgcttcgctctgagagag

SEQ ID NO: 104470 - DNA, 279 bp, Glycine max
ctcatattcattgcatttttggatggactattcgttgagagagctagaaggaaagcaagcacatgactctctattcctagagaaaatgaagagtttcattatcacagacgtattactaactagtgagagaatgtgtgtgggtggccagggccattggatttggggagaagggctttcagggccttgcaacagcagcatatctcaaagagaaaggattgccaagcctaatcttggaaagatccaactgcatagcatccttgtggcaactcaagacctatg

SEQ ID NO: 104471 - DNA, 104 bp, Glycine max
aaaggtttcttcctgagaaaggcaccccaggagtatgaagaaatggtgaaaagtcatcgaaaggcttatttgaggaactattgacatcaaagtttcaaactcta

SEQ ID NO: 104472 - DNA, 257 bp, Glycine max
aaaatttcaaccacagtgaaggctacatctcgtgttgacaagttttcaaaaagcgatatcattgtctctccatccattctttctgcaaactttgcaagattgggacaacaggtgaaagcactgcagttggctggttgtgattggcttcacgttgatgtaatggatggccgttttgttccaaatattacaattggacctcttgtcggctgatgcattgcgccctgtgacagatcttcctttggatgtacacctgatga

SEQ ID NO: 104473 - DNA, 259 bp, Glycine max
gtctttgaacactcatcaccatggccaagcttgttctttccccttgtttccttcttttcagtggctgcttcgctctgagagagcaggcacagcaaaatgcgtgccagatccaaaagctgaatgccctcaaaccggataaccgtatagagtcggacggtgggttcattgagacctggaaccctaacaacaagcaattccagtgtgccggtgttgccctctctcgctgcacccttaaccgcaatgcccttcgtagaccttc

SEQ ID NO: 104474 - DNA, 257 bp, Glycine max
taaacactcatcagtcatcaccatggccaagctagttttttccctttgttttctgcttttcagtggctgctagttcgctttcagttccagagagcagcctcagcacaacgagtgccagatccaaaaactcaatgccctcaaaccggataaccgtatagagtcagaaggagggctcattgagacatggaacctaacaacaagccattccagtgtgccggtgttgccctctctcgctgaaccttcaacgcaacgccttc

SEQ ID NO: 104475 - DNA, 263 bp, Glycine max
gaagcagcagctacaggacagtcaccagaagattcgtcacttcaatgaaggagacgtactcgtgattcctcctggtgttccttactggacctataacactggcgatgaaccagttgttgccatcagtcttcttgacacctctaacttcaataaccagcttgatcaaacccctatggtattttaccttgctgggaacccagatatagagtacccagagaccatgcaccaacaacaacagcagaaaagtcatggtggacgcaagc

SEQ ID NO: 104476 - DNA, 261 bp, Glycine max
caaaaatatgccactcccatgatgcccctagatgaagaaattctttccaaggttgcgcaagatatggttgaggaatggtttgattgtgttgatgaggaggattcctttgaggaagtttctttaagtgcagaactcaatggtgttgagggtttggactacatggaaagaattcctcttgcaacatctgagggttttcctcaggtgctttcacgcaaaaatggtgaaaaaggtaagaggagattcgtatctggggatggtgaa

SEQ ID NO: 104477 - DNA, 260 bp, Glycine max
cggctcgagtggggaagcccttcactctctctctttcttccctttgcttgctactcttgtcgagtgcatgctttgctattagctccagcaagctcaacgagtgccaactcaacaacctcaaggcgttggaaacccgccaaccgcgttgagtccgaaggtggtttgattcaaacatggaactctcaacaccctgagttgaaatgcgccggggtcactgtttccaaactcaccctcaaccgcaatggcctccacttgccatc

SEQ ID NO: 104478 - DNA, 262 bp, Glycine max
cagatagcgaaaaacctacaaggagagaacgaaggggaagacaatggagccattgtgacagtgaaaggaggtctgagcgtggtaaaaccacccacggacgagcagcaacaaagaccccaggaagaggaagaagaagaagaggatgagaagccacagtgcaagggtaaagacaaacactgccaacgcccccgaggaagccaaagcaaaagcagaagaaatggcattgacgagaccatatgcaccatgagacttcgccacaaca

SEQ ID NO: 104479 - DNA, 248 bp, Glycine max
gcaaaggattctacccgccgctcgatgggaattgcgcttcaaggcgtctcgtagggctaatccgcctcacgagggtcaccaacggcacgtgcctttggtgggccgaggcccctactgctggtcggcaaacggacggcgggctgacgcgtcgcttctagcccggattctgacttagaggcgttcagtcataatccaacgcacggtagcttcgcgccactggcctttcaaccaagcgcgatgaccaattg

SEQ ID NO: 104480 - DNA, 105 bp, Glycine max
ctcgagccgatgaggatgaggatgaggaacaagatgaacgtcaattcccattcccacgaccacctcatcatgaggaatagcgaaagcaagaggaagatgaggatg

SEQ ID NO: 104481 - DNA, 256 bp, Glycine max
ctagttcaatatcctagtataccttaataaataatttaagatactatgatgagagcacggttcccattactgttgctgggacttgttttcctggcttcagtttctgtctcatttggcattgcttactgggaaaaagagaaccccaaacacaacaagtgtctccagagttgcaatagcgagagagactcgtacaggaaccaagcatggccacgctcgttgcaacctccttaaggtggagaaagaagaatgtgaagaa

SEQ ID NO: 104482 - DNA, 255 bp, Glycine max
gaactaatggagtctaaaggtgggaaaaagaagtctagtagtagtagtagtaaatcattgttctacgaagctcccctcggatacagcattgaagacgttagaccaaacggtggaatcaagaaattcagatctgctgcttactccaactgcgctcgcaaaccttcctggatatccatccagattgatagttcattacatgcaaccatagttttattaggttttttctactttggtttcaattaggtttttgctgct

SEQ ID NO: 104483 - DNA, 257 bp, Glycine max
gcttcgctctgagagagcaggcacagcaaaatgagtgccagatccaaaagctgaatgccctcaaaccggataaccgtatagagtcggaaggtgggttcattgagacctggaaccctaacaacaagccattccagtgtgccggtgttgccctctctcgctggacccttaaccggaatgcccttcgtagaccttcctacaccaacggtcccatggaaatctacatacaacaaggtaatggtatttttggcatgatattc

SEQ ID NO: 104484 - DNA, 267 bp, Glycine max
aaacaacttttcacacatgaccatgctacctcattcattaactatgattgcaacactaataatcatttttcttgcacaaacacttgtgggggtgagttcacttcctgaagctgataaaataaccaatttgccggggaagccacgggtcgaatttcagcaatattctggtaatgtcaccgtggatgatcaaaatcaaagagctttgttttactaactttgttgaggctgaagaaaacccttcttccaagccattagtcctatggttga

SEQ ID NO: 104485 - DNA, 264 bp, Glycine max
cttgcgaaaccgagagagcgaaggggcaaacacaattttttttactcttcttttttattttttgtagagagagagagagagaaaatgttggggatcttcagcagttcagtggtgtcgccgccggaggagctggtggtcgctggcagcagaacgccgtcgccgaagacgacggcgggggaagctgctgaaccggttcgtggagagcaaggcgtcggcggtgtcgctgcaggtgggggaacacgtgcagttggcttacacacacca

SEQ ID NO: 104486 - DNA, 252 bp, Glycine max
ctcgagcgtgaagcagaaaaaagtgacattgctactgaatttagggatgatgagcaaaaattgtctttcattgatgaagattagatagagaagcatgatgaacttcttgcccttccagctcatggttctgaagtctttattggtggatatcctcgggatgtatgtgaagatgatttaagggaattgtgcgagcccatgggtgatattcttgaggtgcgattaatgaaagacagggacactggagaaaacaag

SEQ ID NO: 104487 - DNA, 248 bp, Glycine max
gttcaatatcctagtacaccgtattaaagaatttaagatatactatgatgagagcgcggttcccattactgttgctgtcagttgttttcctggcatcagtttctgtctcatttggcattgcgtattgggacaagcagaaccccagtcacaacaagtggcctccgaagttgcaatagcgagaaagactcctacaggaaccaagcatgccacgctcgttgcaacctccttaaggtggaggaagaagaaga

SEQ ID NO: 104488 - DNA, 248 bp, Glycine max
atttgatcgcagtgcctactggtgttgcatggtgcatgtacaacaatgaatacactcctgttgtacccgtttctattatggacaccaacagcttgcagaaccagctcgaccagatgcctaggagactctatcttggtgggaaccaatagcaatagtttctataatatcagcacgagcaatgaggtcatcaaagccagacaggaaagcatcagctagaagaagacaacgaaggaggcagcatattgagt

SEQ ID NO: 104489 - DNA, 254 bp, Glycine max
tggccacgttcgcgtcctccagaggttcaacaaacgctcccaacagcatcagaatctccgagactaccgcattttggagttcaactccaaacccaacacccttcttctcccccaccatgctgacgctgattacctcatcgttatccttaacgggactgccattcttaccttggtgaacaacgacgaccgagactcttacaaccttcaatctggcgatgccctaagagtccctgcaggaaccacatactatgtgg

SEQ ID NO: 104490 - DNA, 252 bp, Glycine max
actagttcaatatcctagtataccttaataaataatttaagatactatgatgagagcacggttcccattactgttgctgggacttgtattcctggcttcagtttctgtctcatttggcattgcttactggggaaaatcagaaccccaaacacaacaagtgtctccagagttgcattagcgagagagactcgtacaaggaacaagcatgccacgctcgttggaaacctccttaatgtggagaagaagaatgtg

SEQ ID NO: 104491 - DNA, 264 bp, Glycine max
gtccttaaacactcatcagtcatcaccatggccaagctagttttttccctgtgttttctgcttttcaatggctgctgcttcgcttcagttccagagagcagcctcagcaaaacgagtgccagatccaaaaactcaatgccctcaaaccggataaccgtatagagtcagaaggagggctcattgagacatggaaccctaacagcaagccattccaatgtgccggtgttgccttctctggctgaacctgaaaccgcaacgcccttg

SEQ ID NO: 104492 - DNA, 258 bp, Glycine max
gaactaatggagtctaaaggtgggaaaaagaagtctagtagtagtagtagtaaatcattgttctacgaagctcccctcggatacagcattgaagacgttagaccaaacggtggaatcaagaaattcagatctgctgcttactccaactgcgctcgcaaaccttcctgatatccatccagattgatagttcattgcatgcaaccatagttttattaggtttttacttctttgttttcaattaggtttttgctgctctcc

SEQ ID NO: 104493 - DNA, 85 bp, Glycine max
tcggggcgaacaggaggaaactctggtggaggcccgcagcgatactgacgtgcaaatcgttcgtctgacttgggtataagggcga

SEQ ID NO: 104494 - DNA, 256 bp, Glycine max
cgccaacgtgccggggcaaaaggaaaccaaagttaaggtccctctggctttgtttggaggttcaggaaactatgcctctgctttgtatattgcatctgtgaaagccaatgcagtggaaaaggttgagactgagcttctgcaatttgttgaggcagtaaagaatagtcccatattttcacagtttataagggacttgtctgtggctaaggatgttagagtgaaagttatccaggatatttgtggggaagccaagttt

SEQ ID NO: 104495 - DNA, 256 bp, Glycine max
cgcttgtgctgccttcgtttgcgtttttatcacagaggaattaacatatatatagcaagcatggcagtcacactctacgaccttagctcttcctctgggttgaagaaacttgatgagtaccttctcccacgcagttacatcaccgggtaccaagctacaaaggatgatcttactgtttatggcagctttgccaactgctccatcagatgaatatggaaatgtttccaggtggtacaagcacattgatgctttgttg

SEQ ID NO: 104496 - DNA, 254 bp, Glycine max
caagaataacttgaactatatcagggacatgaatgcaaacagaaaatcaccccattctcatcgtttaggattgaacaagtttgctgacatcactcctcaagagttcagcaaaaagtacttgcaagctcccaaggatgtgtcgcagcaaatcaaaatggccaacaagagaatgaagaaggaacaatattcttgtgaccatccacctgcatcatgggattggaggaaaaaaggtgtcatcacccaagtaaagtacc

SEQ ID NO: 104497 - DNA, 251 bp, Glycine max
gaccaaacagcatccgcggcagcgacggtaaccctccaacaacaacacttccgctgcgaaaaatgtctctggtggcgaacgaggatttccagcacattctgcgtgtgctgaacaccaacgtggatgggaagcagaagataatgttcgcaatgacctccatcaagggtattggaaggagattcgccaacatcgcttgcaagaaggctgatgttgacatgaacaaaagggctggtgagttgactgctgctgag

SEQ ID NO: 104498 - DNA, 259 bp, Glycine max
aattcttggcagagattctatcttgctgggaaccaagagcaagagtttctaaaatatcagcagcagcagcaaggaggttcccaaagccagaaaggaaagcaacaagaagaagaaaacgaaggaagcaacatattgagtggcttcgcccctgaattcttgaaagaagcgttcggcgtgaacatgcagatagtgagaaacctacaaggtgagaacgaagaggaggatagtggagccattgtgacagtgacaggaggtctaa

SEQ ID NO: 104499 - DNA, 262 bp, Glycine max
cagcaacaaagaccccaggaagaggaagaagaagaagaggatgagaagccacagtgcaagggtaaagacaaacactgccaacgcccccgaggaagccacagcaaaagcagaagaaatggcattgacgagaccatatgcaccatgagacttcgccacaacattggccagacttcatcacctgacatctacaaccctcaagccggtagcgtcacaaccgccaccagccttgacttcccagccctctcgtggctcagactcagtg

SEQ ID NO: 104500 - DNA, 257 bp, Glycine max
agccacagttggtattcctgagaatacaggtatagcattggcctgtgctatgaatagttcctttagggggcgtgccaattctgatatttacaccatctgctctcaagactgtgaattatggaatcctgcttgcacaaaagcaatgactatgtcatttaatccaaacccgtgttctgatgcatggagtttggaatttctgaagcgtaccggatttcattgtgatatcatttgtgtcactggatggactgccactccaa

SEQ ID NO: 104501 - DNA, 254 bp, Glycine max
ggcaagtgttcccgccatgggaatggagcgagtgcagtgtgcctatgcctctctggacgaagcgttcgaaatagggaaagagacgtatcagggtcagcattacagccagatttacttcgcgcgccttcatttgatgcgaacactcttgtattccctcattcctcattggaaacccaattctcccgtgtgcacggtgctgggattggaagagggcaaggagtgtgtcatggttggaaccctctataaacacatga

SEQ ID NO: 104502 - DNA, 253 bp, Glycine max
aactgccccaagattcatcaagtgcgtgaccgttggtgatggagctgtagggaagacctgcatgctcatttgctataccagcaacaaattccccacggactatatccccactgtgtttgataatttcagtgcaaatgtggttgttgaaggcataactgtcaacttaggcctttgggatacagctgggcaagaggattacaacaggctgaggcccttgagctacaggggggcagatgtctttgtcttggctttt

SEQ ID NO: 104503 - DNA, 253 bp, Glycine max
tctcgagccgattcggctcgaggaagaaccacgtgaaagaggatgcaagaaacggggttgagcgaaaatatctgcaccttgaagcttcacgagaacattgctcgcccttcacgcgctgacttctacaaccctaaagctggtcgcattagtaccctcaacagcctcaccctcccagccctccgccaattccaactcagtgcccaatatgttgtcctctacaagaatggaatttactctccacattggaatctga

SEQ ID NO: 104504 - DNA, 248 bp, Glycine max
aacaggcatctcagtgttgttcaccctatttataaactccttcaccctcactatcgtgacaccatgaacataaatggccttgctcggttatcactggtcaacgacggtggcgttatagaacaaacatttttgtggggaaggtattctgtggaaatgtctgctgtagtttacaaggattgggtttttacagatcaagcattgcctgctgatcttataaaaagaggaatggcaattgaggatccatcgtg

SEQ ID NO: 104505 - DNA, 247 bp, Glycine max
cggctcgaggctaagattcaagacaaggaagggatcccacctgaccagcagagacttatctttgcgggtaaacaacttgaggatggtcgcacccttgccgattacaacatccaaaaggaatcaaccctccatctcgtgcttcgcctcaggggtggcatgcaaatctttgtcaagactttgaccgggaagaccatcacccttgaggtggaatcctcggacaccattgataatgttaaggccaagatcc

SEQ ID NO: 104506 - DNA, 250 bp, Glycine max
atggtattgacaaaactagtgcaactttgcaatttagaaagttagcagattgtgattttctcaagagaaactttaagcagatgtctaatgttttatgggtggctcctgaggacaaggcgagtttatggtcacaacttcattatgtttcgtgcaataatctggaaatgcaagaagcttatcttgtcaatctcgtaaatgtgttacgagaattgtatttgcacagtccagaggaagctcgccaattgagaag

SEQ ID NO: 104507 - DNA, 252 bp, Glycine max
gctttctcttccttcataatttctcacctttcaaatctccattcagcttcattttctgcatagaaaaaacccttttctggagaaagaatatagtcttcagctggacaaggatcattcatcttgaaagaagagtttgtgtgtgacaatctttatagttctaaggagggtgcaagagagaactgaatttgctgtgatggcaactcgtagatatgcttttggaagagctgatgaggccactcatccagactccat

SEQ ID NO: 104508 - DNA, 92 bp, Glycine max
aaacactcatcagtcgtcagcatgggcaagctagtgttttccctttgtgtgctgcagttcagtggctgctgcttcgcgttcagttccagaga

SEQ ID NO: 104509 - DNA, 258 bp, Glycine max
taagaaagtcttccatagccccccaaaaatgaagagcaccatcttctttgctctctttctcttttgtggcttcaccagctcatacctaccttcagccatcgctgatttcgtgctcgataatgaaggtaaccctcttgaaaatggtggcacatattatatcttgtcagacataacagcatttggtggaataagagcagccccaacgggaaatgaaagatgccctctcactgtggtgcaatctcgcaatgagctcgacaa

SEQ ID NO: 104510 - DNA, 99 bp, Glycine max
ttggcattaaagaacaacaacagaggcagcaacaggaagagcaacctttggaagtgcggaaatatagagctgaattgtctgaacaagatatatttgtaa

SEQ ID NO: 104511 - DNA, 257 bp, Glycine max
gtataccttaataaataatttaagatactatgatgagagcacggttcccattactgttgctgggacttgttttcctggcttcagtatctgtctcatttggcattgcttactgtggaaaaagagaaccccaaacacaacaagtgtctccagagttgcaatagcgagagagactcgtacaggaaccaagcatgccacgctcgttgcaacctccttaaggtggagaaagaagaatgtgaagaaggtgaaactccacgacc

SEQ ID NO: 104512 - DNA, 252 bp, Glycine max
gagaaccccaaacacaacaagtgtctccagagttgcaatagcgagagatgctcggtacaggaaccaagcatgccacgctcgttgcaaactccttgaggtggagaaagaggaatgtgaaggaggtgaaattccacgacgacgaccacgaacacaacacgcggagagtggacctcagaatctcggtgagaaggaggaagacgatgatgaggcaccacgtccaatcccattcccatgcccacaacctcgtcaaga

SEQ ID NO: 104513 - DNA, 243 bp, Glycine max
ctcgagccgttttgttggagatctcgtctttgaagtttctaagatgacttctccctacattaaatgtacagtctctttcttcatagcatttggaaatttggctgatgacaccatcaattttgaggcttatccccacaagctggtgcagtttggagagattcaggaaaaagttgtgttgaaattttcacaagaggaatttcttacagcttggtcaactcaggtgcgtcccgcaacgactctgtt

SEQ ID NO: 104514 - DNA, 242 bp, Glycine max
aatgcatgtcatccaggacatgcttgttcctttgtacaaggtgggagaggctttagaatgggttcaccgtgagatggaggtataccccatttggctctgcccacacaaattgttcaagctgcctgtcaaaactatgatttacccagagccagggttcgaactacatcgcaggcaaggagacacacaaactgctcaaatgtacacagatgttggagtttactatgcaccaggtcctgttttta

SEQ ID NO: 104515 - DNA, 250 bp, Glycine max
gtgaattaaaaacccaagggaggttcatggccaaaggtaaagatatccgagtaattgttattttggaatgtaccggttgtgataaaaagagtgttaataatgaatcaacgggtatttctagatatataactaaaaagaatcgacagaatacgcctagtcgattggaattgagaaaattttgtccccgttgttgcaaacatacaattcacgcagaaataaagaaatagatcaaattgatcgcttgtgtgtt

SEQ ID NO: 104516 - DNA, 247 bp, Glycine max
tggaggtgctgatgagcagttggagaagattatgaagactgataggtttaagcccgataaagggtttgctggggcttctgagagggctggtccgagggataggccggtcgagtttgagaatgaagaggctgatccgtttggtttggatcagttcttgactgaggtgaagaagggtaagaaggccatggagaaagtgggtggtggagggactatgagggcaagtgctggatcatctatgcgggatggt

SEQ ID NO: 104517 - DNA, 258 bp, Glycine max
ctgggaatgcagcagtcaaaaggagtgattgggcctcattggtacaagtgtttttaacaaacagcaacagtacagagcattttgatgcatgcaagtggacaaaatcggaaccacattcctgggaattgatcttcccaatagaggtatgtggtcctaacaatggttttgaaatgtggagtttctgagtgggcaaatcaaacttcatggcatttgagtttccttattgacaatcccaaacagtctacagttcttgatatt

SEQ ID NO: 104518 - DNA, 229 bp, Glycine max
attcaaaggcgatagtgatactggtaattaatgaaggagatgcaaacattgaacttgttggcctaaaagaacaacaacaggagcagcaacaggaagagcaacctttggaagtgcgggaatatagagccgaattgtctcgaacaagatatatttgtaatcccagcaggttatccagttgtggtcaacgctacctcaaatctgaatttctttgctattggtataaatgccg

SEQ ID NO: 104519 - DNA, 247 bp, Glycine max
gtagaagaagataagttggatgcttgctacatcactacttgcaaaagccaaggaaaagggggtgtctctcttgttaccaagtgatgtggtgattgcagacaaatttgctcctgatgctaatagcaaggtcgtgccagcatctgccatccctgatggctggatgggattggatattggtccagattctgttaaatcattcagtgaagcattggatactacgcaaaccatcatatggaatggaccaatg

SEQ ID NO: 104520 - DNA, 183 bp, Glycine max
ctgttggcttgacatcaagttacactccaactccattgttggaatctggtttgcagaaagacagagggttaattgtggagtattttggaaggatgtctttacgttgcgcataacgttaatcagccccaagagaaagatttgttagagggaaatttttcctttgatattaaatcccgctctaga

SEQ ID NO: 104521 - DNA, 253 bp, Glycine max
gcataatagagaaatcttttttgccctcaaagcattccgttgagatggtcttcagcggtttataagaattgggttttcactgatcaagcactacctgcagatcttatcaagagaggagtggcaattaaggatccatctgctccacatggacttcgacttctgatagaggactacccttatgctgttgatgggctagagatatgggctgcaattaagacatgggtccaagaatatgtgtccttgtactatgcaa

SEQ ID NO: 104522 - DNA, 182 bp, Glycine max
tggacttcgacttctgatagaggactacccttatgctgttgatgggctagagatatgggctgcaattaagacatgggtccaagaatgtgtccttgtactatgcaagagatgatgatgtcaaacctgattctgaactccaacagtggttggaaaagaaagctggtaagaggagaggggtcatg

SEQ ID NO: 104523 - DNA, 204 bp, Glycine max
attcaggaaaaagttgtattgaaattttcacaagaggaatttcttacagcttggtcaactcaggtgcgtcctgcaacaaccctgttggctgatgggtgtccatatttgtatgctatggtgcatgacatttcagtgtctacaataccaggtgattttgttattggtgttaagttgacaaccataaaccatatgtgtgcatatggg

SEQ ID NO: 104524 - DNA, 233 bp, Glycine max
cgaagagaatggctcccaagggtttaatctttttggctgtgttatgcttctcagcactgtcactgagtcgttgtcttgcggaggataatggacttgttatggacttctacaaggaatcatgccctcaggctgaagacatcatcaaagaacaagtcaagcttctctacaagcgccacaagaacactggctttctcctggctcagaaacatcttccatgactgtgctgttcagag

SEQ ID NO: 104525 - DNA, 246 bp, Glycine max
tcggagctgtctgtgcaaatttgcgttgttcttcgcggcacacctcactcactgaacggtaagtatggcggacaaggctgttacaatccgaacccgaaagttcatgaccaacaggcttctttccaggaagcagtttgtcgttgatgtccttcatccagggagggcaaatgtttccaaggctgaacttaaggagaagctggctaggatgtatgaagtgaaaaccctaatactgtatttgtcttcaaa

SEQ ID NO: 104526 - DNA, 250 bp, Glycine max
aggtgctgagcgaggagctgaaaacaggctgtcacagagtgtggatactgagggttccagcgacggaagtgatggcaacactgcaggggctaatcaaacaaaaaggaaaagaagccgagaaggaacaccgatcactgatgcagaagggaaaactgagctacaaaatggtccggcttccagagagactgcatcttccaaaaagattgtgtcagctaccccagctagtgttgcaggaacattagttggacct

SEQ ID NO: 104527 - DNA, 192 bp, Glycine max
agacactcctgttgttgccgtttctattattgacaccaacagcttggagaaccagctcgaccagatgcctaggagattctatcttgctgggaaccaagagcaagaggtttctaaaatatcagcaagagcaaggaggtcatcaaagccagaaaggaaaggatcatcatgcagaagatgacgacggaggcagca

SEQ ID NO: 104528 - DNA, 252 bp, Glycine max
tcccgccatgggaatggagcgagtgcagtgtgcctatgcctctctggacgaagcgttcgaaatagggaaagagacgtatcagggtcagcaatacagccagatttacttcgcgcgccttcatttgatgcgaacactcttgtattccctcattcctcattggaaacccaattctcccgtgtgcacggtgctgggattggaagagggcaaggagtgtgtcattgttggaaccctctataaacacatgaagctcaa

SEQ ID NO: 104529 - DNA, 206 bp, Glycine max
tgcaaagctagcgaaaccctttcggtccttccctttgcgaaggtcaactccccctctgagtctgaggtgttgcgcttcgcccccttcttcctacagcatcactctcattcccggcgatggtatcggccccgaaatcatctctgtggccaaagacgttcttgtcctcgtgggttctctcgaagggatcaaattcgagttccaagagg

SEQ ID NO: 104530 - DNA, 256 bp, Glycine max
agcttttgtcaattttctattgaccttctcggtggaggaattttagtggacaaaactggagattggatcacacttatacaaaattctccaattagtaacttgttgagagttgctgcttggaagaaaggttgtttaatggtcaagattgtgatgtctgggaatgcagcagtcaaaaggagtgattgggcctcattggtacaagtgtttttaacaaacagcaacagtacagagcattttgatgcatgtaagtggacaa

SEQ ID NO: 104531 - DNA, 249 bp, Glycine max
ccattctttccttggtgaacaacgacgacatagactcctacaggcttcaatctggtgatgccctgagagtcccctcaggaaccacatactatgtggtcaagcctgacaacaacgaaaatctcagattaataacactcgccatacccggtaacaagcctggtagatttgagagtttcttcctatctagcactgaagctcaacaatcctacttgccaggattcagcaggaacattttagagggctcctacg

SEQ ID NO: 104532 - DNA, 241 bp, Glycine max
atacccgttaacaagcctggtagatttgagagtttcttcctatctagcactgaagctcaacaatcctacttgcaaggattcagcaggaacattttagaggcctcctacgataccaaattcgaggagataaacaaggttctgtttactacagaggaagggcagcagcaaggggagcagaggctgcaagagagcgtgattgtggaaatctcgaaggaacagattcgggcactgagcaaacgtg

SEQ ID NO: 104533 - DNA, 191 bp, Glycine max
aagattgctaccagattgagtaccagacatagatcctcaatacaatgaggttcaggctcagatcgaaacaaatttgtttaaattgtctcttgatgatgttgaaactcccaaaggttccatgttggatcttaaaatttctcaatctaagattgcacttcccaaaaacacattgggaggaaccattctgcgta

SEQ ID NO: 104534 - DNA, 253 bp, Glycine max
cggaaataagttatattgaaattttcacaagaggaatttcttacagcttggtcaactcaggtgcgtcctgcaacaaccctgttggctgatgggtgtccatatttgtatgctatgggtgcatgacagttcagtgtctacaatacaaggtgattttgttattggtattaagttgacaaccataaacaatatgtgtgcatatgggctcatcctggtatttcaggttctcgacttttgggcaccattcctcagtcta

SEQ ID NO: 104535 - DNA, 233 bp, Glycine max
ggaagtattcccaaggtgctgtcttcgatgttccaacacatgaagaagctgaagtgggtactcgcgaactcgtttcacgaactggagaaagaggtaatagactccatggctgagttatgccccataacaacggtgggcccactagtccctccatcgttactcggccaagacgaaaacatcgaaggagacgtgggaatcgaaatgtggaagcccaggactcgtgcatggagtgg

SEQ ID NO: 104536 - DNA, 237 bp, Glycine max
acaggagcagcaacaggaagagcaacctttggaagtgcggaaatatatagccgaattgtctgaacaagatatatttgtaatcccagcaggttatccagttgtggtcaacgctacctcaaatctgaatgtctttgctattggtattaatggccgagaacaaccagaggaacttcctcgcaggtcgcaagacaatgtgataagcagattcctagtcagttcaagagccttcattccctg

SEQ ID NO: 104537 - DNA, 148 bp, Glycine max
tcaattgaagaagatgccgatcagaaacatcgccgtcggaaggcctgaagaggcgactcaccccgacacgttgaacgcggctttggctgagttcatctcaaccttcatcttcgtgttcgccggctcaggctccggcatcgcctacaac

SEQ ID NO: 104538 - DNA, 251 bp, Glycine max
ttcctgctgaatccttgcaagtaggattgttgagcttcagtgctagataggaagggcagcagcaaggggagcagaggctgcaagagagcgtgattgtggaaatctcgaaggaacagattcgggcactgagcaaacgtgccaaatctagttcaaggaaaaccatttcttctgaagataaaccttttaacttgagaagccgcgaccccatctactccaacaagcttggcaagttcgttgagatcaccccagag

SEQ ID NO: 104539 - DNA, 207 bp, Glycine max
cagcttggagaaccagctcgaccagatgcctaggagattacatcttgctgggaaccaagagcaagagtttctaaaatatcagcaagagcaaggaggtcatcaaagccagaaaggaaagcatcagcaagaagaagaaaacgaaggaggcagcatattgagtggcttcaccctggaattcttggaacatgcattcagcgtggacaagca

SEQ ID NO: 104540 - DNA, 228 bp, Glycine max
gttcaatatcctagtataccttaataaataatttaagatactatgatgagagcacggttcccattactgttgctgggacttgttttcctggcttcagtttctgtctcatttggcattgcttactgggaaaaagagaaccccaaacacaacaagtgtctccagaggttgcaatagcgagagagactcgtacaggaaccaagcatgccacgctcgttgcaacctccttaa

SEQ ID NO: 104541 - DNA, 203 bp, Glycine max
tccctggtaagctgatgaagcgcctgatacagtcacaggggatattgtctttgtcctacaacagaaggaacacccaaagttcaaacgaaaggcagatgacctttttgtagaacacacattgtctcttactgaggctctatgtggcttccagtatgtgctgactcacctggatagcaggcagcttctgatcaaatcaaaccctg

SEQ ID NO: 104542 - DNA, 191 bp, Glycine max
cgtccctcacattctgaagaagtgccctgatgccattgccagaccctaaggcggtgcagtacgtgagaaacgaccgtggcactcccatgattctagacaacaactactacagaaacatattagacagcaagggtctcttgatagtggatcaccaactagccaatgacaagaggaccaagccttatgtgaag

SEQ ID NO: 104543 - DNA, 240 bp, Glycine max
ggaaagccgtgaaagggaagaagaacaacaagagcagcatgaggaacaagatgaaaatccctacatttttgaggaagataaggattttgagaccagagtcgaaactgaaggtggcagaattcgggttcccaagaagttcactgaaaaatccaagcttcttcagggcattgagaacttccggttgggcattttggaagctagagcacacacgttcgtgtctcctcgccactttgattccga

SEQ ID NO: 104544 - DNA, 251 bp, Glycine max
gaggaagggcagcagcaaggggagcagaggctgcaagagagcgtgattgtggaaatctcgaaggaacagattcgggcactgagcaaacgtgccaaatctagttcaagggaaaccatttcttctgaagataaaccttttaacttgagaagccgcgaccccatctactccaacaagcttggcaagttctttgagatcaccccagagaaaaacccccagcttcgggacttggatatcttcctcagtattgtgga

SEQ ID NO: 104545 - DNA, 197 bp, Glycine max
ccttctttcagtggctgcttcgctctgagagagcaggcacagcaaaatgagttccagatccaaaagctgaatgccctcaaaccggataaccgtatagagtcggaaggtgggttcattgagacctggaaccctaacaacatttcattccagtgtgccggtgtggccctctctcgatggaaccttaaccgaaatgcctt

SEQ ID NO: 104546 - DNA, 254 bp, Glycine max
cgaggagaaattgagtttctgagataaccacttttctctttgattcatcaatggcaaccgcgaggaccgtgaaggatgtttcgcctcacgatttcgtgaaggcttacgcctcccatctcaagcgttccggcaagatggagcttcctgagtggactgatattgtaaaaacagcaaaatttaaggaattggctccatatgatcctgactggtattatgttagggctgcctcaatggcaaaaaagtttatttgagag

SEQ ID NO: 104547 - DNA, 224 bp, Glycine max
tataccttaataaataatttaagatactatgatgagagcacggttcccattactgttgctgggacttgttttcctggcttcagtttctgtctcatttggcattgcttactggggaaaaagaggaaccccaaacacaacaagtgtctccagagttgcaatagcgagagagactcgtacaggaaccaagcatgccacgctcgttgcaacctccttaaggtggagaa

SEQ ID NO: 104548 - DNA, 253 bp, Glycine max
ttggcattcttggcattgcatgggcctttggtggcatgatcttcatccttgtctactgcactgctgggatctcagggggtcacattaacccagcggtgacatttgggctgtttttggctcgcaaggtgtctttgatccgagccatcatgtacatggtggctcagtgcttaggtgctatctgtggagttggtttagttaaggctttccagaagtcttacttcaacaagtatggtggtggggtaattcctcgctg

SEQ ID NO: 104549 - DNA, 263 bp, Glycine max
tttgctgctttaacagaggagttgcgtctgaagatgactttggacacactctgaatcccaaactccttccaagaggagagtcatcagtttctgggcccgtagttaggctgttcaagccattcgatgaactttttgttgacttccaggatttcaatgtggaagctcttagagaagtttgttgaggaatctagtacccctgttgttactgtctttaacaatgaaccgagcaatcaccctttcgttgtcaaattcttcaacagtcc

SEQ ID NO: 104550 - DNA, 232 bp, Glycine max
cagtttagtgatttgtcctcttggatagatgacaatggggagcggttgaaaggaaaaaatatactcatgtattgtactggtggaatcaggtgtgaaatggcatcggcatatattaggtcaaaaggtgctggggtttgaggaatgtgtttcagttatttgggtgcatacaacggtatttggagcaattcccagatggtgggtttttcaaaggaaaaaattttgtgtttgatca

SEQ ID NO: 104551 - DNA, 249 bp, Glycine max
ttccaccaagttatgggtttccttgtgttgcttcttttctccctcttaggtctctcttctagttccagcatatcaactcatcgttccatattggaccttgacctaaccaagtttaccacacagaaacaggtgtcttcactgttccaactatggaagagtgagcatggacgtgtctaccataaccacgaagaagaggcaaagagacttgagattttcaagaatagaaacaactatatcagggacatgaat

SEQ ID NO: 104552 - DNA, 254 bp, Glycine max
cggctcgagggcgccctcttccatttaccattccgagagaggtccgacgacctctcaggttctcgcagttgtcgccggccttccggtcggcggcatcctcctgctcctggcaagactgaccctggctggaactctcaccgggatggtggtggcaacaccgctcttcatcatcttcagcccggtgctgattacggtcacggtcgcaattggcctggccgtggccgggttcctgacgtcgggagtctttgggctca

SEQ ID NO: 104553 - DNA, 243 bp, Glycine max
cccccaataatgaagagcaccatcttctttgctctcttactcattagtgccttcaccacctcatacctaccttcagccatcgcttatttcgtgctctgataatgacggtaaccctcttgaaaatggatgcacatattatatcatgtcagacatgacagcatttggtggaataagatcagcccctacgggatattagagattccctctcactgtggtgcaatctcgcattgagctcgacaaagg

SEQ ID NO: 104554 - DNA, 247 bp, Glycine max
gtgatgaaaaattgatgcgtgaaaggacgcacctgctgttggcttgttgttcaaggatggcaatttgtaagaaagatgtttggagagttgaatgtggaatcccttctggatttccgctcacagttatttgcaatagcatttttaatgagatgctcattagatatagctatgaaaaattactgcgccaggctaaagctccaagtatgtttttacaatccttcaaaaattttgtttctttgtgtgtggt

SEQ ID NO: 104555 - DNA, 259 bp, Glycine max
  unsure (1)..(259): unsure at all n locations
gctcgagcaacacgaatttcattgcagagtgttattttgagtatcagcatcaatggctccaattgcagtgggaaacgtgattccagacagcatnttggcttacttggatgaagaaaacaaaccccaaactgtctccattcactctctcgccaccggcaagaaagtcatcatctttggggttcccggtgccttcactcctacttgcagcttgaagcacgttcctggcttcattgagagagcagaagagctgaaagggaag

SEQ ID NO: 104556 - DNA, 260 bp, Glycine max
ctcgaggaaggaggaagacgaaggtgagcagccacgtccattcccattcccacgcccacgccaacctcatcaagaggaagagcacgagcagaaggaggaacacgaatggcatcgcaaggaggaaaaacacggaggaaagggaagtgaagaggaacaagatgaacgtgaacacccacgcccacaccaacctcatcaaaaggaagaggaaaagcacgaatggcaacacaagcaggaaaagcaccaaggaaaggaaagtgaag

SEQ ID NO: 104557 - DNA, 199 bp, Glycine max
agtgcaactttgcaatttagaaagttagcagattgtgattttctcaagagaaactttaagcagatgtctaatagttttatgggtggctcctggaggacaaggcgagtttatggtcacaacttcattatgtttcgtgcaataatctggaaatgcaagaagcatatcttgtcaatctcgtaaatgtgttacgagaattgta

SEQ ID NO: 104558 - DNA, 250 bp, Glycine max
cgagctccattggtccttaaacactcatcagtcatcaccatggccaagctagttttttccctttgttttctgcttttcagtggctgctgcttcgctttcagttccagagagcagcctcagctaaacgagtgccagatcccaaaactcaatgccctcaaaccggataaacgtatagagtcagaaggagggctcattgagacatggaacctaacaacaagccattccattgtgccggtgttgccctctctcg

SEQ ID NO: 104559 - DNA, 218 bp, Glycine max
gagaattattaacacttccttagttcaatatggggaagcccttcactctctctctttcttccctttgcttgctactcttgtcgagtgcatgctttgctattagctccagcaagctcaacgagttgccaactcaacaaccttcaacgcgttggaacccggaccaccgcgtttagtccgaagtggttttattcaaacatggaactctcaacaccctgagc

SEQ ID NO: 104560 - DNA, 117 bp, Glycine max
aattcttgcacttgctaggcaaaagttgacccagcttccaggaacttctattgagggagttgaaaagggtggctacaccatttcagacaactcatcaggtaacaagcctgatgttat

SEQ ID NO: 104561 - DNA, 245 bp, Glycine max
aaactcttcgtccatcatcttgataattcccacactatggctgagcttcactaccaccaacaacaccaataccctcaccgataccctaatgatccatacgaacaacaaactagctactccactcaggtcgtcaaggcggccaccgccgtcaccgcgggcggctccctcttgatcctcgcctcgttgcaccttgccggcaccatcatcgccctcaccatcgtcacaccaccgctcgtcatcttcag

SEQ ID NO: 104562 - DNA, 237 bp, Glycine max
ggctcgagcggctcgagcactttccttagctcaatatggggaagaccttcttcactctctctcttacttgccttagcttgctactcttgtcgagtgcatgctttgctattacctccagcaagttcaacgagtgccaactcaacaacctcaacgcgttggaacccgaccaccgcgttgagtccgaaggtggtcttattgaaacatggaactctcaacaccctgagctgcaatgcgccg

SEQ ID NO: 104563 - DNA, 252 bp, Glycine max
gtgacagtgaaaggaggtctaagagtcacagctccagccatgaggaagccacagcaagaagaagatgatgatgatgaggaagagcagccacagtgcgtggagacagacaaaggttgccaacgccaaagcaaaaggagcagaaatggcattgatgagaccatttgcacaatgagacttcgccaaaacattggtcagaattcatcacctgacatctacaaccctcaagctggtagcatcacaaccgccaccagc

SEQ ID NO: 104564 - DNA, 251 bp, Glycine max
gcatcatgggattggaggaaaaaaggtgtcatcacccaagtaaagtaccaagggggctgtggaagcggttgggcgttttctgccacgggagccatagaagcagcacatgcaatagcaacaggagaccttgttagcctttctgaacaagaactcgtagactgtgtggaagaaagcgaaggttgttacaatggatggcactatcaatcgttcgaatgggttttagaacatggtgggattgccactgatgatga

SEQ ID NO: 104565 - DNA, 249 bp, Glycine max
gttctgtccacagcaagctgaggatgacaaatgtggggatattgggattagtattgatcatgatgatggaaccaggcgtttggtggtgtctaagaacaaaccgttagtggttcagtttcaaaaacttgataaagaatcactggccaagaaaaatcatggcctttctcgcagtgagtgagacacaagtgtgagagtactaaataaatgctttggttgtacgaaatcattacactaaataaaataatcaaa

SEQ ID NO: 104566 - DNA, 248 bp, Glycine max
tggaacatatgtatggttggcaaagaagaagaattgaagaatttaagaggagatggaaaaggagagcgcaaagaacatgataggatctatgattatgatgtctacaatgatttgggcaatccagatcacggtgaaaattttgctcgcccaattcttggagggtctagcactcatccctaccctcgtaggggaagaactggtcgatatccaacaaggaaagatcagaattctgagaagccaggcgaagt

SEQ ID NO: 104567 - DNA, 248 bp, Glycine max
atcgagcgaatcggctcgagattgctggtggtggtggcatcacaccagccagatccgacaactacataacttggggacttgtgggaatcttcttcaatttctacgtttacagcaagttcaaggcatggtgggctagacacacttacatcctctcagctgctttagatgctggtgttgctttcatgggtgtcattctctattttgcccttcaaaattatggtgtttttggtccaatatggtggggtcaa

SEQ ID NO: 104568 - DNA, 249 bp, Glycine max
ggaattcgagtaatattcagatttccggcttattttacgacggcagatacaaattctggactaaacacgagaaaaatcttgctttgacagaagaggaaaagatggaagtgattagaaatagaggcattcctgctgatgttcttgcaaagcgagctcatgaatttgaaaaacatgttgctcatgaaagcctcaaggatcaaattcctgctgttgacaagttgtattctactcaaggtaataagtttgcaa

SEQ ID NO: 104569 - DNA, 250 bp, Glycine max
ttcaaacttaattattaacacttccttagttcaatatggggaagcccttcaggctctctctttcttccctttgcttgctactcttgtcgagtgcatgctttgctattagctccagcaagctcaacgagtgccaactcaacaacctcaacgcgttggaacccgaccaccgcgttgagtccgaaggtggtttgattcaaacatggaactctcaacaccctgagctgaaatgcgccggtgtcactgtttccaa

SEQ ID NO: 104570 - DNA, 249 bp, Glycine max
gcattttcagaggaacaatggcgggtagggtttcgacgtgcttcttcttcgtgtttgctctttctctccttcttccttttcagatctccgctgaggaatcatcggagaaagagttcgtactcacattggatcactctaactttcacgacactgtcagcaagcacgatttcatcgtcgtcgagttctacgctccatggtgtggccactgtaagaagcttgctcccgagtatgagaaagctgcttctatct

SEQ ID NO: 104571 - DNA, 246 bp, Glycine max
gcaatgcgtcggtgtcactgtttccaaacgcaccctcaaccgcaacggcctccacttgccatcttactcaccttatccccaaatgatcattgtcgttcaagggaagggagcaattggatttgcatttccgggatgtcctgagacgtttgagaagccacaacagcaatcaagcagaagaggctcaaggtcgcagcagcaactacaagacagtcaccagaagattcgtcacttcaatgaaggagacgt

SEQ ID NO: 104572 - DNA, 250 bp, Glycine max
caggaaccacatactatgtggtcaaccctgacaacaacgaaaatctcagattaataacactcgccatacccgttaacaagcctgggcgatttgagagtttcttcctatctagcactgaagctcaacaatcctacttgcaaggattcagcaggaacattttagaggcctcctacgataccaaattcgaggagataaacaaggttctgttgagtagagaggaagggcagcagcaaggggagcagaggctgca

SEQ ID NO: 104573 - DNA, 248 bp, Glycine max
gtgtttttcgtgtgcgtcgttcgttaattttgttttgtgtattcggatcgagatttttcgcgttcggttgcggggatcttcggtttaggtaaatgaatggtttttgagcaacagcagttaaaagagaaaagggattcagcgaagatgacatcggttggtgtggcaccaacttcgggtttgagagaagccagtgggcatggagcagcatcctatgatagattgccagaggagatgaacgatatgaaaat

SEQ ID NO: 104574 - DNA, 250 bp, Glycine max
gtcatgattctatttggtttgctcaaccaacaaattattccgagaatatacaagaagataaaaaaatacgagattgtatcaaaaattatatacaaaaaaatataagaatatcctctggtgttgagggaattggacagataaagattcaaaaaagaattgatcttattcaagttataatatatatgggatttccaaagtttttaatagagggtaagtctcaaaaaatcgaagaattacagacgaatatgca

SEQ ID NO: 104575 - DNA, 247 bp, Glycine max
ggctacttcaaagttgaaaacccagaatgtggttgtatctctctccctaaccttaaccttggtactggtgctactgaccagcaaggcaaactcagcggaaactgtttctttcagctggaacaagttcgtgccgaagcaaccaaacatgatcctccaaggagacgctattgtgacctcctcgggaaagttacaactcaataaggttgacgaaaacggcaccccaaaaccctcgtctcttggtcgcgcc

SEQ ID NO: 104576 - DNA, 248 bp, Glycine max
cacaaggcagaaagcaagctcatcctagagttttaaaaatggcagcagcctcctccatggctctctcttccccatccttggctggcaaggccgtgaagctgggcccatcagcccccgaagtcgggagggtcagcatgaggaagaccgtcaccaagcaggcctcctccggaagcccatggtacggcccagaccgcgtcaagtacttgggcccattctctggcgagcccccgtcctacctcactggcgag

SEQ ID NO: 104577 - DNA, 248 bp, Glycine max
aaaattcttccaccaagttatgggtttccttgtgttgcttcttttctccctcttaggtctctcttctagttccagcatatcaactcatcgttccatattggaccttgacctaaccaagtttaccacacagaaacaggtgtcttcactgttccaactatggaagagtgagcatggacgtgtctaccataaccacgaagaagaggcaaagagacttgagattttcaagaataacttgaactatatcaggg

SEQ ID NO: 104578 - DNA, 247 bp, Glycine max
aatccttcaaaaattttgtttctttgtgtgtgtatggtgatgataacttaattagtgttcatgaatatgtcaagccttactttagtggttctaaattgaaaagctttctagctggtcataatatcaccattactgatggtattgacaaaactagtgcaactttgcaatttagaaagttagcagattgtgattttctcaagagaaactttaagcagatgtctaatgttttatgggtggctcctgagga

SEQ ID NO: 104579 - DNA, 254 bp, Glycine max
cgcgagtatgcttgcaaagatgtgacaggtatcatcgtatgaagcaagagcgagagaaacaaatccaagaggaaactcgtgagaagaaagaggaggaaagccgtgaaagggaagaagaacaacaagagcagcatgaggaacaagatgaaaatccctacatttttgaggaagataaggattttgagaccagagtcgaaactgaaggtggcagaattcgggttctcaagaagttcactgaaaaatccaagcttctt

SEQ ID NO: 104580 - DNA, 245 bp, Glycine max
gttacaattgattggtttatttcctctcaggaatgtgttcccaggacattatgtgttttaaatccacaaaatccttttgtgttaaataggtggatggggaaactgactttcccccagggcacttcccgaagtgttaaaagaatgcctctttcaatagggggaggagctggtgcaaagaatgctattctcataaatatgccaaatgctgttctttcaatgtggagatattttgttggagacctcgt

SEQ ID NO: 104581 - DNA, 244 bp, Glycine max
ttggcattaaagaacaacaacagaggcagcaacaggaagagcaacctttggaagtgcggaaatatagagctgaattgtctgaacaagatatatttgtaatcccagcaggttatccagttgtggtcaacgctacctcagatctgaatttctttgcttttggtatcaatgccgagaacaaccagaggaacttccttgcaggttcgaaagacaatgtgataagccagatacctagtcaagtgcagga

SEQ ID NO: 104582 - DNA, 245 bp, Glycine max
gcggaaatatagagctgaattgtctgaacaagatatatttgtaatcccagcaggttatccagttgtggtcaacgctacctcagatctgaatttctttgcttttggtatcaatgccgagaacaaccagaggaacttccttgcaggttcgaaagacaatgtgataagccagatacctagtcaagtgcaggagcttgcgttccctgggtctgcaaaagatattgagaacctaataaagagccaaagtg

SEQ ID NO: 104583 - DNA, 247 bp, Glycine max
gtgaagcagcagagggaggagcggcattaaaaatgcagatcttcgtgaaaaccctaacggggaagaccataaccctcgaggtcgaaagcagcgacaccattgacaatgtcaaggctaagattcaagacaaggaaggcatccctccggatcagcagcgtttgattttcgccggaaagcaacttgaagatggaaggaccttggccgattacaacatccagaaggaatcaacccttcaccttgtcctcag

SEQ ID NO: 104584 - DNA, 248 bp, Glycine max
ccaagttcacaatcctcctcatctctcttctcttctgcatcgcccacacttgcagcgcctccaaatggcagcaccagcaagatagctgccgcaagcagctccagggggtgaacctcacgccctgcgagaagcacatcatggagaagatccaaggccgcggcgatgacgatgatgatgatgacgacgacaatcacattctcaggaccatgcggggaagaatcaactacataaggaggaacgaaggaaaa

SEQ ID NO: 104585 - DNA, 247 bp, Glycine max
cagagaactttgcagctctcttaggtttttaaaaaacaccacgcaaacagcaagatggccacttccgacagtaacatgctactaaattatgttccagtttatgtgatgctcccactcggagttgtcaatgttgacaatgtttttgaagacccagatggccttaaagaacagctcttgcagcttcgagctgcgggtgttgacggggttatggttgatgtgtggtgggggatcatagaactgaaggggc

SEQ ID NO: 104586 - DNA, 245 bp, Glycine max
gggaaaagaaaattggccttacaatccccagagtgaccatctcagaagatgatcttctggctgtagcagcagaaaattgcataccgcgaagtattgtggcatctttcactcatgacatattcatcaaaggttgtcaagttaacttcaacatagatggacttggtgatgttgagattagcactctctatcctgatgaagcattcagaagcttggaggattgcttcgagggctttgctcttatgatc

SEQ ID NO: 104587 - DNA, 246 bp, Glycine max
cccaagctgactgtgctgttcttatcattgattcgaccactggtggttttgaagctggtatttccaaggatggacagactcgtgaacatgctctgctttcattcacccttggtgtgaaacagatgatttgctgctgtaacaaaatggatgctactacacccaagtattccaaggccaggtatgatgaaattgtgaaggaagtctcttcctacttgaagaaagtaggatacaaccctgacaagattc

SEQ ID NO: 104588 - DNA, 245 bp, Glycine max
caaagtcattcacctaaaccctatggccgacgaacccaaagccaaaggcaacgcagccttctcctccggcgactaccccgccgcaattcaccacttctccgacgccatcgccttggcccccaccaaccacgtcctctattccaatcgatccgccgcatacgcttctctccaaaactacaccgatgccttagccgatgctaagaagaccgttgaactcaagcccgactggtccaagggctacagcc

SEQ ID NO: 104589 - DNA, 246 bp, Glycine max
cttacacagagagaaaagagagagaaagaaaaggatcaaatagtcaaaacctttggttctttccctccatagttccatttttccattcaacaacacaacacctcagacagacatcatggaggcaggttacaatcctcgtaccgtcgaagaggtctttagggatttcaagggtcgcagagctgctttgattaaagccctcaccaccgatgttgaagagttctaccagcagtgcgatcccgagaagga

SEQ ID NO: 104590 - DNA, 244 bp, Glycine max
gttattatcaaataattaattaaattcctcgtggaatcttgttgaagccatgtctacagctggtcaggtcatcaagtgcagagctgcggtggcatgggaagcagggaagccactatcgatagaaaccatagaagtggcaccaccccagaaaggtgaagtgcgtttgaagatcctcttcaactccctttgccgtacagatgtttactggtgggatgctaagggccagactccgctgtttcctcgt

SEQ ID NO: 104591 - DNA, 241 bp, Glycine max
attgaagccaaacatggtcacccctggatcccaatctgctaaggtttcccctcaggtggttgccgagcacactgtcagagcccttcagagaaccgtgcctgctgcagttcctgctgtcgttttcttgtctggtggccagagtgaggaggaggcatccgtcaacctcaacgccattaaccaggtcaatgggaagaagccatggtcactctctttctcctttggaagggcacttcaacagagc

SEQ ID NO: 104592 - DNA, 241 bp, Glycine max
cggctcgagtactcattctccatacctcaacgaagctgttaaagagacggcaacactttgctgtccgccttgaccgagcagagcttcgtcttggccctcgattttgccctaaagtactctcagtcacaacagacaccgtcgtcgtcgtcgtcgtcatcaatggcaccgaagcagaccaaggctgagaagaagatcgcttacgatgcgaactgtgcgacctaatggaggagtacggccagat

SEQ ID NO: 104593 - DNA, 231 bp, Glycine max
gttgaaactttggatccacaagttaggcagtttagtgatttgtcctcttggatagatgacaatggggagcggttgaaaggaaaaaatatactcatgtattgtactggtggaatcaggtgtgaaatggcatcggcatatattaggtcaaaaggtgctgggtttgagaatgtgtttcagttatttggtggcatacaacggtatttggagcaattcccagatggtgggtttttc

SEQ ID NO: 104594 - DNA, 246 bp, Glycine max
ttaaacactcatcagtcatcaccatggccaagctagttttttccctttgttttctgcttttcagtggctgctgcttcgctttcagttccagagagcagcctcagcaaaacgagtgccagatccaaaaactcaatgccctcaaaccggataaccgtatagagtcagaaggagggctcattgagacatggaaccctaacaacaagccattccagtgtgccggtgttgccctctctcgctgcaccctca

SEQ ID NO: 104595 - DNA, 244 bp, Glycine max
cggctcgagcattgtctttgaacactcatcaccatggccaagcttgttctttccctttgtttccttcttttcagtggctgcttcgctctgagagagcaggcacagcaaaatgagtgccagatccaaaagctgaatgccctcaaaccggataaccgtatagagtcggaaggtgggttcattgagacctggaaccctaacaacaagccattccagtgtgccggtgttgccctctctcgctgcaccc

SEQ ID NO: 104596 - DNA, 244 bp, Glycine max
attgaagccaaacatggtcacccctggatcccaatctgctaaggtttcccctcaggtggttgccgagcacactgtcagagcccttcagagaaccgtgcctgctgcagttcctgctgtcgttttcttgtctggtggccagagtgaggaggaggcatccgtcaacctcaacgccattaaccaggtcaatgggaagaagccatggtcactctctttctcctttggaagggcacttcaacagagcacc

SEQ ID NO: 104597 - DNA, 242 bp, Glycine max
ataaaattcttccaccaagttatgggttaccttgtgttgcttcttttctccctcttaggtctctcttctagttccagcatatcaactcatcgttccatattggaccttgacctaaccaagtttaccacacagaaacaggtgtcttcactgttccaactatggaagagtgagcatggacgtgtctaccataaccacgaagaagaggcaaagagacttgagattttcaagaataacttgaacta

SEQ ID NO: 104598 - DNA, 243 bp, Glycine max
aaagaaccaaagagaatcctactttgtggatgctcagcctaagaagaaagaggaggggaataagggaagaaagggtcctttgtcttcaattttgagggctttttactgaataagtatgtactaaaatgtatgctgtaatagctcatagtgagcgaggaaagtatcgggctatgtaactatgactagagcttcaactatgaataaataaatcgacagcatatgatgcttttgttttgtgtcaaa

SEQ ID NO: 104599 - DNA, 245 bp, Glycine max
agcatccagtgaatcctataaatgagaatgatagtcagcaatcaagaccattgaaattttacaactctgagattcatacagcggctttctgtttgccatcttttgctaagaggaagattggttctaaaacaaattgaaaatatttttcatgggattgaaggagcaaatgtggctgtcggcattcatccttttactggattggtccatccatcaatgaaaagtgggataagagcttcaagatgaca

SEQ ID NO: 104600 - DNA, 264 bp, Glycine max
ctcgctcttcggatcgagaatgcgaacattgaacttgttggcataaaagatcaacaacaggagtagcaacaggaagagcaacctttggaagtgcggaaatatagagccgaattgtctgaacaagatatatttgtaatcccagcaggttatccagttgtggtcaacgctacctcaaatctgaatttctttgctattggtattaatgccgagaacaaccagaggaacttcctcgcaggttcgcaagacaatgtgataagccagata

SEQ ID NO: 104601 - DNA, 242 bp, Glycine max
ccaaggttaagatgccacttcccgatatgatggctgcagtactagctttggatgagtcagtattggatgttgatcaagtggaaaatctcattaagttttgtcctaccaaagaggagatggatcttttgaagggatacactggtgacaaggagattttggggaagtgtgaacagttttttctggagttgatgaaggtgccaagggtggagtcaaaattaagagtatttgcattcaagattcag

SEQ ID NO: 104602 - DNA, 238 bp, Glycine max
gcaaagctcatccttgagttaaaaaatggcagcagcttcttccatggctctctcatccccatccttggctggcaaggccgtgaagctgggcccatcagccccagaagtgggaagggtgagcatgaggaagaccgtcaccaagcaggtctcctcaggaagcccatggtacggcccagaccgagtcaagtacttgggcccattctctggcgagcccccgtcctacctaaccggtgagttc

SEQ ID NO: 104603 - DNA, 243 bp, Glycine max
cggctcgaggaactagttcaatatcctagtataccttaataaataatttaagatactatgatgatagcacggttcccattactgttgctgggacttgttttcctggcttcagtttctgtctcatgtggcattgcttactgggacaaagagaaccccaaacacaacaagtgtctccagagttgcaatagcgagtgagactcgtacaggaaccaagcatgccacgctcgttgcaacctccttaag

SEQ ID NO: 104604 - DNA, 243 bp, Glycine max
ctcgagccgaatcggctcgaggtactagtgattaatgaaggagaaccaaacattgaacttgactggcattaaagaacaacaacagaggcagcaacaggaagagcaacctttggaagtgcggaaatatagagctgaattgtctgaacaagatatatttgtaatcccagcaggttatccagttgtggtcaacgctacctcagatctgaatttctttgcttttggtatcaatgccgagaacaacca

SEQ ID NO: 104605 - DNA, 242 bp, Glycine max
ccaaattcgaggagataaacaaggttctgtttggtagagaggaggggcagcaacaaggggaggagaggctgcaagagagtgtgattgtggaaatctcaaagaaacaaattcgggaactgagcaaacatgccaaatctagttcaaggaaaaccatttcttctgaagataaacctttcaacttgagaagccgcgaccccatctattccaacaagcttggcaagttgtttgagattaccccagag

SEQ ID NO: 104606 - DNA, 242 bp, Glycine max
attttcctttttaagggatgctagtaatggttgtgttgatgttggtaatgttgcttcagcattgactacatcaagtgtgctcgaggcgcaaagccgaaaacccaacagatatgaggtctctcaatataggtatcgcaatgtgccgataaagcgcagagcgtgggttgagggccaaatgtcttttgatcaatcagtggtagcaattatgtcaaaatgtaaagccagtatgagaatgggaaaca

SEQ ID NO: 104607 - DNA, 242 bp, Glycine max
ctgctcgagcattatctttgaacactcatcaccatggccaagcttgttctttccctttgtttccttcttttcagtggctgcttcgctctgagagagcaggcacagcaaaatgagtgccagatccaaaagctgaatgccctcaaaccggataaccgtatagagtcggaaggtgggttcattgagaacaagaaccctaacaacaagccattccagtgtgccggtgttgccctctctcgctgcac

SEQ ID NO: 104608 - DNA, 240 bp, Glycine max
ccggataaaggtgaaaatcatgcgcgtcctgttcttggaggaaatgacacctttccttatcctcgtagggggagaactggtagaaaaccaacaaggaaagatcctaatagtgagagtaggagcaatgatgtttatctgccaagagatgaggcttttggacacttgaagtcatctgactttcttacttatggactaaaatccgtatctcaaaatgttcttccattattgcaatctgctttt

SEQ ID NO: 104609 - DNA, 241 bp, Glycine max
ccaacgaggacatagctgagaaacttcagtctccagactacgaaaggaagcagatcgtgacagtggaaggaggtctcagcgttatcagccccaagtggcaagaacaacaagatgaagatgaagatgaagacgaagatgatgaagatgaacaaattccctctcaccctcctcgccgaccaagccatggaaagcgtaaacaagacgaggacgaggacgaagatgaagataaacctcgtcctag

SEQ ID NO: 104610 - DNA, 181 bp, Glycine max
taagatttgaaattttgataaaccgcgatcacaggttgccgtaccttaataccggaaacaaaatcaatcgttacttgatttcaagaatttctcaatttcttcctacttctttgtgtacgatttcttaagggaaagaaaatcactctctgtgctggccacagacttcgtgaatcattttctt

SEQ ID NO: 104611 - DNA, 241 bp, Glycine max
aagggatatgatccttttcttggtggaattcaaaaatatgctactcccatgatgcccctagatggagaaattctttctaaggttgcacaagatatggttgaggaatggtttgattgtgttgatgaggaggattcctttgaggaagtttctttaagtgcagcactcaatggtgttgagggtttggactatatggaaagaattcctcttgccacatctgagggttttcctcatgtgctttcac

SEQ ID NO: 104612 - DNA, 242 bp, Glycine max
actcggaattatgggagaattcacaccagagcaacagcgtgccttctgtcaatttgttactggtgcacctaggttgcctcctggtggactggcagttctaaatccaaaattaacgattgtgaggaagctttcatcaagtgcagctaatgcttcatctaatgggaacggtccttcagaattagcggatgatgacttgccaagtgtgatgacgtgtgcaaattaccttaagcttcctccttatt

SEQ ID NO: 104613 - DNA, 240 bp, Glycine max
gcaggggcaaactcattgttgaacgcattgccagaggaagtgattcagcacacttttaacctaaagagccagcaggccaggcaggtgaagaacaacaaccctttcagcttcctggttccacctcaggagtctcagaggagagctgtggcttagagagccctttttgcatgtgctaccacacttttgtccttttgggctctagctagtgctggtagcagtacataagaatgaataaaagaa

SEQ ID NO: 104614 - DNA, 241 bp, Glycine max
ctcttgatgaggagattctttccaaagttgcacaagacatggttgaagaatggtttgattgtgttgatgaggaggatacatttgaagaagtttctttgagtgctgcactcaatggtgttgaaggtttggactacatggaacgcattcctcttgccacttcagagggttttccccatgttctgtccaggaaaaatggtgaaaaaggcaagagaagatttgttactggagatggtgaagaaat

SEQ ID NO: 104615 - DNA, 188 bp, Glycine max
atggcgggtagggtttcgacgtgcttcttcttcgtgtttgctctttctctccttcttccttttcagatctccgctgaggaatcatcggagaaagagttcgtactcacattggatcactctaactttcacgacactgtcagcaagcacgatttcatcgtcgtcgagttctacgctccatggtgtggcca

SEQ ID NO: 104616 - DNA, 266 bp, Glycine max
ttgaatggacgggcattgatacaagtggtgaattgcaacggtgagagagtgtttgatggagagctgcaagagggacgggtgctgatcgtgccacaaaactttgtggtggctgcaagatcacagagtgacaacttcgagtatgtgtcattcaagaccaatgatacacccatgatcggcactcttgcaggggcaaactcattgttgaacgcattaccagaggaagtgattcagcacactttcaacctaaaaagccagcaggccaggca

SEQ ID NO: 104617 - DNA, 224 bp, Glycine max
cacattggaacttgaacgcgaacagtgtgatctatgtgactcgagggaaaggaagagttagagtggtgaactgccaagggaatgcagtgttcgacggtgagctaaggaggggacaattgctagtggtgccgcagaactttgtggtggctgagcaagggggagaacaaggattggaatacgtagtgttcaagacacaccacaacgccgtgagcagctacattaag

SEQ ID NO: 104618 - DNA, 259 bp, Glycine max
ttcagtgtctacaataccaggtgattttgtcattggtgttaagttgacaaccataaacaatatgtgtgcatatgggctcaatcctggtatttcaggttctcgtcttttgggtaccattcctcagtctatttcacagcaaactgtttggaatcaaatggcaacagtgagaacaccattgaattttgattctagcaagcagagcttttgtcaattttctattgaccttctcggtggaggaattttagtggacaaaactgga

SEQ ID NO: 104619 - DNA, 262 bp, Glycine max
gcatgtgctgctgttggcttgacatcaagttacactccaactccattgttggaatctggtttgcaaaaagacagagggttaattgtggaatattttggaaggatgtcttacgttgctcataacgttaatcagccccaagagaaagatttgttggagggaaatttttccttcgatattaaatctcgctctagattggaaaaagtttcctctacaaaagcacaatttgttagtggaaaaaccttcaaatatgatataattggtg

SEQ ID NO: 104620 - DNA, 262 bp, Glycine max
agcgagaaagactcctacaggaaccaagcatgccacgctcgttgcaacctccttaaggtggaggaagaagaagaatgcgaagaaggtcaaattccacgaccacgaccacaacacccggagagggaacgtcagcaacacggtgagaaggaggaagacgaaggtgagcagccacgtccattcccattcccacgcccacgccaacctcatcaagaggaagagcacgagcagaaggaggaacacgaatggcatcgcaaggaggaaa

SEQ ID NO: 104621 - DNA, 266 bp, Glycine max
tggccacgttcgcgtcctccagaggttcaacaaacgctcccaacagctacagaatctccgagactaccgcattttggagttcaactccaaacccaacacccttcttctcccccaccatgctgacgctgattacctcatcgttatccttaacgggactgccattcttaccttggtgaacaacgacgaccgagactcttacaaccttcaatctggcgatgccctaagagtccctattttaaccacatactatgtggttaaccctgaca

SEQ ID NO: 104622 - DNA, 145 bp, Glycine max
cagatctgaatttctttgcttttggtatcaatgcggagaacaaccagaggaacttccttgcaggttcgaaagacaatgtgataagccagatacctagtcaagtgcaggagcttgcgttccctgggtctgcaaaagatattgagaa

SEQ ID NO: 104623 - DNA, 270 bp, Glycine max
gattcacatagtatgtcagagaatggctgtggtgatgttgctattgaagctttggttacagtatgtcgtgctgtttcacaattggaaatgggcagcttggctgttgctagttttggaacgaaaggaaacatcaagttattgcacgactttgacaagccctttagcggagagtctggagtcaagatgatctccaatttgacattcaagcaagaaaatactattgcggatgagccagttgttgacctattgaagtacttaactaacaagctc

SEQ ID NO: 104624 - DNA, 161 bp, Glycine max
gaagattcgtcacttcaatgaaggagacgtactagtgattcctcctggtgttccttactggacctataacactggcgatgaaccagttgttgccatcagtcttcttgacacctccaacttcaacaatcagcttgatcaaaaccccagagtattttaccttg

SEQ ID NO: 104625 - DNA, 259 bp, Glycine max
tatgaaattgcgttgagccaaataaggagcaaccgcgaggcgattgacaagattgtggaagttctattggagactgagacaatgtctggagatgaattccgagctctcctgtccgagtttgttgaaattcctgctgaaaatcgggtccctccttcaactccctcaccagttgctgtttgaattgcctatatgccactgcaatgtagtgtagctttccacttactgaattttctgaaattgtgaaatatttgtaatatac

SEQ ID NO: 104626 - DNA, 260 bp, Glycine max
cggctcgagtactcattctccatacctcaacgaagaggttaaagagacggcaacactttgctgtccgccttgaccgagcagagcttcgtcttggccctcgattttgccctaatgtactctcagtcacaacagacaccgtcgtcgtcgtcgtcgtcatcaatggcaccgaagcagaccaaggctgagaagaagatcgcttacgatgcgaactgtgcgacctaatggaggagtacggccagatcctcgttgtgaactccgat

SEQ ID NO: 104627 - DNA, 260 bp, Glycine max
ctggggatggtgaagagatgacattgattccgggaaccagtgttgaagaggcttacaataagctaatagttgaacttgagaaaagtgttcctacattggttggcattgaatgtcccaaggatgagaaacttcctcgtcgcaaaatttttgacaaacctaagacgcgctgcttcactattctccctatggagtttaatcttgtggttcgtcagaagtttttaaattttgtgaggttcattatgaagaaaagggacaagctt

SEQ ID NO: 104628 - DNA, 133 bp, Glycine max
ggccagggagcttcggaaacatgtgtcgtggaggacgcatgtttgccccgaccaagatctggcgccgctggcacaggaaaatcaatgtgaaccagaagcgctacgccgttgtctccgcaatcgctgcctccgc

SEQ ID NO: 104629 - DNA, 159 bp, Glycine max
ctgaagcaaagcaatggctacttcaaagttgaaattccagaatgtggttgtatctctctccctaaccttaaccttggtactggtgctactgaccatcaaggcaaacttagcggaaactgtttctttcagctggaacaagttcgtgccgaagcaaccaaa

SEQ ID NO: 104630 - DNA, 199 bp, Glycine max
ctctaaccgtgtaattttaataaaccgcgatcacaggttgccgcaccttaaaaccggttacaaaagcaatcgttacttgatttcaagaatttctcaatttcttcctacttctttgtgtacgatttcttaagggaaagaaaatcactctctgtgctggtcacatagttcgtgtatcattttcttttccactcctagttta

SEQ ID NO: 104631 - DNA, 264 bp, Glycine max
ttcaaaccttgctctatactacacagtacacacactagaagaataatggcttccatcctccactactttttagccctctctctttcttgctcttttcttttcttcttatccgactcagtcacccctacaaaaccaataaaccttgttgttctacccgttcaaaatgatggttccacagggctccattgggccaacctccaaaaaagaacccctctaatgcaagtaccagtcctcgtggacctcaatggaaatcacttgtgggtt

SEQ ID NO: 104632 - DNA, 260 bp, Glycine max
gtataccttaataaataatttaagatactatgatgagagcacggttcccattactgttgctgggacttgttttcctggcttcagtttctgtctcatttggcattgcttactgggaaaaagagaaccccaaacacaacaagtgtctccagagttgcaatagcgagagagactcgtacaggaaccaagcatgccacgctcgttgcaacctccttaaggtggagaaagaagaatgtgaagaaggtgaaattccacgaccacga

SEQ ID NO: 104633 - DNA, 221 bp, Glycine max
ctctccattggtccttaaacactcatcagtcatcaccatggccaagctagttttttccctttgttttctgcttttcagtggctgctgcttcgctttcagttccagagagcagcctcagcaaaacgagtgccagatccaaaaactcaatgccctcaaaccggataaccgtatagagtcagaaggagggctcattgagacatggaaccctaacaacaagccat

SEQ ID NO: 104634 - DNA, 261 bp, Glycine max
ggctcaaggtcgcagaagcagcagctacaggacagtcaccagaagattcgtcacttcaatgaaggagacgtactcgtgattcctcctggtgttccttactggacctataacactggcgatgaaccagttgttgccatcagtcttcttgacacctctaacttcaataaccagcttgatcaaacccctagggtattttaccttgctgggaacccagatatagagtacccagagaccatgcaacaacaacaacagcagaaaagt

SEQ ID NO: 104635 - DNA, 256 bp, Glycine max
gcgttgcgccccgatgcctctaatcattggctttacccgatagaactcgcccacttggagctctcgattccatggcgcggctcaacagagcagccgcaccgtcctacctatttaaagtttgagaataggtcgagggcgttgcgcccccgatgcctctaatcattggctttacccgatagaactcgcccgcgggctccagctatcctgagggaaacttcggagggaaccagctactagacggttcgattagtctttc

SEQ ID NO: 104636 - DNA, 253 bp, Glycine max
ctctttcttcatagcatttggaaatttggctgatgacaccatcaattttgaggcttttcctcacaagctggtgcagtttggagagattcaggaaaaagttgtattgaaattttcacaagaggaatttcttacagcttggtcaactcaggtgcgtcctacaacaactctgttggctgatgggtgtccatatttgtatgctatggtgcatgatagttcagtgtctacaataccaggtgattttgtcattggtgtt

SEQ ID NO: 104637 - DNA, 257 bp, Glycine max
gagatgatgacgaaaactttttaaggtgcaaaaagttttgcacgaagccaaaggcttttaggtctccacgacgcattgcacaccgaagaatcaggaatttgatgtcttccaagatactggaagacagctccaaagttgaaggactctgaactttctagatctgatctaggagtacctcgttatcataagaggaagacttgttacggttttgaaagatctcagcacaatgccattgttaaaaagaggaaattcgttga

SEQ ID NO: 104638 - DNA, 153 bp, Glycine max
gtggaaaaccttcaaatatgatataattggtgctggttcacattcttcagaagattttcctgaaaaggaagatcaagaacaacccaaaaagattgataccagattgagacacagaatagatcctcaatacaatgaggttcaggctcagatgga

SEQ ID NO: 104639 - DNA, 257 bp, Glycine max
gttcaatatcctagtataccttaataaataatttaagatactatgatgagagcacggttcccattactgttgctgggacttgttttcctggcttcagtttctgtctcatttggcattgcttactgggaaaaagagaaccccaaacacaacaagtgtctccagagttgcaatagcgagagagactcgtacaggaaccaagcatgccacgctcgttgcaacctccttaaggtggagaaagaagaatgtgaagaaggtga

SEQ ID NO: 104640 - DNA, 259 bp, Glycine max
actagttcaatatcctagtataccttaataaataatttaagatactatgatgagagcacggttcccattactgttgctgggacttgttttcctggcttcagtttctgtctcatttggcattgcttactgggaaaaagagaaccccaaacacaacaagtgtctccagagttgcaatagcgagagagactcgtacaggaaccaagcatgccacgctcgttgcaacctccttaaggtggagaaagaagaatgtgaagaaggt

SEQ ID NO: 104641 - DNA, 105 bp, Glycine max
attgtcttagaacactcatcaccatggccaagcttgttctttccctttgtgtccttcttttcagtggatgcttcgctctgagagagtaggcacagcaaaatgagt

SEQ ID NO: 104642 - DNA, 262 bp, Glycine max
gaatctgcgtgtgtttgtgaattgttgttgagatctgaatcaaaatcagaaacgataatggctacaccggaccacctcttcaacctccgcaacaacttctacctcggcgcttaccaagccgccatcaacagcagcgacgttgccaacctctcccaagaagataccctcgagcgcgacaccctcgtccaccgctgctacatcgccctcggccagctccagttcgtcatctccgagatccacgacgatgctcccacaccactcc

SEQ ID NO: 104643 - DNA, 259 bp, Glycine max
gagccattcatcatagcaacaaaccgacaccttagtgctcttcacccaatttataagcttctaactcctcactaccgtgacaccatgaacatcaacgcacttgctaggcaatctctcattaatgctgatggcataatagagaaatcttttttgccctcaaagcattccgttgagatgtcttcagcggtttataagaattgggttttcactgatcaagcactacctgcagatcttatcaagagaggagtggcaattaagg

SEQ ID NO: 104644 - DNA, 268 bp, Glycine max
gcaagatacaacaagcctgacaatgagattgttgaccattacacgtatgctattctgggtgatggttgtcaaatggagggaattgcaaatgaagcatgctcacttgctggccactggggactggggaagctgatagcattttatgatgacaatcatatttctattgatggtaacacagagattgcgttcactgagagtgttgatagtcgttttgagggacttgggtggcatgttatttgggtaaagaatggaaataatggctatgatg

SEQ ID NO: 104645 - DNA, 255 bp, Glycine max
cttaataaataatttaagatactatgatgagagcacggttcccattactgttgctgggacttgttttcctggcttcagtttctgtctcatttggcattgcttactgggaaaaagagaaccccaaacacaacaagtgtctccagagttgcaatagcgagagagactcgtacaggaaccaagcatgccacgctcgttgcaacctccttaaggtggagaaagaagaatgtgaagaaggtgaaattccacgaccacgac

SEQ ID NO: 104646 - DNA, 110 bp, Glycine max
tgttctttaattttctgattttagcaaattaaaatagtagtgttattggtaggttttggcaaagatgttttcagttccaggggtgtcgggaattctgaacagaggaggag

SEQ ID NO: 104647 - DNA, 254 bp, Glycine max
gttaataagtttgcaaaaattatgaaccttagacaaagtgttgttggtgatcttaaacttcttactgatgggaagttgtatgagggtaagcatattcctgtatctaatattagtgcaggggaaaatcatgtagttcaaatacccctaatggcacaggaggaaattctgtcttctagtgcaagtgatttcagaactggaatggtgagtaaaaatagcaagcctcaagctactgcaatgcatgtgggagctataga

SEQ ID NO: 104648 - DNA, 257 bp, Glycine max
gcgttgcgcccccgatgcctctaatcattggctttacccgattgaactcgcccacttggagctctcgattccatggcgcggctcaacagagcagccgcaccgtcctacctatttaaagtttgagaataggtcgagggcgttgcgcccccgatgcctctaatcattggctttacccgatagaactctcccgcgggctccagctatcctgagggaaacttcggagggaaccagctactagacggttcgattagtctttc

SEQ ID NO: 104649 - DNA, 260 bp, Glycine max
gtcacaaaactacccttttgcttttgctcttatgttctttgccatggagtggccacaacaacaatggccttccatgatcatgagggtggtgatacaaagtcaccaaaaagtttgtttttgatgagcaactccacgagggttttcaagactgatgcaggggaaatgcgtgtgctgaaaagccatggtggtaggatattttataggcacatgcacattggcttcatctctatggaaccacagtccttgtttgttcctcagta

SEQ ID NO: 104650 - DNA, 236 bp, Glycine max
caatatcctagtataccttaataaataatttaagatactatgatgagagcacggttcccattactgttgctgggacttgttttcctggcttcagtttctgtctcatttggcattgcttactgggaaaaagagaaccccaaacacaacaagtgtctccagagttgcaatagcgagagagactcgtacaggaaccaagcatgccacgctcgttgcaacctccttaaggtggagaaaga

SEQ ID NO: 104651 - DNA, 264 bp, Glycine max
ctccattggtccttaaacactcatcagtcatcaccatggccaagctagttttttccctttgttttctgcttttcagtggctgctgcttcgctttcagttccagagagcagcctcagcaaaacgagtgccagatccaaaaactcaatgccctcaaaccggataaccgtatagagtcagaaggagggctcattgagacatggaaccctaacaacaagccattccagtgtgccggtgttgccctctctcgctgcaccctcaacgcaa

SEQ ID NO: 104652 - DNA, 261 bp, Glycine max
tctgtctctctctacgctttctcgttcgagatccctcaagggatccactaactgaaggagaaatggggttgacattcaccgagcttttcagccggcttttcgccaagaaggaaatgcgaattctgatggtgggtctcgatgcagctggtaagaccaccatcctgtacaagctcaaacttggagagatcgttaccacaattcccaccattgggttcaatgtggagactgtggaatacaagaacattagtttcactgtctggg

SEQ ID NO: 104653 - DNA, 231 bp, Glycine max
tttcaatgtggagatattttgttggagatctcgtctttgaagtttctaagatgacttctccctacattaaatgtacagtctctttcttcatagcatttggaaatttggctgatgacaccatcaattttgaggcttttccccacaagctggtgcaatttggagagattcaggaaaaagttgtattgaaattttcacaagaggaatttcttacagcttggtcaactcaggtgc

SEQ ID NO: 104654 - DNA, 217 bp, Glycine max
cgtgaagaggttgaaggatgtgacaatttccgagaaggaatttaaggagaagattgaggcggtgggagcgatggatcacgagagtttggtgcctctcagggcttactatttcagcagggatgagaagctccttgtctatgattatatgcccatgggaagcttgtctgcccttttacatggaaacaaaggagctggtaggacaccactgaattgggaa

SEQ ID NO: 104655 - DNA, 250 bp, Glycine max
gcgtgataaagggtttggttttgtgaggtacagtactcatgctgaagcagctctggctattcagatggggaacgcccagtctcttctatgtggaaaaccaattaagtgctcttgggggagcaagcccactccacctggaactgcttcaaatccccttcccccacctgctgctgcatctctgcctggcctgtctgcaactgatcttttggcgtatgagcgacagctagcaattagcaagatgggtggcgtc

SEQ ID NO: 104656 - DNA, 257 bp, Glycine max
aatccacaaaatccttttgtgttaaataggtggatggggaaactgacttttccccagggcacttcccgaagtgttaaaagaatgcctactttctatagggggaggagctggtgcaaagaatgctattctcatgaatatgccaaatgctgttctttcaatgtggagatattttgttggagatctcgtctttgaagtttctaagatgacttctccctacattaaatgtacagtctctttcttcatagcatttggaaatt

SEQ ID NO: 104657 - DNA, 185 bp, Glycine max
cttaaacactcatcagtcatcaccatggccaagctagttttttccctcttgttttctgcttttcagtggctgctgcttcgctttcagttccagagagcagcctcaacaacacgagtgccagatccaaaaactcaatgccctcaaaccggataaccgtatagagtcagaaggagggctcattgaga

SEQ ID NO: 104658 - DNA, 249 bp, Glycine max
caaaatgaccaagttcacaatcctcctcatctctcttctcttctgcatcgcccacacttgcagcgcctccaaatggcagcaccagcaagatagctgccgcaagcagctccagggggtgaacctcacgccctgcgagaagcacatcatggagaagatccaaggccgcggcgatgacgatgatgatgatgacgacgacaatcacattctcaggaccatgcggggaagaatcaactacataaggaggaacga

SEQ ID NO: 104659 - DNA, 251 bp, Glycine max
aatcacatctccagaacacaaagaagagtgacccttcttcttgttattccacttgcgttaggtattggtgtgattgtttgtaccatccggtggtggagcttgttggaaattggagatgagtcagaggggtttaatatatagctttgttgccaaaggaactgttgttttagcagagcacacgcaatataccgggaatttcagtaccattgccgttcagtgcctgcagaagctgccatcaaatagcagcaaat

SEQ ID NO: 104660 - DNA, 254 bp, Glycine max
gctgaagcaacattaccaacttcaagtgtgcttgaggcccaaagtagaaagcccaacagatatgaagtttcccaatacagatatcgcaatgtgccaataaagcgcagagcatgggttgaaggccagatgtctttcgatcagtctgtagtagcgattatgtctaaatgcaaagccagcatgagaatgggaaacactgatgctcaaattttgatggttccagggcgcagattcatagctcatggacattttttcaa

SEQ ID NO: 104661 - DNA, 254 bp, Glycine max
gtgaaggttctgagtctcaaagagaaccacgaagacataagaataagaacccttttcacttcaactctaaaaggttccaaactctcttcaaaaaccaatatggccacgttcgcgtcctccagaggttcaacaaacgctcccaacagcttcagaatctccgagactaccgcattttggagttcaactccaaacccaacacccttcttctcccccaccatgctgaacccagatacctcatcgttatccttaacggg

SEQ ID NO: 104662 - DNA, 258 bp, Glycine max
agatgacttctccctacattaaatgtacaatctctttcttcatagcatttggaaatttggctgatgacaccatcaattttgaggcttttccccacaagctggtgcagtttggagagattcaggaaaaagttgtattgaaattttcacaagaggaatttcttacagcttggtcaactcaggtgcgtcctgcaacaactctgttggctgatgggtgtccatatttgtatgctatggtgcatgatagttcagtgtctacaa

SEQ ID NO: 104663 - DNA, 153 bp, Glycine max
tctaacctacctctttttcttctctctcaacaacttcaccttcttcctcctcgatcatgtctcacttcaagggcaagtaccatgatgagcttatcgccaatgctgcgtacattggcactcctggaaagggtattcttgctgctgatgagtcaa

SEQ ID NO: 104664 - DNA, 253 bp, Glycine max
gcaggagcttgcattccctgggtctgcacaagctgttgagaagctattaaagaaccaaagagaatcctactttgtggatgctcagcctaagaagaaagaggaggggaataagggaagaaagggtcctttgtcttcaattttgagggctttttactgaataagtatgtactaaaatgtatgctgtaatagctcatagtgagcgaggaaagtatcgggctatgtaactatgactagagcttcaactatgaataaa

SEQ ID NO: 104665 - DNA, 248 bp, Glycine max
taaagaatgtcattatctggggcaatcactcatcaacccagtatcctgatgttaatcatgcaactgttgcaacctcagctggggagaagcccgtccgtgagcttatagctgatgatgcctggttgaatggggaattcattactactgttcaacaacgtggcgctgcaattatcaaagctagaaagctttcaagtgcactatcagctgctagtgctgcttgtgaccatattagagactgggttcttgga

SEQ ID NO: 104666 - DNA, 249 bp, Glycine max
tgtgatcctctacaggaacaggcttagccttatgcttaaatcaaaacgtaagaagaataagcttccattaggcactcttggatggccttttatcggtgaaaccattgagtttgtttcttgtgcctactctgatcgccctgagagcttcatggacaagcgacgccgcatgtatggcaaggtgttcaagtcacacatatttggaagccctacaattgtttcaactgatgctagtgtgaataagttatactt

SEQ ID NO: 104667 - DNA, 252 bp, Glycine max
tggaagaaaccctagccactctcccggcgtcacgatgcagatcttcgtgaaaaccctaacgggtaaaacgatcacgttggaggtggagtcttcggacaccatcgacaacgtgaaggccaagatccaggacaaggaaggcatccctccggaccagcagcgcctcatcttcgccgggaagcagctggaggacggccgcaccctcgccgactacaacatccagaaggagtccacgcttcacctcgtcctccgcct

SEQ ID NO: 104668 - DNA, 246 bp, Glycine max
atggaatcaggcgtttagtgctgtctaagatctaaccattagtggttcagtttcagaaatttagagtactatcttctttgctctctttctagtttgtgccttcaccatctcatacctgccttcagccaccgctcagttcgtgctcgacactgatgatgatcctcttcagaacggtggcacatactatatgttgccagttatgagaggacagggcactggaatagaagtagattcaactggaaaaga

SEQ ID NO: 104669 - DNA, 177 bp, Glycine max
atgaatttgaaggagggattccacccgagtttggacatatcaccaagctgaagtatcttgatttagcagaaggtaatcttggtgttgaaattccaactgagttgggaaggctcaaattgttgaatacagttttcttgtataaaaacaaatttgaaggcaagattccaccagcaattg

SEQ ID NO: 104670 - DNA, 255 bp, Glycine max
aaaattcttccaccaagttatgggttgccttgtgttgcttcttttctccctcttaggtctctcttctagttccagcatatcaactcatcgttccatattggaccttgacctaaccaagtttaccacacagaaacaggtgtcttcactgttccaactatggaagagtgagcatggacgtgtctaccataaccacgaagaagaggcaaagagacttgagattttcaagaataacttgaactatatcagggacatgaa

SEQ ID NO: 104671 - DNA, 131 bp, Glycine max
caatggtgattttgttcaagggaaagatctcgcaatggttaaagttgatgtagcatgtgctgctgttggcttgacatcaagttacactccgactccaatgttggaatctggtttgcaaaaagacactgggt

SEQ ID NO: 104672 - DNA, 223 bp, Glycine max
aatcagcctccaattcgtgccactctcttcaaaatggccgttaccttctcaaatctccacacagaatcaggtctcaagtccctcgacgacttcctctctgggaaggtctacgtttctggggatcagttcacaaaggactacatcaaagtgtatggtgctgtttttgataagccaggtgactcttttcccaatgctgccaagtggtacgaggttgtctcatctc

SEQ ID NO: 104673 - DNA, 204 bp, Glycine max
agctttttctgctggtttgcatggctgggcttttaccctgactaactttgccaagatgtatgcatccaagtttggagttgatgaaggaaagatgatggaaaggctctggggtgaaaacttttttgatccagccacaaagaaatggaccagcaagaatagtggttctgctacctgcaagcgtgggtttgttcagttctgttatga

SEQ ID NO: 104674 - DNA, 208 bp, Glycine max
attccaatatattccattctctctgtgtatttccctacctctcccttcaagatgcagatcttcgtcaagaccctcaccggcaagaccatcacccttgaggtggaaagctctgacaccatcgacaacgtcaaggccaagatccatgacaaggaaggaatccccccggaccagcaacgtctcattttcgccggaaagcagcttgaggacg

SEQ ID NO: 104675 - DNA, 268 bp, Glycine max
gcaccacgtatccctgagaaaagagaggaaccacactctctaagccaaagcaaaagcagcagcagcagcaatggttaaagacacaaagcctttagcctatgctgccaataatggataccaacaaaagggttcttcttttgattttgatcctagcgctcctccaccgtttaagattgcagaaatcagagcttcaataccaaaacattgctcggtcaagaatccatggagatccctcagttatgttctcagggatgtgcttgtaattgct

SEQ ID NO: 104676 - DNA, 239 bp, Glycine max
attctctccattgtctttgaacactcatcaccatggccaagcttgttctttccctttgtttccttcttttcagtggctgcttcgctctgagagagcaggcacagcaaaatgagtgccagatccaaaagctgaatgccctcaaaccggataaccgtatagagtcggaaggtgggttcattgagacctggaaccctaacaacaagccattccagtgtgccggtgttgccctctctcgctgc

SEQ ID NO: 104677 - DNA, 239 bp, Glycine max
ctcgagccgaatcggctcgaggaagaaaagaatgaccccgagcacgcaaaaaagcttgcagctctggcagatctgtatacgaatgatgcatttggtactgctcacagggcacatgcatcaacagagggtgttactaaatacctgaagccatctgttgctggttttcttttgcaaaaggaacttgattaccttgttggggcagtatcaaaccccaaaaggccatttgctgccattgttgg

SEQ ID NO: 104678 - DNA, 260 bp, Glycine max
ggctcgagccgattcggctcgagcttattaacactttccttagttagatatggggaagcccgtcttcactctctctctttactccctttgcttgctactcttgtcgagtgcatgctttgctattacctccagcaagttcaacgagtgccaactcaacaacctcaacgcgttggaacccgaccaccgcgttgagtccgaaggtggtcttattgaaacatggaactctcagcaccctgagctgcaatgcgccggtgtcactg

SEQ ID NO: 104679 - DNA, 236 bp, Glycine max
ctatgaaaaattactgcgccaggctaaagctccaagtatgtttttacaatccttcaaaaattttgtttctttgtgtgtgtatggtgatgataacttaattagtgttcatgaatatgtcaagccttactttagtggttctaaattgaaaagctttctagctggtcataatatcaccattactgatggtattgacaaaactagtgcaactttgcaatttagaaagttagcagattgtg

SEQ ID NO: 104680 - DNA, 237 bp, Glycine max
gtcttccatagccccccaaaaatgaagagcaccatcttctttgctctctttctcttttgtgccttcaccacctcatacctaccttcagccatcgctgatttcgtgctcgataatgaaggtaaccctcttgaaaatggtggcacatattatatcttgtcagacataacagcatttggtggaataagagcagccccaacgggaaatgaaagatgccctctcactgtggtgcaatctcga

SEQ ID NO: 104681 - DNA, 218 bp, Glycine max
cactggtcaacgacggtggcgttatagaacaaacatttttgtggggaaggtattctgtggaaatgtctgctgtagtttacaaggattgggtttttacagatcaagcattgcctgctgatcttataaaaagaggaatggcaattgaggatccatcgtgccctcatgggattcgccttgtgatagaggactacccttatgctgttgatggacttgagata

SEQ ID NO: 104682 - DNA, 200 bp, Glycine max
cggctcgagtgaaattttgataaaccgcgatcacaggttgccgcaccttaaaaccggaaacaaaagcaatcgttacttgatttcaagaatctctcaatttcttcctacttctttgtgtacgatttcttaagggaaataaaatcactctctgtgctggtcacagacttcgtgaatcattttcttttccactcttagtctat

SEQ ID NO: 104683 - DNA, 219 bp, Glycine max
caatatcctagtataccttaataaataatttaagatactatgatgagagcacggttcccattactgttgctgggacttgttttcctggcttcagtttctgtctcatttggcattgcttactgggaaaaagagaaccccaaacacaacaagtgtctccagagttgcaatagcgagagagactcgtacaggaaccaagcatgccacgctcgttgcaacctc

SEQ ID NO: 104684 - DNA, 198 bp, Glycine max
gtcgcagcaaaaccaaaccacatattaacttgtttgctctaagtcatggctctgatcttgcacgcaaccaaagcaaacaagaatgctttcaagacgctgattgcggcagagtacagtggcgtccaagtggaattggcccctaatttcgagatgggtgtctctaatagaactcctgaattccttaaaatgaatcccata

SEQ ID NO: 104685 - DNA, 263 bp, Glycine max
cggctcgagtaaaattcttccaccaagttatgggtttccttgtgttgcttcttttctccctcttaggtctctcttctagttccagcatatcaactcatcgttccatattggaccttgacctaaccaagtttaccacacagaaacaggtgtcttcactgttccaactatggaagagtgagcatggacgtgtctaccataaccacgaagaagaggcaaagagacttgagattttcaagaataacttgaactatatcagggacatg

SEQ ID NO: 104686 - DNA, 254 bp, Glycine max
tgatgattatgggcttcttgtcagtgagaaagcaaggaaatatgctatagtaaaagaacttgatgaggccgtgagtctcaaggatgaaacagttgttcttcagtttgagactcggcttcagaatggccttgagtgtggtggtgcatatctagaatatctccgaccacaggaggctggatggaaatccgaggaatttgataatgaatctccatattctatcatgtttggtcctgacaagtgtggtgccacaaaca

SEQ ID NO: 104687 - DNA, 137 bp, Glycine max
gttgtggtcaacgctacgtcaggtctgaatttctttgctatgggtattaatgccgacaacaaccataggaacttcctggcaggttcgcaacacaatgtgataagccaggtacctagtcgagtgcaggagcttgcatt

SEQ ID NO: 104688 - DNA, 239 bp, Glycine max
ataggcttggccttgctcttaacttttctgtattttactacgaaatccttaattctccggatcgtgcctgcaaccttgcaaaacaggcttttgatgaagctattgctgaattggatacactgggagaggagtcatacaaggatagcactttgatcatgcaactccttcgtgataacctcacactttggacctctgacatgcaggacgatggagcagatgaagttaaagaagcagcaccg

SEQ ID NO: 104689 - DNA, 212 bp, Glycine max
atcacatctggccttctctaagtgatgatcaatggatgaaggtggaggttgcattaagagatcttatactatcagattatgcaaagaaaaacaatgtgaatacttcagctttgactcagtctgagattcgtgatattatacttggagctgagattactccaccttctcaacagcggcaacagattgcagagattgagaaacatgcccatgat

SEQ ID NO: 104690 - DNA, 262 bp, Glycine max
gaaatatctatctagtgggacatcaggaactctatccactttatttgatgttggaggggtgctcggtggaattctagctggccacatttctgatcacttagaggctagagccattactgcagcaagtttcatgtactgtgcaatccccgctctcttcttctatcgaagttatgggcacgtttctttgattgtaaatggagcattgatgtgtgtcactggcatgtttgtgaacggaccttatgctcttataactactgcagtt

SEQ ID NO: 104691 - DNA, 261 bp, Glycine max
atatactgtatctttttggggagcttgaacaatttgtgctcactcaacaagcagtatggtttggcaaagggcaccaacgaagccatgtttgtgattgaagcttacaagacactccgtgaccgtggtccataccctgcagatcaagttgtgaaggatcttgatggcagctttggctttgttgtctatgacagcaaggttggcagtgtctttgcagcactgggttctgatggtggaattaagctgtattggggtattgcagct

SEQ ID NO: 104692 - DNA, 259 bp, Glycine max
ggaagaaaccctagccactctcccggcgtcacgatgcagatcttcgtgaaaaccctaacgggtaaaacgatcacgttggaggtggagtcttcagacaccatcgacaacgtgaaggccaagatccaggacaaggaaggcatccctccggaccagcagcgcctcatcttcgccgggaagcagctggaggacggccgcaccctcgccgactacaacatccagaaggagtccacgcttcacctcgtcctccgcctccgtggcg

SEQ ID NO: 104693 - DNA, 264 bp, Glycine max
ttcaatgcttgtctggaactggttctttaagagttgggggtgaatttttggctaaacactatcaccaacggactatatacttgccaacaccaacttggggcaatcacccgaaggttttcaacttagcaggcttgtctgtcaaaacataccgctactatgctccagcaacacgaggacttgactttcaaggacttctggaagaccttggttctgctccatctggatctattgttttgctacatgcatgcgcacataaccccactg

SEQ ID NO: 104694 - DNA, 242 bp, Glycine max
gttccactgcctacaaaaacagaatttggtggaaactcccaaggaatggcaactggatctaccttgtgacaaaatacctagtgtcttgactacaactgatgagagattggtaggcacagaacatgagggatatgatccttttcttggtggaattcaaaaatatgcgactcccatgatgcccctagatgaagaaattctttctaaggttgcacaagatatggttgaggaatggtttgattgtg

SEQ ID NO: 104695 - DNA, 250 bp, Glycine max
ggtctgcaaaagatattgagaacctaataaagagccaaagtgagtcctactttgtggatgctcagcctcagcagaaagaggaggggaacaagggaagaaagggtcctttgtcttcaattttgagggctttttactgaataagtatgtagtactaaaatgtatgctgtaatagctcatagtgagcgaggaaagtatcgggctatttaactatgacttgagctccatctatgaataaataaatcagcgtatg

SEQ ID NO: 104696 - DNA, 236 bp, Glycine max
cataaacaatatgtgtgcatatgggctcaatcctggtatttcaggttctcgtcttttgggcaccattcctcagtctatttcacagcaaactgtttggaatcaaatggcaacagtgagaacaccattgaattttgattctagcaagcagagcttttgtcaattttctattgaccttctcggtggaggaattttagtggacaaaactggagattggatcgcacttatacaaaattctc

SEQ ID NO: 104697 - DNA, 252 bp, Glycine max
gaaaaacacggaggaaagggaagtgaagaggaacaagatgaacgtgaacacccacgcccacaccaacctcatcaaaaggaagaggaaaagcacgaatggcaacacaagcaggaaaagcaccaaggaaaggaaagtgaagaagaagaagaagaccaagacgaggatgaggagcaagacaaagagagccaagaaagtgaaggttctgagtctcaaagagaaccacgaagacataagaataagaacccttttcac

SEQ ID NO: 104698 - DNA, 241 bp, Glycine max
gaagagaagtagaaaaaggaaggggggaggagactcgcctcaatacttcccactggacgagaggcgcacctaacccacctacccactcatcaatcacggtgttcagctgacttgcactgatagacccctattgtattggaattaggcgcccatctttttactgttgtcaactaatctcttccatgttcgattctactctatgttagaacatttctgtgaatgctattttgatctaagtggt

SEQ ID NO: 104699 - DNA, 239 bp, Glycine max
gttcgatatcctagtataccttaataaataatttaagatactatgatgagagcacggttcccattactgttgctgggacttgttttcctggcttcagtttctgtgtcatttggcattgcttactgggaaaaagagaaccccaaacacaacaagtgtctccagagttgcaatagcgagagagactcgtacaggaaccaagcatgccacgctcgttgcaacctgattaaggtggagaaaga

SEQ ID NO: 104700 - DNA, 266 bp, Glycine max
gcgaagagaatggctcccaagggtttaatctttttggctgtgttatgcttctcagcactgtcactgagtcgttgtcttgcggaggataatggacttgttatgaacttctacaaggaatcatgccctcaggctgaagacatcatcaaagaacaagtcaagcttctctacaagcgccacaagaacactgctttctcctggctcagaaacatcttccatgactgtgctgtttatagttgtgatgcttcactgttgctggactccacaag

SEQ ID NO: 104701 - DNA, 205 bp, Glycine max
agttgcagaccgagctagctagctagcaagcaagcacagagatggaggcaaagcgaggccatgccctcatgtgcttggcacgtgtttcgatcttcctctgcgctctaaccctatccgctgctcacggaagcaccacggttcaagacatcgcgagaaagttgaaactcggggacaacgagcttctgcgcacggataagaagttcaa

SEQ ID NO: 104702 - DNA, 214 bp, Glycine max
gttcaatatcctagtataccttaataaataatttaagatactatgatgagagcacggttcccattactgttgctgggacttgttttcctggcttcagtttctgtgtcatttggcattgcttactgggaaaaagagaaccccaaacacaacaagtgtctccagagttgcaatagcgagagagactcgtacaggaaccaagcatgccacgctcgtt

SEQ ID NO: 104703 - DNA, 163 bp, Glycine max
tcttggcaagttctttgagatcaccccagaggtaaacccccagctacgggacttggatatcttcctcagtattgtggatatgaacgagggagctcttcttctaccacactccagttcaaaggcgatagtgatactggtaattagtgaatgagatgcaaacatt

SEQ ID NO: 104704 - DNA, 256 bp, Glycine max
catttggaaatttggctgatgacaccatcaattttgaggcttttccccacaagctggtgcaatttggagagattcaggaaaaagttgtattgaaattttcacaagaggaatttcttacagcttggtcaactcaggtgcgtcctacaacaactctgttggctgatgggtgtccatatttgtatgctatggtgcatgatagttcagtgtctacaataccaggtgattttgtcattggtgttaagttgacaaccataaa

SEQ ID NO: 104705 - DNA, 260 bp, Glycine max
aacgttagcgcctccgaacataccaccaacaaagacgtcaacaacaacgtagaaaacggcgagagcagccgcagattcgagtgccattgttgttgcagaaacttccccacttcccaggccttaggcgggcaccaaaacgcgcacaaacgagagcgccacacgcgaaacgacaccttcaaagtaccctgatctccgatgcaaacgcgtatagcttcgtgaactacaggttcggttccacggcaatgtctaattacactgag

SEQ ID NO: 104706 - DNA, 235 bp, Glycine max
ggtctgcaaaagatattgagaacctaataaagagccaaagtgagtcctactttgtggatgctcagcctcagcagaaagaggaggggaacaagggaagaaagggtcctttgtcttcaattttgagggctttttactgaataagtatgtagtactaaaatgtatgctgtaatagctcatagtgagcgaggaaagtatcgggctatttaactatgacttgagctccatctatgaataa

SEQ ID NO: 104707 - DNA, 240 bp, Glycine max
gaatcctggtctctgtctactcttcaattattcccaacctctcacctcttcatcttcttcttccttacctttgaccagagacagagcagcactcacattcacaacgaaggtttcctattcatcagacatggtgaaggcaatcagagttcacgaactcggtggccctcaagttctgaagtgggaggatgtggaaattggagatccaaaagaaggcgaggtccgtgtgaggaacaaagccat

SEQ ID NO: 104708 - DNA, 260 bp, Glycine max
ggctggaaagggttctgcaactttgtcaatggcctatgctggtgccctttttgctgatgcttgcctcaagggcctcaatggagtcccagatgttgtcgagtgctctttcgtgcaatccactgttactgaacttcccttctttggttccaaggtgaggcttgggacggttggtgtggaggaagttctgggcttggggcacctctcagattttgagcaactgggcctcgaaagccttaagcctgaactcgaatcatcaattg

SEQ ID NO: 104709 - DNA, 264 bp, Glycine max
ctcgagccgtcttaaaccgtccaactcttagtaggcgattcatgcctgagaaaggttctggcgagtatgaggagctgaggaagaatccccagaaggcttacttgaagactattacaccaaagtttcagacccttattgacctttctgttatagaaatcttgtcaaggcatgcatctgatgaggtgtaccttggggagagggacaatccaaattggacatctgatacaagagcattagaggcttttaaaaggtttggaaataaac

SEQ ID NO: 104710 - DNA, 82 bp, Glycine max
catatactatgatgagagtgcggtttcctttgttggtgttgctgggaactgttttcctggcatcagtttgtgtctcattaaa

SEQ ID NO: 104711 - DNA, 214 bp, Glycine max
tgcaaacattgaacttgttggcctaaaagaacaacaacaggagcagcaacaggaagagcaacctttggaagtgcggaaatatagagccgaattgtctgaacaagatatatttgtaatcccagcaggttatccagttgtggtcaacgctacctcaaatctgaatttctttgctattggtattaatgccgagaacaaccagaggaacttcctcgca

SEQ ID NO: 104712 - DNA, 254 bp, Glycine max
ggtgggactatgtcactgattttcaaattagatgccccatgaaggagaagaagtacaataaggaatgtgcaaatgctgttattaaatcactgggtctcaatacggaaaagatttaaaagtgcatgggagatccagacgccgatactgataatcctgttttgaaagaagagcaagatgcccaaattggaaagggatcgcgaggtgatgttaccatattgcctactcttgtggtcaataatcgacaatatcgagga

SEQ ID NO: 104713 - DNA, 212 bp, Glycine max
ctaaaccctactcattctccatacctcaacgaagaggttaaagagacggcaacactttgctgtccgccttgaccgagcagagcttcgtcttggccctcgattttgccctaaagtactctcagtcacaacagacaccgtcgtcgtcgtcgtcgtcatcaatggcaccgaagcagaccaaggctgagaagaagatcgcttacgattcgaactgt

SEQ ID NO: 104714 - DNA, 263 bp, Glycine max
  unsure (1)..(263): unsure at all n locations
ggatcgagccgaatcggctgcgacccaaacacaacaagtgtctccacgcttgcaatagcgagagcgactcgtacaggaaccaagcatgccacgctcgttgcaacctccttaaggtggagaaagaagaatgtgaagaaggtgaaattccacgactgcgaccacagcgacaacacccgnagatggaacctcagcaacccggtgagaaggaggaagacgaatgtgagcaaccacgtccaatcccattcccacgcccacaacctcgt

SEQ ID NO: 104715 - DNA, 257 bp, Glycine max
attgaagccaaacatggtcacccctggatcccaatctgctaaggtttcccctcaggtggttgccgagcacactgtcagagcccttcagagaaccgtgcctgctgcagttcctgctgtcgttttcttgtctggtggccagagtgaggaggaggcatccgtcaacctcaacgccattaaccaggtcaatgggaagaagccatggtcactctctttctcctttggaagggcacttcaacagagcacccttaaggcatggg

SEQ ID NO: 104716 - DNA, 248 bp, Glycine max
gcgtagactcttcccagttctgttgtgtgagtctgtgagtctttcttagctgatatggcggttgatcgctcccttacgaggtgctgtagcctcgtactgtggtcgtggatgttgctgaggatgatgatggcgcagggtgcagccgcgagggccaaccggaatgagtgggactcggtcataaagttaccggctgaaccggtcgatgctgactcggatcatgaagtgggaacacgatgggcggttctttt

SEQ ID NO: 104717 - DNA, 253 bp, Glycine max
ctccattggtccttaaacactcatcagtcatcaccatggccaagctagttttttccctttgttttctgcttttcagtggctgctgcttcgctttcagttccagagagcagcctcagcaaaacgagtgccagatccaaaaactcaatgccctcaaaccggataaccgtatagagtcagaaggagggctcattgagacatggaaccctaacaacaagccattccagtgtgccggtgatgcgtaactcgttgagag

SEQ ID NO: 104718 - DNA, 243 bp, Glycine max
ccgattgctagaatggaatttcgatgctcagtcatctcttttaccattctcttctctcttgctcttgcaggagagagccatgtccatgcatcgctacctgaggaagattattgggaagctgtttggccaaacactcccattcccactgcactgcgagagcttctaaagcctctccctgcaggtgtagaaatcgatgaactccctaagcgaattgatgatacacagtacccaaaaacattcttc

SEQ ID NO: 104719 - DNA, 262 bp, Glycine max
ccttaaacactcatcagtcatcaccatggccaagctagttttttccctttgttttctgcttttcagtggctgctgcttcgctttcagttccagagagcagcctcagcaaaacgagtgccagatccaaaaactcaatgccctcaaaccggataaccgtatagagtcagaaggagggctcattgagacatggaaccctaacaacaagccattccagtgtgccggtgttgccctctctcgctgcaccctcaaccgcaacgccctt

SEQ ID NO: 104720 - DNA, 146 bp, Glycine max
gttcaatatcctagtatgccttaatgaataatttgagatagtatgatgagagcacggttcccattactgttgctgggacttgttttcctggcttcagtttctgtctcatttggcattgcgtactgggaaagagagaaccccaaaca

SEQ ID NO: 104721 - DNA, 257 bp, Glycine max
aaatgaccaagttcacaatcctcctcatctctcttctcttctgcatcgcccacacttgcagcgcctccaaatggcagcaccagcaagatagctgccgcaagcagctccagggggtgaacctcacgccctgcgagaagcacatcatggagaagatccaaggccgcggcgatgacgatgatgatgatgacgacgacaatcacattctcaggaccatgcggggaagaatcaactacataaggaggaacgaaggaaaagac

SEQ ID NO: 104722 - DNA, 231 bp, Glycine max
gttcaatatcctagtacaccgtattaaagaatttaagatatactatgatgagagcgcggttcccattactgttgctgggagttgttttcctggcatcagtttctgtctcatttggcattgcgtattgggaaaatcagaaccccagtcacaacaagtgcctccgaagttgcaatagcgagaaagactcctacaggaaccaagcatgccacgctcgttgcaacctccttaagg

SEQ ID NO: 104723 - DNA, 254 bp, Glycine max
aacctttcaacttgagaagccgcgaccccatctattccaacaagcttggcaagttgtttgagattaccccagataaaaaccctcagcttcgggacttggatgtcttcctcagtgttgtggatatgaacgagggagctctttttctgccacacttcaattcaaatgccatagtggtactagtgattaattaaggagaagcgaacattgaacttgttggcattaaagaacaacaacagaggcagcaacaggtttag

SEQ ID NO: 104724 - DNA, 258 bp, Glycine max
ggaagaaaccctagcctctcaccctccctgcgacacgatgcagatcttcgtgaaaaccctaacgggtaagacgatcacccttgaggtggagtcttctgacaccatcgacaacgtgaaggccaagatccaggacaaggaaggcatccctccggaccagcagcgcctcatcttcgccggaaagcagctggaggacggccgcaccctcgccgactacaacatccagaaggagtccaccctccacctcgtcctccgtctccg

SEQ ID NO: 104725 - DNA, 256 bp, Glycine max
gtagttctagatcgcgatctagaactagtcggctcgagcggctcgagcggctcgaggtgaaaggaggtctgagcgtgataaaaccacccacggaagagcagcaacaaagaccccaggaagaggaagaagaagaagaggatgagaagccacagtgcaagggtaaagacaaacactgccaacgcccccgaggaagccaaagcaaaagcagaagaaatggcattgacgagaccatatgcaccatgagacttcgccacaa

SEQ ID NO: 104726 - DNA, 252 bp, Glycine max
gaattcatgcctggaaaacaggtggggatgagtgatgtatgttaccctgacagtctgattgggaatattccaaatgtatattactatgctgcaaacaacccttctgaggccaccattgccaagcgcaggagttatgcaaacaccattagctatctgactcctccagcggaaaatgctgggctatacaaaggtcttaagcagttaagtgagctcatctcctcatatcagtccctcaaagacaccgcccgtggg

SEQ ID NO: 104727 - DNA, 227 bp, Glycine max
gttcaagctggtgaaatcttggattagtgctcccactctcctatctggtataggacttcgtgggtagacttttctatttctctcctttctttcactctcttcttctcactgatctgcattgccgttcaaagtggtcttatttgaaaaacacttgggcgttggtgcaaatgtttgcttcgttaattttctttggagacaacaggctcactgagaaaacaatttttact

SEQ ID NO: 104728 - DNA, 231 bp, Glycine max
ccgattgctagaatggaatttcgatgctcagtcatctcttttaccattctcttctctcttgctcttgcaggagagagccatgtccatgcatcgctacctgaggaagattattgggaagctgtttggccaaacactcccattcccactgcactgcgagagcttctaaagcctctccctgcaggtgttgaaatcgatgaactccctaagcaaattgatgatacacagtaccca

SEQ ID NO: 104729 - DNA, 255 bp, Glycine max
gtcttccatagccccccaaaaatgaagagcaccatcttctttgctctctttctcttttgtgccttcaccacctcatacctaccttcagccatcgctgatttcgtgctcgataatgaaggtaggcctcttgaaaatggtggcacatattatatcttgtcagacataacagcatttggtggaataagagcagccccaacgggaaatgaaagatgccctctcactgtggtgcaatctcgcaatgagctcgacaaaggg

SEQ ID NO: 104730 - DNA, 237 bp, Glycine max
attttgttggagatctcgtctttgaagtttctaagattacttctccctacattaaatgtacagtctctttcttcatagcatttggaaatttggctgatgacaccatcaattttgaggcttttccccacaagctggtgcagattggagagattcaggaaaaagttgtattgaaattttcacatgaggaatttcttacagcttggtcaactcaggtgcgtcctacaacaactctgttgg

SEQ ID NO: 104731 - DNA, 261 bp, Glycine max
ggacgaagccagaggccccaagaccgtcaccaaaaggtacatcgcttcagagagggtgatttgatcgcagtgcctactggtgttgcatggtggatgtacaacaatgaagacactcctgttgttgccgtttctattattgacaccaacagcttggagaaccagctcgaccagatgcctaggagattctatcttgctgggaaccaagagcaagagtttctaaaatatcagcagcagcagcaaggaggttcccaaagccagaaa

SEQ ID NO: 104732 - DNA, 224 bp, Glycine max
tgttggtcgaacccattgtgtgaagttggtgcaccgtttgcacccagagattgatccagctctgaaccctgaccacgtccctcacattctgaagaagtgccctgatgccattccagaccctaaggcggtgcagtacgtgagaaacgaccgtggcactcccatgattctagacaacaactactacagaaacatattagacagaagggtctcttgatagtggatca

SEQ ID NO: 104733 - DNA, 141 bp, Glycine max
atcaccatggccaagcttgttctttccctttgtttccttcttttcagtggctgcttcgctctgagagagcaggcacagcaaaatgagtgccagatccaaaagctgaatgccctcaaaccggataaccgtatagagtcggaa

SEQ ID NO: 104734 - DNA, 225 bp, Glycine max
tgtgaagaaggtgaaattccacgaccacgaccacgaccacaacacccggagagggaacctcagcaacccggtgagaaggaggaagacgaagatgagcaaccacgtccaatcccattcccacgcccacaacctcgtcaagaagaagagcacgagcagagagaggaacaggaatggcctcgcaaggaggaaaaacgcggagaaaagggaagtgaagaggaagatgag

SEQ ID NO: 104735 - DNA, 225 bp, Glycine max
gcgaaaaacctacaaggagagaacgaaggggaagacaagggagccattgtgacagtgaaaggaggtctgagcgtgataaaaccacccacggacgagcagcaacaaagaccccaggaagaggaagaagaagaagaggatgagaagccacagtgcaagggtaaagacaaacactgccaacgcccccgaggaagccaaagcaaaacagaagaaatggcattgacgaga

SEQ ID NO: 104736 - DNA, 227 bp, Glycine max
cggctcgagatcaaattcattcctttccttctttcttctaaaccctatggccgacgaagccacagccaaaggcaacgcagccttctcctccggggactatcctgccgccatccaccacttctccgatgccatcgccctggctccctccaaccatgtcctctattccaaccgatccgccgcatacgcctccctcaaaaactacgcagatgcattagcggatgccaaaa

SEQ ID NO: 104737 - DNA, 226 bp, Glycine max
caacaacacaccgctacgaagctggcgtcgtcccccccggagcccgtttcgaaccgccgcgttatgaagccggcgtcaaagcgccctccatttaccattccgagagaggtccaacgacttcccaggtcctcgccgtcctcgccggcctcccggtcggtggcatcctgctcctcctggcgggattgaccctggcaggaaccctcacggactggcagttgccacgccg

SEQ ID NO: 104738 - DNA, 230 bp, Glycine max
gcattttcagaggaaaatggcgggtacggtttcgacttgtttcttcttcgtgtttcttctttctctccttcttccttatcagatctccgctgaggaatcctcggagaaggagttcgtactcacattggatcactctaactttcacgacactgtcagcaagcacgatttcatcgtcgtcgagttctacgccccatggtgtggtcactgaagaagcttgctccggagtatga

SEQ ID NO: 104739 - DNA, 126 bp, Glycine max
caatatcctagtataccttaataaataatttaagatactatgatgagagcacggttcccattactgttgctgggacttgttttcctggcttcagtttctgtctcatttggcattgcttactgggaa

SEQ ID NO: 104740 - DNA, 221 bp, Glycine max
gtttgttgttcctcactgacctcaccatggcgaccagagccaagctttctttagctatcttccttttctttcttttagccttgatttcaaacctagccttgggcaaacttaaagaaaccgaggtcgaagaagatcccgagctcgtaacatgcaaacaccagtgccaacagcaacggcaatacactgagagtgacaagcaacatgcttgcaacaatgtgaca

SEQ ID NO: 104741 - DNA, 224 bp, Glycine max
cctcgagccgaatcggctcgaggtctttgaacactcatcaccatacgccaagcttgttcttaccctttgtttccttctttacagtggctgcttcgctctgagagagcaggcacagcaaaatgagtgccagatccaaaagctgaatgccctcaaaccggataaccgtatagagtcggaaggtgggttcattgagacctggaacctaacaacaagccattccagtg

SEQ ID NO: 104742 - DNA, 222 bp, Glycine max
gttgcaatggccgtttctttggcagtgaaccgtcctctgcttggtcttcacgagaatgtaccattagctgttgctcatccccaattcctcccgttcaaatggccacccaagtccaaactcccctccgtcgtcggaattcgatgctcctcctcccctttcaacgacaaaaccctcatttccatcacacctaacacttcccactcaatcccaaccctctcgctt

SEQ ID NO: 104743 - DNA, 224 bp, Glycine max
atacccccaactaacaataattccttcacttgcagaacttagttctctgttgcatcatcatcatcttcattagtgttagccctaaacttcaccttcaaccatgaccacagtgccaccacacagtgtccaagtgcacacaacaacacacctctacgaagccggcgtcgtcccgccggctcgttttgaggcgccgcgttacgagccggcatcaaggcgccctcttc

SEQ ID NO: 104744 - DNA, 226 bp, Glycine max
ataaaattcttccaccaagttatgggtttccttgtgttgcttcttttctccctcttaggtctctcttctagttccagcatatcaactcatcgttccatattggaccttgacctaaccaagtttaccacacagaaacaggtgtcttcactgttccaactatggaagagtgagcatggacgtgtctaccataaccacgaagaagaggcaaagagacttgagattttca

SEQ ID NO: 104745 - DNA, 171 bp, Glycine max
gagcacggttcccattactgttgctgggacttgttttcctggcttcagtttctgtctcatttggcatttcttactgggaaaaagagaaccccaaacacaacaagtgtctccagagttgcaatagcgagagagactcgtacaggaaccaagcatgccacgctcgttgcaacc

SEQ ID NO: 104746 - DNA, 154 bp, Glycine max
gtcgtcgagcacagttggtcaagtcatcaaatgcaaagctgcggtttcatgggaggcagggaagccacttgtgattgaagaagtagaggtggcaccaccacaagctggtgaagttagtttgaagatcctctacacctctctttgccacactgat

SEQ ID NO: 104747 - DNA, 217 bp, Glycine max
ccctgctgcataggaagaaaccctagcctctcaccctccctgcgacacgatgcagatcttcgtgaaaaccctaacgggtaagacgatcacccttgaggtggagttttctgacaccatcgacaacgtgaaggccaagatccaggacaaggaaggcatccctccggatcagcagcgcctcatcttcgccggaaagcagctgaggacggccgcaccctcg

SEQ ID NO: 104748 - DNA, 219 bp, Glycine max
atattctagaggcctcatacgacaccaaattcgaggagataaacaaggttctgtttggtagagaggaggggcagcaacaaggggaggagaggctgcaagagagtgtgattgtggaaatctcaaagaaacaaattcgggaactgagcaaacatgccaaatctagttcaaggaaaaccatttcttctgaagataaacctttcaactggagaagccgcgacc

SEQ ID NO: 104749 - DNA, 217 bp, Glycine max
cctgagaatacaggtatagcattggcctgtgctatgaatagttcttttagggggcgcgccagttctgatatttacaccatctgctctcaagactgtgaattgtggaatcctgcttgcacaaaagcaatgactatgtcatttaatccaaacccgtgttctgatgcatggagtttggaatttttgaagcgtaccggattcattgtgatatcatttgtgt

SEQ ID NO: 104750 - DNA, 219 bp, Glycine max
gtcttcctcagtgttgtggatatgaacgagggagctctttttctgccacacttcaattcaaaggccatagtggtactagtgattaatgaaggagaagcaaacattgaacttgttggcattaaagaacaacaacagaggcagcaacaggaagagcaacctttggaagtgcggaaatatagagctgaattgtctgaacagatatatttgtaatcccagcag

SEQ ID NO: 104751 - DNA, 221 bp, Glycine max
ctcgagccgttctaaagcactcatccacacattctccgtcgccacgacaacaatggctccacaagaaaggtgcgaaaggtggagttgtagcagcaaagaagaaggttcaggagaaggtaacgaaccctttgttcgagaagcgtccgaagcagttcgggatcggaggcgcgctgccgccgaagcgggacctgacgcgcttcgtgaagtggccgaagaacgtc

SEQ ID NO: 104752 - DNA, 218 bp, Glycine max
gccaaatgcctcgtcatctaattagtgacgcgcatgaatggattaacgagattcccactgtccctgtctactatccagcgaaaccacagccaagggaacgggcttggcggaatcagcggggaaagaagaccctgttgagcttgactctagtccgactttgtgaaatgacttgagaggtgtaggataagtgggagctgaaacagcgaaagtgaaatacc

SEQ ID NO: 104753 - DNA, 222 bp, Glycine max
actcgagccgaatcggctcgaggattcctgggaaactcatttcaatagagtgagagagagacagagagagagagagatgtatcacagtgaaacgaagaagccctaactacgcacgcactcattcttgagagagctcaatattcattcgtccatggcactctcttctcgtctcttttccaaatccaaattgatctatggcgtcaaatacttctgcaaaaggag

SEQ ID NO: 104754 - DNA, 223 bp, Glycine max
aaatgaccaagttcacaatcctcctcatctctcttctcttctgcatcgcccacacttgcagcgcctccaaatggcagcaccagcaagatagctgccgcaagcagctccagggggtgaacctcacgccctgcgagaagcacatcatggagaagatccaaggccgcggcgatgacgatgatgatgatgacgacgacaatcacttctcaggaccatgcggggaaga

SEQ ID NO: 104755 - DNA, 224 bp, Glycine max
gagagattcaggaaaaagttgtattgaaattttcacaagaggaatttcttacagcttggtcaactcaggtgcgtcctgcaacaaccctgttggctgatgggtgtccatatttgtatgctatggtgcatgacagttcagtgtctacaataccaggtgattttgttattggtgttaagttgacaaccataaacaatatgtgtcatatgggctcaatcctggtattt

SEQ ID NO: 104756 - DNA, 220 bp, Glycine max
cgctgattacctcatcgttatccttaacgggactgccattctttccttggtgaacaacgacgacagagactcctacagacttcaatctggtgatgccctgagagtcccctcaggaaccacatactatgtggtcaaccctgacaacaacgaaaatctcagattaataacactcgccatacccgttaacaagcctggtagatttgagagtttcttcctatct

SEQ ID NO: 104757 - DNA, 218 bp, Glycine max
atcacacttatacaaaattctccaattagtaacttgttgagagttgctgcttggaagaaaggctgtttaatggttaagattgtgatgtctggaaatgcagcagtcaaaaggagtgattgggcctcattggtacaagtctttttaacaaacagcaacagtacagagcattttgatgcttgtaagtggacaaaatcggaaccacattcctgggaattgat

SEQ ID NO: 104758 - DNA, 217 bp, Glycine max
atagcatctcctttaccaccattctagatatcagagaactttgcagctctcttaggtttttaaaaaacaccacgcaaacagcaagatggccacttccgacagtaacatgctactaaattatgttccagtttatgtgatgctcccactcggagttgtcaatgttgacaatgtttttgaagacccagatggccttaagaacagctcttgcagcttcgag

SEQ ID NO: 104759 - DNA, 214 bp, Glycine max
gttggtgtggtttggttttactttaggtacaagaatttccaggactcgaagagggctatcgataagtcgaaatggacgttgatgtcgtttcataagctgggttttagtgaagatgagattttgaactgtcttgatgaggataatgtgattggaagcggatcgtccgggaaggtctacaaggttgtgcttagcgtggggaggttgtggctgtgaa

SEQ ID NO: 104760 - DNA, 214 bp, Glycine max
tggggatggtgaagagatgacattgattccaggaaccagtgttgaagaggcttacaacaagctaatagttgaacttgagaaaagtgttcctacattggttggcattgaatgtcccaaggatgagaaacttcctcgtcgcaaaatttttgacaaacctaagacgcgctgcttcactattctccctatggagtttatcttgtggtccgtcaaaagt

SEQ ID NO: 104761 - DNA, 216 bp, Glycine max
cagggtaagcatattcctgtatctaatattagtgcaggggaaaatcatgtagttcaaatacccctaatggcacaggaggaaattctgtcttctagtgcaagtgattttagaactgcaatggtgagtaaaaatagcaagcctcaagctactgcaatgcatgtgggagctatagacattatcattgatagtttcgaagtcctgactgcaacatagttg

SEQ ID NO: 104762 - DNA, 217 bp, Glycine max
  unsure (1)..(217): unsure at all n locations
tgcattcaaagtcttcgtatgantgccaaccactggtggtcctgctcctgcagctgctccagatcctggttctgagctagcaaaggcatagaatgtccaatgatgacaagcaacaatgttgtacgaaacttagaaagccagtgaatagggaccataaataaatagaggactgctgaatgaagttgcttgagtggactcaagcttggttggataatat

SEQ ID NO: 104763 - DNA, 216 bp, Glycine max
gctgttgacaagttgtattctactaaggttaataagtttgcaaaaattatgatggttagacgaagtgttgttggtgatctaaaacttcttactgatgggtagttgtatgagggtaagcatattcctgtatctaatattagtgcaggggaaaatcatgtagttcaaatacccctaatggcacaggaggaaattctgcttctagtgcaagtgatttca

SEQ ID NO: 104764 - DNA, 219 bp, Glycine max
gtttgttgttcctcactgacctcaccatggcgaccagagccaagctttctttagctatcttccttttctttcttttagccttgatttcaaacctagccttgggcaaacttaaagaaaccgaggtcgaagaagatcccgagctcgtaacatgcaaacaccagtgccaacagcaacggcaatacactgagagtgacaacgaacatgcttgcaacaatgtga

SEQ ID NO: 104765 - DNA, 221 bp, Glycine max
tttggtcgattttcttcaagtgtgaaaggctttcggaatatagacttgtttgtccagcacaacgatgggaaaaagatcatagatcctgaaagccagaaaaccttgtgttcatgcttaaaagaagagatgcttcatccgttgcgggtgacgatagtgaaccggggtccagacacagaacttctggttgctaatcctgtggagctgagtggaaaggggagacc

SEQ ID NO: 104766 - DNA, 221 bp, Glycine max
atttactctccacattggaatctgaatgcaaacagtgtgatctatgtgactcgaggacaaggaaaggttagagttgtgaactgccaagggaatgcagtgttcgacggtgagcttaggaggggacaattgctggtggtaccacagaacttcgtggtggcggacaagccggagaacaaggattctaatacatagtattcaagcacaccacaacgcagtcacta

SEQ ID NO: 104767 - DNA, 227 bp, Glycine max
gattcgggcactgagcaaacgtgccaaatctagttcaaggaaaaccatttcttctgaagataaaccttttaacttgagaagccgcgaccccatctactccaacaagcttggcaagttctttgagatcaccccagagaaaaacccccagcttcgggacttggatatcttcctcagtattgtggatatgaacgagggagctcttctttaccacacttcaattcaaaggc

SEQ ID NO: 104768 - DNA, 106 bp, Glycine max
cggaattggtcgaggaaccttttctcttcggctctaacaggttcgaaactctcttcaaaaaccaatatgcgtcgcattcgcgtcgctccagaggttcaactcaacg

SEQ ID NO: 104769 - DNA, 97 bp, Glycine max
gagactcgtacaggaaccaagcatgccacgctcgttgcaacctccttaaggtggagaaagaagaatgtgaagaaggtgaaattccacgagcacgacc

SEQ ID NO: 104770 - DNA, 214 bp, Glycine max
tctctccattgtctttgaacactcatcacgatggccaagcttgttctttccctttgtgtccttcttttcagtggctgcttcgctctgagagagcaggcacagcaaaatgagtgccagatccaaaagctgaatgccctcaaaccggataaccgtatagagtcggaaggtgggttcattgagacctggaaccctaacaacaagccattccagtgtg

SEQ ID NO: 104771 - DNA, 214 bp, Glycine max
cccagagaaaaacccccagcttcgggacttggatatcttcctcagtattgtggatatgaacgagggagctcttcttctaccacacttcaattcaaaggcgatagtgatactggtaattaatgaaggagatgcaaacattgaacttgttggcctaaaagaacaacaacaggagcagcaacaggaagagcaactttggaagtgcggaaatatagag

SEQ ID NO: 104772 - DNA, 216 bp, Glycine max
gccaaatgcctcgtctcctaattagtgacgcgcatgaatggattaacgagattcccactgtccctgtctactatccagcgaaaccacagccaagggaacgggcttggcggaatcagcggggaaagaagaccctgttgagcttgactctagtccgactttgtgaaatgacttgagacgtgtaggataagtgggagctggaaacagcgaaagtgaaat

SEQ ID NO: 104773 - DNA, 216 bp, Glycine max
cggctcgagctctttgcaacacaacaaaaaaagacaacccagagagcgcgtcttaataaacgctcttctctgaaaacccccatttcttttcttctttcttcttctctttcgcttcttcgatcttcgatcttcgtcgctgaaaatgagagagtgcatttcaatccacatcggccaggccgggattcaggttggaacgcctgctgggagctttactgc

SEQ ID NO: 104774 - DNA, 216 bp, Glycine max
catttggaaatttggctgatgacaccatcaattttgaggcttttccccacaagctggtgcaatttggagagattcaggaaaaagttgtattgaaattttcacaagaggaatttcttacagcttggtcaactcaggtgcgtcctacaacaactctgttggctgatgggtgtccatatttgtatgctatggtgcagatagttcagtgtctacaatacc

SEQ ID NO: 104775 - DNA, 217 bp, Glycine max
aatgttttaaacgttgttacgttgattgttctggcagacatacatgttcaagtacgacaccgttcatgggcagtggaagcattttgatgtgaagctgaaggactctaagacccttctcttcggtgagaagcccgtcaccgtttttggattcaggaaccctgaggaaattccatggggtgaggttggtgctgatttgttgttgagtcaactggcgtat

SEQ ID NO: 104776 - DNA, 219 bp, Glycine max
aaagatgttcttgtggagagagtagttggacggagattagatcctgttaccggcaagatatatcacttgaagtattctcctccagagacacaagaaatagccgcaaggcttacccaacgctttgatgatacagaagaaaaggtgaaattgcgattgaatacccatcatcaaaatgtggagtcagtcctttccatgtacaagacataactgttaagatta

SEQ ID NO: 104777 - DNA, 224 bp, Glycine max
ttgtcctagcacttatcaagagccgcaagaatctcagcaacgaggacgaagccagaggccccaagaccgtcaccaaaaggtacatcgcttcagagagggtgatttgatcgcagtgcctactggtgttgcatggtggatgtacaacaatgaagacactcctgttgttgccgtttctattattgacaccaacagcttggagaacagctcgaccagatgcctaggag

SEQ ID NO: 104778 - DNA, 213 bp, Glycine max
caataattccttcacttgcagaacttagttctctgttgcatcatcatcatcttcattagtgttagccctaaacttcaccttcaaccatgaccacagtgccaccacacagtgtccaagtgcacacaacaacacaccgctacgaagccggcgtcgtcccgccggctcgttttgaggcgccgcgttacgaagcggcatcaaggcgccctcttccat

SEQ ID NO: 104779 - DNA, 208 bp, Glycine max
gaccattcttctgcagtctttctgcaattgagtggctctgcctgcggatggagttactgtcaacctttgtatttgctttctgtatggtattacttgtgagttttcctcgtggaagtatcgaccccagcatggctggacttgctgtgacatatggcctgaatttaaatgcacgcctatcacggtggatatcagcttttgcaagcttgaa

SEQ ID NO: 104780 - DNA, 211 bp, Glycine max
attgtatttgtcgatgaagttgacagtctgcttggagctcgaggtggtgcttttgagcatgaggccactagaagaatgaggaacgagttcatggcagcttgggatggattgaggtcaaaagaaaaccaaagaatccttattctgggtgcaactaaccggccatttgaccttgatgatgctgttattcgcgtttgccaagaaggatatatgt

SEQ ID NO: 104781 - DNA, 212 bp, Glycine max
atcctagtacaccttattaaagaatttaagatatactatgatgagagcgcggttcccattactgttgctgggagttgttttcctggcatcagtttctgtctcatttggcattgcgtattgggaaaagcagaaccccagtcacaacaagtgcctccgatgttgcaatagcgagaaagactcctacaggaaccagcatgccacgctcgttgcaa

SEQ ID NO: 104782 - DNA, 210 bp, Glycine max
atgggtgtcaacaggtcaccctccaagtgtgcctctgttggcattcaaggcattgcttgggcctttggtggcatgatctttgcccttgtctactgcactgctggaatttcagggggacacatcaacccagctgtgacctttggtctgtttttggcaaggaagctgtccctaacaagggcactgttctacatatcatgcagtgtcttggag

SEQ ID NO: 104783 - DNA, 214 bp, Glycine max
tgttgcgattatgctagttttgatggtttgattaccaagcaagttatgagcaagatggcagaaatgataaacagtctttgtggtggtgatgaaaaattgatgcgtgaaaggacgcacctgctgttggcttgttgttcaaggatggcaatttgtaagaaagatgtttggagagttgaatgtggaatcccttctggatttccgctcacagttattt

SEQ ID NO: 104784 - DNA, 218 bp, Glycine max
ccgcagagtcagagagagagattcactgaaacagagcgcagaagaaaatacataaactaatccagaaaatgagcagcggcgctggaaaggtggtgtgtgtcaccggcgcttccggttacattgcttcctggatagtcaaattcctcctcaatcgcggctacaccgttaaggccaccgttcgcgacacaagtgatcgaaaaaaataaaccacttggttg

SEQ ID NO: 104785 - DNA, 221 bp, Glycine max
gtgcatttcaatccacatcggccaggccgcgattcaggttggaaacgcctgctgggagctttactgcctcgaacacggcattcagcctgatgggcagatgccaagtgacaagaccgttggtggaggtgatgatgctttcaacaccttcttcagtgaaactggggcaggaaagcacgtgccccgtgcgatttttgtagatcttgagcccactgtgattgatg

SEQ ID NO: 104786 - DNA, 227 bp, Glycine max
agatggtccagattagtaccacaaaaatggagaaatagaataactgaatatcgtatagctcaaaataaagatttaaccaaatgcaattcatatgaaaaaagccaattaattctttacaaagaacaacaagtaaacgcattaaaaaaaaaaaattagaaaacaatatagatacgatcttttatcctataattttatcaattatgcagataagaaagactcatatattt

SEQ ID NO: 104787 - DNA, 265 bp, Glycine max
ttaaacactcatcagtcatcaccatggccaagctagttttttccctttgttttctgcttttcagtggctgctgcttcgctttcagttccagagagcagcctcagcaaaacgagtgccagatccaaaaactcaatgccctcaaaccggataaccgtatagagtcagaaggagggctcattgagacatggaaccctaacaacaagccattccagtgtgccggtgttgccctctctcgctgcaccctcaaccgcaacgccttcgtaga

SEQ ID NO: 104788 - DNA, 255 bp, Glycine max
ctcgagccgtgcagaccgagctagctagctagcaagcaagcacagagatggaggcaaagcgaagccatgccctcatgtgcttggcacgtgtttcactcttcctctgcgctctaaccctatccgctgctcacggaagcaccacggttcaagacatcgcgagaaagttgaaactcggggacaacgagcttctgcgcacggagaagaagttcaaggttttcatggagaattacgggaggagctactccacagaggaga

SEQ ID NO: 104789 - DNA, 260 bp, Glycine max
ctctcgctcttgcattagtcctcttccaacaatccgcacctaaactctagggttctgacatggacactggtggaaagatcaagaagggcgccggaggaagaaagggcggcggcccaaagaagaagccggtttcaaggtccgtcaaggccggtctccaattccccgtcggaagaattggccgttatttgaagaaaggaaggtacgcccagcgtgtcggtaccggtgctcccgtttacttggccgcagttctcgagtaccta

SEQ ID NO: 104790 - DNA, 262 bp, Glycine max
ctaacaattccttcacttgcagcactgttgcatcatcatcttcattgcaaaaccctaaacttcaccttcaaccatgaccacacaagtaccaccacacagtgtccaagtccacacaacaacacaccgctacgaagctggcgtcgtcccccccggagcccgtttcgaaccgccgcgttatgaagccggcgtcaaagcgccctccatttaccattccgagagaggtccaacgacttcccaggtcctcgccgtctcgccggcctcc

SEQ ID NO: 104791 - DNA, 257 bp, Glycine max
gaaaatttaggtcacttgaagtctaaggatgctcttgagattggaacaaaatctttatctcaaattgtccagccggcgttcgaatctgcgttcgatttgaaatccacgccaattgagtttcatagcttccaagatgtgcatgacttgtatgaaggtggaattaagcttcctagagatgtaattagcacaattatccccttaccagtgatcaaagaactctatcgtaccgatggtcaacacatcctcaagtttccaca

SEQ ID NO: 104792 - DNA, 255 bp, Glycine max
aagaaagtgaaattctgagttacgaagacataagaataagaacccttttctcttcggctctaacaggttcgaaactctcttcaaaaaccaatatggtcgcattcgcgtcctccagaggttcaaccaacgctccccacaacttcagaatctccgagactaccgcattttggagttcaactccaaacccaacaccctccttctccccaaccatgctgacgctgattacctcatcgttatccttaacggactgccatt

SEQ ID NO: 104793 - DNA, 258 bp, Glycine max
acaaccttcaatctggcgatgccctaagagtccctgcaggaaccacatactatgtggttaaccctgacaacgacgagaatctcagaatgataacactcgccatacccgttaacaaacccggtagatttgagagtttcttcctatctagcactcaagctcaacagtcctacttgcaagggttcagcaagaatattctagaggcctcatacgacaccaaattcgaggagataaacaaggttctgtttggtagagaggagg

SEQ ID NO: 104794 - DNA, 255 bp, Glycine max
ctcgagccgaatcggctcgaggaagaaaagaatgaccccgagactgcaaaaaagcttgactctctggcagatctgtaactgaatgatgcatttggtactgctcacagggcacatgcatcaacagagggtgttactaaatacctgaagccatctgttgctggttttcttttgcaaaaggaacttgattaccttgttggggcagtatcaaaccccaaaaggccatttgctgccattgttggtggttcaaagtctcat

SEQ ID NO: 104795 - DNA, 256 bp, Glycine max
taaaattcttccaccaagttatgggtttccttgtgttgcttcttttctccctcttaggtctctcttctagttccagcatatcaactcatcgttccatattggaccttgacctaaccaagtttaccacacagaaacaggtgtcttcactgttccaactatggaagagtgagcatggacgtgtctaccataaccacgaagaagaggcaaagagacttgagattttcaagaataacttgaactatatcgggacatgaat

SEQ ID NO: 104796 - DNA, 259 bp, Glycine max
ctcgagccggttcaatatcctagtataccttaataaataatttaagatactatgatgagagcacggttcccattactgttgctgggacttgttttcctggcttcagtttctgtctcatttggcattgcttactgggaaaaagagaaccccaaacacaacaagtgtctccagagttgcaatagcgagagagactcgtacaggaaccaagcatgccacgctcgttgcaacctccttaaggtggagaaagagaatgtgaaga

SEQ ID NO: 104797 - DNA, 261 bp, Glycine max
gcttccccagtatccacccacctcggaggcccaagccaaagatcctgccgacatcgtaagtaaatcttataaagatggagatgataactaatgttaccgagtatgaggctattgcaaaggaaaaattgccaaagatggtttatgactactatgcatcaggggcagaggatcagtggactttgaacgagaaccgaaatgcgttctcaaggattctgttccggccgcgtattcttgttgatgtaagcaagatagacttgacta

SEQ ID NO: 104798 - DNA, 267 bp, Glycine max
ctctcgctcttgcaattagtcctcttccaacaatccgcacctaaactctagggttctgacatggacactggtggaaagatcaagaagggcgccggaggaagaaagggcggcggcccaaagaagaagccggtttcaaggtccgtcaaggccggtctccaattccccgtcggaagaattggccgttatttgaagaaaggaaggtacgcccagcgtgtcggtaccggtgctcccgtttacttggccgcagttctcgagtactagctgctg

SEQ ID NO: 104799 - DNA, 260 bp, Glycine max
aaagcaatggctcttcaaagttgaaaacccagaatgtggttgtatctctctccctaaccttaaccttggtactggtgctactgaccagcaaggcaaactcagcggaaactgtttctttcagctggaacaagttcgtgccgaagcaaccaaacatgatcctccaaggagacgctattgtgacctcctcgggaaagttacaactcaataaggttgacgaaaacggcaccccaaaaccctcgtctcttggtccgccctctact

SEQ ID NO: 104800 - DNA, 257 bp, Glycine max
aacttattaacctttccttagttcaatatggggaagcccttcttcactctctctctttcttccctttgcttgctactcttgtcgagtgcatgctttgctattacctccagcaagttcaacgagtgccaactcaacaacctcaacgcgttggaacccgaccaccgcgttgagtccgaaggtggtcttattgaaacatggaactctcaacaccctgagctgcaatgcgccggtgtcactgtttccaaacgcaccctcaa

SEQ ID NO: 104801 - DNA, 234 bp, Glycine max
tctcgagccgatcggctcgagggaagaatcactcccttatccacttccacaccacaccatggatacaaccaacgctcactcttcagcctccattctacgctctcccaaccgccagtctctgacccgaagagcgaaccataatggaagagtaaattaccggaaaccgaataaccgtttccccgtgaaggctcggccaaagagattgcctttgaccagcattccggtctgctatgc

SEQ ID NO: 104802 - DNA, 230 bp, Glycine max
ccatattaaaatatggggagccgtacgtgcaaactatttatcagctatctatgcatgtgtccgtctctgtaacgtttgtatggaaaaatggaaataagtaacaaattgttattagttgttacctttgtggcatctactccagctttgatttcctagctagttgttatgtaatgtaaccaatataatcgaagcatgttgagaataaaatactccctactcattccaacttc

SEQ ID NO: 104803 - DNA, 252 bp, Glycine max
ggggagaaattgcaactgctgccatggctcagggttccactcctcctgaccattgcaatctcatatctcgatcttacaagacgctttggaaagatttagatatttcttacgacaagttcattagaacaactgatagcaagcatgaagcaattgtgaaggaattttattcaagagtgcttgccaatggtgacatctaccgagctgattatgatggactttattgtgtaaactgtgaggaatataaggatgaga

SEQ ID NO: 104804 - DNA, 255 bp, Glycine max
acgttccgagttttctgatcgctcatagagagttcgacgcggcggttgcagaagaagattgcaagatgaagttcaacatcgcgagtcccaccactggatgccagaagaagctcgagatcgacgacgatcagaaactacgagcattttgggacaagaggatctcacaggaggtcagcggagatgcacttggtgaggaatttaagggctatgtcttcaaaattactggaggttgtgacaaacaaggattcccgatga

SEQ ID NO: 104805 - DNA, 257 bp, Glycine max
agagcattgtgatgcttgtaagtggacaaaatcggaaccacattcctgggaattgatcttcccaatagaggtatgtggtcctaataatggttttgaaatgtggagttctgagtgggcaaatcaaacttcatggcatttgagtttccttattgacaatcccaaacagtctacagtttttgatattctcttgggaatttctcaagattttgaaattgctggtaatactcttatgccagctttttctgttccacaggcta

SEQ ID NO: 104806 - DNA, 259 bp, Glycine max
tgacccatatgtagatgactattaccaccaagcttgtctggcaaaaaaaacttctgtggctaagtttaaacatccattttgacccaatccaaataagggaatatcctccacgatcccgtgctaatactgagccacattcatttgttcagattgatgccctagggagagtttcattttcttctattcgtcgtcctcgccctcttcttgaggttgaccctccaaacacttctgctagctctgatcaaaaatttcagagaag

SEQ ID NO: 104807 - DNA, 260 bp, Glycine max
cccaagagaagatttgttagagggaaatttttcctttgatattaaatctcgctctagattggaaaaagtttcctctacaaaagcacaatttgttagtggaaaaaccttcaaatatgatataattggtgctggttcacattcttcaggagattttcctgaaaaggaagatcaagaaaaacccaaaaagattgataccagattgagacaaagaatagatcctcaatacaatgaggttcaggctcagatggaaacaaatttgt

SEQ ID NO: 104808 - DNA, 267 bp, Glycine max
ttgcaggattgaagatgggtcaagcattcggttgctaccaagtcgatcagtcaaatgtggctatcaaggagcattttggaaaatttgatgatgtcctagagcctggatgtcactgcctgccttggtgtcttgggtaccagattgctggtagtctgtcgctgcgagtgcagcaacttgatgttcgatgtgagacgaaaaccaaggacaatgtctttgtcaatgtggttgcatctgtgcaataccgagctgtgtctgagaaagcatctg

SEQ ID NO: 104809 - DNA, 244 bp, Glycine max
actaaacttacaaaagcgtgcgcattttctttgccaaccatacataggtaactagtgagacaccagcaccacttgtggagtacagagaagaagaatagaagagtgtaagaggatatggaacgggagagcgcaaggaatatgataggatctatgattatgatgtctacaatgagttgggcaacccagataagagtgtagagttagctcgtccagttcgtggagggtctagcacctttccctaccc

SEQ ID NO: 104810 - DNA, 256 bp, Glycine max
ctcgagcggtcctagcacatttgaagagcctcaacaacctcaacaaagaggacaaagaagcagaccacaagaccgtcaccagaagatctataacttcagagagggtgatttgatcgcagtgcctactggtgttgcatggtggatgtacaacaatgaagacactcctgttgttgccgtttctattattgacaccaacagcttggagaaccagctcgaccagatgcctaggagattctatcttgctgggaaccaagag

SEQ ID NO: 104811 - DNA, 250 bp, Glycine max
atgatcgcagattgctgatgaggatcctgacgagtcaactgacaaagaaaagaaagaagatgcatcctctgacaatgatgagaagaaaggtcaatattctaagttctggaatgagtttggtaaatccattaaagttggtatcatcgaggatgccaccaacagaaatcgtttggcaaaactgctcagatttgagagcaccaagtctgagggtaaattgacatctctggatcagtacatatcagaatgaaaa

SEQ ID NO: 104812 - DNA, 250 bp, Glycine max
aattttcttccccaaatcgtagatctacggtttaactggagtagtgtggtaagatgggaggtggatttagagtgcttcatttagttaggccgtttctatcgtttcttcctgaagttcaaactgctgacaggaaagtgccatttagagagaaggtcatatacactgtgatctctcttttcattttcctggtttgtagtcagctccctctatatgggatacactcaacaacaggtgctgatcattctattgg

SEQ ID NO: 104813 - DNA, 250 bp, Glycine max
  unsure (1)..(250): unsure at all n locations
ggtctgaaaagatattgagaacctaataaagagccaaagtgagntctactttgtggatgctcagcctcagcagaaagaggaggggaacaagggaagaaagggtcctttgtcttcaattttgagggctttttactgaataagtatgtagtactaaaatgtatgctgtaatagctcatagtgagcgaggaaagtatcgggctatttaactatgacttgagctccatctatgaataaataaacagcatatgat

SEQ ID NO: 104814 - DNA, 252 bp, Glycine max
ctcgagcggtcctagcacatttgaagagcctcaacaacctcaacaaagaggacaaagcagcagaccacaagaccgtcaccagaagatctataacttcagagagggtgatttgatcgcagtgcctactggtgttgcatggtggatgtacaacaatgaagacactcctgttgttgccgtttctattattgacaccaacagcttggagaaccagctcgaccagatgcctaggagattctatcttgctgggaacca

SEQ ID NO: 104815 - DNA, 251 bp, Glycine max
cttggatagtgctcccactctcctatctggtataggacttcgtgggtagacttttctatttctctcctttctttcactctcttcttctcactgatctgcattgccgttcaaagtggtcttatttgaaaaacacttgggcgttggtgcaaatgtttgcttcgttaattttctttggagacaacaggctcactgagaaaacaatttttacttgcagagatttggacatcttggttgtttatttacaatagcaa

SEQ ID NO: 104816 - DNA, 251 bp, Glycine max
cagaaggtggacacgtgttcgaggaaatgcagaggccaggtaccccactatacaacatcaaggcatacctccctgtcatcgagtcctttggtttctcgagcacattgagggctgcaacatcaggccaggccttcccacaatgtgtgtttgatcactgggacatgatgtcttctgacccattggaggctggatcacaagctgcacagcttgtcactgacattcgcaagaggaagggcttgaagaacagatga

SEQ ID NO: 104817 - DNA, 254 bp, Glycine max
agctttgatgaagttcatggactctattcaggcggaattaagctgccaacagatataatcagcaagattagtccactacccgtgcttaaggaaatcttccgaactgatggtgaacaggcccttaagtttcctcctcctaaagtaattcaagtgagtaagtctgcatggatgactgatgaagaatttgcaagagaaatgcttgctggtgtaaatccaaacttgattcgttgtcttaaggatttcccccacgaagc

SEQ ID NO: 104818 - DNA, 264 bp, Glycine max
aaagcaatggctacttcaaagttgaaaacccagaatgtggttgtatctctctccctaaccttaaccttggtactggtgctactgaccagcaaggcaaactcagcggaaactgtttctttcagctggaacaagttcgtgccgaagcaaccaaacatgatcctccaaggagacgctattgtgacctcctcgggaaagttacaactcaataaggttgacgaaaacggcaccccaaaaccctcgtctcttggtcgcgcctctactcca

SEQ ID NO: 104819 - DNA, 261 bp, Glycine max
gcacttcccgaagtgttaagagaatgcctctttctatagggggaggagctggtgcaaagaatgctattctcatgaatatgccaaatgctgttctttcaatgtggagatattttgttggagatctcgtctttgaagtttctaagatgacttctccctacattaaatgtacagtctctttcttcatagcatttggaaatttggctgatgacaccatcaattttgaggcttttccccacaagctggtgcagttggagagattca

SEQ ID NO: 104820 - DNA, 257 bp, Glycine max
ccctaacacacaggcgcagacgcaaacgcaaacgcaaacgcaaacgcaaacgcagagcgtgatccattgacgaagatggtgcagcgtctcacctaccgcaagcggcacagctatgccaccaagtccaaccaacacagggtcgtcaaaacccctggtgggaagctcgtttatcagactaccaagaagagggccagcggacccaagtgccccgtcactggcaagaggattcaggggattccacacttgaggcctgcaga

SEQ ID NO: 104821 - DNA, 253 bp, Glycine max
ctgtgtctcggcttcagcatgttgaattgagtggacttcagggagtaacagatgcagggtttcttccattgctggagagctctgaggctggtctggttaaagttaatctaaatggctgtgtaaatctttcagacagagtagttttgtccatggtcaactcacatggatggactctcgaggtgctaagccttgatggttgtaaaagagttggtgatgctagcttgatggcaattgcaggcagttgcccattgct

SEQ ID NO: 104822 - DNA, 253 bp, Glycine max
agaaagcttccatagccccccaaaaatgaagagcaccatcttctttgctctctttctcttttgtgccttcaccacctcatacctaccttcagccatcgctgatttcgtgctcgataatgaaggtaaccctcttgaaaatggtggcacatattatatcttgtcagacataacagcatttggtggaataagagcagccccaacgggaaatgaaagatgccctctcactgtggtgcaatctcgcatgagctcgaca

SEQ ID NO: 104823 - DNA, 251 bp, Glycine max
acgcactgagttgactgatgggtgtccatatttgtatgctatggtgcatgatagttcagtgtctacaataccaggtgattttgtcattggtgttaagttgacaaccataaacaatatgtgtgcatatgggctcaatcctggtatttcaggttctcgtcttttgggcaccattcctcagtctatttcacagcaaactgtttggaatcaaatggcaacagtgagaacaccattgaattttgatctagtaaaca

SEQ ID NO: 104824 - DNA, 252 bp, Glycine max
aatggtcccaagggtttaacctttctggctgtgttaatatgcgtttcagcactgtcactgagtccttctgttgcgggggaagggcaaaataatggccttgttatgaacttctacaaggaatcatgccctcaggctgaagacatcatcacagaacaagtcaagcttctctacaagcgccacaagaacactgctttctcctggctcaggaacatcttccatgactgtgctgttcagagttgtgatgcttcactg

SEQ ID NO: 104825 - DNA, 249 bp, Glycine max
gttaatatcctagtataccttaataaataatttaagatactatgatgagagcacggttcccattactgttgctgggacttgttttcctggcttcagtttctgactcatttggcattgcttactgggaaaaagagaaccccaaacacaacaagtgtctccagagttgcaatagcgagagagactcgtacaggaaacaagcatgccacgctcgttgcaacctccttaaggtggagaaagaagaatgtgaag

SEQ ID NO: 104826 - DNA, 250 bp, Glycine max
gttcatatcctagtataccttaataaataatttaagatactatgatgagagcacggttcccattactgttgctgggacttgttttcctggcttcagtttctgtctcatttggcattgcttactgggaaaaagagaaccccaaacacaacaagtgtctccagagttgcaatagcgagagagactcgtacaggaaccaagcatgccacgctcgttgcaacctccttaaggtggagaaagaaaatgtgaagaa

SEQ ID NO: 104827 - DNA, 252 bp, Glycine max
cattctgatggtattgacaaaactagtgcaactttgcaatttagaaagttagcagattgtgattttctcaagagaaactttaagcagatgtctaatgttttatgggtggctcctgaggacaaggcgagtttatggtcacaacttcattatgtttcgtgcaataatctggaaatgcaagaagcttatcttgtcaatctcgtaaatgtgttacgagaattgtatttgcacagtccagaggaactcgccaattga

SEQ ID NO: 104828 - DNA, 251 bp, Glycine max
ctcgaccgaatcggttcgagcggtctcgagcggctcgagcggcacgagcggctcgaggtaccacttgcacaacaaattgacaaggtcaagcgagcactaggggactatcttggtgtcaaggttcatgcttgtgttagtgggaccagtgttcgtgaagatcaacgcatcctctcaagtggggttcatgttgttgttggtactcctggacgtgtatttgacatgctgcgcaggcaatcattgcgcctgataac

SEQ ID NO: 104829 - DNA, 257 bp, Glycine max
aaaattctccaccaagttatgggtttccttgtgttgcttcttttctccctcttaggtctctcttctagttccagcatatcaactcatcgttccatattggaccttgaactaaccaagtttaccacacagaaacaggtgtcttcactgttccaactatggaagagtgagcatggacgtgtctaccataaccacgaagaagaggcaaagagacttgagattttcaagaataacttgaactatatcagggactgaatgca

SEQ ID NO: 104830 - DNA, 243 bp, Glycine max
cagtcaggatgaagccggtgctgcggccatcaagacagttgagctggatgcagctcttggaggacgtgctgttcagtatcgtgaagtacaaggccatgaaactgaaaagtttctgtcttatttcaaaccatgtattatcccacaagaaggtggagttgcttctggtttcaaacatcctgaggctgaaaaacataagacacggttgtttgtatgcagagggaaacatgttgtacatgtcaaaga

SEQ ID NO: 104831 - DNA, 252 bp, Glycine max
tgaaaagtttgctgacatcactcctcaagagttcagcaaaaagtacttgcaagctcccaaggatgtgtcgcagcaaatcaaaatggccaacaagaaaatgaagaaggaacaatattcttgtgaccatccacctgcatcatgggattggaggaaaaaaggtgtcatcacccaagtaaagtaccaagggggctgtggaagcggttgggcgttttctgccacgggagccatagaagcagcacatcaatagcaaca

SEQ ID NO: 104832 - DNA, 250 bp, Glycine max
ggcacccatgcctactactatgcctgctgctccacatcctccagcaatacgtcctagggtgcgggccagaagaggacaggctacagatccacacagcatagctgatacgattacgcagagaaagaatagcagaaagaatcagggcattgcaagaactggttccaagtgtcaacaagacagatagagctgccatgttagatgaaattgtggattatgtcaagttcttaaggcttcaagtgaagttttgagc

SEQ ID NO: 104833 - DNA, 253 bp, Glycine max
caccttactgatggtattgacaaaactagtgcaactttgcaatttagaaagttagcagattgtgattttctcaagagaaactttaagcagatgtctaatgttttatgggtggctcctgaggacaaggcgagtttatggtcacaacttcattatgtttcgtgcaataatctggaaatgcaagaagcttatcttgtcaatctcgtaaatgtgttacgagaattgtatttgcacagtccagaggaagctcgccaat

SEQ ID NO: 104834 - DNA, 251 bp, Glycine max
cattgtccttgaatataatactcagcatggctaagcttgttctttccctttgttttgtgcttttcagtggctgctgcttcgctttcagtttcagagagcagccacagctgaacgagtgccagatccaacgcctcaatgccctcaaaccggataaccgtatagagtcagaaggtggcttcattgagacatggaaccctaacaacaagccattccagtgtgccggagttgccctctctcgctgcaccctcaac

SEQ ID NO: 104835 - DNA, 253 bp, Glycine max
gctgcttcgctttcagttccagagagcagcctcagcaaaacgagtgccagatccaaaaactcaatgccctcaaaccggataaccgtatagagtcagaaggagggctcattgagacatggaaccctaacaacaagccattccagtgtgccggtgttgccctctctcgctgcaccctcaaccgcaacgcccttcgtagaccttcctacaccaacggtcccacggaaatctacatccaacaaggtaagggtatttt

SEQ ID NO: 104836 - DNA, 247 bp, Glycine max
cgctcgagatcaaattcattcctttccttctttcttctaaaccctatggccgacgaagccaaagccaaaggcaacgcagccttctcctccggggactatcctgccgccatccaccacttctccgatgccatcgccctggctccctccaaccatgtcctctattccaaccgatccgccgcatacgcctccctcaaaaactacgcagatgcattagcggatgccaaaaagacagttgactcaagcccga

SEQ ID NO: 104837 - DNA, 250 bp, Glycine max
gcgattgccactgatgatgattatccttacagagctaaagagggtagatgcaaagccaataagatacaagacaaggttacaattgacggatatgaaactctaataatgtcagatgagagtacagaatcagagacagagcaagcgttcttaagcgccatccttgagcaaccaattagtgtctccattgatgcaaaagattttcatttatacaccgggggaatttatgatggagaaaactgtacaagtccgt

SEQ ID NO: 104838 - DNA, 247 bp, Glycine max
tttctctctcgttttttctcaaaaagttgcaagagttaaagcaaaaaccaaagtgagagagaaaatgatgaagccatcgatgctcagatctcttcactctgccgccacccgcggcgcctcccacctctcccgccgtggctacgcctccgagccggtgccggagcgcaaggtggccgttctaggtgccgccggcgggatcgggcaacccctctcccttctcatgaagctcaaccccctcgttccagcc

SEQ ID NO: 104839 - DNA, 254 bp, Glycine max
atgaaagtacaattcaccaagcgtccctatgcacaaccttatggtgtatatacatggttaacggatattaaagacacctctaaagaaggatatagttttgaagagatatgcatcaagaaagaagcgtttgagggagaagagaagttttgtgcaaaatccttgggaacagtaattggttttgccatttcaaagctgggaaagaacattcaagtactttcaagttcctttgtcaataagcaagagaatacactgtg

SEQ ID NO: 104840 - DNA, 258 bp, Glycine max
cacaattctcaaatccaaatccaattccaattccaattcccaatcttctcaaaccctaattcctcatcttgaaaatgagagaaatcttgcacatccagggagggcaatgcgggaaccagatcggagcgaagttctgggaggtgatatgcgacgagcacggcatcgaccacaccggaaagtacagtggcgactctgaactccaattggaacgcatcaatgtttattacaacgaagcgagtggcggaaggtcgttccacg

SEQ ID NO: 104841 - DNA, 254 bp, Glycine max
ccccttctccccaaccatgctgacgctgattacctcatcgttatccttaacgggactgccattctttccttggtgaacaacgacgacagagactcctacagacttcaatctggtgatgccctgagagtcccctcaggaaccacatactatgtggtcaaccctgacaacaacgaaaatctcagattaataacactcgccatacccgttaacaagcctggtagatttgagagtttcttcctatctagcactgaagc

SEQ ID NO: 104842 - DNA, 253 bp, Glycine max
caaacactgtgctggcaaagaaggacttagaatcaagaagaactacaagaagatctacttcactttctcagcatttttcaccacaatcctactactaatacttcttatatggctcatcctccaccctgcaaagcctcaattctccctcaaagaagttgacatctaccaactaaacctctcaggcccaaacctcaactcctccatccaactcaccctcctctccaaaaacccaaaccagaaagttggcatttac

SEQ ID NO: 104843 - DNA, 251 bp, Glycine max
acggtccttatctatcgtattaacaatcgaaaaatggtcgaaagaaaaaatccctatttgacaaggcttcttactatacctatgaattccattggacccaaaaatgatacattggaagaatcatctgagtcttccaatatcaataggttgattgttccgctcctgtatcttccaaaaggaaaaaagatctctgagagctatttcctggatccgaaagagagtactcgggttctcccaataactaaaaagta

SEQ ID NO: 104844 - DNA, 248 bp, Glycine max
cgacaatgaatgctagtgagtgtgttgctaggggctgtgcgttggaatgcgcaattcttagtccaacgttcaaagtacgagaatttcaggtcaacgaaagccttcctttctcgatttctctttcatggaaaggttctggtccagatgcacaggacaatggatcagaaaatcagcagagttcccttgtttttcctaagggtaatcccataccaagtatcaaggcactgacattctgcaggcaggaacat

SEQ ID NO: 104845 - DNA, 249 bp, Glycine max
ataaaattcttccaccaagttatgggtctacttgtgttgcttcttttctccctcttaggtctctcttctagttccagcatatcaactcatcgttccatattggaccttgacctaaccaagtttaccacacagaaacaggtgtcttcactgttccaactatggaagagtgagcatggacgtgtctaccataaccacgaagaagaggcaaagagacttgagattttcaagaataacttgaactatatcagg

SEQ ID NO: 104846 - DNA, 247 bp, Glycine max
agctcactgagaaaacaatttttacttgcagagatttggacatcttggttgtttattatacaatagcaactcaatttagaaaatttctaccgcattacattaggtggcatctgtataccttgttgatctacattctcccatcttttctcactgctgaaattaaatataagcggaatttgagtaatattcacatttccggcttattttacgacggcagatacaaattctggactaaaccgagataaat

SEQ ID NO: 104847 - DNA, 245 bp, Glycine max
aataacttggaagatgctcatgagttgattgatacagcaatctcaactgcgctgaaagatagcaaacctgtgtatataagcattagctgtaacttgcctgggattcctcaccccactttcagtcgtgaccctgttcgtttttcattgtctccaagattgagtaataagatggggttggaggccgcagtggaggcagcggcggaattccttaacaaggcagtgaaaccagtgctggtaggtggtcc

SEQ ID NO: 104848 - DNA, 248 bp, Glycine max
atttgttactggagatggtgaagaaatgtcactaattcctggtaccagtgttgaagaagcatacaataaattgactgttgaactagaaaagtgtgttccaacattggttggcatagaatgtcccaaagatgaaaaacttccccgtcgcaaaatttttgataaacccaagacgcgctgcttcaccatacttcctatggaatttaatctagtggtgcgtcaaaaattcttgaattttgtgcgattcatta

SEQ ID NO: 104849 - DNA, 247 bp, Glycine max
acttattaacactttccttagttcaatatggggaagcccttcttcactctctctctttcttccctttgcttgctactcttgtcgagtgcatgctttgctattacctccagcaagttcaacgagtgccaactcaacaacctcaacgcgttggaacccgaccaccgcgttgagtccgaaggtggtcttattgaaacatggaactctcaacaccctgagctgcaatgcgccggtgtcactgtttccaaac

SEQ ID NO: 104850 - DNA, 249 bp, Glycine max
ctttgcagacatatcttggatcccatttccatcaggtcagtgcatatgtacttttttcagaaaggttggtggtgactggtgattgttgaagagaataatggcaacttcaactatggatattcttcatttccaccacactcctttttattgtgaggagaatgtatacttgctttgcaaaaagttgtgcaatgatggaatagcaaatgctgatggatctgatctttttgttgctttcattccaacgaaaag

SEQ ID NO: 104851 - DNA, 250 bp, Glycine max
caccatgctgacgctgagtacctcatcgctatccttaacgggactgccattcttaccttggtgaacaacgacgaccgagactcttacaaccttcaatctggcgatgccctaagagtccctgcaggaaccacatactatgtggttaaccctgacaacgacgagaatctcagaatgataacactcgccatacccgttaacaaacccggtagatttgagagtttctgcctatctagcactcaactcaacagtc

SEQ ID NO: 104852 - DNA, 241 bp, Glycine max
gctgatgtgatgctttgtggaggctcagatgctgctattataccaattggtttgggaggctttgtggcatgcagggcactctcacaaaggaatactgatcctaccaaagcttcacgcccttgggacattaaccgtgatggatttgtcatgggtgaaggggctggagttttgcttttagaggaactggagcatgctaaggaaagaggtgccaccatatatgctgaattccttggtggaattt

SEQ ID NO: 104853 - DNA, 265 bp, Glycine max
tgtcaagacagttccagtaatagtactacacagttttggaggactgttccaaagggaacttttgtgtatgtggatcctgaattccttgcttctggtgaacttacaccaaagtcagatgtttattcatttggaatcattttattgagattgatgactgggaaaccagccctgggaataataaaggaagtgcaatatgcattagatgctggaaagttgaaatccatcttggatccttggctggagaatggccatttatgctggctga

SEQ ID NO: 104854 - DNA, 127 bp, Glycine max
actcgagccgtttttttaattcaataaaggaaattaggcatgaccctcttgttgagtaagctctgcctatctgaaaatttccacacctcttttaattgtcgtaatgatgtgtgaagtgtgtgttatt

SEQ ID NO: 104855 - DNA, 269 bp, Glycine max
cctcaggtaccacatactatgtggtcaaccctgacaacaacgaaaatctcagattaataacactcgccatacccgttaacaagcctggtagatttgagagtttcttcctatctagcactgaagctcaacaatcctacttgcaaggattcagcaggaacattttagaggcctcctacgataccaaattcgaggagataaacaaggttctgtttagtagagaggaagggcagcacaaggggagcagaggctgcaagagagcgtgattgtgg

SEQ ID NO: 104856 - DNA, 272 bp, Glycine max
ttcgagcgaattcggctcgagcggctcgaggttgcagaccgacgctagctagctagcaagcaagcacagagatcgaggacaagcgaggccatgccctcatgtgcttggcacgtgtttcactcttcctctgcgctctaaccctatccgctgctcacggaagcaccacggttcaagacatcgcgagaaagttgaaactcggggacaacgagcttctgcgcacggagaagaagtcaaggttttcatggagaattacgggaggagctactccacag

SEQ ID NO: 104857 - DNA, 257 bp, Glycine max
ccttaaacactcatcagtcatcaccatggccaagctagttttttccctttgttttctgcttttcagtggctgctgcttcgctttcagttccagagagcagcctcagcaaaacgagtgccagatccaaaaactcaatgccctcaaaccggataaccgtatagagtcagaaggagggctcattgagacatggaaccctaacaacaagccattccagtgtgccggtgttgcctctctcgctgcaccctcaaccgcaacgc

SEQ ID NO: 104858 - DNA, 271 bp, Glycine max
ccttatcctcgtagggggagaactggtagaaaaccaacaaggaaagatcctaatagtgagagtaggagcaatgatgtttatcttccaagagatgaggcttttggacacttgaagtcatctgactttcttacttatggactaaaatccgtatctcaaaatgttcttccattattgcaatctgcttttgatttgaatttcacaccccgtgagtttgatagctttgatgaagtcatggactctattcaggcggaattaagctgccaacagatat

SEQ ID NO: 104859 - DNA, 274 bp, Glycine max
tgcctctagggttatcatttctccatttccattttctctctcacttttcaagaatcgtaagctatgggaaagtcttacccaactgtgagtgctgattactagaaggccgttgagaaggcgaagaagaagctcagaggcttcatcgctgagaagagatgcgctcctctaatgctccgtttggcatggcactctgctggaacctttgacaagggcacgaagaccggtggaccttcggaaccatcaagcaccctgccgaactggctcacagcgctaa

SEQ ID NO: 104860 - DNA, 274 bp, Glycine max
cagatctgattgttggaaactacagtgatggaaacattgtcgcttctttgttggcacataaattaggtgtcactcagtgtaccattgctcacgcacttgagaagaccaaataccccgaatccgacatttactggaaaaaattggaagagagataccacttctcttgccaattcacagctgatctatttgccatgaaccacacagatttcattatcaccagtaccttccagggattgctggaagcaaggacactgttggacagtacgaatctcac

SEQ ID NO: 104861 - DNA, 270 bp, Glycine max
tgtggattctccttgctgtctggtgacaggtgaatatgggtggacagccaacatggaaaggattatgaaagcacaggcattgagggacagcagcatggctggatacatgtcaagcaagaagacgatggagattaaccctgagaaccccatcatggaggagctgaggaagcgagcagatgctgataagaatgacaagtctgtgaaggatctcgagctcttgctctttgagactgccttctaacttctgggtttcaccttgatgatcccaac

SEQ ID NO: 104862 - DNA, 192 bp, Glycine max
ctcgagccgcgcaagcgaaaagaaagaatcccaggcgaggagacagatggaggggaaggcgcaggatgtgtcgttgggagcgaacaagttccccgagagacagccgattgggacggcggcgcagagccaagacgacggcaaggactaccaggagccggcgccggcgccgctggttgacccgacggagtttac

SEQ ID NO: 104863 - DNA, 272 bp, Glycine max
gtgtgttccaagaatactgtgaagccatgagcaaactctctcttgggataatggagcttctggggatgagcctaggagttggcagggaatgtttcagagatttcttcgaaggaaatgagtcggttatgaggttgaattactacccaccatgccaaaaacctgagttagctttaggaactggacctcattgtgaccctacatccctaaccattctccaccaagatcaagtcgaggcctccaagtctttgttgatggaagatggtactctgtcg

SEQ ID NO: 104864 - DNA, 216 bp, Glycine max
ctcgagccggaagaaaaaagagaagaagatgggtttgaagaacaacatggtggtgctaacggtgtgtttggtgctacttttccttgtggggtgtactactagtgccaacttgaggctgagtaagcttggcctgctcatgaaaagtgatcatcatcaacactcaaatgatgatgagtcttcaaaaccatgctgtgatcaatgcgcatgcacaaagtc

SEQ ID NO: 104865 - DNA, 272 bp, Glycine max
tctctccattgtctttgaacactcatcaccatggccaagcttgttctttccctttgtttccttcttttcagtggctgcttcgctctgagagagcaggcacagcaaaatgagtgccagatccaaaagctgaatgccctcaaaccggataaccgtatagagtcggaaggtgggttcattgagacctggaacccaaacaacaagccattccagtgtgccggtgttgccctcttcgctgcacccttaaccgcaatgcccttcgtagaccttcctac

SEQ ID NO: 104866 - DNA, 266 bp, Glycine max
tgataacttaattagtgttcatgaatatgtcaagccttactttagtggttctaaattgaaaagctttctagctggtcataatatcaccattactgatggtattgacaaaactagtgcgactttgcaatttagaaagttagcagattgtgattttctcaagagaaattttaagcagatgtctaatgttttgtgggtggctcctgaggacaaggcgagtttatggtcacacttcattatgtttcgtgtaataatctggaaatgcaaga

SEQ ID NO: 104867 - DNA, 268 bp, Glycine max
ctcgagcgaatcggctcgaggttttttttgttcctcactgaacaagccaccgcgatgagaaccaaactttctttagcactctttttctttttacttttagccttattttcaaacctagcctttggcaaatgtaaagaaaccgaggtagaagaagaagaccctgagctcgtaacatgcaaacaccaatgccaacagccacagcaatacactgagggtgacaagcggtatgcttgcaaagatgtgacaggtatcatcgtatgaagcaaga

SEQ ID NO: 104868 - DNA, 270 bp, Glycine max
tgctcgagctgcaccaccccttcttccttttcatcaggtttattccttttcttttggttcaattttgctgaatggagagtgcaagaatcagcaaatggttaaatcttctagtttgtgtactgctattgcttaaggcagaaggatctcttgttccattgactttggtgaagaatgcagacccaaaaggagctgtttgtttggatggaagccccccagcataccactttgacaacggatttgaagaagggattaagaactggattgttcact

SEQ ID NO: 104869 - DNA, 263 bp, Glycine max
  unsure (1)..(263): unsure at all n locations
ctcgagccgcactcatcaccatggccaagcttgttctttccctttgtttccttcttttcagtggctgcttcgctctgagagagcaggcacagcaaaatgagtgccagatccaaaagctgaatgccctcaaaccggataaccgtatagagtcggaaggtgggttcattgagacctggaaccctaacaacaagccattccagtgtgccggtgttgccctctctcgctgacccttaaccgcaatgcncttcgtagaccttcctaca

SEQ ID NO: 104870 - DNA, 269 bp, Glycine max
ctcgagcgcggactttgagcttgagagaccacctcccccaatcaagagtggtcctaatgcacacccgaagaagctgctacatggatccggacttaatggatctggacttcatctatctaaccacagtaatggtgatgggttggacctctctcctgtcagcagcaaaaaaaggaaggactttttccctcatggaaatgaagaagaatgttacttggctgttaatccccatctgatcgtataccagatatagaaatgcacccaaccgagcc

SEQ ID NO: 104871 - DNA, 269 bp, Glycine max
cagaccatggccatatcttttgaggttaccgagttaccagttagatcagccttggattctggcgagtttatactctggaactgtctgcatctggaactaccaatctcagaccatggccaaatcttttgaggttgatctatcgcattgatgtcaatgtgaaaaacctctactgggctgacagtggtgatctagtaacaattgctagcgatacatcattctacattctgagtacaatcgtgatgttgttgtatcacatttagatagtggaa

SEQ ID NO: 104872 - DNA, 239 bp, Glycine max
aacagagttgttgtaggacgcacctgagttggctgatgggtgtccatatttgtatgctatggtgcatgatagttcagtgtctacaataccaggtgattttgtcattggtgttaagttgacaaccataaacaatatgtgtgcatatgggctcaatcctggtatttcaggttctcgtcttttgggtaccattcctcagtctatttcacagcaaactgtttggaatcaaatggaacagtgag

SEQ ID NO: 104873 - DNA, 256 bp, Glycine max
ctgtgttccaagaatactgtgaagccatgagcaaactctctcttgggataatggagcttctggggatgagcctaggagttggcagggaatgtttcagagatttcttcgaaggcaatgagtcggttatgaggttgaattactacccaccatgccaaaaacctgagttagctttaggaactggacctcattgtgaccctacatccctaaacattctacaccaagatcaagtcagggcctccaaatctttgttgatgga

SEQ ID NO: 104874 - DNA, 257 bp, Glycine max
ggacatactctgagcgtgagatagagaaggggaagaaagagagagagtgatgggaaggggaagagtggagttgaagagaattgagaacaagatcaacaggcaagtgacctttgcaaaacgaaggaacgggcttttgaagaaagcttatgagctttccgttctttgtgatgccgaggttgctctcatcatcttctccaatagaggaaagcagtacgagttttgcagcggttaagcatgctcaaaacgctggaggggta

SEQ ID NO: 104875 - DNA, 267 bp, Glycine max
aattcttccaccaagttatgggtttccttgtgttgcttcttttctccctcttaggtctctcttctagttccagcatatcaactcatcgttccatattggaccttgacctaaccaagtttaccacacagaaacaggtgtcttcactgttccaactatggaagagtgagcatggacgtgtctaccataaccacgaagaagaggcaaagagacttgagattttcaagataacttgaactatatcagggacatgaatgcaaacagaaaatc

SEQ ID NO: 104876 - DNA, 265 bp, Glycine max
ggctattgaactctctgctgaaattctgtccaatgtgaagtttatccaggagaagcgattgattggaaaatactttgaggaaatcagccaggatactgggaagtatgtttttggggttgatgatactctaaaggctttagagatgggagctgttgagacacttattgtgtgggaaaatctggatatgaataggtatgtcttgaaaaatagtgctactggtgagttgtcattaagcacttaaacaaggaacaggatgccgatcaaa

SEQ ID NO: 104877 - DNA, 250 bp, Glycine max
ctacaacgcctcgaatccacacagttctactcttcgctctaaaccctctctctctctctctctcgatctatcatggctttgcccaatcagcaaaccgtggattaccctagtttcaaactcgtcatcgtcggtgacggcggtacaggaaagacaacgttcgtgaaaaggcatcttaccggtgaattcgagaaaaaatacgaaccgaccattggagtggaggttcaccattggatttcttcacaaactgcgg

SEQ ID NO: 104878 - DNA, 269 bp, Glycine max
cttttccccacaagctggtgcagtttggagagattcaggaaaaagttgtattgaaattttcacaagaggaatttcttacagcttggtcaactcaggtgcgtcctgcaacaaccctgttggctgatgggtgtccatatttgtatgctatggtgcatgacagttcagtgtctacaataccaggtgattttgttattggtgttaagttgacaaccataaacaatatgtggcatatgggctcaatcctggtatttcaggttctcgtcttttgg

SEQ ID NO: 104879 - DNA, 169 bp, Glycine max
gagatgtcggatgcgccaccgagcccgactcatgagagtgggggcgagcagagcccgcgcggttcgtcgtccggcgcgagggagcaggaccggtacctcccgattgccaacatcagccgcattatgaagaaggctctgcctcccaacggcaagattgcaaaggatgcca

SEQ ID NO: 104880 - DNA, 265 bp, Glycine max
gtaaaagaccaatgaataagaaggaattagcaaaaaatgaggaggacatcatagaaacatattccaattctttaacagtgcacgagactaaactgaaggttgacctaactcagtatgtagaaaagcatgaatttgtctttgatgctgttttgaatgaagaggttacaaatgatgaggtgtatcgtgaaacagtagagcccatagttccaataatatttgaacgcactaagcaatttgctttgcatacgggcaaacaggaagtggg

SEQ ID NO: 104881 - DNA, 83 bp, Glycine max
gagaaagtcttccatagccccccaaaaatgaagagcaccatcttctttgctctctttctcttttgtgccttcaccacctcata

SEQ ID NO: 104882 - DNA, 253 bp, Glycine max
gggcctcattggtacaagtgtttttaacaaacagcaacagtacagagcattttgatgcatgtaagtggacaaaatcggaaccacattcctgggaattgatcttcccaatagaggtatgtggtcctaataatggttttgaaatgtggagttctgagtgggcaaatcaaacttcatggcatttgagtttccttattgacaatcccaaacagtctaacagtttttgatatctcttggggatttctcaagattttga

SEQ ID NO: 104883 - DNA, 261 bp, Glycine max
attgaagctcgtgtgaaggaccttctttctcgcatgactctgagggagaagattggtcagatgacccaaattgagcgcactgttgccacctcttctgccattagagatctctccattgggagcatactcagttctggtggcagtgcaccatttgaaaatgcactgtcgtctgattgggctgatatggtggatggctttcaaaaatcagctcttcagtcgcgactggaatacctctcatctatgggattgatgcagttcatg

SEQ ID NO: 104884 - DNA, 266 bp, Glycine max
gcaggcccgaacaacaagaaccacgtggaagaggatgtcagactagaaatggggttgaggaaaatatttgcaccatgaagcttcacgagaacattgctcgcccttcacgtgctgacttctacaacccaaaagctggtcgcattagcaccctcaacagtctcaccctcccagccctccgccaattcggactcagtgcccaatatgttgtcctctacaggaatggatttactctccacattggaacttgaacgcgaacagtgtgatct

SEQ ID NO: 104885 - DNA, 271 bp, Glycine max
tcgatctcgagcgattcggctcgaggaaagatgtttggagagttgaaactggaatcccttctggctttccgctcacagttattacgaaatagcatttttaatgagatgctcattagatatagctaggaaaaattactgcgtcaggctaaagctccaagtatgtttttacaatccttcaaaaattttgtttctttgtgtgtgtatggtgatgataacttaattagtgtcatgaatatgtcaagccttactttagtggttctaaattgaaaag

SEQ ID NO: 104886 - DNA, 264 bp, Glycine max
gctatggcggcgatgcagaggccactcaagagaaccattgcaatcgctctgcaacgcgcgtgcttttcctctctcctaccctccgccgctgccgccgccgccgccgataccgtcgcgcctccgcagctccccccgttcgatcaccagccgcacccttacaacggtccctccgccgatgaagtcttcgccaagcgcaaaacgttcctcggtcctttcgtcttccacactataagatacctctgaatatcgtggaagggaagatgc

SEQ ID NO: 104887 - DNA, 256 bp, Glycine max
ggttcgtcctgtatttcctgcacgctctcctggagcagttaacatacctacaatatcacgcccgcctgttgcagggatccctgcagttcgcccaattattccgcctgtagtcagacctgtggtagcccctagtgttactccagctgagaagcctcagaacacagtttacattggcaagattgcaccaactgtggaaaatgagttcatgctctctctccttcaattatgggaactatcgagacctggaaacgtcctc

SEQ ID NO: 104888 - DNA, 271 bp, Glycine max
tctccattgtctttgaacactcatcaccatggccaagcttgttctttccctttgtttccttcttttcagtggctgcttcgctctgagagagcaggcacagcaaaatgagtgccagatccaaaagctgaatgccctcaaaccggataaccgtatagagtcggaaggtggggtcattgagacctggaaccctaacaacaagccattccagtgtgccggtgttgccctctctgctgcacccttaaccgcaatgcccttcgtagaccttcctaca

SEQ ID NO: 104889 - DNA, 185 bp, Glycine max
gttctttcaatgtggagatattttgttggagatctcgtctttgaagtttctaagatgacttctccctacattaaatgtacaatctctttcttcatagcatttggaaatttggctgatgacaccatcaattttgaggcttttccccacaagctggtgcagtttggagagattcaggaaaaagttgt

SEQ ID NO: 104890 - DNA, 165 bp, Glycine max
gcgttggcccctaccaagaaaagctcttggtggccattcggtggcgaatccaagcctcaattcaatattttcagcaagcgtcccactatctccaacggataacgtcgtttaactgaagttggtcctgacgatgatgaaaagagttggcttcaaagactcaatctc

SEQ ID NO: 104891 - DNA, 265 bp, Glycine max
aacgcgaacagtgtgatctatgtgactcgagggaaaggaagagttagagtggtgaactgccaagggaatgcagtgttcgacggtgagctaaggaggggacaattgctagtggtgccgcagaactttgtggtggctgagcaagggggagaacaaggattggaatacgtagtgttcaagacacaccacaacgccgtgagcagctacattaaggatgtgtttaggcaatcccttcggaggttctttccaattcttacaaccttggcca

SEQ ID NO: 104892 - DNA, 262 bp, Glycine max
ctcttttgctgcatcagaggagttgtaaattaagagcatggctgcacaagctcttgtatcatcatcttctcttaccttctcagcggaggctgcaagacaaagtcttggaccaagatcactccaatctccatttggcttctccagaaaagcctcctttcttgttaaggcagctgctaccccccctgtcaagcaaggatcagacagacctttgtggtttgcatcaagcaaagtctttcttacttggatggcagccttccgggtg

SEQ ID NO: 104893 - DNA, 261 bp, Glycine max
gaaagaagtacagaaatgcttgcgaaatcctctatatcctttggtataccttgaatcggaaaggatatagaggttttcagaaagaagtacagaaatgcttgcgaaatgcccactacttcaaaggccgccttgttgaggctgggattggtgcaatgcttactgaactgagcagcacggttgtgtttgagaggccacatgatgaggaatttatacgcaatggagttagcatgcaaagggaatatcgcacatgtggtggtgatg

SEQ ID NO: 104894 - DNA, 252 bp, Glycine max
ctcctttgacgtttagcattggaaacaccatgaaacgtatatctgtcattgtgtcttccattattatcttccacacaccagttcaacccatcaatgctcttggtgccgccattgctatccttggaaccttcttgtattcacaggcgatactatagagttggggaactaagattcctctagggacttgtttgttacagttcttcatgctcaaccagggacaagcagttgattatgtaatgtgtcactgctgga

SEQ ID NO: 104895 - DNA, 262 bp, Glycine max
tgatgagagtgcggtttcctttgttggtgttgctgggaactgttttcctggcatcagtttgtgtctcattaaaggtgagagaggatgagaataaccctttctacttgagaagctctaacagcttccaaactctctttgagaaccaaaacggtcgcattcgtctcctccagagattcaacaaacgctccccacaacttgagaaccttcgagactaccggatttccagtttcagtcaaaacccaacacaatccttctcccccac

SEQ ID NO: 104896 - DNA, 254 bp, Glycine max
cagaaaagaaggagaggctcttgaaaagggctcaggcagaggctgaaggcaaaaccgttgaagctaagaagcccattgttgtgaagtatggtctcaaccatgttacctacctcattgagcagaacaaagcacagcttgttgtgattgctcacgatgtggacccaattgaattggttgtctggcttcctgcattgtgcaggaagatggaaattccgtactgcatgtgaagggaaaggcccgttgggaacggttgt

SEQ ID NO: 104897 - DNA, 264 bp, Glycine max
tctcgagccgattcggctcggtagattgagacaaagaatagacactcaatacaatgaggttccaggctcagatggaaacaaatttgtttaaattgtctcttgatgatgttgaaactcctaaaggttccatgttggatcttaaaatttctcaatctaaaattgcacttcccaagaacacagttggaggaaccattctgcgtagtgatctatatggcaactttttgacagagggattttagagccagtgttgatttgcagcgcact

SEQ ID NO: 104898 - DNA, 260 bp, Glycine max
ggccatcctttgagccttaagttcgattcatttgcagttataatgctgtgtgttggaattcctaccgagtggtctgttgtggaggatctaccagaaggacctgctgttaaaattggtgagaacaaagatgcaatggatggttggtttagacttgagagagtttctgatgatgaattcaataactataagcttgtgttctgtccacagcaagctgaggatgacaaattggggatattgggattagtattgatcatgatgat

SEQ ID NO: 104899 - DNA, 244 bp, Glycine max
aaaaatgccaccaatgttgaacaggctttcatggccatggctgctgaaattaaaaacagaatggcaagccagccagtgaacaatgcgaggcctccaacagttcaaattcgaggacagccagtgaaccagaaggctggttgctgctcgacttagagagagacgaagtatttggggtcttagaagttcatgtgtctcagtggcatctaaaactagcttttcacatgctttcatatcaagattgttc

SEQ ID NO: 104900 - DNA, 179 bp, Glycine max
gaaattttgatatatcgcgatcacaggttgccgcaccttaaaaccggaaacaaaagcaatcgttacttgatttcaagaatctctcaatttcttcctacttctttgtgtacgatttcttaagggaaagaaaatcactctctgtgctggccacagacttcgtgaatcattttcttttccac

SEQ ID NO: 104901 - DNA, 241 bp, Glycine max
gtccccgccgtaatcaccgttgcgctcctgagcctggggttcctcgcctcgagtgggttcggtgtggcggcgatcacggtgctggcgtggatctacaggtacgtcaccggcaagcaaccacctggcgcggatcagttagacagcgcgcgtcacaagatcatggacaaggcgcgtgagatcaaggactacggacagcaacaaatcagcggggtccaggcttctaattctgcactcgcacgca

SEQ ID NO: 104902 - DNA, 261 bp, Glycine max
aattcttccccctccacccacccagcatatctctctattcctatatattagcacccctcacattaccttgtgtcaccaactactttgactcctttaccataccattacaataattatcaaacctaaccagtaaaaatggtgaccgtggaggaaatccgcaacgctcagcgttcccatggacccgccaccatcttggccttcggcaccgccacgccgtccaatgcgtctcccaagccgattaccctgactactacttccgca

SEQ ID NO: 104903 - DNA, 257 bp, Glycine max
cgataccaaattcgaggagataaacaaggttctgtttagtagagaggaagggcagcagcaaggggagcagaggctgcaagagagcgtgattgtggaaatctcgaaggaacagattcgggcactgagcaaacgtgccaaatctagttcaaggaaaaccatttcttctgaagataaaccttttaacttgagaagccgcgaccccatctactccaacaagcttgcaagttctttgagatcaccccagagaaaaaccccca

SEQ ID NO: 104904 - DNA, 263 bp, Glycine max
gtttcttcctatctagcactcaagctcaacagtcctacttgcaagggttcagcaagaatattctagaggcctcatacgacaccaaattcgaggagataaacaaggttctgtttggtagagaggaggggcagcaacaaggggaggagaggctgcaagagagtgtgattgtggaaatctcaaagaaacaaattcgggaactgagcaaacatgccaaatctagtcaaggaaaaccatttcttctgaagataaacctttcaacttga

SEQ ID NO: 104905 - DNA, 272 bp, Glycine max
atcacttcccttctccaacatgccaaacgacagcgttctgagtcttttcttcttcgttaccctcttcacatgccttctctctgctaattcccacgatgaccatattttcctaccgagtcaactccatgacgatgactcagtgagttgcactgctaccgacccaaaccttaactacaagccggtgatcggaatcctgacccaccccggcgacggtgcctctggccggctcatcaacgccaccggggtttcttacatcgccgcctcctacgtta

SEQ ID NO: 104906 - DNA, 269 bp, Glycine max
gcagtattgcatgaaccatccagaagaaatgagtaaactatcaaaattgaaggctcaaataactgaggtcaaggggataatgatggacaatattgagaaggttttggatcgtggagagaagattgaactgctggtggacaaaacagaaaacttacagttccaggctgacagcttccagaggcagggcaggcagctgagaaagtagatgtggctgcagaatctccaaatgaagctgatggtgggaggaggaatcttatcttaattataat

SEQ ID NO: 104907 - DNA, 266 bp, Glycine max
cttagacaaagtgttgttggtgatcttaaacttcttactgatgggaagttgtatgagggtaagcatattcctgtatctaatattagtgcaggagaaaatcatgtagttcaaatacccctaatggcacaggaggaaattctgtcttctagtgcaagtgatttcagaactgcaatggtgagtaaaaatagcaagcctcaatttactgcaatgcatgtgggagctatagaaattatcattgatagtttcgcaagtcctgactgcaacat

SEQ ID NO: 104908 - DNA, 253 bp, Glycine max
tgtagatcaaactttttatatctgacaatgagttcaacctgactatcattgctaggcgctcacggcattatgctgggaccagatatttgaaacgaggagtgaatgaaaagggtagagtagccaatgatgttgagacagagcagatcatctttacagatgctcgtgatggacgcccaatgcaaatcagttctgtggtgcagatccggggttcaatccctctgttctggtctcaggaaacctctagattgaatat

SEQ ID NO: 104909 - DNA, 253 bp, Glycine max
cggctcgagcggctcgagcggctcgagtgtctttgaacactcatcaccatggccaagcttgatctttcccattgtttccatcttttcagtggctgcttcgctctgagagagcaggcacagcaaaatgagtgccagatccaaaagctgaatgccctcaaaccggataaccgtatagagtcggaaggtgggttcattgagacctggaaccctaacaacaagccattccagtgtgccggtgttgccctcgttcgct

SEQ ID NO: 104910 - DNA, 244 bp, Glycine max
aagccacagtgcaagggtaaagacagacactgccaacgctcccgaggaagccaaagcaaaagcagaagaaatggcattgacgagaccatatgcaccatgagacttcgccacaacattggccagacttcatcacctgacatctacaaccctcaagccggtagcgtcacaaccgccaccagccttgacttcccagccctctcgtggctcagactcagtgctgagtttagatctctccgcaagaatg

SEQ ID NO: 104911 - DNA, 274 bp, Glycine max
gttgaaattttcacaagaggaatttcttacagcttggtcaactcaggtgcgtcccgcaacgactctgttggctgatgggtgcccatatttgtatgctatggtgcatgatagttcagtgtctacaataccaggtgattttgtcattggtgttaagttgacaaccataaacaatatgtgtgcatatgggctcaatcctggtatttcaggttctcgtcttttgggcaccattcctcagtccatttcacagcaaactgtttggacatcaatggcaaca

SEQ ID NO: 104912 - DNA, 243 bp, Glycine max
tgcgactggaaatgtcaaaatgaacatgtttgtggaaacatgtatcgctgcaagctaactgggctgactcacatctgtgataaaaactgtaaccagagaattctgtatgacaaccatagctccctttgtcgagctagtggtcaaattttccccctttcacctgcagaggaacaggcagtgagaggcgtacgaaggaagcttgatgcagagaattcgccttccgaaagctgtggttttaagcgt

SEQ ID NO: 104913 - DNA, 247 bp, Glycine max
ctccacggagaacacggcgacaatgaaagaggggctccgaacatcaccatggaggcctcgcctttccttagttcaatatggggaagcccttcttcactctctctctttcttccctttgcttgctactcttgtcgagtgcatgctttgctattacctccagcaagttcaacgagtgccaactcaacaacctcaacgcgttggaacccgaccaccgcgttgagtccgaagtggtcttattgaaacatgg

SEQ ID NO: 104914 - DNA, 264 bp, Glycine max
cttaattattaacacttccttagttcaatatggggaagcccttcactctctctctttcttccctttgcttgctactcttgtcgagtgcatgctttgctattagctccagcaagctcaacgagtgccaactcaacaacctcaacgcgttggaacccgaccaccgcgttgagtccgaggtggtttgattcaacatggaactctcaacaccctgagctgaaatgcgccggtgtcactgtttccaaactcaccctcaacagcaatggc

SEQ ID NO: 104915 - DNA, 253 bp, Glycine max
ggatgctgaagcttggactgagcattgatgaagatgctggtgaagcagatgctgacatgcctcctctcgaggacgccgatgctgatgccgatgctgagggtagcaagatggaagaagttgattaaatctaacttaattattgatttgcctttgtgtttttagaaacaatgattggggaacagtcttttactatgtttatgttttgaattttcgaaattttggaatgttggctagttaggtgccgtttcctgga

SEQ ID NO: 104916 - DNA, 264 bp, Glycine max
gttcaatatcctattataccttaataaataatttaagatactatgatgagagcacggttcccattactgttgctgggacttgtcttcctggcttcagtttctgtctcatttggcattgcttactgggaaaaagagaaccccaaacacaacaagtttctccagagttgcaatagcgagagatactcgtacatgtaccttacatgccacgctcgttgcaacctccttaaggtggtgatagaagaacttgtagaatgtgaaattcca

SEQ ID NO: 104917 - DNA, 247 bp, Glycine max
atctagactcactgctgaaattaaatatatgcggaatttgagtaatattcatattgccggcttattgtacgacggcagatacaaattctggactaaacacgataaaaatcttgctttgactgaagaggataagatggctgtgattagatatagtggcattcctgctgatgttcttgcaaagcgagctcatgaatttgaaaaacatgatgctcatgatagcctcaaggatcaaattcctgctgttgac

SEQ ID NO: 104918 - DNA, 265 bp, Glycine max
ctcgagccgcgcaacaaaaagaaagaatcccaggcgaggagaaagatggaggggaaggagcaggatgtgtcgttgggagcgaacaagttccccgagagacagccgattgggacggcggcgcagagccaagacgacggcaaggactaccaggagccggcgccggcgccgctggttgacccgacggagtttacgtcatggtcgttttacagagcagggatagcagagtttgtggccacttttctgtttctctacatcaccgtcttaa

SEQ ID NO: 104919 - DNA, 268 bp, Glycine max
ctttgagatcaccccagagaaaaacccccagcttcgggacttggatatcttcctcagtattgtggatatgaacgagggagctcttcttctaccacactgcaattcaaaggcgatagtgatactggtaattaatgaaggagatgcaaacattgaacttgttggcctaaaagaacaacaacaggagcagcaacaggtagagcaacctttggaagtgcggaaatatagagccgaattgtctgaacaagatatatttgtaatcgcagcaggt

SEQ ID NO: 104920 - DNA, 242 bp, Glycine max
gcgagagagactcgtacaggaaccaagcatgccacgctcgttgcaacctccttaaggtggagaaagaagaatgtgaagaaggtgaaattccacgaccacgaccacgcccacaacacccggagagggaacctcagcaacccggtgagaaggaggaagacgaagatgagcaaccacgtccaatcccattcccacgcccacaacctcgtcaagaagaagagcacgagcagagagaggaacaggaa

SEQ ID NO: 104921 - DNA, 266 bp, Glycine max
cgcagcaaaaagaaagaatcccaggcgaggagaaagatggaggggaaggagcaggatgtgtcgttgggagcgaacaagttccccgagagacagccgattgggacggcggcgcagagccaagacgacggcaaggactaccaggagccggcgccggcgccgctggttgacccgacggagtttacgtcatggtcgttttacagagcagggatagcagagtttgtggccacttttctgtttctctacatcaccgtcttaaccgttatggg

SEQ ID NO: 104922 - DNA, 273 bp, Glycine max
catggccaccgagcacgaaaagcagttaattgtggccaaaccgaaccctaacaccataagccctcgccgatcctccacctcttcatcgctcgccatcatctacggcattttcgcgagaaaaagcttcttctacgacaggcttccctcccaaccactcagactcaccgttctcaaactcgacggttcctgcttccatattcaagtttcgaagaccgccaccgttgcggaactgaaggacgcagtggaggccgtgttcagtcacgtgcctcacaa

SEQ ID NO: 104923 - DNA, 273 bp, Glycine max
gagaagagggtcagagtgagaaagagagagagagagagagaaatcgagagatattcgcgaaccctaatttcggaaagatcggcgatggctgcctccaaggatcgcgagaacttcgtctacatcgccaagctcgccggacaggccgtgcgatacgaagagatggtggaatcaatgaagaacgttgcgaatctcgacgttgaactgactgtggaggagcggaatttactttctgttgggtacaagaatgtgattggtgctcggagacaatcgtgg

SEQ ID NO: 104924 - DNA, 268 bp, Glycine max
aagaaagtcttccatagccccccaaaaatgaagagcaccatcttctttgctctctttctcttttgtgccttcaccacctcatacctaccttcagccatcgctgatttcgtgctcgataatgaaggtaaccctcttgaaaatggtggcacatattatatcttgtcagacataacagcatttggtggaataagagcagccccaacgggaaatgaaagatgccctctcactgtggtgcaatctcgcaatgagctcgacaaagggattggaa

SEQ ID NO: 104925 - DNA, 266 bp, Glycine max
gttggcctaaaagaacaacaacaggagcagcaacaggaagagcaacctttggaagtgcggaaatatagagccgaattgtctgaacaagatatatttgtaatcccagcaggttatccagttgtggtcaacgctacctcaaatctgaatttctttgctattggtattaatgccgagaacaaccagaggaacttcctcgcaggttcgcaagacaatgtgataagccagatacctagtcaagtgcaggagcttgcattccctgcgtctgc

SEQ ID NO: 104926 - DNA, 240 bp, Glycine max
aagccacagtgcaagggtaaagacaaacactgccaacgcccccgaggaagccaaagcaaaagcagaagaaatggcattgacgagaccatatgcaccatgagacttcgccacaacattggccagacttcatcacctgacatctacaaccctcaagccggtagcgtcacaaccgccaccagccttgacttcccagccctctcgtggctcagactcagtgctgagtttggatctctccgcaag

SEQ ID NO: 104927 - DNA, 263 bp, Glycine max
gcaaacattgaacttgttggcattaaagaacaacaacagaagcagaaacaggaagaggaacttttggaagtgcaaaggtacagagctgaattgtctgaagacgatgtatttgtaattccagcagcttatccatttgtcgtcaacgctacctcaaacctcaatttccttgcttttggtatcaatgctgagaacaaccagaggaacttccttgcaggcgagaaagacaatgtggtaaggcagatagaaagacaagtgcaggagct

SEQ ID NO: 104928 - DNA, 256 bp, Glycine max
gagcgagttgttgtaaagctagccttgttgcagccatggccacccacgcggctctagcttctacaaggatccccactaacaccaagttcccatccaaggcttcacactctttcccaacccaatgcgcctcaaagagacttgaggtgacagaattctctgggctaagatccacttcatgtgtgacatatgctaacgatgctagagaatcttccttttttgatcttgtagcttcccaactcactcccaagaccaatgg

SEQ ID NO: 104929 - DNA, 242 bp, Glycine max
cgttcgcgtcctccagaggttcaacaaacgctcccaacagctacagaatctccgagactaccgcattttggagttcaactccaaacccaacacccttcttctcccccaccatgctgacgctgattacctcatcgttatccttaacgggactgccattcttaccttggtgaacaacgacgaccgagactcttacaaccttcaatctggcgatgccctaagagtccctgcaggaaccacatact

SEQ ID NO: 104930 - DNA, 261 bp, Glycine max
aaattcctcgtggaatcttgttgaagccatgtctacagctggtcaggtcatcaagtgcagagctgcggtggcatgggaagcagggaagccactatcgatagaaaccatagaagtggcaccaccccagaaaggtgaagtgcgtttgaagatcctcttcaactccctttgccgtacagatgtttactggtgggatgctaagggccagactccgctgtttcctcgtatcttaggccacgaagcttcggggattgtggagagcgt

SEQ ID NO: 104931 - DNA, 268 bp, Glycine max
ttcttctcttgcggctagggttttagcgcacatcttctagatttaaggaagatgggtaaggaaaaggttcacatcagtattgtggtcattggccatgtcgactctgggaaatccactaccactggtcacctgatttacaagcttggaggcattgacaagcgtgttattgagaggtttgagaaggaagctgctgagatgaacaagaggtctttcaagtatgcctgggtgctggacaaacttaaggctgagcgtgaaagaggaatcacca

SEQ ID NO: 104932 - DNA, 271 bp, Glycine max
gccttactttagtggttctaaattgaaaagctttctagctggtcataatatcaccattactgatggtattgacaaaactagtgcaactttgcaatttagaaagttagcagattgtgattttctcaagagaaactttaagcagatgtctaatgttttgtgggtggctcctgaggacaaggcgagtttatggtcacaattcattatgtttcgtgtaataatctggaaatgcaagaagcttatcttgtcaatctcgtaaatgtgttacgagaat

SEQ ID NO: 104933 - DNA, 84 bp, Glycine max
agcgaggaaagtatcgggctatgtaactatgactagagcttcaactatgaataaataaatcgacagcatatgatgcttttgttt

SEQ ID NO: 104934 - DNA, 237 bp, Glycine max
attcaatgtatagcctcacaattgatgaagttcagaatcatttaggtgacttagggtaaccactgagtagcatgaaccttgacgaacttctaaaaaatgtgtggaccgttgaggcaaaccagtccactggtgtggacattgagggtacagctcaaactagacaagctgcgctgcagcgtacaggctagtctttcattaactagtgctctaagcgggaagactgttgatgatgtttgg

SEQ ID NO: 104935 - DNA, 262 bp, Glycine max
gttcaatatcctagtataccttaataaataatttaagatactatgatgagagcacggttcccattactgttgctgggacttgttttcctggcttcagtttctgtctcatttggcattgcttactgggaaaaagagaaccccaaacacaacaagtgtctccagagttgcaatagcgagagagactcgtacaggaaccaagcatgccacgctcgttgcaacctccttaaggtggagaaagaagaatgtgaagaaggtgaaattc

SEQ ID NO: 104936 - DNA, 244 bp, Glycine max
caactaaataagaaatgaagagtactatcttctttgctctctttctagtttgtgccttcaccatctcatacctgccttcagccaccgctcagttcgtgctcgacactgatgatgatcctcttcaaaacggtggcacatactatatgttgccagttatgagaggaaagggcggtggaatagaagtagattcaactggaaaagaaatatgccctctcactgttgtgcaatcacccaatgagctcga

SEQ ID NO: 104937 - DNA, 262 bp, Glycine max
gtacttgttcggagtcgtccccggagactatggttatgacccatttggtcttagcaagaagccagaagatttttccaaatattcggcatttgaattgattcacgccatatgggcaatgcttggtgctgctggattcatcattaccgaggccttcaacaaatatggagcaaactgcggtcctgaggctgtttggttcaagactggagctctgcttcttgatgggggtaccttgaactacttcgggaaacccatccccatcaat

SEQ ID NO: 104938 - DNA, 240 bp, Glycine max
cttgagccgtgataagccagatacctagtcaagtgcaggagcttgcattccctgggtctgcacaagctgttgagaagctattaaagaaccaaagagaatcctactttgtggatgctcagcctaagaagaaagaggaggggaataagggaagaaagggtcctttgtcttcaattttgagggctttttactgaataagtatgtactaaaatgtatgctgtaatagctcatagtgagcgagga

SEQ ID NO: 104939 - DNA, 269 bp, Glycine max
aaaatggctgatacaggtggaggagatgcagtgagaccagtggtaatatgtgataacaagtgtggctgcacacttccatgcactggtggttccacttgcaggtgcacaagtgctggcactgccacaggagggggtgatcacgtgacatgctcgtgcggagagcactgtggttgcaatccatgctcatgtcccaagattgcggctgctggaagtggttgcagatgtggcacagattgtgcatgtgcctcctgccgcacttagtatcacac

SEQ ID NO: 104940 - DNA, 268 bp, Glycine max
gtgaggatgaggttgagattaaatgcatgggacatccagtgcttccttcactgcaggtgcaaaacttggttgactcgtggcttgatatggcggcttcaggacatagaattccagcaaccattggatcctcggggaaagattttgtcatgatcctaacctatggtcggaaggtcctacacccttgattgtggttcccagttcttcccctttcacatttttattatagcatgaaaaatcgaaaaccttcccagaataattgcttcctcgt

SEQ ID NO: 104941 - DNA, 257 bp, Glycine max
attcttcagaagattttcctgaaaaggaagatcaagaaaaacccaaaaagattgatgccagattgagacagagaatagatcctcaatacaatgaggttcaggctcagatggaaacaaatttgtttaaattgtctcttgatgatgttgaaactcctaaaggttccatgttggatcttaaaatttctcaatctaaaattgcacttcccaaaaacacagttggaggaaccatcctgcgtagtgatctattggcaaatttt

SEQ ID NO: 104942 - DNA, 253 bp, Glycine max
caactaaataagaaatgaagagtactatcttctttgctctctttctagtttgtgccttcaccatctcatacctgccttcagccaccgctcagttcgtgctcgacactgatgatgatcctcttcaaaacggtggcacatactatatgttgccagttatgagaggaaagggcggtggaatagaagtagattcaactggaaaagaaatatgccctctcactgttgtgcaatcacccaatgagctcgataaggggat

SEQ ID NO: 104943 - DNA, 262 bp, Glycine max
agctagtttcacaatttccaaatggctaggggattgaagaagcatctcaagaggctcaatgctcctaagcattggatgcttgacaaactgggtggtgcatttgcgcccaaaccctcatctggaccacacaaatctagggagtgccttcccctcatactcatcctacgaaaccggctaaagtatgctctgactccccgtgaagtcatcgctattctgatgcagagacatgttcttgttgatggaaaagtcaggactgacaaga

SEQ ID NO: 104944 - DNA, 230 bp, Glycine max
caagtgttgatttgcagcgcactcatcgtattaaaggaatgattaaaatggtggccacagttggtattcctgagaatacaggtatagcattggcctgtgctatgaatagttcttttagggggcgcgccagttctgatatttacaccatctgctctcaagactgtgaattatggaatcctgcttgcacaaaagcgatgactatgtcatttaatccaaacccgtgttctgat

SEQ ID NO: 104945 - DNA, 260 bp, Glycine max
ctcgagctctgcgagatcttcattcgccgattttaaaagatgagtaagcttcagactgatgctttgcgtgaagccatttcaggaatcatggccgattccaaggagaagaatcgcaaatttgtggagaccatcgaactccaaatcgggttgaaaaactacgatccacagaaggacaagcgtttcagtggctctgtcaagctgccccacatccctcgccccaagatgaaaatttgcatgcttggtgatgctcagcatgttga

SEQ ID NO: 104946 - DNA, 241 bp, Glycine max
ctagttcaatattctagtattctctaataaataatttaagatactatgatgagagcactgttcccattactgttgctgggacttgttttcctggcttcagtttctgtctcatttggcattgcttactgggaaaaatagaatcccaaacacaacaagtgtctccagagttgcaatagcgagagagactcgtacaggaaccaagcatgccacgctcgttgcaacctccttaaggtggagaaag

SEQ ID NO: 104947 - DNA, 260 bp, Glycine max
tctcgagcgattcggctcactcttagtcccaattttctagggatttattcattttccgactggctctgcagatgttgaataccgttgctttgtcggtgggctcgcttgggccactgacgaccatgccctcgagagagccttctctcagtacggcgaaatcgttgaaacgaagattatcaacgatcgtgagactggcagatccaggggttttggatttgtgaccttcgcctcggagcagtccatgaaagatgcgatcggag

SEQ ID NO: 104948 - DNA, 254 bp, Glycine max
aaacactcatcagtcatcaccatggccaagctagttttttccctttgttttctgcttttcagtggctgctagttcgctttcagttccagagagcagcctcagacaaaacgagtgccagatccaaaaactcaatgccctcaaaccggataaccgtatagagtcagaaggagggctcattgagacatggaaccctaacaacaagccattccagtgatgcggtgttgccccctctcgctgcaccctcaaccgcaacg

SEQ ID NO: 104949 - DNA, 229 bp, Glycine max
gtgctgatggtatggatactgatggtgacacacctagcaaaaaacagcgtctgagtagatcactgtcacggtccaggtcagtgtcacgcccaccacatgaagttgtgcctggagaaggcttcaaggattctgctcaaaaggtcaaggcaatcaaacttgcaaagaaatctgtcaagaagagaaacaaggccgcccgtcgtggagaagctgatagagtcatactaatctg

SEQ ID NO: 104950 - DNA, 246 bp, Glycine max
ctccaacaagcttggcaagttctttgagatcaccccagagaaaaacccccagcttcgggacttggatatcttcctcagtattgtggatatgaacgagggagctcttcttctaccacactttcaattcaaggcgatagtgatactgggaattcatgaaggagatgcaaacattgaacttgttggcctaaaagaacaacaacaggagcagcaacaggtagagcaacctttggaagtgcggaaatatag

SEQ ID NO: 104951 - DNA, 234 bp, Glycine max
gctagggactctcatgttcctgtgttagcaccacttcccattgggtttgccgtcttcatggttcacttggctacaatccctgtcactggaaccggcattaaccctgcaaggagtttcggaccagctgtgatcttcaacaacgacaaagcctgggacgaccaatggatttactgggttggaccgtttgttggagctgcggtggctgcaatctaccatcaatacattcttagaggt

SEQ ID NO: 104952 - DNA, 260 bp, Glycine max
attcaattcaatctgcctcgatcatggagaggaaaacatttgggtttttgttcttgctcctccttgtcttagcttctgatgtgacggtgaagagagcagaggcgaaagattgcttgacaaggaggcacgggttccagggtagatgcttattcgacaggcaatgtgcacatgtgtgcaggagcgatggtttcatcggtggtcagtgccgaggccctcttcgcaaatgcttttgcagcaggccatgttgatcgaaattacta

SEQ ID NO: 104953 - DNA, 250 bp, Glycine max
taaaattcttccaccaagttatgggtctccttgtgttgcttcttttctccctcttaggtctctcttctagtttaagcatatcaactcatcgttccatattggaccttgacctaaccaagtttaccacacagaaacaggtgtcttcactgttccaactatggaagagtgagcatggacgtgtctaccataaccacgaagaagaggcaaagagacttgagattttcaagaataacttgaactatatcaggga

SEQ ID NO: 104954 - DNA, 262 bp, Glycine max
gtgcggtttcctttgttggtgttgctgggaactgttttcctggcatcagtttgtgtctcattaaaggtgagagacgatgagaataaccctttctacttgagaagctctaacagcttccaaactctctttgagaaccaaaacggtcgcattcgtctcctccagagattcaataaacgctccccacaacttgagaacattcgagactaacggattgtccagtttcagtcaaaacccaacacaatccttctcccccaccatgctg

SEQ ID NO: 104955 - DNA, 237 bp, Glycine max
tgtctcacttcggacgttcgggtcccccagacatttccgacacttatcctcttctcgttctgaacatcaccttccgtaccaccgccgacgacctattccctctcttcgacaagtatgggaaggtcgtcgacatcttcatccccaaggatcgaaggactggtgaatcgaggggttttgcgttcgtgcgttacaagtatgctgatgaggctcagaaggccgttgagaggctcgacggga

SEQ ID NO: 104956 - DNA, 241 bp, Glycine max
gataaacaaggttctgtttggtagagaggaggggcagcaacaaggggaggagaggctgcaagagagtgtgattgtggaaatctcaaagaaacaaattcgggaactgagcaaacatgccaaatctagttcaaggaaaaccatttcttctgaagataaacctttcaacttgagaagccgcgaccccatctattccaacaagcttggcaagttgtttgagattaccccagagaaaaaccctcag

SEQ ID NO: 104957 - DNA, 122 bp, Glycine max
tggaagcatcacgatgtcaccgttaaggacgataagacccttctcttcggtggcaagccagtcactatttttggacacaggaaccctgaagagatcccatgggggtcaactggagctgacat

SEQ ID NO: 104958 - DNA, 273 bp, Glycine max
gttcaatatcctagtacaccgtattaaagaatttaagatatactatgatgagagcgcggttcccattactgttgctgggagttgttttcctggcatcagtttctgtctcatttggcattgcgtattgggaaaagcagaaccccagtcacaacaagtgcctccgaagttgcaatagcgagaaagactcctacaggaaccaagcatgccacgctcgttgcaacctccttaaggtggaggaagaagaagaatgcgaagaaggtcaaattccacgac

SEQ ID NO: 104959 - DNA, 177 bp, Glycine max
ccacgttcgcgtcctccagaggttcaacaaacgctcccaacagcttcagaatctccgagactaccgcattttggagttcaactccaaacccaacacccttctctcccccaccatgctgacgctgattacctcatcgttctcctgaacgggactgccattttagccttggtgaacaag

SEQ ID NO: 104960 - DNA, 250 bp, Glycine max
cctgattctgaacttgagaaacacattccagatgcacatgtcatcatatctactccattccaccccgcctatgtcaccgcagaaagaattaagaaagccaaaaatttggagctgcttttgactgctggcattggttctgatctgttgatctcaaagctgcagctgctgctggtttacttgtggcaaagtctccaggacgcaacgttgtctcggttgcggaggacgaactcatgagaatcctcattctaat

SEQ ID NO: 104961 - DNA, 264 bp, Glycine max
ggacaagaaacggggttgaggaaaatatctgcaccttgaagcttcacgagaacattgctcgcccttcacgcgctgacttctacaaccctaaagctggtcgcattagtaccctcaacagcctcaccctcccagccctccgccaattccaactcagtgcccaatatgttgtcctctacaagaatggaatttactctccacattggaatctgaatgcaaacagtgtgatctatgtgactcgaggacaaggcaaggttagagttgtga

SEQ ID NO: 104962 - DNA, 263 bp, Glycine max
agtacaccaacgggccccaggaaatgtacatccaacaaggtaagggtatttttggcatgatatacccgggttgtcctagcacatttgaagagcctcaacaacctcatcaaagaggacaaagcagcagaccacaagaccgtcaccagaagatctataacttcagagagggtgatttgatcgcagtgcctactggtgttgcatggtggatgtacaacaatgaagacactcctgttgttgccgtttctattattgacaccaacagc

SEQ ID NO: 104963 - DNA, 247 bp, Glycine max
tctcgagccgaatcggctcgaggagagggtgatttgatcgcagtgcctactggtgttgcatggtggatgtacaacaatggagacactcctgttgttgccgtttctattattgacaccaacagcttggagaaccagctcgacagatgcctaggagattctatcttgctgggaaccaagagcaagagtttctaaaatatcagcagcaccagcaaggaggttcccaaacccagaagggaaagcaacaaga

SEQ ID NO: 104964 - DNA, 242 bp, Glycine max
ggttaaatactcatgcggtgattgagccattcatcatagcaacaaaccgacaccttagtgctcttcacccaatttataagcttctaactcctcactaccgtgacaccatgaacatcaacgcacttgctaggcaatctctcgataatgctgatggcataatagagaaatcttttttgccctcaaagcattccgttgagatgtcttcagcggtttataagaattgggttttcactgatcaagca

SEQ ID NO: 104965 - DNA, 217 bp, Glycine max
ctccgcagcagccacacttcttcgccgtttcagctgaagagccatccgcaggtaagcaatggttaagcataataatgttatccccaatgggcacttccggaaacactggcaaaactatgtgaagacttggtttaatctaccacccgaaagaccagaagacggttggctcggcagaagaaggctgtcaagattttccccaggcctactgctggatctc

SEQ ID NO: 104966 - DNA, 130 bp, Glycine max
gtggctcagcatttgggtgagggcgttgtccgaaccattgccatggatgccaccgaagggtcgttagagggtggcgcgtcctcaacactggctcccctattaccgttccagttggtagggctacccttgg

SEQ ID NO: 104967 - DNA, 259 bp, Glycine max
ttggaatctggtttgcaaaaagacagagggttaattgtggagtattttggaaggatgtcttacgttgctcataacgttaatcagccccaagagaaagatttgttagagggaaatttttcctttgatattaaatctcgtctagattggaaaaagtttcctctacaaaagcacaatttgttagtggaaaaaccttcaaatatgatataattggtgctggttcacattcttcaggagattttcctgaaaaggaagatcaaga

SEQ ID NO: 104968 - DNA, 256 bp, Glycine max
gaactaaacaattcaattcaatctgcctcgatcatggagaggaaaacatttgggtttttgttcttgctcctccttgtcttagcttctgatgtgacggtgaagagagcagaggcgaaagattgcttgacaaggaggccgggttccagggtagatgcttattcgataggcaatgtgcacatgtgtgcaggatcgatggtttcatcggtggtcagtgccgaggccctcttcgcaaatgcttttgcagcaggccatgttg

SEQ ID NO: 104969 - DNA, 261 bp, Glycine max
ctgaattaaagtatggcagtcttaactccttgcaacggcaacttgaaagtgcagagaaggagttagacgaatatatgaactctgggaagtctatgctgagagaggaagttacgggaaatgatattgctgaaattgtaagcaagtggactggtatccctgtttcaaaacttcaacaatcagagagggagaagttgttgtatttagaggaagtgcttcataagcgtgttgttggccaagaccctgtagttaaggcagttgctg

SEQ ID NO: 104970 - DNA, 259 bp, Glycine max
agctggtgcagtttggagagattcaggaaaaagttgtattgaaattttcacaagaggaatttcttacagcttggtcaactcaggtgcgtcctgcaacaaccctgttggctgatgggtgtccatatttgtatgctatggtgcatgacagttcagtgtctacaataccaggtgattttgttattggtgttaagttgacaaccataaacaatatgtgtgcatatgggctcaatcctggtatttcaggttctcgtcttttggg

SEQ ID NO: 104971 - DNA, 137 bp, Glycine max
taacatgccgcaacttcctgttgccggttgattgtctcttttgaggggatggttctgttccggctagatctagtttccattactgttctataaaactggttctgtttgtttccgtttttatgtaacctgttgtttgt

SEQ ID NO: 104972 - DNA, 89 bp, Glycine max
gtgcaaggaggtcatcaaagccagataggaaagcatcagcaagaagaagaaaacgaaggaggcagcatattgagtggcttcaccctgga

SEQ ID NO: 104973 - DNA, 268 bp, Glycine max
tgctgacgctgattacctcatcgttatccttaacgggactgccattcttttcttggtgaacaacgacgagagatactcctacagacttcaatctggtgatgccctgagagtcccctcaggaacgacatactatgtggtcaacctgacaacaacgaaaatctcagattaataacactcgccatacccgttaacaagcctggtagatttgagagttgcttcctatatagcactggagctcaacaatggtagttgcacggattcagcagga

SEQ ID NO: 104974 - DNA, 258 bp, Glycine max
cacgagaaaaatcttgctttgacagaagaggaaaagatggaggtgattagaaatagaggcattcctgttgatgttcttgcaaagcgagctcatgaatttgaaaaacatgttgcttctgaaagcctcaaggatcaaattctgctgttgacaagttgtattctactaaggttaataagtttgcaaaaattatgaaccttagacaaaatgttgttggtgatcttaaacttcttactgatgggaagttgtatgagggtaagc

SEQ ID NO: 104975 - DNA, 260 bp, Glycine max
ttaaaagccggagtaaagactgggaagaccagcttggagcagatatcaagagtttatggcaatcaggcagtggttgttagtatcgatccgcgtagagtgtatgtaaaggatcctaatgatttgcaattgaagaccaaagggtttcaagtccaggtccaaatggagaagaatatgcatggtatcaatgtacagttaatgggggacgagagggccggccaattggtgcttatgaactagcaaaagcagttgaagagcttggt

SEQ ID NO: 104976 - DNA, 255 bp, Glycine max
ggccgcagcaacccccacttctctgcggttcctcctctccgtttccgtaaccctaaccctaaccctgcttaacctcgccgcctcaaattccgaaggcgacgctctctacacgctgaaacggagcctctcggacccgacaacgtcctccagagctgggatcccactctcgttagtccctgtacttggttccacgtcacctgcaaccaggacaaccgagtcactcaagtggatcttggtaactctaacctatctgga

SEQ ID NO: 104977 - DNA, 238 bp, Glycine max
ttcaagctctgcaaggttaggtcagtgcagtttggccagaaaggtatcccatacctgaacacctatgatggtcgcaccatccgttacccagaccctctcatcagggccaacgacaccattaagctggatctggaggaaaacaagattgttgattttatcaaatttgatgttgggaatgtagttatggtaacaggtgggagaaacagggggcgtgttggagtgatcaagaacagggaga

SEQ ID NO: 104978 - DNA, 146 bp, Glycine max
cttactggtcaaaagagaaccccaaacacaacaagtgtctccaatgttgcaatagcgagagagactcgtacaggaaccaagcatgccacgctcgttgcaacctccttaaggtggagaaagaagaatgtgaagaaggtgaaattcca

SEQ ID NO: 104979 - DNA, 235 bp, Glycine max
gaaaagtttccttgacaatctaattctgcaaaaatggcaagcactaaggagtctaagttcccagcacagagccagaaaactcagccacaaaaagaacatgtaatgaatccactcccacaagccacaaatcctgatccaaggccgccaataaactccagggaaaggtggcgttggtgacaggacgtgactcaggaattggcagagcggtttgcctgtgtttcgcaaaagagggtgc

SEQ ID NO: 104980 - DNA, 101 bp, Glycine max
agcttttctttttcttgttctttaattttctgattttagcggattaaaatagtagtgttattggtaggttttggcaaagatgttttcagttccacacgaca

SEQ ID NO: 104981 - DNA, 252 bp, Glycine max
ttaacactttccttagttcaatatggggaagcccttcttcactctctctctttcttccctttgcttgctactcttgtcgagtgcatgctttgctattacgtccagcaagttcaacgagtgccaactcaacaacctcaacgcgttggaacccgaccaccgcgttgagtccgaaggtggtcttattgaaacatggaactctcaacacgctgagctggaatgcgccggtgtcactgtttccaaacgcaccctcaa

SEQ ID NO: 104982 - DNA, 255 bp, Glycine max
ggagaagcagaaggagcaaaagcaatggcgccgaagaagccgagaaccacgacaaggaaccctgatttggttagggggattggcaagtattcgaggtcgcagatgtaccacaagatgggcatctgggccatcaggccaaaaactgtggcgttttgccccgccacgatcccaagcccaagcccgaggccccggcccagaagccgcccaagttctaccccgcggacgatgttaagaagccctcgtcaacaagcacaa

SEQ ID NO: 104983 - DNA, 256 bp, Glycine max
ctcgagccgctcgagccgcgaaccccccaaaaccctaggtagagcgctcttcctcactctcattcccccctgccgcagcagcacgtcctctcgtcaccgtgcaggccctcgacagtgacatggccaccgacgcctccgccaccgtccctatccctgacgtcatgaagtcctccatccgcccggacatcgtcaacttcgtacactccaacatctccaagaacagccgacaaccctatggagtcagccgccgcgctgg

SEQ ID NO: 104984 - DNA, 153 bp, Glycine max
ctttgaacactcatcaccatggccaagcttgttctttccctttgtttccttgctttcagtggctgcttcgctctgagagagcaggcacagcaaaatgagtgccagatccaaaagctgaatgccctcaaaccgtgtaaccgtatagagtcggaa

SEQ ID NO: 104985 - DNA, 232 bp, Glycine max
cttctatcttgagtagtcatgatcctccggttgttttggctaaaattgatgccaatgaggagaagaacaaagaccttgcatctcaatatgatgttaggggatacccaacaattaagattctgagaaatgggggaagaatgttcaggaatacaaaggtccccgtgaagcagatggcatcgttgactatttgaagaaacaaagtggtcctgcttcaactgaaattaaatctgct

SEQ ID NO: 104986 - DNA, 262 bp, Glycine max
caccattactgatggtattgacaaaactagtgcaactttgcaatttagaaagttagcagattgtgattttctcaagagaaactttaagcagatgtctaatgttttgtgggtggctcctgaggacaaggcgagtttatggtcacaacttcattaagcttcgtgtaataatctggaaatgcaagaagcttatcttgtcaatctcgtaaatgtgttacgagatatgtatttgcacagtccataggaagctcgccaattgagaagg

SEQ ID NO: 104987 - DNA, 245 bp, Glycine max
aggcgcagagtagagcagcacagaagagggaaaactgcaccgccgccgtagaagaaaacaaccatggtgtacgtctccttttacaggaactatgggaagacattcaagaagccgcgtcgtccgtacgagaaggagcgtctcgacgcggagttgaagctggttggtgagtacgggcttcggtgcaagatagagctgtggagggtgcagtacgcgctcagccgcatccgcaacaacgcgcggaacct

SEQ ID NO: 104988 - DNA, 247 bp, Glycine max
caatatggggaagcccttcttcactctctctctttcttccctttgcttgctactcttgtcgagtgcatgctttgctattacctccagcaagttcaacgagtgccaactcaacaacctcaacgcgttgagaacccgaccaccgcgttgagtccgaaggtggtcttattgaaacatggaactctcaacaccctgagctgcaatgcgccggtgtcactgtttccaaacgcaccctcaactgcaacggcct

SEQ ID NO: 104989 - DNA, 253 bp, Glycine max
tgcagaccgagctagctagctagcaagcaagcacagagatggaggcaaagcgaggccatgccctcatgtgcttggcacgtgtttcactcttcctctgcgctctaaccctatccgctgctcacggaagcacacggttcaagacatcgcgagaaagttgaaactcggggacaacgagcttctgcgcacggagaagaagttcaaggttttcatggagaattacgggaggagctactccacagaggaggagtatttg

SEQ ID NO: 104990 - DNA, 246 bp, Glycine max
gtgcagtgctgaagattggtcccaacgagccatctgagctgtctatccatgagaacgcctatggcttggctagatacgctgtcatatgccaggagaatggcctggttcccattgttgagcctgagatcctgttgatggacctcatgacattcacaagtgtgccgccgtcaccgagcgtgtccttgcagcatgctacaaggctttgaatgatcaccatgtccttcttgagggtacctattgaagcca

SEQ ID NO: 104991 - DNA, 253 bp, Glycine max
cagagagtgatttcagtgagtgatcggtgttcacttgatctcatcataatcgtcagcgtcaattgaagaagatgccgatcagaaacatcgccgtcggaaggcctgaagaggcgactcaccccgacacgttgaaggcggctttggctgagttcatctcaaccttcatcttcgtgttcgccggctcaggctccggcatcgcctacaacaagctcaccgacaacggcgctgccacccctgccggcctcatctccgc

SEQ ID NO: 104992 - DNA, 254 bp, Glycine max
cggctcgagcgcgtgacctagccaagccaacacaaagggcacagaagagggtttcttttcgtttacgtttcaatggggagcgaagaggagaacggcgaattctacctgcgatactacgtcgggcacaagggaagttcggtcacgagttcttggagttcgagttccgccccgacgggaagctccgctacgccaacaactccaactacaaaaacgacaccatcatccgcaaggaggtttacctcacccccgccgtt

SEQ ID NO: 104993 - DNA, 253 bp, Glycine max
gcaagaggaagatgaggatgaggagcagcagcgagagagcgaagaaagtgaagattctgagttacgaagacataagaataagaacccttttctcttcggctctaacaggttcgaaactctcttcaaaaaccatatggtcgcattcgcgtcctccagaggttcaaccaacgctccccacaacttcagaatctccgagactaccgcattttggagttcaactccaaacccaacaccctccttctcgccaaccatg

SEQ ID NO: 104994 - DNA, 245 bp, Glycine max
attctctccattgtctttgaacactcatcaccatggccaagcttgttctttccctttgtttccttcttttcagtggctgcttcgctctgagagagcaggcacagcaaaatgagtgccagatccaaaagctgaatgccctcaaaccggataaccgtatagagtcggaaggtgggttcattgagacctggaaccctaacaacaagccattccagtgtgccggtgttgccctctctcgctgcaccctt

SEQ ID NO: 104995 - DNA, 152 bp, Glycine max
ctggtagatttgagagtttcttcctatctagcactgaagctcaacaatcctacttgcaaggattcagcaggaacattttagaggcctcctacgataccaaattcgaggagataaacaaggttctgtttagtagagaggaagggcagcagcaa

SEQ ID NO: 104996 - DNA, 126 bp, Glycine max
attaagacttccttagttcaatatggggtagtccctcactctctctctcactgccctttagttgctactacttgtcgagtgaatgatctggtattagctcgagtaagctcaacgtgtgtcaactca

SEQ ID NO: 104997 - DNA, 246 bp, Glycine max
gcaagggcaacgatattctgtgttgcgattatgctagttttgatggtttgattaccaagcaagttatgagcaagatggcagaaatgataaacagtctttgtggtggtgatgaaaaattgatgcgtgaaaggaacacctgctgttggcttgttgttcaaggatggcaatttgtaagaaagatgtttggagagttgaatgtggaatcccttctggatttccgctcacagttatttgcaatagcatttt

SEQ ID NO: 104998 - DNA, 133 bp, Glycine max
gttcaatatcctagtacaccgtattaaagaatttaagctatactatgatgagagcgcggttcccattactgttgctgggagttgttttcctggcatcagtttctgtctcatttggcattgcgtattgggaaaa

SEQ ID NO: 104999 - DNA, 254 bp, Glycine max
cacaaccctcggaacctgcgacgccgctttcgccgttcaacaaatagccgacatagcagaaggcgacaaccgcggtctggcactgttgctgcccataattcctgcaatagggtgggttctgttcaacattctgcagccggcgctgaaccaactgaaccgcatgcgcacaccaaaggcgtgatcattgggttggggcttggcggcttggctggcttggtggctgcgccgcatgcatcggcggcggcggcttctga

SEQ ID NO: 105000 - DNA, 253 bp, Glycine max
gaagacactcctgttgttgccgtttctattattgacaccaacagcttggagaaccagctcgaccagatgcctaggagattctatcttgctgggaacacaagagcaagagtttctaaaatatcagcagcagagcaaggaggttcccaaagccagaaaggaaagcaacaagaagaagaaaacgaaggaagcaacatattgagtggcttcgcccctgaattcttgaaagaagcgttcggcgtgaacatgcagatag

SEQ ID NO: 105001 - DNA, 182 bp, Glycine max
gtgaaatggactgaggaatggcaacagtgagaacaccattgaattttgattctagcaagcagagcttttgtcaattttctatcgaccttctcggtggaggaattttagtggacaaaactggagattggatcacacttatacaaaattctccaattagtaacttgttgagagttgctgcttgg

SEQ ID NO: 105002 - DNA, 249 bp, Glycine max
ctccattgtctttgaacactcatcaccatggccaagcttgttctttccctttgtttccttcttttcagtggctgcttcgctctgagagagcaggcacagcaaaatgagtgccagatccaaaagctgaatgccctcaaaccggataaccgtatagagtcggaaggtgggttcattgagacctggaaccctaacaacaagccattccagtgtgccggtgttgccctctctcgctgcacccttaaccgcaat

SEQ ID NO: 105003 - DNA, 250 bp, Glycine max
ctcgagccgcaggcagagtagagcagcacagaagagggaaaacagcaccgccgccgtagatgaaaacaaccatggtgcacgtctccttttacaggaactatgggaagacattcaagaagccgcgtcgtccgtacgagaaggagcgtctcgacgcggagttgaagctggttggtgagtacgggcttcggtgcaagagagagctgtggagggtgcagtacgcgctcagccgcatccgcaacaacgcgcggaa

SEQ ID NO: 105004 - DNA, 249 bp, Glycine max
aacatattatatcttgtcagacataacagcatttggtggaataagagcagccccaacgggaaatgaaagatgccctctcactgtggtgcaatctcgcaatgagctcgacaaagggattggaacaatcatctcgtccccatatcgaatccgttttatcgccgaaggccatcctttgagccttaagttcgattcatttgcagttataatgctgtgtgttggaattcctaccgagtggtctgttgtggagga

SEQ ID NO: 105005 - DNA, 95 bp, Glycine max
gccatagagttgagattgccacatcctcatggcgatcaatctggtgcttttagtcaagtttctctgcctgcagacgaaggtgtcgaaagttctat

SEQ ID NO: 105006 - DNA, 221 bp, Glycine max
ataaaaaaggaggctgaagcataatcagcgcggcggtgtaagatggtggcaacggcgatcgaggaagtgcgaaccctctggattggcgatttacagtactgggtcgacgagtcctacctctctcagtgcttcgcccacagcggcgaagtggtttccatcaaaatcatccgcaacaagctgacgggccagcccgagggctactgcttcgtcgatttcgtctc

SEQ ID NO: 105007 - DNA, 255 bp, Glycine max
tccaagactacgagcagggttgggatgatcactggatcttctgggtgggacctttcattggtgctgcacttgcagcactctaccaccaggtcgtaatcagggccattcccttcaagtccaagtgattcaatcaaaccgttcatgcttaatcaagttgggaacaacaaaaaaaatcaaaacaatgtttctgggtttcggtttcatttcatcaagatgatctgtttatctttttttttttaattttaatttaaagtc

SEQ ID NO: 105008 - DNA, 140 bp, Glycine max
ggcatatatactctgcatccaagcagattagtgctgcaatatctccagatcaaaataccactgcctttaaagaggtagcaattatccgtcacccgcgtgttggtgaatatgcgtttggatttattacatcaactgttact

SEQ ID NO: 105009 - DNA, 100 bp, Glycine max
gccagatccaaaaactcaatgccctcaaaccggataaccgtatagtgtctgaaggagggctcattgagacatggaaccctaacaacaagccattccagtg

SEQ ID NO: 105010 - DNA, 247 bp, Glycine max
gggcgttttctgccacgggagccatagaagcagcacatgcaatagcaacaggagaccttgttagcctttctgaacaagaactcgtagactgtgtggaagaaagcgaaggttgttacaatggatggcactatcaatcgttcgaatgggttttagaacatggtgggattgccactgatgatgattatccttacagagctaaagagggtagatgcaaagccaataagatacaagacaaggttacaattga

SEQ ID NO: 105011 - DNA, 246 bp, Glycine max
gtaaactttgccaaataatttttctgcagaattgctctcttgcaaattggatactgttactggtcaatattatcctgagtgggctccaattaattgtcgagttcatcgacaaccaattcacatcactgaaggaaattatgtcagaaagcaagatgtcagcattgaatatgatgcatgtacaattccaaatgattgtggttcattggttgttgccaaggttggaaatcacaaacaaattgttggttt

SEQ ID NO: 105012 - DNA, 241 bp, Glycine max
gagaaggcttacttgaagactattacaccaaagtttcagacccttattgacctttctgttatagaaatcttgtcaaggcatgcatctgatgaggtgtaccttggggagagggacaatccaaattggacatctgatacaagagcattagaggcttttaaaaggtttggaaataaactggcacaaattgagaataaactctcagagagaaacaacgatgagaaactgagaaaccgttgtggac

SEQ ID NO: 105013 - DNA, 242 bp, Glycine max
ctgccagtagtcatatgcttgtctcaaagattaagccatgcatgtgtaagtatgaactaattcagactgtgaaactgcgaatggctcattaaatcagttatagtttgtttgatggtatctactactcggataaccgtagtaattctagagctaatacgtgcaacaaaccccgacttctggaagggatgcatttattagataaaaggtcaacacaggctctgcctgttgctttgatgattcat

SEQ ID NO: 105014 - DNA, 246 bp, Glycine max
gcttggagaaccagctcgaccagatgcctaggagattctatcttgctgggaaccaagagcaagagtttctaaaatatcagcaagagcaaggaggtcatcaaagccagaaaggaaagcatcagcaagaagaagaaaacgaaggaggcagcatattgagtggcttcaccctggaattcttggaacatgcattcagcgtggacaagcagatagcgaaaaacctacaaggagagaacgaaggggaagaca

SEQ ID NO: 105015 - DNA, 244 bp, Glycine max
cgaatctgacaccggggactattggaagcttataatagaaggaagtggaaagacttggaagcaggatcagaggattcgccttcagcatattgacactggaggctatctacatagtcatgataagaaatacagtcgtattgctgggggtcagcaggaggtttgtggtgttcgtgaaaagcgtgctgacaatgtgtggttggcagccgaaggtgtctaccttcccgttacggaaagcaaatgagtt

SEQ ID NO: 105016 - DNA, 130 bp, Glycine max
acgcgggattcggctcgagctcgtcgctccattgtctttgaacactcatcaccatggccaagcttgttctttccctttgtttccttcttttcagtggctgcttcgctctgagagagcaggcacagcaaaa

SEQ ID NO: 105017 - DNA, 131 bp, Glycine max
ccttaataaataatttaagatactatgctgagagcacggttcccattactgttgctgggacttgttttcctggcttcagtttctgtctcatttggcattgcttactgggaaaaagagaaccccaaacacaa

SEQ ID NO: 105018 - DNA, 130 bp, Glycine max
gagcaaagcaatggctacttcaaagttgaaaacccagaatgtggttgtatctctctccctaaccttaaccttggtactggtgctactgaccagcaaggcaaactcagcggaaactgtttctttcagctgg

SEQ ID NO: 105019 - DNA, 98 bp, Glycine max
ctgacgctgattacctcatcgttatccttaacgggactgccattctttccttggtgaacaacgacgacagagactcctacagacttcaatctggtgat

SEQ ID NO: 105020 - DNA, 242 bp, Glycine max
atcatgctcggggaacagttcaaacgatgccggtgattttgaatgcaacatatgcttcgatttggcgcaagaccctgtgatcacactctgtggtcacctattctgttggccatgcctttataggtggctccaccatcactcccattctcaggaatgccctgtttgcaaggcccttgtgcaggaagagaaattggttcctctttatggaaggggcaaaacacagactgatcccaggaccaagt

SEQ ID NO: 105021 - DNA, 124 bp, Glycine max
gatatcctagtataccttaataaataatttaagatactatgatgcgagcacggttcccattactgttgctgggacttgttttcctggcttcagtttctgtctcatttggcattgcttactggga

SEQ ID NO: 105022 - DNA, 241 bp, Glycine max; identical to SEQ ID NO: 104135

SEQ ID NO: 105023 - DNA, 243 bp, Glycine max
tctctccattggtccttaaacactcatcagtcatcaccatggccaagctagttttttcctcttgttttctgcttttcagtggctgctgcttcgctttcagttccagagagcagcctcagcaaaacgagtgccagatccaaaaactcaatgccctcacaccggataaccgtatagagtcagaaggagggctcattgagacatggaaccctaacaacaagccattccagtgtgccggtgttgccc

SEQ ID NO: 105024 - DNA, 244 bp, Glycine max
gtgatcttaaacttcttactgatgggaagttgtatgagggtaagcatattcctgtatctaatattagtgcaggggaaaatcatgtagttcaaatacccttaatggcacaggaggaaattctgtcttctagtgcaagtgacttcagaactgcaatggtgagtaaaaatagcaagcctcaagctactgcaatgcatgtgggagctatagaaattatcattgatagtttcgcaagtcctgactgcaa

SEQ ID NO: 105025 - DNA, 255 bp, Glycine max
attcggctcgagagcgaagtggaatggctcccaagggtttaatctttttggctgtgttatgcttctcagcactgtcactgagtcgttgtcttgcggaggataatggacttgttatgaacttctacaaggaatcatgccctcaggctgaagacatcatcaaagaacaagtcaagcttctctacaagcgccacaagaacactgctttctcctggctcagaaacatcttccatgactgtgctgttcagagttgtgatg

SEQ ID NO: 105026 - DNA, 127 bp, Glycine max
gacttgtttaaattgtctcttgatgatgttgaaactcctaaaggttccatgttagatctgaaagtttctcaatctaaaattgcacttcccaaaaacacagttgggggaaccattctgcgtagtgatc

SEQ ID NO: 105027 - DNA, 244 bp, Glycine max
gtaccctcaacagcctcaccctcccagccctccgccaattccaactcagtgcccaatatgttgtcctctacaagaatggaatttactctccacattggaatctgaatgcaaacagtgtgatctatgtgactcgaggacaaggaaaggttagagttgtgaactgccaagggaatgcagtgttcgacggtgagcttaggaggggacaattgctggtggtaccacagaacttcgtggtggcggacaa

SEQ ID NO: 105028 - DNA, 274 bp, Glycine max
cgcgtacgtcgctccccattcggctcgagattggtccttaaacactcatcagtcatcaccatggcccagctagttttttccctttgtttcctgcttttcagtggctgctgcttcgctttcagttccagagagcagcctcagcaaaacgagtgccagatccaaaaactcaatgccctcaaaccggataaccgtatagagtcagaaggagggctcattgagacatggaaccctaacaacaagccattccagtgtgccggtgttgcactctctcgcc

SEQ ID NO: 105029 - DNA, 243 bp, Glycine max
ctcgagccgagaatattctagaggcctcatacgacaccaaattcgaggagataaacaaggagctgtttggtagagaggaggggcagcaacaaggggaggagaggctgcaagagagtgtgattgtggaaatctcaaagaaacaaattcgggaactgagcaaacatgccaaatctagttcaaggaaaaccatttcttctgaagataaacctttcaacttgagaagccgcgaccccatctattcca

SEQ ID NO: 105030 - DNA, 242 bp, Glycine max
tggaagcatcacgatgtcaccgttaaggacgagaagacccttctcttcggtgacaagccagtcactatttttggacacagaaaccctgaagagatcccatgggggtcaactggagctgacatcattgttgagtccaccggagttttcaccgataaggacaaggccgccgcacatttgaagggtggtgcaaagaaggttattatttctgcccccagtaaggatgcccccatgtttgttgttgg

SEQ ID NO: 105031 - DNA, 233 bp, Glycine max
cctttgttcactcttcttctcttgcggctagggttttagcgcacttcttctagatttaaggaagatgggtaaggaaaaggttcacatcagtattgtggtcattggccatgtcgactctgggaaatccactaccactggtcacctgatttacaagcttggaggcattgacaagcgtgttattgagaggtttgagaaggaagctgctgagatgaacaagaggtctttcaagtatg

SEQ ID NO: 105032 - DNA, 239 bp, Glycine max
gttttgtcaattttctattgaccttctcggtggaggaattttagtggacaaaactggagattggatcacacttatacaaaattctcgaattagtaacttgttgagagttgctgcttggaagaaaggctgtttaatggttaagattgtgatgtctgggaatgcagcagtcaaaaggagtgattgggcctcattggtacaagtgtttttaacaaacagcaacagtacagagcattttgatg

SEQ ID NO: 105033 - DNA, 242 bp, Glycine max
ctcgagccgctcgagccgctcgagccgtcccagtagaaaagatagtcctggcacagaagatgatgatatacaagtgtaatcttgttgggaagccagtggtgactgctacccaaatgcttgaatcaatgataaagtctcccaggccaacccgagctgaagcaactgatgtagctaatgcagttcttgatggaacagattgtgtgatgcttagtggtgaaagtgctgctggggcatacccagaa

SEQ ID NO: 105034 - DNA, 167 bp, Glycine max
agcagcgatgggaatcgatcttaaggctgggggtaagagcaaaaagaccaaaagaacagcaccaaaatccaatgacatctacctcaaattacttgtcaagctttatcggttccttgttcgaaggactggcagcaatttcaatgctgttatactcaagcgcttgttca

SEQ ID NO: 105035 - DNA, 236 bp, Glycine max
gtaaggtcgcccaagaccttttccgcgctctttggtctgcttatgcttcaaccccaacaaatctcaagatcattgacctctacgtaatctatgccgtcttcaccgctctcatccaggttgtttacatggctttggtgggatcatttccatttaactccttcctatcaggagtactttcttgtgtaggaactgctgttcttgctgtctgtctcaggatccaagtgaataaagataac

SEQ ID NO: 105036 - DNA, 142 bp, Glycine max
gtgtgttccaagaatactgtgaagccatgagcaaactctctcttgggataatggagcttctggggatgagcctaggagttggcagggaatgtttcagagatttcttcgaaggaaatgagtcggttatgaggttgaattacta

SEQ ID NO: 105037 - DNA, 122 bp, Glycine max
gcaaaggattctacccgccgctcgatgggaattgcgcttcaaggcgtctcgtagggctaatccgcctcacgagggtcaccaacggcacgtgcctttagggggccgaggccccctactgctgg

SEQ ID NO: 105038 - DNA, 236 bp, Glycine max
tagtaaacagagcttttgtcaattttctattgaccttctcggtggaggaattttagtggacaaaactggagattggatcacacttatacaaaattctccaattagtaacttgttgagagttgctgcttggaagaaaggctgtttaatggttaagattgtgatgtctgggaatgcagcagtcaaaaggagtgattgggcctcattggtacaagtgtttttaacaaacagcaacagta

SEQ ID NO: 105039 - DNA, 161 bp, Glycine max
gttcaatatcctagtacaccctattaaagaatttaagatatactatgatgagagcgcggttcccattactgttgctgggagttgttctcctggcatcagtttctgtctcatttggcattgcgtattgggaaaagcagaaccccagtcacaacaagtgcctc

SEQ ID NO: 105040 - DNA, 234 bp, Glycine max
tactgtatagagagagatggcagctgcaacatctggtgctgtgttaaatgggttgggatcttccttcttgagtggaggaaacaggagccaaacccttctggccactgctattggaggcaaagttggtgctgctgctgttactgttagtcctagaagactcattgtggtagctgctgctgcaccaaagaagtcatggctccctggtgtcagaggtggtggcaacctcgtcgaccc

SEQ ID NO: 105041 - DNA, 236 bp, Glycine max
ttgggtgtccatatttgtatgctatggtgcatgatagttcagtgtctacaataccaggtgattttgtcattggtgttaagttgacaaccataaacaatatgtgtgcatatgggctcaatcctggtatttcaggttctcgtcttttgggcaccattcctcagtctatttcacagcaaactgtttggaatcaaatggcaacagtgagaacaccattgaattttgattctagcaagcag

SEQ ID NO: 105042 - DNA, 234 bp, Glycine max
tggcgaacttcctgaagacgaagacgaccatcgaccgcgtgaagatctacgacgtgaacccggacagcctgcgggccttcgccggcagcggcatctccgtgacggtgaccgcccccaacggcgacatcgccgccttaaccaaaatcgactcggcgacgcagtgggtggcgacgcacatcaaaccctttcaccctcagaccaaaattaattacatcctcgtcggcagcgaggttc

SEQ ID NO: 105043 - DNA, 157 bp, Glycine max
ggagattggatcacacttatacaaaattctccaattagtaacttgttgagagttgctgcttggaagaaaggctgtttaatggttaagattgtgatgtctgggaatgcagcagtcaaaaggagtgattgggcctcattggtacaagtgtttttaacaa

SEQ ID NO: 105044 - DNA, 234 bp, Glycine max
tttctaatctcattctccttctgttcaaacactctctctcatggcatcagataagaagattaggatcggcatcaacgggtttggaaggattggccgtttggtggccagggttgcccttcaaaggaatgatgttgaacttgttgctgtcaacgatcctttcatcaccactgattacatgacatacatgttcaagtacgacaccgttcatggccagtggaagcattttgatgtgaa

SEQ ID NO: 105045 - DNA, 237 bp, Glycine max
gagcttctcaacctcaacatttatgtcccacttgcccttcagcttcttgtggcttgtggcaagtctcctcctcctggttacacctgctccctctaaaccagtgaaaggattgaggaaaatatggtcaaaatcgacatgagaggatgtcgagccacactatctctcttctgtcctgattggaactgctgttgtttgttttgctattatttgaaaaaccaatttgtttttaattgagat

SEQ ID NO: 105046 - DNA, 234 bp, Glycine max
tgtgtgtgtatggtgatgataacttaattagtgttcatgaatatgtcaagccttactttagtggttctaaattgaaaagctttctagctggtcataatatcaccattactgatggtattgacaaaactagtgcaactttgcaatttagaaagttagcagattgtgattttctcaagagaaactttaagcagatgtctaatgttttgtgggtggctcctgaagacaaggcgagtt

SEQ ID NO: 105047 - DNA, 236 bp, Glycine max
ttacaacgaaaatctcagattaataacactcgccatacccgttaacaagcctggtagatttgagagtttcttcctatctagcactgaagctcaacaatcctacttgcaaggattcagcaggaacattttagaggcctcctacgataccaaattcgaggagataaacaaggttctgtttagtagagaggaagggcagcagcaaggggagcagaggctgcaagagagcgtgattgtgg

SEQ ID NO: 105048 - DNA, 183 bp, Glycine max
tttgctacggtgagagagtgtttgatggagagctgcaagagggacgggtgctgatcgtgccagaaaactttgtggtggctgcaagatcacagagtgacaacttcgagtatgtgtcattcaagaccaatgatacacccatgatcggcactcttgcaggggcaaactcattgttgaacgcattac

SEQ ID NO: 105049 - DNA, 233 bp, Glycine max
ttgtctttgaacactcatcaccatggccaagcttgttctgtccctttgtttccttcttttcagtggctgcttcgctctgagagagcaggcacagcaaaatgagtgccagatccaaaagctgaatgccctcaaaccggataaccgtatagagtcggaaggtgggttcattgagacctggaaccctaacaacaagccattccagtgtgccggtgttgccctctctcgctgcaccc

SEQ ID NO: 105050 - DNA, 101 bp, Glycine max
ggacagagactcctacagacttcaatctggtgatgccctgagagtcccctcaggtaccacatactatgtggtcaaccctgacaacaacgaaaatctcagat

SEQ ID NO: 105051 - DNA, 203 bp, Glycine max
gcgaatttcgttcctctgtctcccatcagcttcctagatagagcagcgaaggtttgcagagacagaacctcgcttgtgtatggtactttggagtataactggggtgagacccatcaacggtgcttgaaactcgcatctgatatcaccaattggggctttcagtcgcgatgtggacgctacctatcacctaatgtccctgcatg

SEQ ID NO: 105052 - DNA, 265 bp, Glycine max
ctacttgcaagggttcagcaagaatattctagaggcctcatacgacaccaaattcgaggagataaacaaggttctgtttggtacagaggagggagagcaacaaggggaggagaggctgcaagagactgtgattgtggagatctcaaagatacaaattcgggaactgagcaaacatgccagatctagttacaagacaaacatttcttctgaggataaacctttcaacttgagcagccgcgacaccatctattccaacaagcttggc

SEQ ID NO: 105053 - DNA, 262 bp, Glycine max
gttggaaatcacaaacaaattgttggtttccatgttgctggaagcaaaggaagattgggatatgcttcattgataccatatgttgagccagttgtgcaagctcaaagtgctgaagtttactttgacttcttcctgtggaggttgatagtcaagagggagttgctcacattggtgaattgaaatctggtgtctatgttccactgcctacaaaaactaatctggtggaaactcccaaggaatggcaactggatctaccttgtga

SEQ ID NO: 105054 - DNA, 90 bp, Glycine max
attggtccttaaacactcatcagtcatcaccatggccaagctagttttttccctttgtattctgcttttcagtggctgcagcttcgcttt

SEQ ID NO: 105055 - DNA, 258 bp, Glycine max
cccaaacagtctacagtttttgatattctcttgggaatctctcaagattttgaaattgctggtaatactcttatgccagctttttctgttccacaggctactgccagatcttctgaaaaatgcggaatcctctgcatgatctggatttcgtgttttcttccgcttgtccgtttgtttaattcaataaaggaaattaggcatgaccctcttgttgagtatgctctgcctatctgaaaatttccacacctcttttaattg

SEQ ID NO: 105056 - DNA, 252 bp, Glycine max
gttaggacttttgagacacattgtggatccctgtctcagtatgggatgaaacatatgaggtcctttgcaaacttctgcaacgctggaatacgcaaagagcagatggctgagtgctcagcacaagcatgtgtcaatatcccgctagttcatggagtctatgcacacgggttcagtgcatatctctagaatgcgctccattgaagacgagtatagtcgtcgtaaaatattcttcacgagtgttatggactgtac

SEQ ID NO: 105057 - DNA, 258 bp, Glycine max
gaatgaagttatatgcagagtctcttgcacgctttcaaggagggtcaccatacatatatcctttgtatggtttaggagagcttccccaggcatttgcacggcttagtgctgtttatggtgggacatatatgttgaataagcctgagtgcaaggtagaatttgatgaggaaggaaaggttgttggtgtcacatctgaaggggaaactgcaaagtgcataaaagttgtttgtgatccatcatatttgcccggcaaggtga

SEQ ID NO: 105058 - DNA, 258 bp, Glycine max
  unsure (1)..(258): unsure at all n locations
tctctccattgtctttgaacactcatcaccatggccaagcttgttctttcactttgtttccttcttttcagtggctgcttcgctctgagagagcaggcacagcaaaatgagtgccagatccacaagctgaatgccctcaaacgggataaccgtatagagtcggaaggtgggttcattgagacgccanaccctaacaacaagccattcaagtgtaccggtgttgccatctctggctgcacccttaaccgcaatgccctt

SEQ ID NO: 105059 - DNA, 255 bp, Glycine max
atcatgtctcacttcaagggcaagtaccatgatgagcttatcgccaatgctgcgtacattggcactcctggaaagggtattcttgctgctgatgagtcaacagggacaattggcaagcgtatgccagcatcagtgtagagaacattgaatccaacaggcgagctcttagggagctgcttttcactgctccgggtgttcttcaatatctcagtggtgtcatcctctttgaggaaaccctctaccagagcacagctg

SEQ ID NO: 105060 - DNA, 257 bp, Glycine max
gttctagccaagtcattgctcaatactaccaactgattcggcttggttttgagggatatagagacgtgtcggaaaactgcatggacaacatgctggtgctgagagagggactcgagaagacagggccgataccagttgtgtgcaaaagccagtggtgtgccctgagtgggctttgacactgaaaggtccacgaccgactttgtacgagattccggatctcaagacttcctgaggcgctttgggtgggatagagccag

SEQ ID NO: 105061 - DNA, 90 bp, Glycine max
cgctcgacccgcgcgaacagcataatctacgcattgaatgggcgggcattggtacaagtggtgcattgcaatggtgagacagtgtttgat

SEQ ID NO: 105062 - DNA, 236 bp, Glycine max
ggtggaacaggagtctcagaggagagctgtggcttagagagccccttttgcatgtgctaccacacttatgtccttttgggctctagctagtgctggtagcagtaaataagactgtataaaatgaacagatgcttagatgccctctgttaagtgcagaataacgggtatagcagctatgtacccttgtgtaatgagtcactcaagtacctatgcgggaaaagcatggatataagaag

SEQ ID NO: 105063 - DNA, 249 bp, Glycine max
tagcaagcagagtttttgtcaattttctattgaccttctcggtggaggaattttagtggacaaaactggagattggatcacacttatacaagattctccaattagtaacttcatgagatttgctgcttggcagaaaggctgtttaatggttagcatgtgatgtctgggacgcagcagtcgaaggagtgattgggcctcattggtacaagtgtatttaacaaacagcaacagtacagagcattttgatgc

SEQ ID NO: 105064 - DNA, 218 bp, Glycine max
ctttctctatctctccttcaaaatcgttgtcaatttcgcctctttctctctcaactcccatagattctctccatcgggtcttcaaaaatgcggtagagctgcaatcgatgtcgagttctcagaaaatgtagcagtgagaattgcagcatcagaccctgtatacaatggatcagaatcgcaggatctcaagcgagatgtactgtgtttcgtgccaagtt

SEQ ID NO: 105065 - DNA, 257 bp, Glycine max
catgaagcttcacgagaacattgctcgcccttcacgtgctgacttctacaacccaaaagctggtcgcattagcaccctcaacagtctcaccctcgcagccctccgccaattcggactcagtgcccaatatgttgtcctctacaggaatggaatttactctccacattggaacttgaacgcgaacagtgtgatctatgtgactcgagggacaggaagagttagagtggtgaactgccaagggaatgcagtgttcgacg

SEQ ID NO: 105066 - DNA, 216 bp, Glycine max
tactcgagccgaatcggctcgaagggaaaagcagaatcccagtcacaataagtgcctctgaagatccaatagcgataaagactactacaggaaccaagcatgccacgctcgttagaacctccataaggtggactcagaacaagaatgcgaaaaggttcaattcaggatcacgacataataccggagagggaagtcagcaacacgtgagaaggagga

SEQ ID NO: 105067 - DNA, 234 bp, Glycine max
tctgagtctcaaagagaaccacgaagacataaggatacgaacccttttcacttcaactctaaaaggttccaaactctcttcaaaaaccagtatggccacgttcgcgtcctccagaggatcaacaaacgctcccaacagcttcagaatctccgagactaccgcattatcgagttcacttcatatccaacactcttcatctcccccatcatgctgacgctgattacctcatcgtta

SEQ ID NO: 105068 - DNA, 251 bp, Glycine max
attctggtgaatgcgtagaaaaggaagataaagaaattagcgtcaaaaatgttgggtgtgttcagcagctccatagtgtcgccgccggacgagctcgttgccgccggcagccgtacaccgtcgcccgagatgacggcggcggcgcttcggaactggttcgaggagaagaacccctccgcagtgtcggtggaggtcggagagcatgtccagctcgcttatacgcaccagaacgagtcgccgtttcagcccag

SEQ ID NO: 105069 - DNA, 254 bp, Glycine max
gtcttccatagccccccaaaaatgaagagcaccatcttctttgctctctttctcttttgtgccttcaccacctcatacctaccttcagccatcgctgatttcgtgctcgataatgaaggtaaactcttgaaaatggtggcacatattatttcttgtcagacataacagcatttggtggaataagagcagccccaaacggacaatgaaagatgccctctcactgtggtgcaatctcgcaatgagctcgacaaagg

SEQ ID NO: 105070 - DNA, 243 bp, Glycine max
agacccccaaaaatgcagagcgccatcttctatgctctctttctctatcgtgactagagcacctcatagctacctgcagatgtcgctgcgtgcgtgctcgataatgaaagtaaccctcttgataatggtcgcacatatcgtaacttgtcagacatagcagcatttcgatggctaagagcagccccaacgggacatgaaagatgccctctcactgtggtgcaatctcgcaatgagctcgacaaa

SEQ ID NO: 105071 - DNA, 250 bp, Glycine max
gttcctcactgacctcaccacggcgaccagagccaagctttctttagctatcttccttttctttcttttagacctgatttcaaacctagccttgggcaaacttaaagaaaccgaggtcgaagaagatcccgagctcgtaacatgcaaacaccagtgccaacagcaacggcaatacactgagagtgacaagcgaacatgcttgcaacaatgtgacagtatgaagcaagagcgagagatacaagtcgaagag

SEQ ID NO: 105072 - DNA, 222 bp, Glycine max
aatctgcaaaaaagatgtttggagggttgagtgtggtatcccttctggatttccactcactgttatctgcaatagcattttcaatgagatgcttatcagatatagttatgaaagttgttgcgtcagctaaggctctagtatgttctcagtctgtaaaatttattcttgtggttatgagatgatattatagtgtcatgagtatgtagcatatgtagtgtctaa

SEQ ID NO: 105073 - DNA, 253 bp, Glycine max
atcgttatacttaacgggactgccattctttccttggtgaacaacgacgacagagactcctacagacttcaatctggtgatgccctgagagtcccctcaggaaccacatactatgtggtcaatcctgaccaacaacgaatatcccagattaataacactcgccatacccgttaacaagcctggtagatttgagagtttcttcctatctagcactgaagctcaacaatcctacttgcaaggattcagcaggaac

SEQ ID NO: 105074 - DNA, 308 bp, Glycine max
agatcgagcggtgatacgacatccggttcttcgagctaaacactggagctaatatcccttcactagggctgggaacttggctggctgatcctggtgttgttggtgatgttatagctcatgccgtcgaggttggttatcgccatattgattgtgctcaaatttacggcaatcaggaggagattggtttagcattaaagaagttatttgaagagggtgtagtcaagcgagaagatttatggatcacctctaaactctggtgtacagatcatgctccagaagatgtaccagaagctctggacagaacattg

SEQ ID NO: 105075 - DNA, 113 bp, Glycine max
atcgagccgaatcggctcgagttcaataacactttccttagttcaatatggggaagcccgtcttcactctctatctttattcccatagcatgctactcttgtcgagtgcatgc

SEQ ID NO: 105076 - DNA, 290 bp, Glycine max
tggcgggcgcacgcgtcgcttctagcccggattctgacttagaggcgtacagtcataatccaacgcacggtagcttcgcgccactggcttttcaaccaagcgcgatgaccaattgtgcgaatcaacggttcctctcgtactaggttgaattactattgcgacactgtcatcagtagggtaaaactaacctgtctcacgacggtctaaacccagctcacgttccctattggtgcgtgaacaatccaacacttggtgaattctgcttcacaatgataggaagagccgacatc

SEQ ID NO: 105077 - DNA, 289 bp, Glycine max
tgaacaaattccctctcaccctcctcgccgaccaagccatggaaagcgtgaacaagacgaggacgaggacgaagatgaagataaacctcgtcctagtcgaccaagccaaggaaagcgtgaacaagaccaggaccaggacgaggacgaagatgaagatgaagatcaacctcgcaagagccgcgaatggagatcgaaaaagacacaacccagaagacctagacaagaagaaccacgtgaaagaggatgcgagacaagaaacggggttgaagaaaatatctgcaccttgaag

SEQ ID NO: 105078 - DNA, 289 bp, Glycine max
agaagaggaagtttacaaggttcaatgggcaactatgtggggagcagatactgccatggatctctcgactggtcgccacatccatgaaactcgagagtggatcctacgcaactctgctgtaccaattgggactgtgcctatttatcaagcacttgaaaaagttaatgggattgctgaggatcttaactggaaggttttcagggacaccctgattgaacaagctgagcagggtgtggattacttcaccatccatgcaggagttcttctgagatacgttccattaacggct

SEQ ID NO: 105079 - DNA, 294 bp, Glycine max
agcagcaaggggagcagaggctgcaagagagcgtgattgtggaaatctcgaaggaacagattcgggcactgagcaaacgtgccaaatctagttcaaggaaaaccatttcttctgaagataaaccttttaacttgagaagccgcgaccccatctactccaacaagcttggcaagttctttgagatcaccccagagagaaacccccagcttcgggacttggatatcttcctcagtattgtggatatgaacgagggagctcttcttctaccacacctcagatcaaaggcgatagtga

SEQ ID NO: 105080 - DNA, 236 bp, Glycine max
gccattcgtattgtcgcagagaaagaaaaccctagctcaccgtttcaagatgcaaatcttcgttaagaccctcactggtaagaccatcactctcgaagtcgagagttcagataccatagacaatgtagaggccaaaattcaagacaaggaagggatcccaccagatcagcaacggctcatttttgctggcaagcagcttgaggatggacgtacccttgctgagtataacatccaaa

SEQ ID NO: 105081 - DNA, 287 bp, Glycine max
aaattcttccaccaagttatgggtttccttgtgttgcttcttttctccctcttaggtctctcttctagttccagcatatcaactcatcgttccatattggaccttgacctaaccaagtttaccacacagaaacaggtgtcttcactgttccaactatggaagagtgagcatggacgtgtctaccataaccacgaagaagaggcaaagagacttgagattttcaagaataacttgaactatatcagggacatgaatgcaaacagaaaatcaccccattctcatcgttt

SEQ ID NO: 105082 - DNA, 147 bp, Glycine max
cttattaacactttccttagttcaatatggggaagcccttcttcagtctctctctttcttccctttgcttgctactcttgtcgagtgcatgctttgctattacctccagcaagttcaacgagtgccaactcaacaacctcaacgcgt

SEQ ID NO: 105083 - DNA, 292 bp, Glycine max
cccagagatctatgagtactattcactacaactcacatgcaacgaagatagcactggtgatcgatggcagagggcatcttcaaatatcatgtccacacatgtcatcaaggtcgtcacactcgaagcatgataagagtagcccttcataccatagaatcagttccgatttgaagcctggaatggtgtttgttgtccctcccggtcatcccttcgtcaccatagcttccaataaagagaatctcctcatgatttgcttcgaggttaacgctcgagacaacaagaagtttacatt

SEQ ID NO: 105084 - DNA, 203 bp, Glycine max
ctgaagcaaagcaatggctacttcaaagttgaaaacccagaatgtggttgtatctctctccctaaccttaaccttggtactggtgctactgaccagcaaggcaaactcagcggaaactgtttctttcagctggaacaagttcgtgccgaagcaaccaaacatgatcctccaaggagacgctattgtgacctcctcgggaaagt

SEQ ID NO: 105085 - DNA, 287 bp, Glycine max
tctctccattggtccttaaacactcatcagtcatcaccatggccaagctagttttttccctttgttttctgcttttcagtggctgctgcttcgctttcagttccagagagcagcctcagcaaaacgagtgccagatccaaaaactcaatgccctcaaaccggataaccgtatagagtcagatggagggctcattgagacatggaaccctaacaacaagccattccagtgtgccggtgttgccctctctcgctgcaccctcaaccgcaacgcacttcgtagaccttcc

SEQ ID NO: 105086 - DNA, 283 bp, Glycine max
cttaaacactcatcagtcatcaccatggccaagctagtttttaccctttgtattctgcttttcagtggctgctgcttcgctttcagttccagagagcagcctcagcaaaacgagtgccagatccaaaaactcaatgccctcaaaccggataaccgtatagagtcagaaggagggctcattgagacatggaaccctaacaacaagccattccagtgtgccggtgttgccctctctcgctgcaccctcaaccgcaacgcccttcgtagaccttcctacaccaacg

SEQ ID NO: 105087 - DNA, 286 bp, Glycine max
cccaatcagtggacccacccagaagatccagtgctggtgccatctccagcccactaattggggcagcactagcagcactggtctatgaatatgttgtgatcccaactgaaccccctcatcaacaccaacctttggctcctgaagattactagttgcttccactagttgtatcaaaatatgagtgttattaatagctttttgtgtatctaaatataagggtatgcttgtgttttctctagtgtttgcaccaccctcttgcttgagtggccactaggctcctgcatgt

SEQ ID NO: 105088 - DNA, 290 bp, Glycine max
aagaaagtcttccatagccccccaaaaatgaagagcaccatcttctttgctctctttctcttttgtgccttcaccacctcatacctaccttcagccatcgctgatttcgtgctcgataatgaaggtaaccctcttgaaaatggtggcacatattatatcttgtcagacataacagcatttggtggaataagagcagccccaacgggaaatgaaagatgccctctcactgtggtgcaatctcgcaatgagctcgacaaagggattggaacaatcatctcgtccccatatcg

SEQ ID NO: 105089 - DNA, 207 bp, Glycine max
aaacaatatgtgtgcatatgggctggatcctggtatttcagggtctcggcttttgggcaccattcctcagtccatttcacagcaaactgtttggaatcaaatggcaccagtgagaacaccattgaattttgattctagcaagcagagcttttgtcaattttctattgaccttctcggtggaggaattgtagtggacaaaactggaga

SEQ ID NO: 105090 - DNA, 201 bp, Glycine max
ctcgagccgctctcatcactacctctgcatttttctctcgctctctgccttccatcactcacgtcatgtccctgccccagatagtagaagatggccgacgatgacgatattcaacctcttgtctgtgacaatggaacaggtctggctaaggctagttttgctggagatgatgcgccacgtgctgtgtttcccagcattcta

SEQ ID NO: 105091 - DNA, 140 bp, Glycine max
tctctggcaaaactgttatgacagatggagaaccgtacgaatccctgcgccactgcaaattggtggatgaagttattcctgatgccccctgggttatcaatcatgagtttcttgacaagcacaacattgactatatggtc

SEQ ID NO: 105092 - DNA, 283 bp, Glycine max
gtcaatctgaaggttatgggtttattgagtttaatagtcgtgctggagctgagagaattcttcaaacatataatggggcaataatgccaaatggggggcagagtttcaggttgaattgggcaacttttagtgctggtgagaggtcgcgccacgacgattctccagattacaccatatttgttggtgacttggctgcagatgttactgattatcttcttcaggagacatttagggctcgttataactcggtgaagggtgcaaaagttgtcattgataggctaac

SEQ ID NO: 105093 - DNA, 287 bp, Glycine max
ttcagcttttgagtaccactaccaatggtgattttgttcaagggaaagatctcgcaatggttaaagttaatgtagcatgtgctgctgttggcttgacatcaagttacactccaactccattgttggaatctggtttgcaaaaagacagagggttaattgtggagtattttggaaggatgtctgacgttgctcataacgttaatcagccccaagagaaagatttgttggagggaaatttttcctttgatattaaatctcgctctagattggacaaagtttcctctaca

SEQ ID NO: 105094 - DNA, 290 bp, Glycine max
aagaaaaaagagaagaagatgggtttgaagaacaacatggtggtgctaaaggtgtgtttggtgctacttttccttgtggggggtactactagtgccaacttgaggctgagtaagcttggcctgctcatgaaaagtgatcatcatcaacactcaaatgatgatgagtcttcaaaaccatgctgtgatcaatgcgtagtgacaaagtcaaaccctcctcaatgccgctgttcagatatgaggctgaattcgtgccattcagcttgcaaatcttgtatttgcgcattatcgta

SEQ ID NO: 105095 - DNA, 288 bp, Glycine max
tgtacatgaaggtgaaaggtaatgttttcaagaacaagagagtcttgatggagagcattcacaagtataaggctgagaaggcaagagagaagactttgtctgatcagtttgaggctaagcgtgcaaagaacaaggctagcagggaaaggaaaattgctcggagggaggagcgcttagcccaaggtcctgttgacaagtcatttacagcacccagtgcccctgctgccacagtgccccagtctgcccaagcgccaaagaaatcgaagaagtgagcagcatatcctggaa

SEQ ID NO: 105096 - DNA, 230 bp, Glycine max
agtcttccatagccccccaaaaatagaagagcaccatcttctttgctctctttctcgtttgtgccctcaacaacttatacctacagttcagagaacgctgatttcgatgtcgataatgaaggtatccctcttgaaaatggtggcacatattatatcttgtcagacatatcagcatttggtggaataagagcagccccaacgggaaatgaaagatgctctctcactgtggt

SEQ ID NO: 105097 - DNA, 273 bp, Glycine max
aaaattcttccaccaagttatgggtttccttgtgttgcttcttttctccctcttaggtctctcttctagttccagcatatcaactcatcgttccatattggaccttgacctaaccaagtttaccacacagaaacaggtgtcttcactgttccaactatggaagagtgagcatggacgtgtctaccataaccacgaagaagaggcacagagacttgagattttcaagaataacttgaactatatcagggacatgaatgccaacagaaaatcacc

SEQ ID NO: 105098 - DNA, 282 bp, Glycine max
caacgcacttgctaggcaatctctcattaatgctgatggcataatagagaaatcttttttgccctcaaagcattccgttgagatgtcttcagcggtttataagaattgggttttcactgatcaagcactacctgcagatcttatcaagagaggagtggcaattaaggatccatctgccccacatggacttcgacttctgatagaggactacccttatgctgttgatgggctagagatatgggctgcaattaagacatgggtccaagaatatgtgtccttgta

SEQ ID NO: 105099 - DNA, 285 bp, Glycine max
aagaccagttgcttggttttgctttggtacccttgtctgaagtactagtccagaatgggaaacttgagaaagagttctctctttcttcaactgatctattccattctccttcgggttttgttcagttgtcgctttcttacactggtgcttcacctgatgttatgacaatttctgcaatgccgaacaaggtggccacagatgccgcagtgcaggactcagaaacgtccgagtcactggccagggatttagacaaaatcgagttcccggatccgaagattgtcaatg

SEQ ID NO: 105100 - DNA, 139 bp, Glycine max
ctttgaacactcatcaccatggccaagcttgttctttccctttggttccttcttttcagtggctgcttcgctctgagagagcaggcacagcaaaatgagtgccagatccaaaagctgaatgccctcaaaccggataacc

SEQ ID NO: 105101 - DNA, 302 bp, Glycine max
ttcggctcgagcaccatcaattttgaggcttttccccacaagctggtgcagtttggagagattcaggaaaaagttgtattgaaattttcacaagaggaatttcttacagcttggtcaactcaggtgcgtcctgcaacaactctgttggctgatgggtgtccatatttgtatgctatggtgcatgatagttcagtgtctacaataccaggtgattttgtcattggtgttaagttgacaaccataaacaatatgtgtgcatatgggcttaatcctggtatttcaggttctcgtcttttgggcac

SEQ ID NO: 105102 - DNA, 294 bp, Glycine max
gtcaaccctgacaacaacgaaaatctcagattaataacactcgccatacccgttaacaagcctggtagatttgagagtttcttcctatctagcactgaagctcaacaatcctacttgcaaggattcagcaggaacattttagaggcctcctacgataccaaattcgaggagataaacaaggttctgtttagtagagaggaagggcagcagcaaggggagcagaggctgcaagagagcgtgattgtggaaatctcgaaggaacagattcgggcactgagcaaacgtgccagatct
